United States Patent Application Publication US 2006/0134663 A1 - sequence listing, part 98

SEQ ID NO: 294005 - DNA, 1000 bp, Homo Sapiens
ctcgccagccagggaactctgcaggtccagctgagtagggcaaatgaagaccctgaacatcctcatgccaatcatggcaggtttagtctctgtgagtgggtagttaaggggcagccagcccactgtgtgtgtgggcagggtgggcatctcatgcttccaggacattctctctaacgacgtagggtaagtgcaatcccaagccgtttaaaataatcccagactgcctggaggctttgttcttattttctgattcttttttctttgtctttgttggattgtgttaattcaaagaccttgtcttcaagctctgaatttccttcttctacttgttcaattctgttgctgagactttccagagcattttgcatttctgtgagtgtatccaatgtttcctgaagttttgattgtttttctttatgctatctatttcttggtccgagcccactgctcctggcggtgtgaccttgggaaagtctcctagcctctctgtgccttagagtcctcgcctgcagagtggcttagaacagtaacctccgtgtagggctgtgctgagtatcagatgaacagatctatacgaagcacagaaaacccggcctgttgcgcaacaaacacttgagacttgttgctgccattatcattactgatgttgctgtcgttttattattattattatttagagtgctcagagcaccatatggagcccaggaaaagaaggggaggagagtgaggacaactccatggaggaggcccccgtggaggacctcagggcactggggcagggaccccataagagagaactgcccacaacagtcagaagaacttagctggccttggatcctcaggtgggctctgctgtgtgccctcaggcaagccacgtgtcctctgagcctcagtttcctcatctgtacaacagggccaatatcactcacttcacaggttgctctgggggatcgctgtgcctggcatatagtaggtgttcaataaatgccctgtgactctc

SEQ ID NO: 294006 - DNA, 1000 bp, Homo Sapiens
ggacgcaggcgcagctgcagaccacgcgcgcggagcttggggaggcgcaggcgaagctgatggagcaggagagcgccctgcgggaactgcgtgagcgcgtgacccagggcttggctgaagccggcaggggccgtgaggacgtccgcactgagctgttccgggcgctggaggccgtgaggctccagaacaactcctgcgagccgtgccccacgtcgtggctgtccttcgagggctcctgctactttttctctgtgccaaagacgacgtgggcggcggcgcaggatcactgcgcagatgccagcgcgcacctggtgatcgttgggggcctggatgagcagggcttcctcactcggaacacgcgtggccgtggttactggctgggcctgagggctgtgcgccatctgggcaaggttcagggctaccagtgggtggacggagtctctctcagcttcagccactggaaccagggagagcccaatgacgcttgggggcgcgagaactgtgtcatgatgctgcacacggggctgtggaacgacgcaccgtgtgacagcgagaaggacggctggatctgtgagaaaaggcacaactgctgaccccgcccagtgccctggagccgcgcccattgcagcatgtcgtatcctgggggctgctcacctccctggctcctggagctgattgccaaagagtttttttcttcctcatccaccgctgctgagtctcagaaacacttggcccaacatagccctgtccagcccagtgcctgggctctgggacctccatgccgacctcatcctaactccactcacgcagacccaacctaacctccactagctccaaaatccctgctcctgcgtccccgtgatatgcctccacttctctccctaaccaaggttaggtgactgaggactggagctgtttggttttctcgcattttccaccaaactggaagctgtttttgcagcctgaggaagcatcaataaatatttgagaaatgaaaaaa

SEQ ID NO: 294007 - DNA, 1000 bp, Homo Sapiens
taaaaagcacttattgttcgttcttatggctttctcttctttgtcctgttctgaaagctagttttcccttatggggagaaggaaaaggaatgggtaattcagtaatactttgtcagttgacatttatttaaccatggttttgagataaccctgttttaaatgtctcccaaagtttttagttttttatccttttaatgtatgagcaattcagtttcaattttttaaagcaaaagaacactgcaataactttcagccacctttttggccgacccagtgggtgtttatggagcagtacaaagaagacctgtgtttgctcctttttttttttaccctccttctcccttctcccttttcccttcccttccccttctccttcctctcccttcctctcccttcccctcccttcccctcccttcccctcccttcctctcccttcctctcccctcccctcccttcctctcccctcccctcccttcctctcccctcccctccccctcctcttctctctcctcctcctcttccctctccaactccttcttctccctctcttatctctctctctctctccacccccgcaaccttcttgacagggtctgcctctcctgcccaggctggaatgcagtggagttatcatgatcatagctcactgtaacctgtaactcctgcactcaagtgatcctcccaccatgcttgggtaattgaaaaaataaacatttgcaggctgggtgctggctcacacctgtaatccaagaactttgggaggccaaggcaggcggatcacctgaggtcagcggtttgagacaagcctggccaacatggtgaaaccctgtctctactaaaaatacaaaaatttagctgtatgtggtggcacgtgcctgtaatcccagtgacttgggaggctgaggcaggagaatcacctgggcccgggaggtggaggttgcagtgagccgagatcgcaccactgcattccagcctgggtgacagagtgagactccatctc

SEQ ID NO: 294008 - DNA, 1000 bp, Homo Sapiens
ttcctctttctacagggtaatgaaatcagccaagttgaagggcttgacaacttagtagtccttcaagaattggtagtggaccataaccgcatccgatcatttaatgacagtgcttttgccaaaccaagttctttattggcacttcacttggaggaaaacagactacgagaactgggcaaattacaatctttggtaaaactagagaaactcttcctaggatataataaaatccaggatatcacagaactggaaaaacttgacgttatctctactctcagggagcttacagtgtatggcaatccagtgaatttgtagaaaaatgctacatcgccacatgcttatatttcgactgcctaacttacagatgttagatggaagtcctgtgaattcagatgatagggcaaaagctgaatttcacctcgctgaactacaagcaaagaaaaattcgcttattcctgttacccactctcctatggatggcagatcatttggccaagtgaaaactcctcccatagagataacaaatgtacttctgcctagtggattcagccattacttgggatctgacgtcactttaactcctgaagttgaagacaaaaaaaacaagaatgctgggattctgacaaataatcctcggagcatccatgcagaaatagcttttcggcaactcagagggataagtatctctccatctcttttatcacatcagaatattgcatctcctactgcacaaatataccagagcaaccaagataagagaagaatttttgggagcaactttccaagatcaaatcgaatgtaactgcctaaagagaaatgagcatacaccaagaaactcacctgtttagtagttgtacaaaaactagcggacagtggtcagttaaaaaaaaaaaaaaaaagataatcatgttacttaagttactgaagcacttcagttccatatgaagataatctattacccttcatgaacttgatttaatatcacctctcttaaactttc

SEQ ID NO: 294009 - DNA, 1000 bp, Homo Sapiens
cagaggcagaagaacttcgagctggctttcaccatggccgagaatctggccaactgtgagcgcctcatcgaagtggaggacatgatggtgatgggccgcaagccggaccccatgtgtgtcttcacctacgtccagtcgctgtacaaccacctgcgtcgcttcgagtaaagcccctgagcctggattgccaaagagcagccccaggaagaggccgggggtccgcttgcgattccccagccaggatgcccccaggagccttgccgtttggtgtgagcgcgctgtttgttctgtggcatgtgacggcactccccttcgagcccagctgtgttactgattaaaagtactgctgagctgtggtccgacagcactgatcacagccaagggcttggaggaaaaggaaaaattatgagagagagagagacattggtgctaagtaatgatcttcctaaagaaatgcttgtgtttatagcttccagaatgctaatctacaattttccctctggtgaattcgatacatcggctttacagggttacagtgattaccaagtgtttttttttatcaaaatacccagagttttttacttcctcacgcgattgtaggttcctctcctccctccctctgggccactgccaggaaacagagagaccgcttaatcagcagcttgacaaagaagacctcaagtcttgggaagaaacagtttaatcactcccaagtcctgggcaacagatgaccttcaagtcacctccgctctccggggagatgggaaggctctcctctcggtcccaaagtcctcctgttcttcccaggaggcctcacaagtgtttggctaagcacaggctctcgggaatttaacacttttggggaaggaataggccctttgtgctgagagagagtttttattcacatcttttttaggggatttgctgcagatatttataaaaagtaactccctctgtaccactgacccatttatacataaaaaagatgtgttgaattttg

SEQ ID NO: 294010 - DNA, 1000 bp, Homo Sapiens
tttttttcctttcttttcataatgaagcagatcaacttaaaggataataaaatttttaaagaaaagatattctaatgtactctcaataattctacagaaataaaactgtaaagtgcaatgtgaaatcaaagattatagtcattgtataatttggcttggaggctatgaaatgtctttttttctttttggtattttacattattcacattttagaataacaagaacaccaagaattacccctaaaacagagaccctgtatttaatctactttgatcagagaagtagaatttataacaggttagctaaaattgggagcatgccttaaaacttaaagattgtatgcatatatgtgtatatgttataaacgtgaaatatatttgacacacacattcacatataaattgttaaaaactgaaggcagaatggaactaatatatgtaacagagaaaaacaataaattttatgaacttgttttatatttgcatatcaagagtcaagtatgatgtttctttaagttgactttttttacttcattatttttaggaataaatgtaagattttacaaatcttttatttccccacaagatctgaagtttggtatttttgcattatgacagttgttgagactaggattttaagctaggatatgattatatttcctatataactaaaaattttgtttcataaattttaaaataattatttttgactatgaacattagtccaaatttaatatttgacacagttcataccagcttgctacaataatgataatttattagtctttctgttatttaaagaataaaaacatgcttataaaagacttttaatgaaatgttgcctttttaaaataattatacttgcacatgaaaataaaatataaagtcaataatagtccttgtagcccaatgggaattgattctgtttattgtctgtaccattttgctaccagttacattgaactgctttaaaataaataataaaattatttctaatgatg

SEQ ID NO: 294011 - DNA, 1000 bp, Homo Sapiens
aaacagctccgaattctgcagtaaaaagtgagcctccgccttggaggagactactggttcgcccatctgtttggagtttctgttgttgctattgttggtttgttttcaaatttcattgtgttttcttctttgctcaaggaaggtgctgcaaaaccatagggaaaaagttcactgctacaaagggatcccaacccactggaggctttgaagtagggaggttggcaggggtggtcaagcgggagggagatagtcacttgttcttgcccctggaaaaaattcaggtgatgtctttgacatccagggatttctcaaaggcagtgagtaaaatcccaaataaagccccaaagagtttgcttttccaatcatctgtgccattggtaataaggagtagcccctgtgaggtcaggtacacagtaaagagggtaaatagaatccttgggaacttctgtttcagtctgaggaatgcttggatttgtcaaaagaatggagctttgtaggaaacaggcacaaagacgcaaacccagggcttaacctgctagaaaatgcatggaatgtgaacacaagttaattatttcaaaatgtttttcagatgttatttaaatagtaatatatacattgatttttcataatttatcaaagcctgtggtacgcactgaattttctttgtcacatagttttgaatttcacagccttctgcattgcatacacttgaactggacatcaggggaagctgcttgagagttctcaattactttcttaaacagtgttttctgaaggcgtgtgtcatgatacaactgtgaattctaccttagggactctggttaaactattggtgaggagctcgagtggtttgtatagaccccagatttttgtttactttaatgtattccacaaaacccatcctggtttttgttagtttgttttgtttttaatctttttttttccttctctacttatttaaattgccactggaataaatgtgccttttgaagcaaagtcc

SEQ ID NO: 294012 - DNA, 1000 bp, Homo Sapiens
tgcattgtgatactatagagttgtgttcatatttcttgtaagaaaaatttttgcttttctttagaaatataggtattagcaaaagtaagtatacaaagaggattatgacaaatagaccatttctttaaaaatggtaactgttgcatttaaacacatcggctgacagattatatggatatttaaaaataactttaaatcaatcttttaatattttgctgtttgctcttatgttctcccttctttcttccttccttgtcttccctccctttccttccttcattctttctttcttctgctctgtcagaagatatacaagtagccaaagcatcacgagccaagctgtttgtcttttgccatattgtcttttgattctcttgataaagagaaagcttttgaaattacttactgccctttgaaagtctgttttacaaccccaaaggatattttaggactttaaaagggaagcttcagtggattcatttggttagattcttttcctaggttaaaaacatcggggaacttaaatacataggaaaggagttcacaaataaaatttagtttttttagaaagagaatattttaataactgtagtataccacaagaaacatctcatggctttaagattaacgatagcgataaggcccactcaagcatctcacagtggtgatattacatgtcacttagcaggatgcaacctggcctagggatttccagaagacaaggccacctcagcacagatgcaactttcataaattttagaacaaagcctaaccttactagattaaacttgctctatgaaagaaacacttggtaattgacccagactgaatacatgtataagaaatgggaaagatctcccaaactctgagaacggtcctcaaatagaagctctcctagtcagttggtcatctgacctctgactatatccggcctatgacaccagccagctcctgctttctgtcttgtaagagcactgctggaataaactacttgagcatt

SEQ ID NO: 294013 - DNA, 1000 bp, Homo Sapiens; identical to SEQ ID NO: 119010

SEQ ID NO: 294014 - DNA, 1000 bp, Homo Sapiens
aaagctcaattagaatagcaaaatttataagctagtaaacttatactatagcaagtgttgctgtaaagtgtttttctccataggaagtgtgaactgtgtattgtctattgttagtaattttaaaaatgcctttatgtacataatcttgatggagctattagctgaactataaaatatgctcttggtaaatatcactaatttcaaagatcaggggaaccactacaaagacgtgtcatttctgcctttgtttgggacaggcagacaggctgaggaagtcaccagtgattgtggaaataattttgctccattttatactattaaatgaagagatgagtgaattctgtggttggttaccttaccttccaagatacagggtccactagaaattggctgtaatactcattgagccaagttgtcatatcaaattcaaccctgctgtaaacacatagaagttgtgaaactgcttcaagtaaatagtggtttgcagaacactgtaggagcatctgtcacttcattatgcagagcataagttgatccttttcctagaattttgtcagtggcaattgcatatatcagattgagtaggaaattgtgtactgtataagacttatttaaatagtcattaaatatttggatatattatgtgtgtgtgtgtgtgtgtgtgtgtgtgtatggtgtgtattccatatctattcccatgtaaatccaaatacttattctttatttcagtaattcttaacttgaatcatagactttggaacgagttagggaatgctctgttgcctaaaaagcaaacctacaagtatgttggtgtgtgtatgtgtatggaccagtttgtttgtgtgtgtgtgtgctcattttgaggggacaaggatctctagcattcataacattctcaaagaatctgaccaaagaaaggtaacaactatctttgtgtattttatgactgtgtgtgtttgcactcattgcaataaagtaggacaaaatgattttgaaatgc

SEQ ID NO: 294015 - DNA, 1000 bp, Homo Sapiens; identical to SEQ ID NO: 224652

SEQ ID NO: 294016 - DNA, 1000 bp, Homo Sapiens; identical to SEQ ID NO: 224653

SEQ ID NO: 294017 - DNA, 1000 bp, Homo Sapiens
aaaaacaaaagagtgaattgatacaagaattatttactctccaaagaaaacttaaagtttttgaagatgaagagaatgaatccatttgtactaccaaatatctagaggcagaaaaaataaaaatcagtgaaaagcctcaaaatgatacagaatgcttaagacttaaaaaagaattagaactttataaggaagatgacatggaaagtgtttatgaagctctccaaacagaaatagaatttttggagttgacattggcacagaaagatcttcaggaaagcaaataacttacagagaattgatcagccatctgagatttgatcagaatatctgagaatcaaatctttgtgatagatatatgaatggtacccgttacaacggatccttgtgggaaatatggggtttaaaatattcaaattgttattatctagaattgatgtgttagccctttaagataatttttgtcttgttactcaaactttaagagttcttctgtggtttgattttgtttctaaaagaaggaaaaggagaagaagtagataccgtgttcccaggcttcttatatgcccctgaacctcaagctgtcctattctttctaatctatataatatggtttggatctgtgtccatgcccaaatctcatgttgaattgtgatccccactgttggaggtgggtcctgataggaggtgattgggtcatgggggtgggtttctcatgaatagcttagcaccattcttcttggtactgtccttgagttctcctgagagctagttgtttactagtgtatagcacttctccactttgctcctgctgccaccgtatgagatgtctcactccccctttgccttcagtcatgattggaaacttcctgaggcctccctagaagcagaagtcactatgcttcctgtacagcctgcagaaccgtgggacaattaaacttgtgttctttataaattaaaaaaaaaaaaaaaaaaaaaaaaaaaaaaaaaaaaaaaaaaaaaa

SEQ ID NO: 294018 - DNA, 1000 bp, Homo Sapiens; identical to SEQ ID NO: 224654

SEQ ID NO: 294019 - DNA, 1000 bp, Homo Sapiens; identical to SEQ ID NO: 119011

SEQ ID NO: 294020 - DNA, 1000 bp, Homo Sapiens; identical to SEQ ID NO: 119012

SEQ ID NO: 294021 - DNA, 1000 bp, Homo Sapiens
gccatgaaagagatggcctactacaatgtgctatagcgcaagctgggccacccctaacgggggccgggggcgagggcatgggggtgagacccatgggctgcaggctgcacctcctgcagccgagaaacaagctactgccccactgttctgagccctccctccccgagtcatttgcaccactagggacctttagaccaaatggagactgtactactggccccggctgtgagccagcacaggcccaggcatcccagcaagggaaggagagcacgcgaggcccagatctgggtctccctggcctgcttccgtggggagtgggagaagtggggccactggggacaggtcacaagggcaccggccctcggggtctctccaggcccagcagagctcttcaggggtcctgacactggaagaagagaccacttgagccatgtctttttcacggccaactcctgcctctaaggatgtctgagctcccctctggccagtactgcccacctctaccttgtccaggcccccttccccgccctgtcgacggaccgccaggcagggcactctgccttctacctcccggggtctcccatgcgctcctcaagccaggtgtgcacgtggccctggccctggcctgcaggacagctggggggcacccagcccccagaagacccctgtcctacatccctttctggaagtgagtgtccctacagtggattgcaacacatgtcgtccacttcgaccctagctggagtgcctcaccagggggccccactaggaacaaagccaggacaggccccgcgtcaggcacacactaacaaaaccagaagcatggggcagggcagggcggagtgagggcatcacaggggaccaagaagggctgtccttgggggaggcccaggaccacctgtcggggagggggaccgcagtcatttctcattcctcagtgtccaccttgcgacggggatagccacgagtcagcagcttcccggaaagagcaacgtatttt

SEQ ID NO: 294022 - DNA, 1000 bp, Homo Sapiens
attgaaaatgtcagggaagtccagcgggcaggaattctcttcttccgaatcatgctgctcgagctacaggaaagcatccaactactcaattccatggaatttgtgtcactgttgctctatgaccatactcttgtaacagagccaaattctcctcaagacagcaaatctatggagttggaagccaacgtgaaactagtgcgtgacatcctgaaggcggttatcttgttctttcatccagagttggaattttcaagtgactttggaagttgggataagtgtaaattttatgttaacaaatatttagtcaacaatatttgtgcctttgatccaactgccaagcatgtggaagttaatgtacagcttattgatgaatatatcagagatcattcccgaactgaagtatggaaatttggtaatgttgtcattgaacatctataccactggatacacatctgttcagctctcatgaagataaccaaacaactaaatagtggtattacacctccgttgccctccaagactgacaattatatgtatgcaaaaatgccaggggaaggtttgcaagagaagtgataatggatgataatggaattgatactgtatttaggatcctttgtttgttatcagttttgtttgttaactataaaatattttccattggaaaggggtacctataaatgtcttctgctgctaatatttatctcagcactttctaaacccaaaagtgctacctaagaagaaatttagccaaaaaatacccagctaaggtagccatagccaagtgtatttaagtatgttatagaatatatttgaaagcttcctttcagtttgagctttgtatctgctgtggaactgttatggttgattgggtagttatttttcattcttataaggttcaaagtaacagctgaggatttagaaaacaagaataccaaatagaatacgaaataataaagataaaccaaaagaataccaaataataaagatttttaagaaatgg

SEQ ID NO: 294023 - DNA, 1000 bp, Homo Sapiens
gctggggctgaggtcagcgtctccatgatagccaagacaccctcttcctgcagagtccaggagcgcagcagagagagcaatgccccactccagagcctcccctcccgtgctggggatgtgggtcaagggcttcccaggaatgcagctgcccctccagggctgggggctggccagcgcctcctgtgttgggcagcagctctctgaagccagggcccccacgccacttccaggtgtggacaaccccgctgatcaatgtctctctgtgttctgccttccccagcagccagggcgctcttccgcgtgggttctgtcattgtctccatgagaggccaatgccgggaccagaggcattcctggctctggagcacccccttgtgctgaagatggccagtgattttgggcatgtgaatgcccctgtccctggtggagaattgcttggtggtgtcacgggaagggaaggctccctgggaccttagacacccagctcatctcagcggggtctggactcaccttccctaaaacagtccccgcggttccctgccacctcccctcaatccctctgcgcccaccctgcctccctccctgttcctccgtgacacaccaacttctttcgcgcccccaagcatttgtgtaggctgttccctctgccatactgttccagttccactttctttttctttttttttttttttttttttttgagacgatctcggcttactgcaagctccgcctcccgggttcacgccattctcctgcctcagcctcccgagtagctgggactacaggcgcccgccaccacgcccggctaattttttgtatttttagtagagacggggtttctccgtgttagccaggatggtctccatctcctgacctcgtgatccgtccgcctcggcctcccaaagtgctgggattacaggcgtgagccaccgcgcccggctacagtttcactttctctaaacaaataaaggtgcccactctgggccatcgctagctcctt

SEQ ID NO: 294024 - DNA, 1000 bp, Homo Sapiens
tctgctttccgggtttttttgttttgttttgttttgttttttgtatttttagtagagacggggtttcaccatgttggccagggtagtcttgaactcctgacttcaaaagtgatcgccctctttggcctcccaaagtgctggggtttacaggcttgagccactgcacctggccaaaaaattaacattctaaaggatttaaatactggaatttgaaaagccaaactgtgaaaccattgggagaaaatagatgatattgtctatgacgttgaggccaaggagctttttttttttttttcaagacaaaaggactctgtaattccacttctaggtatatatacatcctatagaaactcacaaataatgcataagaaatatatatataatatatgtatgtatgtatagccagatgcagtggcacatgcctgtaatcccagctacttgggaggctgatagaagaagataacttgaggtcaggagttcaagaccagcctgggaaacatagcaagaccccatctcttaaaaaaaaagaaatatatagacatatatctgcattgaaaacaacctaaatattcatcagtggggtaatggatgaataaaatatgatatattcaaatgatagaatagtatacagcacttaaaagcagtgaaccagatccatattgtgtaacatggatagttaaaacaatgttgaatgaaaaaaatcaaaatacaaatgaaacattgtgtaataatatttatgtaaattggaatgaaatcatttataaagaacaactgtttctattattgaaaattgtatgtaaaactatttaaaatagaatagaaggatacacacccaattattgatagcattgtctctggagattgaatttgaggctgttgattaaaaggagactttagctttgcttgtagtttttataccttaaaaagactggtagcatataaaataaatcttaaaagctaattatacacaatgacaatatgaaaaaaaaaaaaaaaaaaa

SEQ ID NO: 294025 - DNA, 1000 bp, Homo Sapiens
aaaggccttatgagtgcagtgaatgtgggaaattttttagccaaagctcaagcctcatgcaacatcgaaaagttcacactggagaaaaaccttttaagtgcaatgaatgtgggagattctttagtgagaattccagccttgttaaacatcagagggttcacactggagcaaagccttatgagtgcagggaatgtgggaaattttttcgccacagctccagtcttgttaaacatcgaaggattcacactggagaaatacaatgattgtgagaaatcctttagctggtgtttcaacctcattcaacaccagaaagttcacagtgtaaaaaagtcttgaaggttactaatggaaatccattagctatacctccaaactcattcaacactggacagttcacagagtggacaatgtagtgaatatggtaaaaggcctcagccaaaggcctaaccgtattcaacaccagaaagtttagactggagaaaggccttagactgtcgctgaatcaatatgacctgacttaaagcagaaacagccaggcgtggtggctgacacctgttattctcaccactttgggaggctgaagcgggcggatcacaaggtcaggacatcgaaaccatcctggttaacacaatgaaaccacatctctactaaaaatacaaaaatttactgggcatggtggtgggcgcctgtagtcccagctactcaggaggctgaggcagaagaatggcatgaacctaggaggcagagtttgcggtgagctgagatcacgccactgcactccagactgggtgacagagtgagactctgtctaaaaaaaaaaaaaaaaaaaattagcccggcgtggtggcaggcaactgtagtcccagctacttggggggctgaggcaggagatttgcttgaacccgggaggcggaggttgcattgagccgagatcacgccactgcactccagcttgggtgacagagtgagacttcgtctcaaaaaaaaaaaaaaaaaaaaa

SEQ ID NO: 294026 - DNA, 1000 bp, Homo Sapiens
caggcaatggtgactgtgtgtgtttcctggggaggaggttagcagggacggttgcctttcctgggaagggcggtttgcagaaccaggggtttatattgcagggagtgtattttctgaattctaagtcagaacaagcagtctgatacaggatccatggctgggtcacttctgggtgcaagaggctttctagaccttagacactcaagattacggtcccgggccagtaacagcacctgggagcttggtagaaatgcagaatcttagcctaggcaacatagggagacctcatctctgcaaaaaataacaaaattagccgggcatggtggtgcacacctgtagtcccagctattctccaggctgaggtgggaggatcgcttgagcccaagaggttgaggctgcagtgagccatgatcgcaccactgcactccagcttaggcaatacagcgagaccttgtctcaaaaaaagacaaaaaaaacaaaaagaaatgcagattcttgggccccaccaccccacgcctactgagccagaatctctgggggtggggcccagccatttggcttttcacaagttctccaggtcattcttgggcacgatcaaatttgagaatcacaggtctaggatacgacggggaaaacagaaatgtggggtggtcagggacattcggataattcgggctatttgtattcaggtgtgagctggcaaatccgagacctgttttgcgtagctaattaccagcaatgacaaactcccaggctctgaggcccaagcctcctgggctgcaactggtctttatttttggaggcaatgaatggagcacctcggcctgggaccctcagtgtagggttttctgactcttaggcaacttcctagggtgctgtacttcctttttaaagttggggagcggcagggggagggggaagtgccacgcccttgtagtttcatgatgtcatgttgcatgtgctcttgagctgtaaataaagagacgatggttaaaaagcc

SEQ ID NO: 294027 - DNA, 1000 bp, Homo Sapiens
ggatggaactcttgcaccagagcagcgagagaaccctgagctacgccaaggcgcggcaggagccggaagagcagagcctccaaaagctttatcaaaaccgggagaagtccgaggagcaactgaccctgaagcaagaggaagccttccgcagctactttgagatcttcaatggtcctggtgaggtggatgcacagagcctgaagaatatcctgctcctaatgggcttctctgtgacgctggcccaggtggaggacgccctgatgagtgctgatgtcaatggagatggtcgtgtggacttcaaagacttcttggctgtgatgacagacaccaggcgcttcttctgctctgtggaacagaacgccctgtcggacatggctccccacaacccccacactctactctttgagatcctgtccctgctggtagagatgctggccttaccagaggcagtcttagaggaaatcacaaactactaccagaaaaagctgaaggaaggcacctgcaaggcccaggagatggaagcggccgtaggccggctgcggttgcagaagcttccctacaacccccagcaagaagagagctcagaagttccagaacgaaaggtcctcagtatcctgagccggctgaagcagcagaactatgctcccaacctgcagagcccctatgcccaggtgccctgcatcctgctctgcccacagctggacaagaagatggtccgtaggcagccgagcaaccactatgcactagaccagtgcacaccccctggcctggatcctgacatccgcagccccttcttccagtcaggatctcaaggaaacagggaacacaactctgacagcagaaagtggctcagctctgtgccagctcgaacccactgaccctctggaggcctgactctaggcagctgctcaaggcctgtagacagatgggccaccaggcaggagctgctgctgggatttgcttttgtggcctggtgagctaataaacaccaataacttca

SEQ ID NO: 294028 - DNA, 1000 bp, Homo Sapiens
gaggcctggtcatcctggcccgcaggtctgagaagaccgccaaggtgaaggccctcctgccctccatggtgaagggcctgaagaacatggatgggatgctggtggtggaagcggtccacaacctcaaggctgtcttcaaggggcgggaccagaagctgatggacagtgcggtctatgtggagatgctgcagatcctgctgccgcacttcagcgacgcacgagaggtcgtgcgctcctcctgcatcaacctgtatgggaaggtggtccagaagcttcgggcaccacgcactcaggccatggaggagcagctggtcagcaccttggtgcccctactgctgaccatgcaggagggcaactccaaggtaagccagaagtgtgtgaagaccctgttacgctgttcttacttcatggcttgggagttgccaaaaagagcttatagccggaagccctgggacaaccaacagcagacagtggccaaaatttgcaagtgccttgtgaacacccaccgagacagcgccttcatattcctcagccagagcctggagtatgccaagaactcacgggcctccctccggaagtgctcagtcatgttcatagggtccctggtcccctgcatggagagcataatgacagaagatcgtctgaatgaagtgaaagctgctctggataacttgagacatgacccagaagcatcagtgtgcatctacgcagcccaggtccaggaccacatcctggccagctgctggcagaactcctggctgccgcacgggaactcatgggtgtgttactcagccaccacccaccgctggagccccagctgtgagaacctgcccacttcccaccagcggcgctcctggatcatgcaggcactgggctcctggaagatgtccttgaagaagtgacgtccctgagccccaaaccctcctcagggtggttgagttccagccatgctccctataaatgtcatgtggcttacctctcaaaaaaaaaaaaaaaaaaa

SEQ ID NO: 294029 - DNA, 1000 bp, Homo Sapiens; identical to SEQ ID NO: 224656

SEQ ID NO: 294030 - DNA, 1000 bp, Homo Sapiens
gacaagaaccatctgaatatcaagacaaagaagttttgaatgtgaactttgaattgggaaatgaagtttgggatgattttgatgatgaaaacttagaagttactagcttttcaactgatactgagaagacaaaaatatcagttttgtttcatcacatgagatgtcggatatttctttatcaaattctgctatgcccaagttcagtgcatcctccatgacaaaattacctcaacaagctggaaatgcagttattgtccattttcaagaaagaaaaccacaaaatctgtcaccagagattgagaagcaatgctttactttctctgaaaaaaacccaaattcttcaaattataaaaaagtggatttttttattagaaacagtgaatgtaaaaaggaagttgatttcagtatgtatcatcctgatgatgaagctgatgaaatgaagtctttattgggaatatttgatggtattttctaaaacaaacaaatactttttatattgataagagaaagaataaagacacctaatcacaaagcatgctttttatttttaaaaagtagttcataattgttcggatttttttctcctgtatttgattagctttgttcactttttgcaacaaaatgtatgggccgatttattttcccattatattgtaacttcttgaaaagctcttttacagtggctttgtttcaataagcccttaagttaagggctgattgcacttagaaataagttgcacttagaaataattatttggctattaattggattttgacaagaaccaatgtaaaatttcatttttatattttcttaacaagaagaaaaatattctatgaaagcaaagtaatgctaacttaatgaatctgcttattgtatggattaatcactaatattattcccatgtattttgttttactaaagatttttaagaatccagtggctatttgaacctactgttatctaactttgagcaacaataaatgaaacattaatcagtat

SEQ ID NO: 294031 - DNA, 1000 bp, Homo Sapiens
actatgagattaactgacttagttgtggtatgtagaaagagacacagagcctgcagcaagagcctaggtgaagactcagtgaagcactacctattgaaaggagaatctttcaaatccttaacagttattttcaccatgtaaaaaaggcgacattgccagggaacatcaagtaaagggacaaatgctcagtcagagttttcgcattttcctgattggcccaaatgttttgaagtcggtttcttcacatcagaatccaaaccaggtccacctgtggcaccttcacccttcggagccggacgcgtcacttaaaaccattcctcttacgttgtcgccctcaatcttacagggattctcctgtccatggctgccaccaaaactgcgagttatgatgaacatttcaggccagaaaagttaagagaatggccggagcccgagtccgtttctttaatggaggattgtgacagtgcctgctttaaagcaggcgttgaaggggaatgttcgggctcagatttggccgagagtgtggccaagagtgtttccagtcgccagcctgggggctggcgcaccgacgggggcgggcagccgggcgggtgaaggcagccaccccagctccccggcagaagccaggtctgggcttgccagtcaattctgcatacttcagcgtctggtattagctagagaagacattgatgaagcagtatgtgcaatattatttaaagaaaattccattgtgaaggttacagtcccaccatttgttgatcctctgtttcaaagacagcaagaggtggatgaagagaggagaactggtcttcagtgtgagacaggaaaacgacattccataaaagaacttgaagaaatagagaaggccaggctgcatgccagctcgccctacttcactttcacttcacactgtgtgattccaaaagagtggcataaagcctctgcaagagccaggagtaaaacttacaaatacagtcctgaaaagctcatctgtgcagac

SEQ ID NO: 294032 - DNA, 1000 bp, Homo Sapiens
ttcaaacatagccacagaaataaagaagggacaacaatctgggacagtgtctcctcagaaacaatcggcccggaaggttatatttaaaaagaaagtttctcttttgaatattgccacaagaataatgggtggtgggaaatctggaacagtgtcttctcagaaacagccagcctcaaaggctacaagtgacaagacagattctgctttgaatatagctacagaaataaaggatggactacagtgtgggacagtgtcttctcagaaacaaccagccttgaaggctacaactgacgaggaagactctgtttcgaatatagccacagaaataaaggatggagaaaaatctgggacagtgtcttctcagaaacaaccagccttgaaggctacaactgatgagaaagattctgtttcgaacatagccacagaaataaaggatggagaaaaatctgggacagtgtcttctcagaaaccaccagccttgacggctacaagtgacgaggaaggttctgttttgagtatagccagagaaaacaaggatggagaaaaatctaggacagtgtcttctcggaaaaaaccagcctcgaaggctacaagtgatgagaaggattctttttcgaatataaccagaggaaaaaaggatggagaaatatctaggaaagtgtcttctcagaaaccaccaaccttgaagtgtcttctgagaaaccaccaggcttgaagtgtcttctcggaaaaaaccatccttggaggccacaagtgatgagaaggattctttttcgaatataaccagagaaaaaaaggatggagaaatatctaggaaagtgtcttctcagaaaccaccagccttgaagggtacaagtgacgaggaagattctgttttgggtatagccagagaaaacaaggatggagaaaaatctaggacagtgtcttctgagaaaccaccaggcttgaaggctacaagtgatgagaaagattctgttttgaatatagccagaggaaaaaa

SEQ ID NO: 294033 - DNA, 1000 bp, Homo Sapiens; identical to SEQ ID NO: 119014

SEQ ID NO: 294034 - DNA, 1000 bp, Homo Sapiens; identical to SEQ ID NO: 119015

SEQ ID NO: 294035 - DNA, 1000 bp, Homo Sapiens
ttattctattcaagaaggatcaggaaagagagaagagaaaacttactcagtaaataaccttcctccagatagaccgggaagtccattcactgtcggttctctaattaaacaggcaacaagaattcttcaacattgtgtgaagatgagactttctttaagccataactatcgtatatgctgctggaaaatggtacctgggataaatgatagcaatatactgcctttggttttgaaagagtcactcatacccagtgtgggaagatttcttgcctactctgatgacaaagtacatgctatctttttagatggcattactctaaccctaaattggaatttcagctctcctattgagaagagacaggtaaatcaaggtcttaacttaggttggtgtaagttaacttttcctgatggacaagagcagttaattcagattgaacaccctgaaccatatgaaagatatgtgacaacagtaacatcatggtgcaggagactgacccagactagtcccagagagatgcccactcattcgtcatcttctgttctccaagaaaattggtctgttgcttctgaacttgaaaagatacagaagtttaacttgctactagaaaatagtggtatcctaaaccagatttctaacaagaaaaatgaacaacagtcttttgatcattataaaccaggatcttcagaaaccttgctaggagaagttaatgaaaatagagtatcaatagcattgaaaaaaacctctgaaatccttcacgatattgactgtcttctatcaaactctaaaaagtgaaaaatggaattattacaacatattattaaagtttaaggatgttgtttcaagtgactggtataaaattactagtaagccaagatattgtacgtattaccccggcacaatgattgtgaaagaactgacatttaactttgaaggtatttttaacttgtacatttttaaaatatgtatttatatcttaataataaatatttcgaagttttg

SEQ ID NO: 294036 - DNA, 1000 bp, Homo Sapiens
ttcctccacagctgtgagacacccacccgcctgcctctgtctctggcccaggccctctactttctgaataattctacgtcactgctcaagtgtcagtcagataaaagccagtggcagacttgggacgaattggttgagcgtctgcagtttctgctgtccagttatcaacatgttttaagagaacacttaaggagttccgtgatcgaccgaaaggacttaataatcaaaaggattaagcccaaaccccagcaaggagatgacatcacagtggtagacgtagagaagcagattgaggccttccgcagccgcctgatccagatgctgggggagcctcttgtcccccaactccaagacaaagtgcacttgttgaagctcctgctcttctatgctgcggacttgaaccctgatgcagagccctttcaaaagggctggagcggctcctgagggcctgccaagcactgaatgccaagaatacctcctgaactctctctccaactgctcagaagctctaaaagcatgaaaagtggttaaaatcttacaggaccaaacctgcattatttaatcagtaggttgtaatttctaactctagtaaatatctttttttaaataatcctatcctagcctgttctcaaatatggcttaaatatacaaggtatatatattttttaataaattatttatctatacttttttgaaacaggttaatactctgtgcatcacatgtttaacattttcattcaagatgtggaaaaaatccctctgctgaacctagtctatacaccaatattatgtcattcaaggtaccgacaacctgtttcaggagagagacgttcatttttcactaatgaaatgcaagcattctgttagacctattatattgcctgttaatttgactgtaatgaatagggggtagaaacaaaaggatcaagtgtgttataaaacatttgatgttaaaaggagacaataaaaaggcaatggttttccaaaaaaaaaaaaaaaa

SEQ ID NO: 294037 - DNA, 1000 bp, Homo Sapiens
tttgttgtagggttctccagtatgtggataacattagttgttttagaataggtaattgcaaattagtctgaagaaatctaacaggattcttttaagagcttagatttttcaggaaaaaaaaaaaaaaagaaaccctgtgtcagttttctgttttttctaactatctcattacaattggtgcacaatgaactggaaaatataaaaagtgacactttaggcaaatgtgatggcctccgagctgaaatgaaggaactggcaatctttccaaagtggcagccaaggccccactccctgtcctactcaatctctgcagggaaaaactgtgggataggatagcagccagctggggacacacagaggaacattcaacaggaaggtcccgcctagggaaaaggccacagagcccaggcctcttgccgattcagggatccttggatataagtggattagaggagagggaggaaagctatcatttcagtggtctccaaatcaagtagaaatattactgggaggtatcccacttaagcctgaaccagcagacatccgaaagggtcactctagagtcagaaaggaaagcaggtcccccagaaggcaacacattgataggaagtggaggccacagaaaaagaatgtgcccacttgataattacttaagacttctatttaaccaaaagaacattgaaatactttgtaaatattcatattgttgaacctttcataatcaggaattcactatgtactatactgtaagtcatagttcgcctataatttactagtatatctccctctaggacagatagtaaaatgtgtactatgttgttacagtggtgcaaaaatgttttaaaagtttatcacttgttttgaagactagaactttctttacttttctatattttcttagcaattcacagatatgttctctttggatttagtactttaacatatgtacatttcttcagaataaaaataagggtatttcacaacgaaaaaaaaaaaaaaa

SEQ ID NO: 294038 - DNA, 1000 bp, Homo Sapiens; identical to SEQ ID NO: 119016

SEQ ID NO: 294039 - DNA, 1000 bp, Homo Sapiens
ccgtgctgcagacagacctagtgccgagggatggacaggcgaggtggcagcgtggagggctcggcgtggatggcagcctcaggacacacacccctgcctcaaggtgctgagcccccgccttgcactgcgcctgccccacggtgtccccgccgggaagcagccccggctcctgaatcaccctcgctccgtcaggcgggactcgtgtcccagagaggaaggggctgctgaggtctgatggggcccttcctccgggtgaccccacagggcctttccaagcccccatttgagctgctccttcctgtgtgtgctctgggccctgcctcggcctcctgcgccaatactgtgacttccaaacaatgttactgctgggcacagctctgcgttgctcccgtgctgcctgcgccagccccaggctgctgaggagcagaggccagaccagggccgatctgggtgtcctgaccctcagctggccctgcccagccaccctggacgtgaccgtatccctctgccacaccccaggccctgcgaggggctatcgagaggagctcactgtgggatggggttgacctctgccgcctgcctgggtatctgggcctggccatggctgtgttcttcatgtgttgattttatttgacccctggagtggtgggtctcatctttcccatctcgcctgagagcggctgagggctgcctcactgcaaatcctccccacagcgtcagtgaaagtcgtccttgtctcagaatgaccaggggccagccagtgtctgaccaaggtcaaggggcaggtgcagaggtggcagggatggctccgaagccagaaatgccttaaactgcaacgtcccgtcccttccccacccccatcccatccccacccccagccccagcccagtcctcctaggagcaggacccgatgaagcgggcggcggtggggctgggtgccgtgttactaactctagtatgtttctgtgtcaatcgctgtgaaataaagtctgaaaacttt

SEQ ID NO: 294040 - DNA, 1000 bp, Homo Sapiens; identical to SEQ ID NO: 119017

SEQ ID NO: 294041 - DNA, 1000 bp, Homo Sapiens; identical to SEQ ID NO: 119018

SEQ ID NO: 294042 - DNA, 1000 bp, Homo Sapiens
gccaccacacccggctaatttttgtatttttagtagagatgggttttgcaatgttggccaggctggtctcaaactcctgacctcaagtgatctgcctgcctcggcctctcaaattgctggaattacagttgtgagccaccacacctggcttgaatgtagattttaataattgaatttattctgccgtgttgatagaataactgaatatcagtaaattgtgtaacagtggtggatactgttgcataagatgagctcctgaagagtgaagctaattctttggtcaatgttcttttcccctcagtgtctagtttaaggcttttagaagattgatctgtagcaattatttaatgaattgaatatttaaaaaattttttatttgctgtctttggtaattatctctctgcttgaaattaaatgcactataagttaatataacaagtaaaatacattgtcttttgaaaatagtttctttttaaaggaatactaattaattgtaacttgtaaaaccaaaagttctaatggtttttaaaaaccagtgttgagtggaaaagtgtttctttagtttggaaagacctgtgaagtatcctagtcagggaaagaacctgttttctggaagaatgtaagttgctatatgtggaggggcatgtaggacaggggttctaattactgtctgtgagagttactactttgtaacttatggtttctgcttcagtattgtgttggttctgtattataaattgcaccttaatagaccaaaaatatctatacagcactgatttccttgaatattgtgtgttaattgatatatcttctagaggcaaaaggtttaaatgtgttaaaatggttatattgcctcctttttaaacaaattaaagagttgtaaatactagtgtagatctcttttgtttaccacagcaaatactgattttatgattgttaagcatttcatattttaatttaaattggattcaaccacaataaagaaaatgagaaaagcttt

SEQ ID NO: 294043 - DNA, 1000 bp, Homo Sapiens; identical to SEQ ID NO: 119019

SEQ ID NO: 294044 - DNA, 1000 bp, Homo Sapiens; identical to SEQ ID NO: 115653

SEQ ID NO: 294045 - DNA, 1000 bp, Homo Sapiens
ctatgagcaatacaggggacaactgtgggaaggctgggaaggttaagaaacaacagaggtggacctccaaaaacatagaggcatcacctgactgcacaggcaatgaaaaaccatgtgggtgatttccagcagacctgtggtattggccaggaggcctgagaaagcaagcacgcactctcagtcaacatgacagattctggaggataaccagcaggagcagagataacttcaggaagtccatttttgcccctgcttttgctttggattatacctcaccagctgcacaaaatgcattttttcgtatcaaaaagtcaccactaaccctcccccagaagctcacaaaggaaaacggagagagcgagcgagagagatttccttggaaatttctcccaagggcgaaagtcattggaatttttaaatcataggggaaaagcagtcctgttctaaatcctcttattcttttggtttgtcacaaagaaggaactaagaagcaggacagaggcaacgtggagaggctgaaaacagtgcagagacgtttgacaatgagtcagtagcacaaaagagatgacatttacctagcactataaaccctggttgcctctgaagaaactgccttcattgtatatatgtgactatttacatgtaatcaacatgggaacttttaggggaacctaataagaaatcccaattttcaggagtggtggtgtcaataaacgctctgtggccagtgtaaaagaaaatccctcgcagttgtggacatttctgttcctgtccagataccatttctcctagtatttctttgttatgtcccagaactgatgttttttttttaaggtactgaaaagaaatgaagttgatgtatgtcccaagttttgatgaaactgtatttgtaaaaaaaattttgtagtttaagtattgtcatacagtgttcaaaaccccagccaatgaccagcagttggtatgaagaacctttgacattttgtaaaaggccatttcttgg

SEQ ID NO: 294046 - DNA, 1000 bp, Homo Sapiens; identical to SEQ ID NO: 119022

SEQ ID NO: 294047 - DNA, 1000 bp, Homo Sapiens
gcccagctgggattgccgaggggcccctagccctggcagcggtcctgggctagtcggctgcctggccggggaacctgcaggctcccacaggaagaggtgtggagacctgccctcgggggcctctcccagggtccagcctgagcccccaccaggggtctctgcccagcacaggaagctgaccctggcccagctctaccgaatcaggaccaccctgctgcttaactccacgctcactgcctcggaggtctgagcagagggaggcccccaagagtgccattgaccaagagacagcagacagcctgcctcctggggcgtgccggcacctgcttcagctactgcctcctgtatgcatgagccggatgctgggcaggatccctgcctacgcccgggcccgatttgcgctttgccggactggatggagtggaggaggcccaggccacagtaccaccccacctgcccaggcagcccctcgtcacctactccccgaagttaccagctcagctcgagtcttcagggctgggctcctaggctgcccatcctacttctaccctcactggcctccagtgggattcactcctgccctgcccccaccttcccagtcccacaggccacccctggcttgggctgggttctgtgaagttacgtatttattgagcttttggttcttttataaagacttgtctagactccactgggaagagtcctttgctttggggcccagtgactcggggcacttgagttcagggcggcctccttgtgttcctgtgctcctccacttgccacggatgggccacggatggagcttgccatgggaagcactgggaagtaatggggtgtggggtgccaccagaccaacacccccagacttccccaccttcagccaccatcagagcctctccccaggtgccccccggggattcagggctgaatctgcccagttcccacactcaggccagccctcttgggaaggtgggtcctccatgggggtcccttcaggaac

SEQ ID NO: 294048 - DNA, 1000 bp, Homo Sapiens
cccggccccctgcctgagcctggtctgcaccccagtgagctatgtgtccagcccctgctgccgagtgacctgtgagcccagcccctgccaatcaggctgcaccagctcctgcacgccctcgtgctgccagcagtctagctgccagctggcttgctgtgcctcctccccctgccagcaggcctgctgcgtgcccgtctgctgcaagactgtctgctgcaagcctgtgtactgtgtgcctgtctgcagtggggattcttcatgctgccagcagtctagctgccagtcagcttgctgcacctcctccccctgccagcaggcctgctgtgtgcccatctgctgcaagcctgtctgctctgggatttcctcttcgtgctgccagcagtctagctgtgtgagctgtgtgtccagtccctgctgccaggcggtctgtgagcccagcccctgccaatcaggctgcatcagctcctgcacgccctcgtgctgccagcagtctagctgcaagccggcttgctgcacctcctccccttgccagcaggcctgctgtgtgcctgtctgctgcaagcccgtctgctgtgtgcccacctgctctgatgattccggttcatgctgccagccagcttgctgcacctcctcccaaagccagcagggctgctgcgtgcccgtctgctgtaagcctgtgtgctgtgtgcccgtctgctctggggcttccacttcatgctgccagcagtctagctgccagccggcttgctgcaccacctcctgctgcagaccctcctcctccgtgtccctcctctgccgccccgtgtgcaggcccgcctgctgcgtgcccgtcccctcctgctgcgcccccacctcctcctgccaggccagctgctgccgcccagcctcctgtgtgtctctcctttgccgccccgcatgctcccgcccggcctgctgtggccccacctcaacccagaagtccagctgctgagtgatctccttaagatcatccaaagcctga

SEQ ID NO: 294049 - DNA, 1000 bp, Homo Sapiens
cacactgaggctctcctgcagaaggcgggctggactacctcgtgctgaaccacatcggcggcgccccggccggcacgcgagcccgcagcccccaggcaactcgctggctcatgcaggtaaactttgtgagctacgtgcaactgacgtcgcgggcgctgcccagcctgacggacagcaagggctccctggtggtggtgtcctcgctgctcggccgcgtgcccacgtcgttctccactccctactcggcggccaagtttgcgctggacggcttcttcggctccctgcggcgggagctggacgtgcaggacgtgaacgtggccatcaccatgtgcgtcctgggcctccgagatcgcgcctccgccgccgaggcagtcaggagctcaacgtcacggccgcggcagcctgagcaccggggggtgcccctccagtcccagacggcaatgttcctccctccaactgtccctggagccagaacactcacagagacacccctgagagggtggccacagcccaagatgaagtcatcaagacagaaaagcaaaaccgagaaaaacgacgggcacctggaaccagtcacggcttgggaggtgcaggtgccccgtgttaggcgcctttgtcggggacttgcaaggcctcacctgtttggccatgattgatgacgtgactgcttccattttgcagatgaggaaactaaggctcagagaggccacgccacccttgagccacccatggacccctctccatctcctgcctgcgcctttaagtccctgatttattctttccattcattccatctgggaggaacccccccaactcctgccagcttcccctagctggggtctctggtactcttcacacctgcaggggcgtctacactgttcgtctacctggtggcagggtctgagcgggaggaggagggaaagagtgtgttctgagctggacccagcctcttgttcgagaataaaaactcttcttctcttgcaaaaaaaaaaaaaaaaaa

SEQ ID NO: 294050 - DNA, 1000 bp, Homo Sapiens; identical to SEQ ID NO: 119025

SEQ ID NO: 294051 - DNA, 1000 bp, Homo Sapiens; identical to SEQ ID NO: 224658

SEQ ID NO: 294052 - DNA, 1000 bp, Homo Sapiens
tttagcaaaggagggttgcagagcagcttaaattttttttataatgtataagaattttgtttatcttttaagagtagtaaagtactttgagtgtttgggggttcaacacacacatgcaattttgcttaacaaaagtattttataatacagtttcatacagaattaccttaaaagggagtcttatgttttcaactacagatagttgtaagggatcatacagaagatattgatgatagttgaaatattcttagaaggggtgtgtatgtctagctgtgtctaccatgtgtatgtattcttgacaagcagtataaaatacctgtgatttttctttacattagggataatgcataaggaattaatcttcatatatattatcatccctaatgtagcagggggaagtatttaattgcccatgatatgtattttacttatactatgccagagaggaaactataaagtaattacacatgtaatcttgggtttttcacatatgtaggtattcattttgagtaggttgaagaagaaaaaaaatatttaaatgaattgaattcctgatgggatagtatcaataagtatttaaaagccagtattctaaaaataataaagggtagggtcatttttgagtttgtttttcttttgctattgttaatattcaaaattaaagtgttacattggtacctgttgtcttaatgcatttattgagaacagcattgagatgatgaacaaggggttagcaatagcaaactctataattattttgactaattacttaagaggaaaacagtataagtatctcattcagtatttagcaattctgtaaaataagtattatctctatttttcagatgaggaagtaagggtttagcaaggttaagagatctatccaatttacacagcaagttagtagttgagcctgaccatgagtcttctgactctgttcttttcactatgcaatacgcaaacaataaaatgttatacaaataaaaaaaaaaaaaaaaaa

SEQ ID NO: 294053 - DNA, 1000 bp, Homo Sapiens; identical to SEQ ID NO: 224659

SEQ ID NO: 294054 - DNA, 1000 bp, Homo Sapiens
atcaaaaacatcactccctctccctccctaacagtgaaaagagagaagggagactctatttaagattcccaaacctaatgatcatctgaatcccgggctaagaatgcagacttttcagactgaccccagaaattctggcccagccaatctagaggcaagcctggccatctgtatttttttttttccaagacagagtcttgctctgttgcccaagctggagtgaagtggtacaatctggctcactgcagcctccgcctcccgggttcaagcgattctcccgcctcagcctcctgagtagctgggattacaggcgcgtatcaccatacccagctaatttttgtatttttagtagagacgggttcaccatgttgcccaggagggtctcgaactcctggcctcaagtgatccaccggcctcggcctcccaaagtgctgggatgacaggcatgaatcactgtgctcagccaccatctggagttttaaaaggctcccatgtgagtccctgtgatggccaggccaggggacccctgccagttctctgtggaagcaaggctggggtcttgggttcctgtatggtggaagctgggtgagccaaggacagggctggctcctctgcccccgctgacgcttcccttgccgttggctttggatgtctttgctgcagtcttctctctggctcaggtgtgggtgggaggggcccacaggaagctcagccttctcctcccaaggtttgagtccctccaaagggcagtgggtggaggaccgggagctttgggtgaccagccactcaaaggaactttctggtcccttcagtatcttcaaggtttggaaactgcaaatgtccccttgatggggaatccgtgtgtgtgtgtgtgtgtgtgtgtgtgtgtgtgtgtgtgtgtgttttctcctagacccgtgacctgagatgtgtgatttttagtcattaaatggaagtgtctgccagctgggcccagcacctaaaaaaaaaaaaaaaaaaa

SEQ ID NO: 294055 - DNA, 1000 bp, Homo Sapiens; identical to SEQ ID NO: 119026

SEQ ID NO: 294056 - DNA, 1000 bp, Homo Sapiens
tgtactgtaatggagtgagcgtagcagctcagctctttggatcagtctttgtgatttcatagcgagttttctgaccagcttttgcggagattttgaacagaactgctatttcctctaatgaagaattctgtttagctgtgggtgtgccgggtggggtgtgtgtgatcaaaggacaaagacagtattttgacaaaatacgaagtggagatttacactacattgtacaaggaatgaaagtgtcacgggtaaaaactctaaaaggttaatttctgtcaaatgcagtagatgatgaaagaaaggttggtattatcaggaaatgttttcttaagcttttcctttctcttacacctgccatgcctccccaaattgggcatttaattcatctttaaactggttgttctgttagtcgctaacttagtaagtgcttttcttatagaaccccttctgactgagcaatatgcctccttgtattataaaatctttctgataatgcattagaaggtttttttgtcgattagtaaaagtgctttccatgttactttattcagagctaataagtgctttccttagttttctagtaactaggtgtaaaaatcatgtgttgcagctttatagtttttaaaatattttagataattcttaaactatgaaccttcttaacatcactgtcttgccagattaccgacactgtcacttgaccaatactgaccctctttacctcgcccacgcggacacacgcctcctgtagtcgctttgcctattgatgttcctttgggtctgtgaggttctgtaaactgtgctagtgctgacgatgttctgtacaacttaactcactggcgagaatacagcgtgggacccttcagccactacaacagaattttttaaattgacagttgcagaattgtggagtgtttttacattgatcttttgctaatgcaattagcattatgttttgcatgtatgacttaataaatccttgaatcataaaaaaaaaaaaaaa

SEQ ID NO: 294057 - DNA, 1000 bp, Homo Sapiens; identical to SEQ ID NO: 119027

SEQ ID NO: 294058 - DNA, 1000 bp, Homo Sapiens
cctaaagcaagagtggcaggtgatcagggctggtgtagcatccggttcctttagtgcagctaactgcatttgtcactgatgaccaaggaggaaatcactaagacatttgagaagcagtggtatgaacgttcttggacaagccacagttctgagccttaaccctgtagtttgcacacaagaacgagctccacctccccttcttcaggaggaatctgtgcggatagattggctggacttttcaatggttctgggttgcaggtgggcactgtatggctgggtatggagcggacagcccccaggagtcagagcctcagcccggctgccctggtggaaggtacaggtgttcagcaccttcagaaaagggcataaagtggtgggggacaattctcagtccaggaaaatgcattgaccattgctggctatttgcttacctagtaagaattggattcatttttgaccagattattcttctatgcttttttgcaataaatcaaatcccacatatctacaagtggtatgaagtcctgcaccccccaggaggcctgtccaggcatgtcttcagaggcagggtgggttacactcatttacctcccctctccccaccaaattatgacacaaacgagtatgtttcctctctagaaccctgtaatgcctcctcccccatccccagagctccttactgtaggtcttaccctggacaaggattttttcaagttggaggcacagaacatgagcaatctgacattcccacagcccctcaaacatgcaaggctactaaggcaggaggagtataaatgatggatattgaccaagacctgcttggacggagaccgccatattatctgttctcttcgttcacaaaacagccttcacttgtctcagaatttgatggacacatactgtgatgagcaggagcttcagatgcactctttacacattttgttgaaataaacctctacatttgtagaagaaaaaaaaaaaaaaaaaaaaaaaaaaaaaa

SEQ ID NO: 294059 - DNA, 1000 bp, Homo Sapiens; identical to SEQ ID NO: 119028

SEQ ID NO: 294060 - DNA, 1000 bp, Homo Sapiens; identical to SEQ ID NO: 284969

SEQ ID NO: 294061 - DNA, 1000 bp, Homo Sapiens; identical to SEQ ID NO: 119029

SEQ ID NO: 294062 - DNA, 1000 bp, Homo Sapiens
gctgcagatggaggcttcagtgcgccaggccctttctgaatccctttgcccacacccaggtttctcaccttagagtcccaggagtccctgcacagaacgctgggatctggttgcctcattcacaccaaggtgctagagttaatgactcactctctaaggagtaattgccttttaaaagaaggcctagagagacagcgcacttaacagtgaaaaatgagttaccagtatctgaacttcaggcatctgccagaggtttttttcaggaggtgtggagagaggagcattcctccccttgaggctgagcctacatacatggttgacgccgaaatggaggtcaggccacacgaagattgtctttaacaattggtatctgcatgaatctgtacctggtaaaccccatcactagctgtggctactctggacattttaggaatagatcagcatagtaaccataatagtactcatggctaccacttattgaggcttttctatatgatccagtaggctgcgtactttgaatatagtagatcatgtaatccccataacaaccttagcaagcaggtgctctttattgtactcatgttacgggtgggaaacgtaagctaagagaatttagccaacttgcttaagatcacccagctagcaaatggcagagctgggcctgggaccgggcacgtatggcttctgaccaacagcaaccatgtcatttctatgaacatatggacccaaggctcagaaggaccgagtcataaagtgtgaatggcatagaggccttttagtgctttcatactcaatatggccttttagctcccctttttctccctcttttttcaacccaagacctagtggagtactagagctgcttgtattctggttgttaatctttcaggaattttgcaagctgattgttaattaagtacagtcagtattaaaaatgatatacatttacaattaaataaatcatatttaaagcaaaggtcaaaagtacttaaaactcatc

SEQ ID NO: 294063 - DNA, 1000 bp, Homo Sapiens; identical to SEQ ID NO: 119030

SEQ ID NO: 294064 - DNA, 1000 bp, Homo Sapiens
gccaagcctccactgccaattgttgaaggcagtttcagatcgccaccttttgaggtacatttctttaagcacaagagaagtagaaatggcctttgccttgtctccagtggtttgtccctctggtgcctcagcagataccagagcttattcttatgaccatttggaagtagtcctcaaagtaaagatcaagaaaaaattggattctttttccattttctcataatagtagcctagtcaacacaagactcccataaaatatgactcactattgggagccatactattttataagcttacttcctgctgacaaaactagctttcctcaaggaaatataaaggaggggaaagtcacatagtgttaggaaaacattcctgtgttttgaatacgatgaatccgtaggatagagaaaaatctgcttgttctattctgagagttctctgagatatcccttcactctgcttggcatttggccattgatattcaacaggtcactgaccaagcttttctaaatttttcagagagagttacttaccaataaggtctgttcttaaacctacctagttgattttcatatctttccataaagtgtcatgattctatcatagaccctgacttaacattgtaaggactatgagtcctccattttttaattaattattttttagcaaattaggacttcggcaggttttcctctcctaaactcattctttcctccacaggattgctttgtccatctcctctttcatttcaagtgcataaacaaaacctcaaagggcctgggaaggtgaggcaggccagagtctgtgttctgtgttgagtgtcaagctatttgttaagaaggtctgcaacaggcctttggtgtgggctctgccagagactgttctgaacactttgcttgagatccgtgccctgtaaaatggatatgatgttttactgatgtctgtaatacatttgtaaacttccaataaaatttgaataaaaaaaaaaaaaaaaaaaaaa

SEQ ID NO: 294065 - DNA, 956 bp, Homo Sapiens; identical to SEQ ID NO: 224663

SEQ ID NO: 294066 - DNA, 1000 bp, Homo Sapiens
tccattgagatgtcccatcaagctctatgatttctacctcttcaaatgcccccagagtgtgaaaggccggaatgacaccttttacctgacacctgagccagtggtggcccccaacagcccaatctggtactcagtccagcctatcagcagagagcagatgggacaaatgctgacgcggatcctggtgataagagaaattcaggaggccatcgcagtggccaatgcaagcactatgcactgagatgccttggccatggcacaagagaaaccagccaggaaaaaccagacagactttcacactaaagaagaggcctccatttttttttttcttttttttattggtgtagttacgaagcctttcaggctgcttctgtttaaaatataaaagaaaactttgccccctttgcatcttcataaacctgctgcggcagactcctcagccgatggtggctctgggtttccttgagtgtcatatgtcctagaaagttgctggctgactcttttttgtctggggcctggggaaagggcttggactgtgaaaagaaatgtggcccctttccatcttcaagagagatggaattaatgatggatggaccctggagggaatctccccagccgacttccactgggctgacagactttgctgaccacaggggaacgatgttcttttctttcttcatgatcagacataaacttagcatcttaatggaagaaaaatgaggggaacttcaattatgatttattaaagacaatttctattacaccctcctttatgacaagtgacattttagatgtaaaagtaaaaactttaccatgccttttttttttttgttggcctaacattgaggccttaaaacctgaggctcctgtgcctgatggaattcttgtaacatacacttgtgtatcatataaagataccactctgtttctcttatgtattcttactctagttgtttattaagaatgacaagcacgtcttttcaaaaaaaaaaaaaaaaaa

SEQ ID NO: 294067 - DNA, 1000 bp, Homo Sapiens; identical to SEQ ID NO: 224664

SEQ ID NO: 294068 - DNA, 1000 bp, Homo Sapiens; identical to SEQ ID NO: 119032

SEQ ID NO: 294069 - DNA, 1000 bp, Homo Sapiens; identical to SEQ ID NO: 289465

SEQ ID NO: 294070 - DNA, 1000 bp, Homo Sapiens
cacaaaggcgccttttagcaagaaggtgaatgtacaagaatgccatgcagtggggcctgaggcacatactatccctggttatcccaaaagtgtagatgtatttggctccactccatttcagcccttcctcacatcaacaagtaaaagtgaaagcaatgaggacctttttgggcttgtgccctttgatgaaataacggggagccagcagcaaaaagtcaaacagcgcagcttacagaaactgtcctctcgccaaaggcgcacaaagcaggatatgtccaaaagtaatgggaagcggcatcatggcacgccaactagcacaaagaagactttgaagcctacctatcgcactccagagagggctcgcaggcacaaaaaagtgggccgccgagactctcaaagtagcaatgaatttttaaccatctcagactccaaggagaacattagtgttgcactgactgatgggaaagatagggggaatgtcttacaacctgaggagagcctgttggaccccttcggtgccaagcccttccattctccagacctgtcatggcaccctccacatcagggcctgagcgacatccgtgctgatcacaatactgtcctgccagggcggccaagacaaaattcactacatgggtcattccatagtgcagatgtattgaaaatggatgattttggtgccgtgccctttacagaacttgtggtgcaaagcatcactccacatcagtcccaacagtcccaaccagtcgaattagacccatttggtgctgctccatttccttctaaacagtagatacttctgatggattctcggcattaactcctgtttcaaaaaagtgtgaacagttttatgaatttgaaagaaaatttggtagctctttatagcattcattcttaaagatcagtcagaataggtgatttctaaataaaccaaatagaagaatgaaaaaaaaaaaaaaaaaaaaaaaaaaaaaaaaaaaaaaaaaaaaaaaaaaaaaaa

SEQ ID NO: 294071 - DNA, 1000 bp, Homo Sapiens; identical to SEQ ID NO: 224665

SEQ ID NO: 294072 - DNA, 1000 bp, Homo Sapiens
gaagctgtccaaaggcaccaagaaagacctggatgacatcagcaccaaaacaggcatcaccctcaagagctgccggagacagtttgacaactttaaacgggtcttcaaggtggtagaggaaatgcggggctccctggtggacaatattcagcaacacttcctcctctctgaccggttggccagggactatgcagccatcgtcttctttgctaacaaccgctttgagacagggaagaaaaaactgcagtatctgagcttcggtgactttgccttctgcgctgagctcatgatccaaaactggacccttggagccgtcggtgaggcccccactgacccagactcacagatggatgacatggacatggacttagacaaggaatttctccaggacttgaaggagctcaaggtgctagtggctgacaaggaccttctggacctgcacaagagcctggtgtgcactgctctccggggaaagctgggcgtcttctctgagatggaagccaacttcaagaacctgtcccgggggctggtgaacgtggccgccaagctgacccacaataaagatgtcagagacctgtttgtggacctcgtggagaagtttgtggaaccctgccgctccgaccactggccactcagcgacgtgcggttcttcctgaatcagtattcagcgtctgtccactccctcgatggcttccgacaccaggccctctgggaccgctacatgggcaccctccgcggctgcctcctgcgcctgtatcatgactgaggtgcctcccaacgctccgcccacgctgacaataaagttgctctgagtttggagactggtcctcgctccggggagcaagtggggggcgtgcagatgtgcctgtgtctgtctctgagcacctggtgtccgtgtacaaggatggatgtgtacagtggctccttgggaactgagacatatctcagggaatggtgtctgtgctcagcccatccaccagaagagtctgctcacaagcca

SEQ ID NO: 294073 - DNA, 1000 bp, Homo Sapiens; identical to SEQ ID NO: 224666

SEQ ID NO: 294074 - DNA, 1000 bp, Homo Sapiens; identical to SEQ ID NO: 119033

SEQ ID NO: 294075 - DNA, 1000 bp, Homo Sapiens
aaaataaccagtaggatccaaagaactttagctatttatgttcatcttcaaaaaattattttaggcaaagtccatactccttttaaaacaatatttatgtcctatgtttgtgtatagacatgactctactagggcataattagagtttgtgtattatttttccaggtttggggatgagtcagtccttgcccatccacaattttgtttgtgaacttataacaggaataagcaaaattcatacctgactagtgttcagaatgtagcattctgtgcgaaaaagtattgaagattagcttttaaaaactgaaaaaaaaaaatgaatgactcacatagaggttgagccaatgactgtggcctcattagattacattgtagttaaacaaagcaatttctccagacttaaaacatgatgagttgagctctatcttcatgtactcatcctgaatccttatttttctaaaatagcaccctttgttaattatttttatggaaattattactctgtcataattaaatcatagctagtataactttacagataacctaaaaagaatagaaaagaagagagagtggctttgtcagtataaaaccatgtaaagtcatcatcaagtcatctggatgaatcttgaaacacatttagctgccagttttacaaacctttaatatatcagtgctccagtatataacctcaaacaaatgtaaatagaacgaattattttcttgttttgaattgtcaatatattaaatgttgactctttgggagagttgttggcaagtttcaatggtgagaaacattattgtcaacttgaaatgtgttctgtaatggggacactacaaaaagctagctttccaatgtgtgcatagtattggcaatatgaatatatattatatataatctaatacttattataagctgctccctgtctatgtatttggaaaccttttcacaaagggaattgcctaacatgtggacttttacaataaaaatgctgcattctaa

SEQ ID NO: 294076 - DNA, 1000 bp, Homo Sapiens
gctcggagagggtcaactggacctcccctccgctctgctcttcgtggaacacgaccgtggtgcccggcccttgggagccttggggccagctggcctgctgctctccagtcaagtagcgaagctcctaccacccagacacccaaacagccgtggccccagaggtcctggccaaatatgggggcctgcctaggttggtggaacagtgctccttatgtaaactgagccctttgtttaaaaaacaattccaaatgtgaaactagaatgagagggaagagatagcatggcatgcagcacacacggctgctccagttcatggcctcccaggggtgctggggatgcatccaaagtggttgtctgagacagagttggaaaccctcaccaactggcctcttcaccttccacattatcccgctgccaccggctgccctgtctcactgcagattcaggaccagcttgggctgcgtgcgttctgccttgccagtcagccgaggatgtagttgttgctgccgtcgtcccaccacctcagggaccagagggctaggttggcactgcggccctcaccaggtcctgggctcggacccaactcctggacctttccagcctgtatcaggctgtggccacacgagaggacagcgcgagctcaggagagatttcgtgacaatgtacgcctttccctcagaattcagggaagagactgtcgcctgccttcctccgttgttgcgtgagaacccgtgtgccccttcccaccatatccaccctcgctccatctttgaactcaaacacgaggaactaactgcaccctggtcctctccccagtccccagttcaccctccatccctcaccttcctccactctaagggatatcaacactgcccagcacaggggccctgaatttatgtggtttttatacattttttaataagatgcactttatgtcattttttaataaagtctgaagaattactgtttaaaaaaaaaaaaaaaaaaaaaaaaaaaaaaa

SEQ ID NO: 294077 - DNA, 1000 bp, Homo Sapiens
tggagagtgagctgtgcgtgtgtgtgtgtgtgtgtgcatgtgtgtgtctgtctggcatgcatgcactcactttggggctggaggtgacagtaggtgagggcagaggaggagatcagaaaatccctctgacatctccactgcccccaaagacctccgttgaacattctgtatggaaaagagccctggagcatcaggttccccagataggcccccaaataaagacctgtctatggctctcccaaccttctgtcagcttctttggcaagacattgctccaggcacagggactgaaccccaggcctcctgggactggagcagcagtgaggcaaaacccgacctgctagccctttctgccttggaggtttcagtccatacctggactctgagaaaatgagctgaataaggagtacagtgtgtaaggagcagccagggaagccctagacactccccgcgtctcccccatgcacaggggaaggatgttgacatagcactgggctgtttgaatgccttttcatctccatggtctcatttgaaagtgagcgaggcaggcaggcatgatcccattttccagataaggaaacaagcctagatatgctacatgtccaggaacaactgcagccaggaggcagaacagcctaggtctaactgcagagtagaagctggaccctggagttaccaacactcctccccaacagttcttagcgccccgcaggctgggcgctgtggctcacgcctgtaatcccagcactttgggagggcaaggcaggcggattacctggggtcaggagttcatgaccagcctggccaacatggtgaaaccccgtctctactaaaaaaatacgtaaaaattagccaggcgtggtggcacacgcctgtaaacccagctactcgggaggctgaggcaggagaattgcttgagcccgggagagggaggttgcagtgagccgagatcatgccactgcactccagcctggctgacagagcaagactcccctgtctc

SEQ ID NO: 294078 - DNA, 1000 bp, Homo Sapiens
gcagaggagactcttggacctcagaaaagaaaaaaaccatctgaagaagagactggaaccaaaaggagtaagatgtccaaagagcagactcggccttcctgctctgcaggagccagcacgtccacagccatgggccgttccccacctccccagacctcatcatcagctccacccaacacttcctcaactgagagcctaaaaccattggccaaccgtcacgcaactgccagtaaaaatattttccgagaagacccaataatcgcgatggtactaaatgcaacaaaagtatttaaatatgaatcctcagaaaatgagcaaagaagaatgtttcatgctacagtggctacgcagacacagttctttcatgtgaaggttttaaacatcaacttgaagaggaaattcattaaaaagagaatcatcattatatcaaattattccaaacgtaatagtctcctagaggtgaatgaagcctcttctgtatctgaagctggtcctgaccaaacgtttgaggttccaaaggacatcatcagaagagcaaagaaaattccgaagatcaatattcttcacaaacaaacttcaggatatattgtatatggattatttatgctacatacgaaaattgtaaataggaagacgacaatctatgaaattcaggataaaacaggaagtatggctgtagtaggaaaaggagaatgccacaatatcccctgtgaaaaaggagataagcttcgactcttctgctttcgactgagaaagagggaaaatatgtcaaaactgatgtcagaaatgcatagtttcatccagatacagaaaaatacaaaccagagaagccatgactccaggagcatggcactaccccaggaacagagtcagcatccaaaaccttcagaggccagcacaaccctacctgaaagccatctcaagactcctcagatgccaccaacaaccccatccagcagttccttcaccaaggtcaccaaggacaaggatatcaaataac

SEQ ID NO: 294079 - DNA, 1000 bp, Homo Sapiens; identical to SEQ ID NO: 222501

SEQ ID NO: 294080 - DNA, 1000 bp, Homo Sapiens
gagaaggaggcccagcaagtgtatggtgggaaggaggccaggacggaggagatgaagtggcggcagtgggcggacgactggctggtgcacctgatctcccccaatgtgtaccgcacgcccaccgaggctctggcgtcctttgactacattgtccgcgagggcaagttcggagccgtggagggtgccgtggccaagtacatgggtgcagcggccatgtacctcatcagcaagcgactcaagagcaggcaccgcctccaggacaacgtgcgcgaggacctctatgaggctgctgacaagtgggtggctgctgtgggcaaggaccggcccttcatggggggccagaagccgaatctcgctgatttggcggtgtatggcgtgctgcgtgtgatggaggggctggatgcattcgatgacctgatgcagcacacgcacatccagccctggtacctgcgggtggagagggccatcaccgaggcctccccagcgcactgaatgtccccgcgcagagcagagggaaggcagcggaagacgccagctgccagggcctggggccactgggccagcgcctggcgatactggttgggggcaggatcattctgccccttgtccacgcacccccaccagccctctcgcttctaacacagggcacctgctggggctcagggatgttagggacgagttccagccctgccactgccctggggcgacccctccctgtccctgcctccctgctctgccgcccctcttcctggaccctcagtggctgtcccatggctacatcctgtgggtgggggccctcgacaggacagcaggacggtttgttttcagtggaatcccatccctgggttcccctggttcccactcttcccaagcctcccgggactgggacatgtttgcaataaaggaaaggtttgtggcgcctgtcatggcaggcatctcatggaaaaaaaaaaaaaaaaaaaaaaaaaaaaaaaaaaaaaaaaaaaaaaaaaaaaaaaaa

SEQ ID NO: 294081 - DNA, 1000 bp, Homo Sapiens; identical to SEQ ID NO: 119034

SEQ ID NO: 294082 - DNA, 1000 bp, Homo Sapiens
ataaatggcaagtatctagggtctcaaatcctgaaggaacaagtatcagatatatgtataatcggagaacacattgtcacaggcagcatacaaggattcctgtctataagagatctccacagcttgaatctcagcatcaacccattagccatgcgactgcctatccattgtgtttgtgtcaccaaagaatacagccatattcttgtaggtttagaagatggcaaattgattgtagtgggtgttggcaagcctgctgagatgcgttcaggtcagctttctcgaaaattttggggatcgagcaagcggctcagccagatttcagctggagaaactgaatataatactcaagattccaagtgattgttatttccattttctgttatgattactgaaacctgatttattgctttgtcactttaaccacatctctcaactctctgcaatgttgcaaggcttttatccctgaaaatcatttacagataaccacaatttgctgtggtatataaactaattcttggtctatactaagatgtatttgagaaaatacatttgatttgattttgtggcccattcctaaaggtcattgtatccatttttaaaacaaactaaaatgagaacattaggttcaattttcttattattccaaatgataaaatttaagatttttctaataaaagagtacagataatgggacagttgagagagatggctttaaatacattcttaagtaatcattttcctatttactgaccactgtaatgaaaatatatcaatttatttatggaactcctgattggggataatattttaaaggtatctgttgcacacttggattttcaaaactcggtgaaagttacaagtttgcatggtaagaataaaataagaatattgaaactggtacattagctaattctattactacttagcgtgtttctaatgagaagttactgaaatctattactgtccttaataaaaattgagtagaaaaaagtggaactag

SEQ ID NO: 294083 - DNA, 738 bp, Homo Sapiens; identical to SEQ ID NO: 224667

SEQ ID NO: 294084 - DNA, 1000 bp, Homo Sapiens; identical to SEQ ID NO: 224668

SEQ ID NO: 294085 - DNA, 1000 bp, Homo Sapiens
gtttgggatgtggacagaggggcagggggctgggagaaggctaagccgaggggtcctgtttgtgcctccccttagtcccttccctcccgatttcccgattcccccaccctccctctacacttgaggaccacagttgggggtgtagggaccacccagaccctggttgaattgtttctctctcctgcttgttccaacccttttcactctgggcttctcccaaaacccatcctggcatgacctgcaactccaggtggtggatttgttccaaagcctcaatccctaccccctccaaggggcaggtttccagtccagcctcagagatcaggctctgggacccctgcctggggggtggccttcatgcactagccacttccgcaggtgctgactcccgcactccctggcattttttgcagacaagggcttgggatggaccctcagccccatggtacgccctgcccagtttccagttgccctgtccacttaccctaggtagccccccaccccatcagtgccgagtccttgtccctacctccagcttcctccagcctcaaaccgcctctggatctagctgtccttctccgagtggcacgcctgccccaggatgccccctttccctcccccccatgcccagagccccgcctgcctcagcgggtcaggccttcagaacactgccacccacccagttttataatcccgctccctctccaggcaaccccacccaccagcctaggcctgctcctccacccttcccgggaggcagccccgggatgctgagagttggtggaggggccaggctggacgcttcctgtgggagtcccctccagacctggctggcccctgcagccacagaaaccacgatggcaaaaaatctcattggttctcaaggactaacctgtgggggaaagcaatagagacactctttttctctcttttttttaaagatttatttcttgaaataataaatattttattgggatgtgaggtgcagaagaaaaaaaaa

SEQ ID NO: 294086 - DNA, 1000 bp, Homo Sapiens
aaacataacctcccaatcttttttgttagtccggccgtcaatttgtatagtaccaatttctgtaaattctctcaattcattgaagatcgtagggttaaacttttttgtgtgtgatttaaacttacaaacaagtgaagaagctatcgtttatttcagacgaggctgtagtttaaataccaaaagagggaaaataaaaaagaacctttgtaaaatatatctgaacctaatggtttgtacaactggagaatcgttctagattagttaccaattaaatataactccgccagtgtaagggtgtgaggtgcagttgtccaggagacgattttgtatagtatttttcttgtacattacttccagtaaatatttgaaaatatattgaagtaaacttgattttttttttttgtcacaagaaaatattaagagttattgttgcagttctgatgagctgcaggttttttgaactcacttctggaggtgcagagccacaaacgcactttcggggcctagttttgctcgaatatgaatttagataggtatcaagctgtaactaagacaatatttgataaatgttggatgacatttaatttaatggagcatgtacttatttgcatttgctggcagttcaggcatagttaaagtgagagttctcctatatttcataataagtgggtctgccaaaacccatgtattaaataaattgtccaagtgaaactcgactaactttggcctttgtgtatttcctgaaggtaatattgttaactgttaataaatacttctgacactacatttaaatgtttgcagattctgcaaactaattgctcattgtaatgttgaaataatttggatatttcacattgaaatgaaaagcctttctctggagcattttagatttgcattttaaatgcatgaaatgtaattgatttatttgtaatattttaaatggtattaataaactcagataaaagacaaaaaaaaaaaaaaaaaaaaaaaaaaaaaaaaa

SEQ ID NO: 294087 - DNA, 1000 bp, Homo Sapiens; identical to SEQ ID NO: 224669

SEQ ID NO: 294088 - DNA, 1000 bp, Homo Sapiens
tgctctcagctgggttttggagcctcccttctgccttggcttggacaaacctagaattttctccctttatgtatctctatcgattgtgtagcaattgacagagaataactcagaatattgtctgccttaaagcagtacccccctaccacacacacccctgtcctccagcaccatagagaggcgctagagcccattcctctttctccaccgtcacccaacatcaatcctttaccactctaccaaataatttcatattcaagcttcagaagctagtgaccatcttcataatttgctggagaagtgtgtttcttccccttactctcacacctgggcaaactttcttcagtgtttttcatttcttacgttctttcacttcaagggagaatatagaagcatttgatattatctacaaacactgcagaacagcatcatgtcataaacgattctgagccattcacactttttatttaattaaatgtatttaattaaatctcaaatttattttaatgtaaagaacttaaattatgttttaaacacatgccttaaatttgtttaattaaatttaactctggtttctaccagctcatacaaaataaatggtttctgaaaatgtttaagtattaacttacaaggatataggtttttctcatgtatctttttgttcattggcaagatgaaataatttttctagggtaatgccgtaggaaaaataaaacttcacatttatgtggcttgtttatccttagctcacagattgaggtaataatgacactcctagactttgggatcaaataacttagggccaagtcttgggtctgaatttatttaagttcacaacctagggcaagttactctgcctttctaagactcacttacatcttctgtgaaatataattgtaccaacctcatagagtttggtgtcaactaaatgagattatatgtggactaaatatctgtcatatagtaaacactcaataaattgcaacatattaaaaaaaaa

SEQ ID NO: 294089 - DNA, 1000 bp, Homo Sapiens
accacttgggcttgggatgtccttaacccatttatgcctgaggttgcaattttttgaatttttccaatcacaccttggcgatgaccttgagcagtaggatataaataactcccacatgcttagtgttccaataatggaacactaggcataaacaggttttaattggctcctcagtcaaccatgaccaatatctctatctcagcttctgctgatgccctagctcagggctctgcattccgtgccagggacgcctcagccccttaacatggatgtgccacatgacaggcaataatatattggccccattagcccttcctggagcagtcataatgaattacagtcatgacaggcacatgtaagaaaccaaaatttgctaaatatgtacatgagtcttcatcacagcatcgtttatgaaaacaactaaatattcactaatggtgccagtggaataaatcagagaacatcccctgctacgtaactctctgcatacatcaaagagaatggtgtggctttgctttttcaacaatctactgagtggccatgggcatgtggatatggccatgaatgagcaagatcctctctgatcctgtagaagttaagttctaccagataacttgctgcttcaacaaaaagatttacctttttaaataaatgttgtagaatacttaaaaaaaacaaactagaatttgcctgtgtgcagccagtaacatgtctatttaacctggacaccttttgaggaatattctcagattgcccccatgctgtttataagacattgttccttatacacctgtttatgaatgaaaagaaacataaggagtgggtacaaagacttctatctatgaatgattaaaaaggctagagtacgaatacttcttgaacctttggtactaaatgcttttcatgttctatataaatgtagaaaacattttacaaatcctgtaaataaactgtttattttttatagaaagccaaaaaaaaaaaaaaaaaaaaaaaaaaa

SEQ ID NO: 294090 - DNA, 1000 bp, Homo Sapiens
aggcccacctctccaaggaagacaagaacgggcacgatggtgacacccaccaggaggatgatggcgagaagtcggattagcagggggccgggacagggaggttgggaggggggacagaggggagacagaggcacggagagaaaggaatgtttagcacaagacacagcggagctcgggattggctaaactcccatagtatttatggtggccgccggcgggggccccagcccagcttgcaggccacctctagctttcttcctaccccattcccggcttccctcctcctcccctgcagcctggttaggtggatacctgccctgacatgtgaggcaagctaaggcctggagggtcagatgggagaccaggtcccaagggagcaagacctcgcgaagcgcagcagccccggcccttcccccgttttgaacatgtgtaaccgacagtctgcctgggccacagccctctcaccctggtactgcatgcacgcaatgctagctgcccctttcccgtcctgggcaccccgagtctcccccgaccccgggtcccaggtatgctcccacctccacctgccccactcaccacctctgctagttccagacacctccacgcccacctggtcctctcccatcgcccacaaaagggggggcacgagggacgagcttagctgagctgggaggagcagggtgagggtgggcgacccaggattccccctccccttcccaaataaagatgagggtactaaagttgtcttggtttttattttattattatttttttctttttccagtatactagcttgtcttttaagaaaggggatattaaaaaaaaaaaaagacaaaagtgtttttaaaaaaaagcaacacccacacctgtgtctgtatatagtcagcttatctcgtgttcaatcgtctgatctctacagagagaagtggaaaatgctgtatcaagggtgggcttagctgtgcctttccaataaagatgtgagaagcttcaaaaaaaaaaa

SEQ ID NO: 294091 - DNA, 1000 bp, Homo Sapiens
ggaccacattgctggggggcaaggaagcacaggccctgggagtcccggggggctccgctgagacgacagaagccgagtggggtcctgcggcctggcccgaggacaaaagggcccgccttagtgttgcagccccttgccaaccgcgccccacacattttgtggccctcatggtgaccgagcctgggctacaagcagaagtgaccaaggcccaggaatacctggtccacgtggccccacactgcgccaacttcctagtgccctctcagaacctacacctgaccctggccctgctgcgactggcaggcgctggggaggaggccgctgccattggagctctgagacgggccctcttggccccggggctaaatgcaccccctcggctgagctttagaaagctggtcctcctgggcccgcatgtgctgtgtgccccaccctctcccacactggaaagcatggcacaagtgctgagccagaggctggaagccgaggggctgagtacactacagtctccagggcagctgcacccccacctcaccgtggccaaggtgccccatggttcccaggtccacctccccaagctggagttcaccctcagccaggaagtggggtgccagcccctgcagacactctggctgtgccgtatagggaggacaggggggcctttccagcccctggctgagatccgcctggagtgacacccccagacctctggaggagacaatggatgcaaacagcccacacaggaaagacaaagcaggagcgtgcacgctctctctttctctctttaattttggtttctctcaagcttccaaatggtgctcagtgctccaaggaaaggaaggaaggaaggaaaaggaggggagaggaggggaaggggaggcagaggaggaacatctggaaaaaaagcagcctgacagtccagctgtttgcaaactcatagcacatcctccagttacatggcagaagagggagggagggagggccaaaaaaaaaaaaaaaa

SEQ ID NO: 294092 - DNA, 1000 bp, Homo Sapiens
gaaaacaaattttgaaaaataagacaaatccattctcttcttcaattcagtctaatatgcattgtagtgtcttttaatcagtcttatcctctaagtcaacttcattttcctctttgtgaatacccatagcaatatgtaagattttattgaagtttcctgtgataactgaggaacactttgctatgcctcactgcccaatagggtgggtcatcaattaggagaaatcccaaattataaaagccaacatatgccgtgacctacgtaggaaaagatgtatttgtgcatcttctttctgggtagttaaaaattactccctcttttctctagcattttgacatttcagactcaatgctctgatctctagggagtgtgattattcaaactaatgagaggacaagaagacacagttttagaatctactgctgctaaagcacattaaaaacaaatcctggtttttaatgtatgcatagtttcatatttaatgaatatgctttcattaaatagggaggtagatttgaaaaaactgttataaagaaatgtgccctttggggaatgaatacttttgttcatgtctagcccactgggaattttgttttcaccttatactgagtcctttttctaatgtaaaaatatttcttccaagtttgatttctgtatcagggtaacattgagaacacacatatttctgtttgaggatttgtgacttcctatggaaacagtcttgcatctatgtatttacaaatgaaatttaaagtattcttaaagctttgccttaaatactgcttgcatactgatttacttaatgctaagcatggcaggggttataaatttaaatactataagacctggctgaatcccagatgtatcaataaattgttatagtagcttatggaaaatgctattaaagataaattttcatacattgtatttttagtcaagtaaaatatggatgaaaattaataaagtactgtcaagggaaaaaataaaaaaaaaaaaaaaa

SEQ ID NO: 294093 - DNA, 1000 bp, Homo Sapiens; identical to SEQ ID NO: 224672

SEQ ID NO: 294094 - DNA, 1000 bp, Homo Sapiens
tttatgcaaaaataaatgaattgaatgaggaattaaaagcaaaagaagaagaaaagaaaagttttgatcagacacttgaaatattgaagaacaaatttataactatgagatttaaaagggaacatgcacaaactgtgtttgatcattatatgcaagagaaaaaagactgtgaagagagaatctttgaggaagatcagagatttagagtgctccttgctgtaagacaaaaaactcttcaagatacccaaaaaataatagctgattcacttgaagaaaatctgcgtttagctcaagagtatcaacagctacagtttacattcttaaaagaaaaggacaattatttcaatatatatgataaacagctatcacttgatacttcaattagagataagaaacagctctgtcagctgcagagaaggatgcacacactgtggcaggagcacttcaaactggtggtcctcttcagccagatgaggctggccaacttccagacagactctcaggagagtattcagaaaatattagctgtgcaggaggaatcttcaaatttaatgcaacacatcttaggtttcttccagactttgacagatggcacatgcgaaaacgatggttaagcaaacaaccaatgtatcttggatgctgaaataaaagacaagaaaagtcacacagttcagataacagtgtaattggacattcacctgtttgccatttcacacttccatgaacgaaaaactcactcacctcccagcatgctttgccactcttttactcacagcaaatccataacaatgaaacaggtgactttcatgctgctgtcaggaacgatctaatttcagctctgggtgactgattgcaattggctttgcctcatctgataattaatctatgtcaccattaattggaagagagaataattactggcggtgttgacagtgactgttcgcttccccagatttccctatcgtcttggcccaaataaaggctttgccattcagtactt

SEQ ID NO: 294095 - DNA, 1000 bp, Homo Sapiens
gttctccagaaaaccaccatatagcagattagattacacggatgcaaagtttgtggatgtcatccattctgactccaatggtttaggcattcaagagcccttgggacatatagatttttatccaaatggaggaaataaacaacctggctgtcctaaatcaattttctcaggaattcaattcattaaatgcaaccaccagagagcagttcacttgttcatggcatctttagaaacaaactgcaattttatttcatttccttgtcgttcatacaaagattacaagactagcttatgtgtggactgtgactgttttaaggaaaaatcatgtcctcggctgggttatcaagccaagctatttaaaggtgttttaaaagaaaggatggaaggaagacctcttaggaccactgtgtttttggatacaagtggtacatatccattctgtacctattattttgttctcagtataattgttccagataaaactatgatggatggctcgttttcatttaaattattaaatcagcttggaatgattgaagagccaaggctttatgaaaagaacaaaccattttataaacttcaagaagtcaagattcttgctcaattttataatgactttgtaaatatttcaagcattggtttgacatatttccagagctcaaatctgcagtgttccacatgcacatacaagatccagagactcatgttaaaatcacttacatacccagaaagaccaccactttgcaggtataatattgtacttaaagacagagaggaagtgtttcttaatccaaacacatgtacaccaaagaacacataagatgccttcttccatcaaatgcacttgcttgtgaattaatggacttgtaaatgaaacaatgcaatcagtcttttataatgcactgttcaatttgagattcaagtatttctatttcttggaaaaaattttaagaatcaaaaataaagaaaataaaaaatgcatacagttaaacattccaaa

SEQ ID NO: 294096 - DNA, 757 bp, Homo Sapiens; identical to SEQ ID NO: 224674

SEQ ID NO: 294097 - DNA, 1000 bp, Homo Sapiens; identical to SEQ ID NO: 119039

SEQ ID NO: 294098 - DNA, 1000 bp, Homo Sapiens; identical to SEQ ID NO: 119040

SEQ ID NO: 294099 - DNA, 1000 bp, Homo Sapiens
gggtctctctttacagatttgcttaactaaaaacagcaccttggagccagtgttggctgtttatgtcaatcccttcggaggcagccactctgagagctggtttatgcctgtgaatgaaaacagctttccagactgggagcggactaagttggacctacccctgcagtgttataactggacattaactctggggaacaaatggaagacattttttgagacagtacacatctacctgagaagtcgcatcaagtccaatggtcccaatggtaatgagagcatttactatgaacctctggagtttattgacccttcccggaacctgggctatatgaaaatcaataacattcaagtgtttggctacagcatgcactttgaccctgaagcaattcgggacctgattttgcagctggactacccctatactcagggatcccaggattcagcacttttgcaactactagagatcagagaccgtgtaaataaactctccccacctggtcagcgtcgtctagatcttttctcttgcttgcttcgtcatagactcaagctgtctactagtgaggtggtgaggatccaatctgctctgcaggcgtttaatgccaaattgccaaacacaatggattatgacacgaccaaattatgtagttaaccataaatgtcaagcacaacccaaaatcttgaaggagtttttacagtgcttttgtggaacagtttatgtttggaagagtaaatttaaattgtcttttcaatatctgtcttatatcagtcaataacattggatggcaatttacacacatgaacttgctgacaatgaatatattatacagcagttttggtttatgaatgacataaatactgacaccagtctagaagacattctactttttacaataaatttcatttgtaattttatatgttccgtggcaatgcttttgtgcattacatcctctagagggaacataaaaagataccaataaaattttgtagctgaacagttatt

SEQ ID NO: 294100 - DNA, 1000 bp, Homo Sapiens; identical to SEQ ID NO: 119042

SEQ ID NO: 294101 - DNA, 1000 bp, Homo Sapiens
tatacccaaaattaacttatgctcatatattaggatgtgagaatatcatctgtttatggacacatgaaacctcctaatgacctggaattgttagaatatttgactttttatatgcaaagtttttcaaccaagtggtttgtctaatatttaaacatgtactggcacaatttgtgatgaaaatattagcacatttgcaataatgtttctccataacagagaatgttaatggataccagaattttatttttgtatttatgttcatagtacttttcctcttgtctactccagacagttattccataaagcatttgtataattaaaaggaaaacagaaaaaggaaaagtaggcaaatgtgaaaatagtttcaatatatcttatgatttcttaatgtaaaatgttttgttgaagtatatggctatcatgactaagtgctagaatttatagttacaggcggtgtccttttaaatgtggaaaggcttttaaaatattttaaaactggacctgtattatcctgaatacactattttgaaaatttttaaaaatgacttctttattttgctttaccgtatgtttatatctaattgacatattgactaatgtttgaaagaattcaaccataagttaaaatctgaaggttatctttatcatgtttcatccctgtctgaagatttcctagtcttcttatgtaaatcacatgactcatgtccgtaaatgaactatgaaagatatcgatcagtttatgatcattgacatgtgatttcaaaacacagtgttcttttaaaaatctataatatgtcaaaatacaagttttttttttttacatcgttttagtaagttaatttcatttatttactttggagctatatttccacttagaaaaactaaggtaattttacaatatatgctgagattaaaaaccaaggtaaaaatgatcaaacatatatgaaattgagtcttagatttaatgaatttcactcgaaaataaatgatcagaagaatt

SEQ ID NO: 294102 - DNA, 1000 bp, Homo Sapiens
gaagttgaaaattgttgcgatttattttttcaagagatcatgtttttaaagtgtcttttgcagagttttaagttgttctgtctgaactctgctgtgatcccatgatgtgaccctgatgggctggacttgcccctccggtagccttccttggccctcccagcgaggggcacccttcctctgtgccccagtgggcatcaccgtcgatctcgctggctgaatgaagaagaccgtgttactgcagaacctgccaagtctgtcatcactgtggggtgtagcctgcctcagagggacctgcaatcacctctctgagctcagtggtattttgagaatttaatgtttaactgtacccctttccctcaggaagatttaacatttgcttgggaatgtgattttgctcccaccctaaggaatttttatcaccaaaatgaatgttaatgaatttaaaacccatggtttatcattggcaagaggcaagttgacttcatcctgtcattccagcctggggtctgccagccagccctcctccccgacccagcgcctaagctcacagagtgtcgtcgcccacctccctggtccttgctcttgttaacccaagatgctgctacacagatgccaaatggaaatcttccacagggctttttcagtaaacacgtgatgtggagtgcaagctcctccccttcccactagaacatactttaacagaaaacgagtcggaccttctagctgcactctgtactgtgtgccgagaaggcatttctagacccgtgtttttaaaggagggaactttggggattgccagcccctgctcctcctcccagggagccaactgtccctcctcccctgtccctgggcccatggggcccggcagtggctgtgtcccctgcctgagggctctgtgcctcctgcctcagatgcggcctgtgccagagaggctgcctgtacagccagggtcagtttggccccaaacagggattcagaaaccaaaaaaaaaaaaaaaaaa

SEQ ID NO: 294103 - DNA, 1000 bp, Homo Sapiens; identical to SEQ ID NO: 119044

SEQ ID NO: 294104 - DNA, 1000 bp, Homo Sapiens; identical to SEQ ID NO: 119045

SEQ ID NO: 294105 - DNA, 1000 bp, Homo Sapiens
tacttggtagtgaatttttaagcccaaactatgagcatggtgcccgtcgcagcaagccgttttcagagctgagcgacagtgacctggaggagaagtcgagcagcctttctccgtacgtgaagagctcaagttcacataacgaggttttcctgccgggatcacgtggccctcggcgaaggaaatccaaacaacattttgtggaaaaaaacaagctcactttgggattacccaccccgaaaacggactcttatcttcaacttcacaataaaaaaagaggggaatctcatccagaacaggtcattttgagagtaaattctctcccacgtgatggattcaaaaccttttggagccagtaaacttagttccatttcacaggtgcacataaagaccttcctgcccacctcctatggacatgtccagggatacaggacaagagtggggttagaatggtagagtccaccactcttactggaaagagcttgagatttatcacctgctaatgtgaggtcattttcaaatacaaaggagaggttattatgttaaatgtggttgcccttagacctattccaaatcccaactggtatttttttttaacatattctaacctgttctaacctctaagcattttctaatggaacaaaatagatgaggtggatgaacatttgtggcttttcttcagagactcccttttttgtcttaaagaattacgtctggtggcacgttggctcatgcctgtaatcccagcactttgggaggtcgaggtgggaggatcacttgaggccacgagttcaagaccagcctggccaacatggtgaaacccatctataccaaaaatacaaaaattagccgggtgtggtgatgcacacctgtaatcccagctactcgggaggctgaggcacaagaatcgcttgaacacgggaggcagaggttgcagtgagccgagatggcgccactacactccagcctgggttatagagtgagactctgtctcaaaataaat

SEQ ID NO: 294106 - DNA, 1000 bp, Homo Sapiens; identical to SEQ ID NO: 119048

SEQ ID NO: 294107 - DNA, 1000 bp, Homo Sapiens
ttggagaaaacaaacgaagaaaaacaggtagatttaaaatctgcttttgatgctattttcttaaaaattgtacttactgcctttccatgcacctggatgcatgaaaagatgaataagtgatggtcatggttatgggtaggaaaataagatgccaatagctcttcacattataaacaatatggcttaatgcctcgataaggagaaatgatttttaaagacagtatatattaccaactgtttgtagtatcctataactttgttcatacttaagttgtatctctttcctttttgtacttcatggcaaaattaattttctaaaggattcagagaggcgtttatattttataacatttattagaaataatttgttccaccactagattactgtattttatggaatctaagctgtatatgtgtacatttgtatacatgtatgtgtaaatgtaagcctgacgtgggttcagattccagttttgtcatcagcaagaggcctcggacccatgacttactgcctctgagccttggctttctgtgtatctctgccactgggataatggtacacataacagtggagtggggaccaatttctaaaactcatggcacctagtctttggtccataaatggtgtttgttattttagacactgagaaaaatcttattcacagaagttgcagattatttctgctagtcacttttttatttcttgagagctgccactcatttaatatttctcatttatgagaagagacttgactgatttagataaaagacgaattaaggaaaacctttgaacgtgagtagacaagcttcatatatctgtaaagtgaatattgaatggtagcttgagtcattcgtacttatcacagaaaagaattgaactcccagtcatacacctgtaactgaaataccaaactgtcttaatggagatgtaatgaagtaagatggtcacatctttaactaaacttataaaaattgaaaaaaaaaaaaaaaaaaaaaaaaa

SEQ ID NO: 294108 - DNA, 1000 bp, Homo Sapiens
cctaaagaaagtcttttaggacaccacccgtcccccgccctgctccagagcgtggaccgaggaggtctttgtgccctgagcagggaccggataacaccagaaagagggatgctacacgggggtttctcctctcaagataagtccctgagaattattttcaagcacttttttcttttttacctttaagtttttcttccttttgctttaatatactgaacacttggaagtcacctttacttgcctttgcagaaaacagaacttagccaaacctaagtaagagtcatgcctggatattgggataagccagtgtctagaggcctgaaggaaccgctgaagaaccagaggagatctcctcttccaagacacgtttccttccttcccttctttcctctttcctttccagttaaaaaaaaacaaaaacaaaaacaaaaccctttgctgtatcactgtgtggaaaatacctccaaagctgaaagagccaggtatttacctgatgagcagaggggaccactgattggcagaaaacttccctacgttcagttgttagatatgcaaattgataaggatctaacactaggaaaataaaggcgagttttggtttggttggtttcagtcatttgtttggggagatataaaaggctcaggagagcaggcttttgcttttgcttttgtttgtttcttcccccacccagtgcagaaatcaggatcagggaaagattttattaaatgccaatagatacagtatttaagcatttataaactgaaaccttttcatgtgaagataatgcatattttaccgtttatccagctgttaacattttgtaatcagtcaattcaatagaattattctggataattctatatctagaatataaaatctggtcttatagctagacatgatgatggtccccaaaccattgatgttctgttatgtactgtaatgggaagcgattctgattttgttttatatgggttctctggttctcaaaaaaaaaaaaaa

SEQ ID NO: 294109 - DNA, 1000 bp, Homo Sapiens; identical to SEQ ID NO: 224679

SEQ ID NO: 294110 - DNA, 1000 bp, Homo Sapiens
actgacagcaccaggaaaccaaatgatgtccctgcccgccgcccccgccgggcggctttcccccttgtactggagaagctcgaacacccggtcacagctctctttgctatgggaactgggacacttttttacacgatgttgccgccgtccccaccctaacccccacctcccggccctgagcgtgtgtcgctgccatattttacacaaaatcatgttgtgggagccctcgtcccccctcctgcccgctctaccctgacctgggcttgtcatctgctggaacaggcgccatggggcctgccagccctgcctgccaggtcccttagcacctgtccccctgcctgtctccagtgggaaggtagcctggccaggcggggcctccccttcgacgaccaggcctcggtcacaacggacgtgacatgctgctttttttaattttatttttttatgaaaagaaccagtgtcaatccgcagaccctctgtgaagccaggccggccgggccgagccagcagcccctctccctagactcagaggcgccgcggggaggggtggccccgccgaggcttcaggggccccctccccaccaaagggttcacctcacacttgaatgtacaacccaccccactgtcgggaaggcctccgtcctcggcccctgcctcttgctgctgtcctgtccccgagcccctgcaggtccccccccgcccccccactcaagagttagagcaggtggctgcaggccttgggcccggagggaaggccactgccggccacttggggcagacacagacacctcaaggatctgtcacggaaggcgtcctttttccttgtagctaacgttaggcctgagtagctcccctccatccttgtagacgctccagtccctactactgtgacggcatttccatccctcccctgcccgggaagggaccttgcagggacctctccctccaaaaaaagaaaaaaagaaaaagaaagaaaaaataaatgaggaaacgtgttgca

SEQ ID NO: 294111 - DNA, 1000 bp, Homo Sapiens
tccccatatcttctctcccccacctttatcgaggggtgctgctttttctccctcctcctcaagttcctttttgcaccgtcaccacccaacaccttccatgacacttccttgctttggccagaagccatcaggtaaggttggaaagagcctctgacctcccttgtttagttttggaaccatactcactcactctccaccagcctgggaaatgaatattgggtcctcagccctgccaccctctgctgtcatcagctgatgcattgtttttagctcaggttttgataaggtgaaaagaatagtcaccagggttactcagacctgccagctctcggagtccttggtggttgaacttggagaaagaccgcatgaagatacttgtaagcacacatgatccctctgaattgttttactttcctgtaactgcttttgcttttaaaaattgaagaagttttaaacagggctttcatttggtcatccttgcaatccattggggtctagtttggaatctgacaactggaacaaaaagaaccttgaatccggtgcatgccttggttttggtgctgctgctgcttcccaagatcctcagcagggattaagaaggaacccggtgtgcacagcagatccccgaaattggtgggcttgacctcctggcaaattgctgcgtctttccacttgctgttcaggaccactaaatgctgaaatgtggatgcataccgaaataaaagcaattcattgtgtactaaaggttttttttttttttttaatttagtatttgtgtaaaaccaccttttgaagcagcaactatcaagtctgaaaagcaattgatgtttccattaatctttttctggggggaaaaccttagttctaaggatttaacatcctgtaagtgaagtttaacataacagtattccataagcagcctttttattgtcagaccattgcctgattttaatataataaaaaaaaagtgtgcgttaatatttaaaaaaaaaaaaaaaaa

SEQ ID NO: 294112 - DNA, 1000 bp, Homo Sapiens; identical to SEQ ID NO: 119049

SEQ ID NO: 294113 - DNA, 1000 bp, Homo Sapiens
tctttcaacctcagtgattggctctgtgggctccatgtagaagccactattactgggactgtgctcagagacccctctcccagctattcctactctctccccgactccgagagcatgcttaatcttgcttctgcttctcatttctgtagcctgatcagcgccgcaccagccgggaagagggtgattgctggggctcgtgccctgcatccctctcctcccagggcctgccccacagctcgggccctctgtgagatccgtctttggcctcctccagaatggagctggccctctcctggggatgtgtaatggtccccctgcttacccgcaaaagacaagtctttacagaatcaaatgcaattttaaatctgagagctcgctttgagtgactgggttttgtgattgcctctgaagcctatgtatgccatggaggcactaacaaactctgaggtttccgaaatcagaagcgaaaaaatcagtgaataaaccatcatcttgccactaccccctcctgaagccacagcagggtttcaggttccaatcagaactgttggcaaggtgacatttccatgcataaatgcgatccacagaaggtcctggtggtatttgtaactttttgcaaggcatttttttatatatatttttgtgcacatttttttttacgtttctttagaaaacaaatgtatttcaaaatatatttatagtcgaacaattcatatatttgaagtggagccatatgaatgtcagtagtttatacttctctattatctcaaactactggcaatttgtaaagaaatatatatgatatataaatgtgattgcagcttttcaatgttagccacagtgtattttttcacttgtactaaaattgtatcaaatgtgacattatatgcactagcaataaaatgctaattgtttcatggtataaacgtcctactgtatgtgggaatttatttacctgaaataaaattcattagttgttagtgatggagcttaaaaaaaa

SEQ ID NO: 294114 - DNA, 1000 bp, Homo Sapiens
tagtggcctctcaaaggctgggcgcatcccaagacagccagcaggttgtctctggaaacgaccagagttaagctctcggcttctctgctgagggtgcaccctttcctctagatggtagttgtcacgttatctttgaaaactcttggactgctcctgaggaggccctcttttccagtaggaagttagatgggggttctcagaagtggctgattggaaggggacaagcttcgtttcaggggtctgccgttccatcctggttcagagaaggccgagcgtggctttctctagccttgtcactgtctccctgcctgtcaatcaccacctttcctccagaggaggaaaattatctcccctgcaaagcccggttctacacagatttcacaaattgtgctaagaaccgtccgtgttctcagaaagcccagtgtttttgcaaagaatgaaaagggaccccatatgtagcaaaaatcagggctgggggagagccgggttcattccctgtcctcattggtcgtccctatgaattgtacgtttcagagaaattttttttcctatgtgcaacacgaagcttccagaaccataaaatatcccgtcgataaggaaagaaaatgtcgttgttgttgtttttctggaaactgcttgaaatcttgctgtactatagagctcagaaggacacagcccgtcctcccctgcctgcctgattccatggctgttgtgctgattccaatgctttcacgttggttcctggcgtgggaactgctctcctttgcagccccatttcccaagctctgttcaagttaaacttatgtaagctttccgtggcatgcggggcgcgcacccacgtccccgctgcgtaagactctgtatttggatgccaatccacaggcctgaagaaactgcttgttgtgtatcagtaatcattagtggcaatgatgacattctgaaaagctgcaatacttatacaataaattttacaattctttggaaaaaaaaaaaaaaaaaa

SEQ ID NO: 294115 - DNA, 1000 bp, Homo Sapiens
cagaaggttctgaggaggggaggagctggggcccccactcgccctcctgttgccaggatacaggcccaggaaaaaatgccacagtgctggattaatgtctagacaacgtgacctttcccctggttctctagatataattgggacccaaattgtccggtgtcatgagctgacagcagggatgaaggaggggtctgttctcggtgccccgaggggactccgggagagggagagggcagcccactacctgcgtgggggctgcagggggacgagccagggtcgcccacaaaggcgctttctgtggaggggacgtcacctcttccatcagcgatgacgcagctctgagatcacagtgtcctcgcagtggctcccgttaactccctgctgcccgtcctgccaggctggtgccacgagaccctcggggctgggccgtgggacaggtgcctgcccagccctgcaaacacatccagcaggtgtcgagggctgccaagcacagacttctgctgccagccatgcacagtgccagctgcgacagcaacgcctctgccaggagactcggaggagaccggccctgacgctcctgtcggggggagctgctgcacactcaggcaggatgcaggggtcctgagggggaccctcggctcacccacggctcccgtggccggtctggtcctggtatttatctcaacttcattgttgtccagaagctgctttttattatttgtgaccgtgaaaggatggaaacaaattcctgttttgagtcaaagctacctgcgtccaccgggccacagagcggggacacggccgtaatgtggagtcagtaagccaaggttgtgagaagattctcaggaggggggtccagggagggagaactgagggctggggttccgggggacattttactttttattccaggcagcgctgtactggctggggcctcaaatgctgaataatgctcctgttggacttcagtaattttaaaaaataaaactgtttaaaaatc

SEQ ID NO: 294116 - DNA, 1000 bp, Homo Sapiens; identical to SEQ ID NO: 119050

SEQ ID NO: 294117 - DNA, 1000 bp, Homo Sapiens; identical to SEQ ID NO: 224682

SEQ ID NO: 294118 - DNA, 1000 bp, Homo Sapiens; identical to SEQ ID NO: 224683

SEQ ID NO: 294119 - DNA, 1000 bp, Homo Sapiens; identical to SEQ ID NO: 224684

SEQ ID NO: 294120 - DNA, 783 bp, Homo Sapiens
atgacccgccattggccctgggaggtgagcctccggatggaaaatgagcacgtgtgtggaggggccctcattgaccccagctgggtggtgactgcggcccactgcatccaaggcaccaaagagtactcagtggtgcttggcacctccaagctgcagcccatgaacttcagcagggccctctgggtccctgtgagggacatcattatgcaccccaagtactggggccgggccttcatcatgggtgacgttgcccttgtccaccttcaaacacctgtcaccttcagtgagtacgtgcagcccatctgcctcccggagcccaatttcaacctgaaggttgggacgcagtgttgggtgactggctggagccaggttaagcagcgcttttcagccaactccatgctgaccccagagctgcaggaggctgaggtgtttatcatggacaacaagaggtgtgaccggcattacaagaagtccttcttccccccagttgtcccccttgtcctgggggacatgatctgtgccaccaattatggggaaaacttgtgctatggggattctggagggccattggcttgtgaagttgagggcagatggattctggctggggtgttgtcctgggaaaaggcctgcgtgaaggcacagaatccaggtgtgtacacccgcatcaccaaatacaccaaatggatcaagaagcaaatgagcaatggagccttctcaggtccctgtgcctctgcctgcctcctgttcctgtgctggctgctgcagccccagatgggctcctga

SEQ ID NO: 294121 - DNA, 1000 bp, Homo Sapiens; identical to SEQ ID NO: 115102

SEQ ID NO: 294122 - DNA, 1000 bp, Homo Sapiens; identical to SEQ ID NO: 119052

SEQ ID NO: 294123 - DNA, 1000 bp, Homo Sapiens
ccttttttaaatacaatactgatagttagaagaaaactattgtactcttttgttttagtggagaaataatagatgtctgttcatgtgttaagtgttatagcaaaaaaaatacacatatggttaagttaatgaatagtttttgttttatcagaatggcaacagacagaagtactttgtagagattgacttcctaagctacttaagacaacttgcaccactaagaaaaaaatgtagaaccatttggaaaaatgaaatttagtagttccaagtttcaaagaaatgtcaacattttattccattcaataaagaacaaaaccaatagtgtttttattactttcatctgaaacattccatgttttaatctgagccttgcagactttcatttggagtttgaacccgttttggttgcatttcatttttggagaacttaattaacgtgagattggcaattgaaatgcaggtgcagttttctgttaatgtcatgctgttgtttaggtaataagaaatattaagtaattggctttagattttgtaatttttttccctgagttcctgctagatttcgtattctagtagtcaatgtattttcagtgaaatgcaaaaatattcccgttatctttgaccagtattaatttttgagatcttactgcttgtcacttgaatcccgtgattgtcatacatctctggtataagcaacatttgatttttgaagtgtgtagaccatctcttcatattttcaagatgtaattttacatttctgcatttttaaaacagtttggccataatcctagatgcacgcttctaattcatgtacctgcacatgtgacctttgtgaacagaaatttgcatgtataatttgtgtttacttgtaactttctggttatatactgcttatatctgtggattcaagttactgaagtgaataccaataaaaagaaaaccctaggccatgttaattggttatacatgtttggaatgttaaccaaaaaaaaaaaaaaaa

SEQ ID NO: 294124 - DNA, 1000 bp, Homo Sapiens
agaccctggatcccaaagaggcactttctgagttggagagagtcctggacaaggacttggaagaggacattcctgaaatcagccggctgtccatcagccagaagctccccagcaccaccatgaccaaagcaaggaagaggaggaggcggaggaggctcatggagctggcagagcccaagataaactggcaagtcctgaaagacaggccctctgtgtactggaccgagcggttccttgaggacaccaccctcaccatcacagtgcccgcggtgtcccgccgcgtggaggaactgtctcggcccaagagattctacctggaatattacaacaacaacaggacgactcctgtctggcccattcctcggtcctccctggaatacagagcgtcgagtcgcctgaaggaactggccgccccgaagattcgtgataacttctggagcatgcccatgtctgaggtgtcccaggtatccagggcagcccaaatggcagtccccagctcgcggatcctccagttgtcaaagccgaaggccccagccaccctcttggaagagtgggaccccgtgccaaaacccaagccacatgtgtcagaccataaccgcctccttcacttggccaggcccaaagctcagtcggacaagtgcgttcctgaccgagatcctcgctgggaggtgctggatgtcaccaagaaggtggtggccagcccccggatcatctccctggccaagcccaaagtgcgcaagggcctcaacgagggatacgacaggcgtcccctcgcctctatgagcttgccacccccaaaagcatcaccagaaaagtgtgatcaacccaggcctggcctctaagacctccgctcccagtaaacaccctcaggcaccctaaccctgtgtatgtgattattctgagctttttggcctggagaagggagggcgggctagaaggccaaaagaaggatgaggaggacaataatatttatttttgcatccaaaaaaaaaaaaaaaaa

SEQ ID NO: 294125 - DNA, 1000 bp, Homo Sapiens
gggctttccccatatcttctctcccccacctttatcgaggggtgctgctttttctccctcctcctcaagttcctttttgcaccgtcaccacccaacaccttccatgacacttccttgctttggccagaagccatcaggtaaggttggaaagagcctctgacctcccttgtttagttttggaaccatactcactcactctccaccagcctgggaaatgaatattgggtcctcagccctgccaccctctgctgtcatcagctgatgcattgtttttagctcaggttttgataaggtgaaaagaatagtcaccagggttactcagacctgccagctctcggagtccttggtggttgaacttggagaaagaccgcatgaagatacttgtaagcacacatgatccctctgaattgttttactttcctgtaactgcttttgcttttaaaaattgaagaagttttaaacagggctttcatttggtcatccttgcaatccattggggtctagtttggaatctgacaactggaacaaaaagaaccttgaatccggtgcatgccttggttttggtgctgctgctgcttcccaagatcctcagcagggattaagaaggaacccggtgtgcacagcagatccccgaaattggtgggcttgacctcctggcaaattgctgcgtctttccacttgctgttcaggaccactaaatgctgaaatgtggatgcataccgaaataaaagcaattcattgtgtactaaaggttttttttttttttttaatttagtatttgtgtaaaaccaccttttgaagcagcaactatcaagtctgaaaagcaattgatgtttccattaatctttttctggggggaaaaccttagttctaaggatttaacatcctgtaagtgaagtttaacataacagtattccataagcagcctttttattgtcagaccattgcctgattttaatataataaaaaaaaagtgtgcgttaatatttaaaaaaaaaaa

SEQ ID NO: 294126 - DNA, 1000 bp, Homo Sapiens
aatgacttcctcgagaccatacagccaggaaatagcggtgaatctagtgatctcgggtccctagatttaaccatggcactgaggtgccgtgtgacggtggccttggaggacccagcactgacccatagagggctcctctcagatgggcagcagcttggagcaggcaggcagggcctggtccattggaggggctggcactggacttgcctttgaccccagcagcttggatggggtgccgggctcccccatagttcactgactgtctcctttggtcttctcgcaggccctgctggccctgcctcttctggcctggtgtctcctcatgccccctcagtgaggatcttcatgtacctgctcttctgtttgcacacccagcatagcctccttgcaggcagaaggcagtagggcccctgcacactcagtttctctcgttttccttagttatcagtcctgtcctgtcccactcaggtctgtacttagggcagctggcctggatgggcttcactggggccctgtctgtgtgctgagccagtttcccctgctggctgcaagctgtgggttctttctcctctgtgcccctcatgctgatcttctagatgccactcccaaatccccttcatacccaccaggatgtgtgcccagccaggcctccagcacccccagtgcagctcgtgattggaaactcaccatcggcaggcagtggttcggtttaagagatggcattagagggagcccagtctggatgtggacttggatgccctgtgggtatcagttctgctgacactttggcccgaaatagatccagtgctgagcaagcaatgtacaccagagcctcagtgagcccatctgcacagtggggagcatggagggatgggtttggcctgtgcttctgcttattcagtccttcagctcacggaagggatgctagtccgtgaaggtgacctcacagtactggttaattaaactttattgctcactgtccaaaaaaaaaaaaaaaaaa

SEQ ID NO: 294127 - DNA, 1000 bp, Homo Sapiens
tgtcatggtattcctgacagtcgacctcttcaggatggagatattatcaacattgatgtcacagtctattacaatggctaccatggagacacctctgaaacatttttggtgggcaatgtggacgaatgtggtaaaaagttagtggaggttgccaggaggtgtagagatgaagcaattgcagcttgcagagcaggggctcccttctctgtaattggaaacacaatcagccacataactcatcagaatggttttcaagtctgtccacattttgtgggacatggaataggatcttactttcatggacatccagaaatttggcatcatgcaaacgacagtgatctacccatggaggagggcatggcattcactatagagccaatcatcacggagggatcccctgaatttaaagtcctggaggatgcatggactgtggtctccctagacaatcaaaggtcggcgcagttcgagcacacggttctgatcacgtcgaggggcgcgcagatcctgaccaaactaccccatgaggcctgaggagccgcccgaaggtcgcggtgacctggtgcctttttaaataaattgctgaaatttggctggagaacttttagaagaaacagggaaatgaccggtggtgcggtaacctgcgtggctcctgatagcgtttggaagaacgcgggggagactgaagagcaactgggaactcggatctgaagccctgctggggtcgcgcggctttggaaaaacaaatcctggccctggactcggtttcccagcgcggtcaacgcatctggaggggactggaggaaacccccttgttggaagagattccaagagaagcacggttttctctttcccttgccctgactgttggagtaaaaaacctcttaaatccattgtatcagaggtccttacctctctgacagttacagtgatctttgtatctgaactttgcacgtctgccgaaaaatccgaacctgttgactgggaaaaaaaaaaaaaaaaa

SEQ ID NO: 294128 - DNA, 1000 bp, Homo Sapiens
caggacttctggattgttggagacaaacttcactgcctcagccagaactactggctctgggcttctgaagtggcagcagggattcagagccaagattcctggtctgctgaaccaaacctccaggtccctggaccaaatccccggatacctgaacaggatacacgaactcttgaatggaactcgtggactctttcctggaccctcacgcaggaccctaggagccccggacatttcctcaggaacatcagacacaggctccctgccacccaacctccagcctggatattctccttccccaacccatcctcctactggacagtatacgctcttccctcttccacccaccttgcccacccctgtggtccagctccaccccctgcttcctgacccttctgctccaacgcccacccctaccagccctcttctaaacacatcctacacccactcccagaatctgtctcaggaagggtaaggttctcagacactgccgacatcagcattgtctcgtgtacagctcccttccctgcagggcgcccctgggagacaactggacaagatttcctactttctcctgaaacccaaagccctggtaaaagggatacacaggactgaaaagggaatcatttttcactgtacattataaaccttcagaagctatttttttaagctatcagcaatactcatcagagcagctagctctttggtctattttctgcagaaatttgcaactcactgattctctacatgctctttttctgtgataactctgcaaaggcctgggctggcctggcagttgaacagagggagagactaaccttgagtcagaaaacagagaaagggtaatttcctttgcttcaaattcaaggccttccaacgcccccatcccctttactatcattctcagtgggactctgatcccatattcttaacagatctttactcttgagaaatgaataagctttctctcagaaatgctgtccctatacactagacaaaactg

SEQ ID NO: 294129 - DNA, 1000 bp, Homo Sapiens
gcaaaggccctggggcagtgggcttgttgtatttgagaaacagcaggtgggtgtggccaaagcctaccaagagatgacactggagaagacaggagggtcctgtagtgtatgatacacaagcagccatttttacaaacaataactaaggcacctttccttttcagatggtggaattgcacgacttagagtattcggtactggacaaaaagactggactgcaactgaccccaaagaacctgcagacctagtggccatcgcttttgggggtgtctgtgtaggatttagtaatgctaagtttgggcacccaaacaatataataggagttggcggggcaaagtctatggcggatggttgggaaactgcaagaaggctggaccggccaccaatattagaaaatgatgagaatggcattctcttggttccgggttgtgaatgggcagttttccgattggcacatcctggagtaataactcgaattgaaattgacacaaaatattttgaaggcaatgctcctgacagctgtaaagtggatgggtgcatcctgacaactcaggaagaagaagccgtgatcaggcaaaagtggattctcccggcccacaagtggaaaccactgcttccagtgaccaagttgtctcccaaccaaagtcatctgttcgatagcctgaccctagagctccaagatgtcatcactcacgccaggctcaccatcgtccccgacgggggagtgagccgccttcggctccggggcttccccagctccatctgcctcctgaggccccgggagaagcccatgttgaagttctcggtgagcttcaaagcaaacccttaacacacacaaagccccggtgtcggacacacagcagtaatttcccagtcatagtcttcttttcaaatgttttgaacacctggtgatttaataaagtggtcgtctcacaaaaaaaaaaaaaaaaaaaaaaaaaaaaaaaaaaaaaaaaaaaaaaaaaaaaaaaaaaaaaaaaaa

SEQ ID NO: 294130 - DNA, 1000 bp, Homo Sapiens
cctcgtcctttgtagaaatgggatcacagggagacatgggggacaaaggacagaaaggcagtgtgggtcgtcatggaaaaattggtcccattggctctaaaggtgagaaaggagattccggtgacataggaccccctggtcctaatggagaaccaggcctcccatgtgagtgcagccagctgcgcaaggccatcggggagatggacaaccaggtctctcagctgaccagcgagctcaagttcatcaagaatgctgtcgccggtgtgcgcgagacggagagcaagatctacctgctggtgaaggaggagaagcgctacgcggacgcccagctgtcctgccagggccgcgggggcacgctgagcatgcccaaggacgaggctgccaatggcctgatggccgcatacctggcgcaagccggcctggcccgtgtcttcatcggcatcaacgacctggagaaggagggcgccttcgtgtactctgaccactcccccatgcggaccttcaacaagtggcgcagcggtgagcccaacaatgcctacgacgaggaggactgcgtggagatggtggcctcgggcggctggaacgacgtggcctgccacaccaccatgtacttcatgtgtgagtttgacaaggagaacatgtgagcctcaggctggggctgcccattgggggccccacatgtccctgcagggttggcagggacagagcccagaccatggtgccagccagggagctgtccctctgtgaagggtggaggctcactgagtagagggctgttgtctaaactgagaaaatggcctatgcttaagaggaaaatgaaagtgttcctggggtgctgtctctgaagaagcagagtttcattacctgtattgtagccccaatgtcattatgtaattattacccagaattgctcttccataaagcttgtgcctttgtccaagctatacaataaaatctttaagtagtgcagtagttaagtccaaaaaaaaaaaaaaaaaaa

SEQ ID NO: 294131 - DNA, 1000 bp, Homo Sapiens; identical to SEQ ID NO: 119053

SEQ ID NO: 294132 - DNA, 1000 bp, Homo Sapiens; identical to SEQ ID NO: 116952

SEQ ID NO: 294133 - DNA, 1000 bp, Homo Sapiens; identical to SEQ ID NO: 286240

SEQ ID NO: 294134 - DNA, 1000 bp, Homo Sapiens
ttggtgagcagagtggctctgccaagactagtgttagcagtgtcaccaccccgccaccccatggcaaacgcatccccttctttaagaagacagagcatgtgcccccctatgacgtggtgccttccatgaggcccatcatcctggtgggaccgtcgctcaagggctacgaggttacagacatgatgcagaaagctttatttgacttcttgaagcatcggtttgatggcaggatctccatcactcgtgtgacggcagatatttccctggctaagcgctcagttctcaacaaccccagcaaacacatcatcattgagcgctccaacacacgctccagcctggctgaggtgcagagtgaaatcgagcgaatcttcgagctggcccggacccttcagttggtcgctctggatgctgacaccatcaatcacccagcccagctgtccaagacctcgctggcccccatcattgtttacatcaagatcacctctcccaaggtacttcaaaggctcatcaagtcccgaggaaagtctcagtccaaacacctcaatgtccaaatagcggcctcggaaaagctggcacagtgcccccctgaaatgtttgacatcatcctggatgagaaccaattggaggatgcctgcgagcatctggcggagtacttggaagcctattggaaggccacacacccgcccagcagcacgccacccaatccgctgctgaaccgcaccatggctaccgcagccctggctgccagccctgcccctgtctccaacctccaggtacaggtgctcacctcgctcaggagaaacctcggcttctggggcgggctggagtcctcacagcggggcagtgtggtgccccaggagcaggaacatgccatgtagtgggcgccctgcccgtcttccctcctgctctggggtcggaactggagtgcagggaacatggaggaggaagggaagagctttattttgtaaaaaaataagatgagcggcaaaaaaaaaaaaaa

SEQ ID NO: 294135 - DNA, 1000 bp, Homo Sapiens
ccagcaaatcaggcgataactccagttccagtctgggagatgtggtgactggcacccgccgccccacaccccctgccagtgccaaacagaagcagaagtcgacagagcatgtgcccccctatgacgtggtgccttccatgaggcccatcatcctggtgggaccgtcgctcaagggctacgaggttacagacatgatgcagaaagctttatttgacttcttgaagcatcggtttgatggcaggatctccatcactcgtgtgacggcagatatttccctggctaagcgctcagttctcaacaaccccagcaaacacatcatcattgagcgctccaacacacgctccagcctggctgaggtgcagagtgaaatcgagcgaatcttcgagctggcccggacccttcagttggtcgctctggatgctgacaccatcaatcacccagcccagctgtccaagacctcgctggcccccatcattgtttacatcaagatcacctctcccaaggtacttcaaaggctcatcaagtcccgaggaaagtctcagtccaaacacctcaatgtccaaatagcggcctcggaaaagctggcacagtgcccccctgaaatgtttgacatcatcctggatgagaaccaattggaggatgcctgcgagcatctggcggagtacttggaagcctattggaaggccacacacccgcccagcagcacgccacccaatccgctgctgaaccgcaccatggctaccgcagccctggctgccagccctgcccctgtctccaacctccaggtacaggtgctcacctcgctcaggagaaacctcggcttctggggcgggctggagtcctcacagcggggcagtgtggtgccccaggagcaggaacatgccatgtagtgggcgccctgcccgtcttccctcctgctctggggtcggaactggagtgcagggaacatggaggaggaagggaagagctttattttgtaaaaaaataagatgagcggcaa

SEQ ID NO: 294136 - DNA, 1000 bp, Homo Sapiens; identical to SEQ ID NO: 119054

SEQ ID NO: 294137 - DNA, 1000 bp, Homo Sapiens
tacaatctatgcagtgaaagagcttatgatcctaagcacttccataatagggtcagtagaatcatgattgatgatcataatgtccccactctacatgagatggtggttttcaccaaggaagtaaatgagtggatggctcaagatcttgaaaacatcgtagcgattcactgtaaaggaggcaaaggaagaaccgggactatggtttgtgccctccttattgcctccgaaatatttttaactgccgaggaaagcctatattattttggagaaaggcgaaccaataaaacccacagcaataaatttcagggagtagaaactccttctcagaatagatatgttggatattttgcacaagtgaaacatctctacaactggaatctccctccaagacggatactctttataaaaagattcattatttattcgattcgtggtgatgtatgtgatctaaaagtccaagtagtaatggagaaaaaggttgtcttttccagtacttcattaggaaattgttcgagagaagagggcagcacacagggccaactggaagggggagccatcccggagacctgtgctcgactgatgggtgggagcaatagcgagagagagggagggacctgagagtggaagcctttattgggataatcttcctaaatactatgacaattgtccatttttcttctggttcaacacgtcttttattcaaaataacaggctttgtctaccaagaaatgaattggataatccacataaacaaaaagcatggaaaatttatccaccagaatttgctgtggagatactttttggcgagaaatgacttccaatgatgttgtagctggatccgactaagtatagctcccccttccccttctgggaaagaattatgttctttccaacccctgccacatgttcatgtgtcctaagtcttccttgatgatgcatctatatttatatatgtttatatatgttcttcataaatctattaaatatatatagataaaaa

SEQ ID NO: 294138 - DNA, 1000 bp, Homo Sapiens
atgatgtgaaagtgcagtttttctattcgaatcttcctacatactatgacaattgctcattttacttctggttgcacacatcttttattgaaaataacaggctttatctaccaaaaaatgaattggataatctacataaacaaaaagcacggagaatttatccatcagattttgccgtggagatactttttggcgagaaaatgacttccagtgatgttgtagctggatccgattaagtatagctcccccttccccttctgggaaagaattatgttctttccaaccctgccacatgttcatatatcctaaatctatcctaaatgttccttgaagtatttatttatgtttatatatgtttatatatgttcttcataaatctattacatatatatagataaaatgtcagtgtctttcttcttttttgaaggtacatacttcacagtttccatcttgtatttacctaaatttggaacacagtatgcaggaacatcaggcatcattttgaagaactttgaaatagaactttcaaagcaaaaacttgagatattcaaaaattgtgattccccaacacccacttacttacatatttttggtcaagtatttattccctgctttggttcacatttgtaatttcagatttattagaaagctaatttatatatttttcttccccttcatttacaaactgtctgttaacagattggcaaccaagactaagttttaaatccagaagagagaaatgtttcacgcaagcagtcccccaactcccaacacacactccctttcattccgagcactaaataggtagcttacttgacaagcttcctttaattacacacagacatgggggttggggtaagaagatggtggtaaatatgaaaagtaatctttaataacttctgcttttgtataaaattgtaagtgaagtcaaaagaaaaaaaaaaaaaaaaaaaaaaaaaaaaaaaaaaaaaaaaaaaaaaaaaaaaaaaaaaaaaaaaaa

SEQ ID NO: 294139 - DNA, 1000 bp, Homo Sapiens
cccctggagtggcccacagctgtcactgctgctctaggatgtgccgccttcctcccaccccagctctatgctcattgaatcctcatgaccaccccacaggaggatgtagattccacttggtggagaaaaggagaatggagctcagaaaagtgaaatgcacaaggtctcttggtgaggagcccaggatgtgtcctgggagcctggctgaagggccaagaccccaaccctgtgctgtgctgcttccccctggcactctgcctcctgggtgcctgcatgcagtggccggtctctcaacttcttgctctgcccacttgtggctgccctgcccggaaagccttctccattcttcttcctctacctgggggatgcctgcttggctctggcattaccttctccctgtgtgcttctcaagactgcatcccacatggtatcactggtctgtctactgccctcccctcctagcccagctgtgagcatccagagaggggcctggcacatgctgcatggctgaggaccttggcaccagctgccctttcagcttctcccctgccccatctcttgcgcctggccttgcctctatgcaggttctgtccttccagcattcctggagtggcctcttaccttacgggaaggcaggtgcgagtgaggcagggctggctgcaggtgagctgggggagaacagggtatgtaagtaagatggtcctagacaccagacaaggaaccctttgccattgctcaaagtcagcattttctgcatgaaaggtttacctgtccttgtctgggtaatttacggggcccagaggtgggcaagtatcttcaccttatccacttactgtaattttttcttgtctatttccaagagacctcaaaagaagagcttctccataggtcttctgttaactctgtgtccaccaggaacacagaagaaaatttttattgacacaggcgaggcctaataatagcacagcttaataggagtaaatcttctgctaattacttc

SEQ ID NO: 294140 - DNA, 1000 bp, Homo Sapiens
ccgggcatatggggcgtcagaggctgagaacgttgccgtgaagaggcttaaaagcaagacccggagtggcgaccttaaagaggacggactgaagaaacgcgggaatgagctccagacgcgggagtttcctctctacaaagttacactgcagcagctgtctaccctgccccttgtcttttgagaagttcaaaccttcagaaaagttgcaagaacacgaggctaaaggcagcagttcactatactgtgggttgtctttgcgaggaagttgcattggacaaagagatgcagttcagcaaacagaccattgcggccatttcggagctgactttccgacagtgtgaaaattttgccaaagaccttgaaatgtttgcaagacatgcgaaaagaaccacaattaacactgaagatgtgaagctcttagccaggaggagtaattcactgctaaaatacatcacagacaaaagtgaagagattgctcagattaacctagaacgaaaagcacagaagaaaaagaagtcagaggatggaagcaaaaattcaaggcagccagcagaggctggagtggtggaaagtgagaattaaagtccctcgccgcttggaaagtgcagccttctacaggtagagccacctagaaatgcatatggctgcaaaggaaactttgaagggttaaatagagatttaaaaaaataaaataaaaaggctgggctagggtgctttttgtgctgaattctccacattgttaactgccaaagctagttttagagaatgagaaagtcttaagcaaaatactcccaggtctcactccagaacataaaaatggtgtgtgatcaaatggtatatattagaaattacatctgttgtaattaaaattgtgtgagcaattaaacatggttgactttttcaagcaaaaatcagttcatcttttgatgtaattttctaggctaaatggcaatctctgaaagatgaataaagctatatttatttaaaaaaaaaaaaaaaa

SEQ ID NO: 294141 - DNA, 862 bp, Homo Sapiens; identical to SEQ ID NO: 119056

SEQ ID NO: 294142 - DNA, 1000 bp, Homo Sapiens
ccgcagggaaaagattaaacggtctgtgtgcaaagtccaggaacagatattcaatctttacactaagcttttggagcaagaaagagtttcaggtgtgccttcttcctgctcctcctcctcactggaaaacatgcttttgtttaacagtccttctgttggccctgatgctcccaagatagaggacttgaagtggcattctgcattcttcagaaaacaaatgggtacttccttggttcattcgctgaaaaagccccataagcgagatcctttgcagaatagccctggaagtgaaggcaaaaccctgctgaagcagccagacctgtgtggtagaagggaggggatggtggtcccagagagctttttgggtttagaaaagacctttgcagaagcacgtctcatatcagcacaacagaaaaatggtgtggtgatgccagaccatgggaaaagaagagacaatcgttttcattgtgatctcattaaaggagacttaaaggacaaatcttttaaacagagtcacaagcctctcaggtccacagatgtgtcccagaggcatctggacaacacaagagctgccacctcccctggagtggggcagtcagcacctggcacaaggaaggagatagtgcccaagtgcaatggctccctaatcaaagtaaactataatcagactgcagtcaaagtgcctacaacacctgccagcccagtgaaaaactggggaggattccggattccaaagaagggggaacggcagcagcagggagaggcccacgatggggcctgccaccagcactcagactacccatatttgggcttaggccgagttccagccaaggaaagggcaaaaagcaaattaaaatccgacaatgagaatgacgggtatgtccccgatgtggaaatgagtgactcagagagtgaggcatcagaaaagaaatgtatacacaccagcagcactatcagcagaaggacagacattatcaggagaagcatcttggcttcttga

SEQ ID NO: 294143 - DNA, 1000 bp, Homo Sapiens
tgccttgtcctggcaagcataggttttcccagaccacaatgctgatatatcttatttaatgcagactgtattcttgcagcgtgttgtttcctttgtgactcaaggttgaattaaaatgcctgtgaactgcaaacttgcttatgattgacttggtgcaataaagttcctttctaaccatttctggtttagaaaacattcagccatcctagaaactagcaatatttatttttgcctctttcgttttaccttcatttttagatgaggtaaatgttttgtcttttacttaagggtactaagcaaggtccactctagtgtagctgaagagaatgcatatttggctacactatttctgtttactgtattttgcttcctactttatgtctaaatgctattgtttgtttaaaatcctaataatgtctcatttccaatatgttattttcagataactaaggttttgctactaatgtcagccatttactctcccactaattgggattattttttaaaagaggtctttctccccgaaatacaagttttagaaaatcttagaagaggggtgggtgcatgtcttaatgctgggaagcggcaactttggggttgaacttacttgaatggattaaaaattgcattgtgttacagagctagaaaattttatgtatgaaaaacgataatagccttacactgagtacaaataatactttaagagcatgtgaagatgtgatcatttgtgatgttacttgtaaaaaaaagtatatatacatatcttttgaagtgttaaaaggaaactagtactttatattctttatcatatcactttttgtaagtgttgaatatattcctgtttatttttctatgttctgttttgtagccttaagaagtgtttcaaacatatctgaatgtataaaataagagtaaatgccctacatggtgtgatgctgcattatatataaaactgtgtgcatatattaaattttgtctcttgaaaaaaaaaaaaaaaaaa

SEQ ID NO: 294144 - DNA, 1000 bp, Homo Sapiens
ctcccactttcaacaagagcctctgccatccacttgagggtattgagagccagtgggcttttgtgtagcctttttgttctgcaagcaactttctaaagttgtgtacatgaacatacacccacatccagactacagtgatttagagttgttttgattgggtaccgtgggagcagggaaattggttttttaaaaagcaactgtttaattgcttaaataaggtatgtattaaatctgtctccagttagggctatcttcctagcataggccccttaagtagcatgggggatatattttttgctataacgtaaaaattttcctttaaccactgccctctccttctttctccttcaaggttctttccccctcagttttgttgttgtcttactctggagatgccaagtgtattttttctttctatgtaattttagattcgccttacaatgtaaatcttcacattggagataatattggttggaccttgcccatcttcactctagccttcgtatttgtgaaggactcagccaccttccttcttcaccccatgcttctcaccaaatttttgttgtcattgagggcacttggataactcaagttgatatttatagctgatcaatctatatgtgtcacagaactatgctgcctaaagtgatcttggctccttaatggtccttttggccccttggatagttaacagttgagtaattctaatctcttctgtgttttccttgccttaaccacaaattgtggtgctttttgtatattttatgtataaatcacaaagttgaattctgactatttttaagacaaaagtctgttaaacttttttattgtaaagaatatttattatgcgaatctctattattttatggtatttattgcaaaagactgttgaaatgtactcatgtttgaatataacaaaatatcaatacttaacggaaaataaggtgacacgaagaaagtacatatgttaactataatgcagaaaatatattaattaatg

SEQ ID NO: 294145 - DNA, 1000 bp, Homo Sapiens
caagcatctactctttttatcatttacttcaaaatgacattgctaaagactgcattattttactactgtaatttctccacgacatagcattatgtacatagatgagtgtaacatttatatctcacatagagacatgcttatatggttttatttaaaatgaaatgccagtccattacactgaataaatagaactcaactattgcttttcagggaaatcatggatagggttgaagaaggttactattaattgtttaaaaacagcttagggattaatgtcctccatttataatgaagattaaaatgaaggctttaatcagcattgtaaaggaaattgaatggctttctgatatgctgttttttagcctaggagttagaaatcctaacttctttatcctcttctcccagaggctttttttttcttgtgtattaaattaacatttttaaaaagcagatattttgtcaaggggctttgcattcaaactgcttttccagggctatactcagaagaaagataaaagtgtgatctaagaaaaagtgatggttttaggaaagtgaaaatatttttgtttttgtatttgaagaagaatgatgcattttgacaagaaatcatatatgtatggatatattttaataagtatttgagtacagactttgaggtttcatcaatataaataaaagagcagaaaaatatgtcttggttttcatttgcttaccaaaaaaacaacaacaaaaaaagttgtcctttgagaacttcacctgctcctatgtgggtacctgagtcaaaattgtcatttttgttctgtgaaaaataaatttccttcttgtaccatttctgtttagttttactaaaatctgtaaatactgtatttttctgtttattccaaatttgatgaaactgacaatccaatttgaaagtttgtgtcgacgtctgtctagcttaaatgaatgtgttctatttgctttatacatttatattaataaattgtacatttttctaatt

SEQ ID NO: 294146 - DNA, 1000 bp, Homo Sapiens
ttacgtgaatgtgatgttcatgcttgccattcttctgacattcttccacccctttctggtatatcgggaatgccgtacttggaaagaaagtccctctgcaattgcatagttcagaagccctcacttttcagccccgaggatggttttgttcatcttccaccacctttgaggacctcgtgtcccaaaagactttgcctatcccagcaaaacacacacacacacacacacacacacaaaataaagacacacaaggacgtctgcgcagcaagaaaagaatctcagttgccaagcagattgatatcacacagactcaaagcaaaggcatgtggaacttctttatttcaaaacagaagtgtctccttgcacttagccttggcagacccttgactccaggggagatgacctgggggaggaagtgtgtcaactatttctttaggcctgtttggctccgaagcctatatgtgcctggatcctctgccacgggttaaattttcaggtgaagagtgaggttgtcatggcctcagctatgcttcctggctctccctcaagagtgcagccttggctagagaactcacagctctgggaaaaagaggagcagacagggttccctgggcccagtctcagcccagccactgatgctggatgaccttggcctgaccctggtctggtctcagaatcacttttcccatctgtaaaattgagatgaattttggtgttgaaagttcttcctggagcagatgtcctagaaggttttaggaatagtgacagagtcaggccaccccaagggccatgggagccagctgacctgcttgaccgaaggatttctgacagactatctttggggatgttttcaagaagggatataagttatttactttgggcatttaaaagaaaatttctctcgggaataattttatagaaaaataaagcttctgtgtctaaggcaaaaaaaaaaaaaaaaaaaaaaaaaaaaaaaaaaaaaaaaaaaaaaaaaaaaaaa

SEQ ID NO: 294147 - DNA, 1000 bp, Homo Sapiens
agtgaaatcatacctcagctcatgtcagagtgcgaatatgtctctgagaagctagaggcggcagagagagacaatcaaaacctggaagacaaagtgcgttccttaaagacagacattgaggagagcaaataccgacagcgccacctgaaggtggagttgaagagcttcctggaggtgctggacgggaagattgacgacctgcatgacttccgccgagggctctccaagctgggcaccgataactagggctggccgaggcccaggccccgcccgtgagtcccaagcgtgtgtgcgagaccagatagctctaggacgttcttctgtgtgcattgcttctgtaaatgcaggcgcagtttgtcgtgtttccaaaccagttgtgccgtccactcactccttttcagaatagaaatctcctctcgcttctctggccttgtgaggttgtggacaactggaagattctgactcaggaatccagaactaggtctaccttcaacatttatgcagtcagggcagggatgtttatatctttcataagggctgttgcaaccatatgaactgaaaaaacacgcattttgtaatccaaatattgatattctttacaccaagccatcaggctccttttatcaaatagcattcagagtatttgaatgtccaccagacaccagccccggggggcacagagagaacaacattcctctctgtcaacatcgagaggctttaaaacaactgtttagtggaaactttctgagagatggaaaacaagcttctggtgggtgcattttctggcccggagttgcctgcatccacgctactgccccctgccccccgcccccccagtttgtacggttgcaacagtgttccttttcttggttttaatttctgagcagatgattgtgctgtgggaacagcacacagtgagggtgcctagcacaatgtctggcacaaagtaggtgcttaataaatatttgttcaattaaaaaaaaaaaaaaaaaaaaaaaaa

SEQ ID NO: 294148 - DNA, 1000 bp, Homo Sapiens; identical to SEQ ID NO: 119057

SEQ ID NO: 294149 - DNA, 881 bp, Homo Sapiens; identical to SEQ ID NO: 119058

SEQ ID NO: 294150 - DNA, 684 bp, Homo Sapiens
ctcccggaggcgttgtctgcgactcggcggaggctccaacttccagtggcccggtcgggaaagatcagagcctcctaagaaatatccagaagtcaagccatggatccacctgcacgtaaagaaaaaaccaaagttaaagaatctgtcagcagagttgagaaggccaaacagaaatcagcccagcaggagctgaagcagagacaaagagcagagatctatgccctcaacagagtcatgacagaactggagcagcagcagtttgatgagttctgtaaacagatgcagcctcctggagaatgaggccccaggttcaaaccagatgggatcctgagagctttgagagggtgttgccagttttaagctgagatggcccatttggagccttacagaactagaccagaagacatttgtggataaatctgaactcacttcctgtgtgtaacttctaacttcactggttcctcccatctgaattggccacatgcttgctgaagagacttgttttcttcttctaagacagtggttttgttttttgggtttttaaaaaaaaaaaaaaaaaaaacacacacaaaaaacactttttctattgtttgagaaaaatcagtgtttctcatgaaactctatatcttctccaaaaatacaaataaaatactagcaaaaaaaaaaaaaaaaaaaaaaaaaaaa

SEQ ID NO: 294151 - DNA, 1000 bp, Homo Sapiens
tctgtctattgctcccctgttcttagctccagtctttaactctaaaaggagagttaaaaaagaagaagaagaagaagaagaagaagaagaagaagaagaagaagaagaagaagaagaagaagaagaagaagaagaaagttgaaggcagaggaggaggaggagaagaaaagaaggaatatatttatataagtacaaatatctttatattccacctttttcttaattgaaggcaaaccatatctggtctttctaaagcttcataaaggcatctttgactattagacacccacagacctttttcaacttggaccgccagcctgtcaaacccatcagacaataccatattaaaacccgaaatgcacactcggagtatttttggtggacgagatctttaattcttcactgcacttgaaaaaaaaatcgaaatgacatccagataaagaataaagatggattctcgctctgttgcccaggctggagtgcagtggcgtgatctcggctcgctgcaacctctgcctcccgggttcgggcggttctcctgcctcagcctcccgagtggctgggactgcaggcgcgcaatgccacgcccggctcattttttgtattttggtggaggtggggtttcactgtgttgcccaggctggtcgcgaacttctgagctcgggcggtccacccgcctcggcctcccaaagtgctgggattacacgccgtgagccaccgcacctggcccctgggaccattctcacacagagttattattaaataagaattagcaaagttcagaaagtcatatatttcaagtgctttctaattcaaagtgcttctctatattcaagtactatggtatcatttcaaacatagcaaattataaaagttctgtaatttcctaaatataaatgtactttgtgaaaggcttctgtgacacacataaaagacatatttgatgtaccagttgctttgctgtggcttttaagtaaagaataaaaagtgtcatagaagg

SEQ ID NO: 294152 - DNA, 1000 bp, Homo Sapiens; identical to SEQ ID NO: 224689

SEQ ID NO: 294153 - DNA, 1000 bp, Homo Sapiens
ggggtgcaaggacgccaactgaccgcatcctgcgcctcccggcttcccaggacatgctggccctgcagatcatcgacctcttcaagaacatcttccagctggtcggcctggacctctttgtttttccctaccgcgtggtggccactgcccctgggtgcggggtgatcgagtgcatccccgactgcacctcccgggaccagctgggccgccagacagactttggcatgtacgactacttcacacgccagtacggggatgagtccactctggccttccagcaggcctgctacaacttcatccgaagcatggccgcctacagcctcctgctgttcctgctgcagatcaaggacagacacaacggcaacattatgctggacaagaagggccatatcatccacatcgactttggcttcatgtttgaaagctcgccgggcggcaatctcggctgggaacccgacatcaagctgacggatgagatggtgatgatcatggggggcaagatggaggccacacccttcaagtggttcatggagatgtgtgtccaggctacctggctgtgcggtgagcctgggccctacatggatgtggtcgtctccctggtcactatcatgttggacacgggcctgccctgttttcgcggccagacaatcaagttcttgaagcacaggtttagccccaacatgactgagcgcgaggctgcaaatttcatcatgaaggtcatccagagctgcttcctcagcaacaggagccggacctacaacatgatccagtactatcagaatgacatcccctactgaggaggggaccttcgagggcctctgccccatgtgcccttgaagctgccccacaatcatggagccctgcgacctacccgccctgccgccacatgcagtggaggagaggcctgtggcccgaagagcctggtagcgcctcctggggcagcacgtgggtggcgcaggcttagtaacgccgtggactgcagcgacaatcagtggatggt

SEQ ID NO: 294154 - DNA, 1000 bp, Homo Sapiens; identical to SEQ ID NO: 224690

SEQ ID NO: 294155 - DNA, 1000 bp, Homo Sapiens; identical to SEQ ID NO: 224691

SEQ ID NO: 294156 - DNA, 1000 bp, Homo Sapiens
tttaaattaggcaaagcagctttagcctcatagaatattatttctttggactcaagctgaaatacaagccttacattgccttatgctttatttctttctaatttttatatgtatatagatgagggttccttaatggttgtgagcattgtgtggaattttacacctggcctgcgtggcagcctcttccagttgaggtgttttatgtcacgcacactccatcccagtgtacaaaacctgcttctcttctcaaccgtggcagctcccgctggctcctatgccctgccctaaagggctcttgagcctctgggaatgggaggggccaagagaaggaaaaccctgtctttagcaccctttaaaagaactgtgccccccttctcagtgctgcctttgcatgggcctggcccggctcacattcgtcagtgactccaaccctcctgcttgctgtacttgggatgaaacgaccccacaggtcaggtggagggtggggcgtgggcatcagccaggattgccgttacagtctttttctcaggagctacaaagatctcttcctgttactaaatagtcgcaccccagcagcctctctcgcacaccggggccctgcatgtcagatggcgtggtctgcagggggagctctgtgccttagtggctcttggcaggacactgagggcctgcctgtggtgtgcccggctctgccactcccgggaggggaagggctgctcagctcaaggtgtcctgttcggtagagcaagtgtcctctgacagccgtgtccccggacagttcagacacccttggggatggcactccacacacgacagagatgcaggggccagggaagcccagcgctcggtgcccttcgtccagggttaaaatcggcctgtggggtgtggtgagaaggcaggttgtgcgggtgttgaccgatgtatcttttccttaaagttattataataatgggtaatttgtcaataaagcattcctttgggggaaaaaaaaaaaaaaaaa

SEQ ID NO: 294157 - DNA, 1000 bp, Homo Sapiens; identical to SEQ ID NO: 224692

SEQ ID NO: 294158 - DNA, 1000 bp, Homo Sapiens
agaagtaccccggcttcctgctcaacaacttccacaacctgctgcgcttctggcagcagcactacctgcacaaggacaaggacagcacctgcctagagaacagctcctgcatcagcttctcatactggaaggagacagtgtccatcctgttgaacccggaccggcagtcaccctctgctctcgttagctacattgaggagccctacatggacatagacagggacttcactgaggagtgaccttgggccaggcctcgggaggctgctgggccagtgtgggtgagcgtgggtacgatgccacacgccctgccctgttcccgttcctccctgctgctctctgcctgccccaggtctttgggtacaggcttggtgggagggaagtcctagaagcccttggtccccctgggtctgagggccctaggtcatggagagcctcagtccccataatgaggacagggtaccatgcccacctttccttcagaaccctggggcccagggccacccagaggtaagaggacatttagcattagctctgtgtgagctcctgccggtttcttggctgtcagtcagtcccagagtggggaggaagatatgggtgacccccaccccccatctgtgagccaagcctcccttgtccctggcctttggacccaggcaaaggcttctgagccctgggcaggggtggtgggtaccagagaatgctgccttcccccaagcctgcccctctgcctcattttcctgtagctcctctggttctgtttgctcattggccgctgtgttcatccaagggggttctcccagaagtgaggggcctttccctccatcccttggggcacggggcagctgtgcctgccctgcctctgcctgaggcagccgctcctgcctgagcctggacatggggcccttccttgtgttgccaatttattaacagcaaataaaccaattaaatggagactattaaataactttattttaaaaatgaaaaaaaaaaaaaaaaaaaa

SEQ ID NO: 294159 - DNA, 1000 bp, Homo Sapiens
ggttccatgaccatgggcctaacttaaagatgtgaatgagtgttacagttgaaagcccatcataggtttagtggtcctaggagacttggttttgacttatatacatgaaaagtttatggcaagaagtgcaaattttagcatatggggcctgacttctctaccacataattctacttgctgaagcatgatcaaagcttgttttatttcaccactgtaggaaaatgattgactatgcccatccctgggggtaattttggcatgtatacctgtaactagtaattaacatcttttttgtttaggcatgttcaattaatgctgtagctatcatagctttgctcttacctgaagccttgtccccaccacacaggacagccttcctcctgaagagaatgtctttgtgtgtccgaagttgagatggcctgccctactgccaaagaggtgacaggaaggctgggagcagctttgttaaattgtgttcagttctgttacacagtgcattgccctttgttgggggtatgcatgtatgaacacacatgcttgtcggaacgctttctcggcgtttgtcccttggctctcatctcccccattcctgtgcctactttgcctgagttcttctacccccgcagttgccagccacattgggagtctgtttgttccaatgggttgagctgtctttgtcgtggagatctggaactttgcacatgtcactactggggaggtgttcctgctctagcttccacgatgaggcgccctctttacctatcctctcaatcactactcttcttgaagcactattatttattcttccgctgtctgcctgcagcagtactactgtcaacatagtgtaaatggttctcaaaagcttaccagtgtggacttggtgttagccacgctgtttactcatacagtacgtgtcctgtttttaaaatatacaattattcttaaaaataaattaaaatctgtatacttacatttcaaaaagaaaaaaaaaaaaaaaaaa

SEQ ID NO: 294160 - DNA, 1000 bp, Homo Sapiens; identical to SEQ ID NO: 224693

SEQ ID NO: 294161 - DNA, 1000 bp, Homo Sapiens
gccctgcaggtgacaaagcagatcacgcaggaagaagacgacagtgatgaggaagtagcccccgaaaactttttctccctccctgaaaaggctgagccacctggagttgagccatacccttaccccatccccactgtccctgaagagctgcctccaggcacggaaccagagccggctttccaggacgatgcagccaatgccccccttgaattcaagatggcagcaggttcaagtggggccccttggatgcctaagcctggggacgactacagctacaatcagttttccacatatggcgatgccaatgccgctggtgcttattatcagtttaagcggctgcagggcaagaggaaccgagggagagaagaaatcaactttgtggagatcaaaggtgatgaccagctcagtggggcccagcaatggatgactaagtcattgacagaagagaaaaccatgaagtcattcagcaaaaagaaaggtgagcagccaacaggccagcagcggcggaaacaccagatcacatatcttattcatcaggccaaggagcgggagctggaactgaagaacacctggtcagagaacaagctcagccgccgtcagacccaagccaaatatggattctagggctctggaactgattgctcccaggatctcctgccagcccagctggcctggcccccagcttcacctctgggaccccagctgctctaagcccaggatctctttccccaaggacccagccctcgcctctgcgagaatgaacatatttgatagatttttcttaacaagttagaaaattcagctcctttctgtcctggagctagcaaagacttgtgtgatgcctccgaaggggctctgagttctggggtgggagttttgctctctgtcaggtgtgataaaatgttgaaccctccccaccaccacttttttttttttaaaccagggatgtctgttgaaataaaacattcagtctgacaaacaaaaaaaaaaaaaaaaaaaa

SEQ ID NO: 294162 - DNA, 1000 bp, Homo Sapiens; identical to SEQ ID NO: 119060

SEQ ID NO: 294163 - DNA, 1000 bp, Homo Sapiens; identical to SEQ ID NO: 224694

SEQ ID NO: 294164 - DNA, 1000 bp, Homo Sapiens
taaggaaagaacagaaagcacaaaggtttttcttttctttattaatggcctactagaaatgagcagtgcaagagtctacctgtactattctaatacagtaagatattggacacaaaatggaggtaactttttaaaatagattggcttggaagttgaaatgtagattaatggatataacccaatagaaagggattttcaaataaaaccaaagtctatttttttatttactttctaattttgaacagatgactcagtcctaaatctttgcctttatttcctataaaatgtaggtgatacttgtaactcgacttcctggagttaattcttcagcaagaggtgaccctgggagcgtactttaaaataattgctgtacagccattgagtactaacatgatgataggttttcaaaatatctttgtagtggatgctgcataattacattcacttctcttagactgtaaaagactttcttgacttgttttaacagtagagatagcagtacaatttgaatttatggtttaggctctgcaattagaggaacaattgcagtttcctcctacccttcatatggtctgtgtaaaactgatgtttgcttaacttattttaaaagttgattacgttttcagaaaataaagataatcacttttgccatggttataatcaaatctaagctttcagacttgagagccatggtgtaaaactcaaggaggtttatttaaattatgctgactttgctagaattggataaattctgtataagccaagtatgagttcacatgtactcgaatatacagttttcacaaagctattactctcatcagtcaggcttgtatgatctattccttaccacaaaagaagtagacaattgccacttttatttctaatccttaagttgaatgtttcttcttggatgtaagttcaaataaattgatctggataaattttcatttctacttaattaaaacttcctatgtaaaatccaaaaaaaaaaaaaaaaaaa

SEQ ID NO: 294165 - DNA, 1000 bp, Homo Sapiens
gagggaaaggctgtcggaagtagggactcttaggagagcccgtgtgccctgtttggttcagctgtcaggcgtgtgccacacacatcccacctcatcttctggtcccataattctccatggatgggctgcttttagctccagttttccagtagaatgcttgagttttccttttttccgtacctcctggaggatgaaactcataacctgtcatcatcagtactcactgtgttttccactttgacttgaagtcaaatgaagttaccaaagttaaacatggacttctcaaattagaaaaaaacaaacaacaaaaaaacaggttaagtgttttgttatgaaaattatgaaaatgttcttattattatggaaaatttcaaatagatatagagagaataatgttacaaacccccacatactcaacatttagcttcaaaaattatcaactcatggcgggttttgtttcatctgtacaaactagtcggcacactatgatggcctgtggacaaaatccggccctctgactgtttttgtaaataaggttttattggaacacagccacacatatttgttgacttattgtttttggctgtttttgtacttcattggcagagttgagtaattgcagcagactctatggcttgcaaaacctaaaataattactttgtgtagcgctttatagaaaaaatttgctaactcccgatctgtaacccccaacctatccgccgcaccctgatctaggtaattttgaagcaaatcccaaatgtcacatcatctatccatatttcactatgtatttctaaaacatattcttttattcaaaataaaactctaatatcattaacagtattttgtttatattatcaaatacccagtcaatatttgactttctataattgtgtcacaaattaaacattgactttaacagtatgtattacacacttgtactttgtgtactttataacatgtgcactttaaaacagcaggagctctgtgtaaaaaaaaa

SEQ ID NO: 294166 - DNA, 1000 bp, Homo Sapiens
ctcaggaacccacctggcggttccgtgagctcaggcaggcctgacccggcggcacagcctggcagggacctcgtccccaagcctggcagaatgagaggggttgaggtcccgagcgccactcctagccttgccgccttcaatagagaagaaatccctttgctagatagggtcccccaggcagtccccagtggcgggacacaggggtccggctgtggagctcccctgccagcccctggagctccaggagggcctgttggtcccctgttcagaatggagtgcagcccgccagcggaaagtgttcattctgcataggtgtgaggctttatctgcacacaggacatgaaaaccagcagaaaggccctgagctgctgcatagccccatctgatttctgcagttcccgccagcctccaacacggggactctgccgtaactggaatcttcataggtcatattgaaatcttcaaggtgaccatgccccaccggggtgctggggcagtagtcatggcagactcccggcctgggcccccaggattctaggacccccaggcagccccttggactggtcccgggtgccttccaagcacagtctccatgctcccagattctcgaccttcccccggcccgggaggtgcagcctgcgtctgcctctgtcgtgtgtgctgatttgagtggcttagcttgccacagcgcagcctcttctgtccctttcagtcatttgctgtacttccctgtggcacgttaccatggaagccgctccagggtgggtcagggtgcaagctgctggtgaggtttggaagcatcaggctcacgggtgttcatgtgtgttcgtgcgtgtgtgtgcgtacgtgtatataactgaagtgtctgtacggaatgccctttgctagccatgggctggtcaccagattgttttgtaatgcccgccccttgcctcgatattgccagtttcttgtgcaataaacaatcagcagctgtaaaaaaaaaaaaaaaaaaaaaaaa

SEQ ID NO: 294167 - DNA, 1000 bp, Homo Sapiens; identical to SEQ ID NO: 224695

SEQ ID NO: 294168 - DNA, 1000 bp, Homo Sapiens; identical to SEQ ID NO: 119061

SEQ ID NO: 294169 - DNA, 1000 bp, Homo Sapiens
aagatctttcattttccctttaaatatctcttatgtctgcatttcccttccattcccatcactagcactgtcctctaatgccccacccagtggggaagtctccaataggtccccctgcttataacagccaagagggtagctataaactaggtccaataacatgcttcatgtgagggaactgatggacagctgtctaattcataacctctggcctcaacggaatttacagttcagagtccaaaatagcaaggaagtggtgggaagaaggtgagagaaaagggtgggagggtgagagaggggagggaggggaataaggtgtgggcagtagagggaatctgtcagtctcatggtttgccctaggaaaccttctgctcagccccagcctgcttctgggcactcctcctcacccctccttgctgtccatatgggttcaatgtgagtaaccacaattgtagagtgtggccatcttcttctgacatggtcctaaataaacctaactgagtagccagaagaatcacttctaaggtaaacatctgtaaacattggttatatttattttcaatattactggttaacattgtggagctattactgatgggccagactctgtgctaggcacagactttctagggattatttcatttaattctcatggcaaccaccatgcatttgcagataggcaagtcaggctcacaaaaatgtatgcagagcttcagggttgtgatgggtagagccaaacccatctgcccaacccaagggcccgtgcgctccaaccctgcatcgaactgccaacatagtacaccttttagaaaaagattcttgttgcaaaagtaccataggcagtgtgtgtgtaaggtcattgtaaaagtgtagataagcaagaaagtgttataccaccactcagaagtaaccactgttaacatgttggcttatctgctctcaggtgtttctgtgcctgtacatactattcttcttgaataaaaacaggattacacagtgt

SEQ ID NO: 294170 - DNA, 1000 bp, Homo Sapiens; identical to SEQ ID NO: 119062

SEQ ID NO: 294171 - DNA, 1000 bp, Homo Sapiens
ttggagaaggtatttgggattcaattgaaggaaattgataagaatgaccacttgtacattcttctcagcaccttagagcccactgatgcaggcatactgggaacgactaaggactcacccaagctgggtctgctcatggtgcttcttagcatcatcttcatgaatggaaatcggtccagtgaggctgtcatctgggaggtgctgcgcaagttggggctgcgccctgggatacatcattcactctttggggacgtgaagaagctcatcactgatgagtttgtgaagcagaagtacctggactatgccagagtccccaatagcaatccccctgaatatgagttcttctggggcctgcgctcttactatgagaccagcaagatgaaagtcctcaagtttgcctgcaaggtacaaaagaaggatcccaaggaatgggcagctcagtaccgagaggcgatggaagcggatttgaaggctgcagctgaggctgcagctgaagccaaggctagggccgagattagagctcgaatgggcattgggctcggctcggagaatgctgccgggccctgcaactgggacgaagctgatatcggaccctgggccaaagcccggatccaggcgggagcagaagctaaagccaaagcccaagagagtggcagtgccagcactggtgccagtaccagtaccaataacagtgccagtgccagtgccagcaccagtggtggcttcagtgctggtgccagcctgaccgccactctcacatttgggctcttcgctggccttggtggagctggtgccagcaccagtggcagctctggtgcctgtggtttctcctacaagtgagattttagatattgttaatcctgccagtctttctcttcaagccagggtgcatcctcagaaacctactcaacacagcactctaggcagccactatcaatcaattgaagttgacactctgcattaaatctatttgccatttcaaaaaaaaaaaaaaaaaaaa

SEQ ID NO: 294172 - DNA, 1000 bp, Homo Sapiens; identical to SEQ ID NO: 224697

SEQ ID NO: 294173 - DNA, 1000 bp, Homo Sapiens
tatatagcagccaaaatcaatgaagctaaagatttactagaaggtcaagctaaaaaatgaagtaaatgtatgatgaattttaagttcgtattagtttatgtatatgagtactaagtttttataataaaatgcctcagagctacaattttaaaaaatgatttagcacaagctaaatctcaaagccttggtataattttcttgtttaaatttggggattttaaatcagattatagtttagaatatttgcgtattaattatgggcaagcacacaccttctgaatagaaatattgttcattactcatttagcagataatttgggacctatgtctacttttcaaggcaaagtgaagatgacagtccttgctctcagggagcccccactttaatgggagactgataaactggtaattagactgtgataaatagtatgatggaaattagcttaagctgtttaagtagggactcttcttattcggtggaaaggctgttccaggtacaggcaactggcctggcaacttggatacttggaaccttgtatttaaaagtgaatttaaccacaactgagacctaagaaattgacctaggggtgtgtgtgtgtgtgtattctatgtacatataaaccatttttatttcatgcattaaaaatagtatgataaagatttcagagtacaggtctggtacaatcacagttcattgcagcctcaacctcctgggtttaagcagtcctcccgcctcagcctcccaaagtactgggattacaggcatgagtatttacattgtattcagctagccccttaaaggtaatgaccatttataaattattccttcagttggctatttcttgacataatcaaacttctgcaattgttatgattaagcttaaaccctgttagcaaaactgaaaactgaaatgttctcaatatcaacatatttaatttggactctttagaatttatacactaataaatttaaatgatgtttaaaaaaaaaaaaaaaaaa

SEQ ID NO: 294174 - DNA, 1000 bp, Homo Sapiens; identical to SEQ ID NO: 224698

SEQ ID NO: 294175 - DNA, 1000 bp, Homo Sapiens; identical to SEQ ID NO: 224699

SEQ ID NO: 294176 - DNA, 1000 bp, Homo Sapiens; identical to SEQ ID NO: 224700

SEQ ID NO: 294177 - DNA, 1000 bp, Homo Sapiens; identical to SEQ ID NO: 224701

SEQ ID NO: 294178 - DNA, 1000 bp, Homo Sapiens; identical to SEQ ID NO: 119065

SEQ ID NO: 294179 - DNA, 1000 bp, Homo Sapiens
tattctatctagatgtgtaagtgttttttttaaaatcacatggaacggttttttttatactaaaaagtggagggagatttgtttaaacaagtatttctaaaagaaatatgtacatagttctggaaattatttgtggtaaggaaatattctttactccagttgcatttctcagacaataaagtggtgcatccatgctacctcctactttgtcaacaaagatgctatttaccctttacatttttgtatcataatagattttaaaaatctaatgttctttattgcaagacattcttttgttaacaggtttgtttctttttaatgttttacctaaaatttgacatgcttacaggacaggtttgcctcttactttatttaacattgtagaaatgtaattaataaacaatgctcactacacagtttagaatagacgttctcatttatattatcttccaaatttgatcagttagcaaaacttaatacaccaattaaaatatttctacatatgagaatgtttacaatttaaattttagaacttgttttggatgtgattatatgtacgaaaatcgtgtaacactatgctcatgctaagaaccgacataacagaattactgaaataaatgtgctgtgaggaatggaaaatatggtgcaggtgtcttggtcatgataaattgtgattctttttaaaaattttttccaaaaacaattaggtattttaatctgaaatcagattcctttacaaacaacaagtttttgtatgcaagcaccattttatttcatgtagtatggctaatactatagttgaaccaaggatatgcattgattctttgcttcgtatgtaaataaagttaaaaacagttaaaataaggagtattttggtagagtatatacatacctcactgccagtgaaattgctttcctatggtatatctccttaccagaaaaatctctaaataaaaaaaggtttaaagaaaattaaaaaaaaaaaaaaaaaaaaaaaaaa

SEQ ID NO: 294180 - DNA, 1000 bp, Homo Sapiens; identical to SEQ ID NO: 119066

SEQ ID NO: 294181 - DNA, 1000 bp, Homo Sapiens
cagtgaggaagtttctattagtatatccaatttagcaaaattggtaccaaaatgatttctttggtaattgtgtgaaatataagctttttaacagggcatttaagtggctagcaaatcagtaattaaaaattaagctttctactccaagtatttcacaaacgcatctgccattttcctcatttaaaccttggttatcttggcctgataccacataaaagaatgtagaatggctgaagagatcaagaatttaaagcttctagtcttaacatacttgcatccacttcaaattcaaatcaaaagccagggaaatctaagtgcaaccctaccacttctctgctgagaaccttccagtggttcccctcaccttctgcagaagtctccaatatggagtacatgcacttgggcatttaatatataccactggtgtgtgtgggagggagggaggaggaatactagccctttttatatatttacacaagcaaaacttttaaatatttgaattgacagttacatgtttcataactttgtatgtctattggttgtgcaggtgtaattttttccctttttgattagggttacaaaatttagagaccagtatgattaagttgaagctccttagcctccttcgacctagtctctgcatacctcaacttttacgtaccaatgctactctgctgttcacaattgcctcatgtaatctgcagattcctgcctccccactttggttcagtctgtcttgtgcacctggaacaactgttctcccttgtgactaattcctattttctagagtttaggcatcatctcttcctttgggaagttatctgattcacgactgccttctctgacatccccaccttcctctgtgcccccatagcactgtgtataccgctactaccactgcaattcacattatattggaatgaacaattcacatgtctaccacaagtctgtaaacataaccttatttgaaatgaattgcaataaagctctgttacaacgt

SEQ ID NO: 294182 - DNA, 1000 bp, Homo Sapiens; identical to SEQ ID NO: 224702

SEQ ID NO: 294183 - DNA, 1000 bp, Homo Sapiens
ccttgccgcaaagtgtgtaacggaataggtattggtgaatttaaagactcactctccataaatgctacgaatattaaacacttcaaaaactgcacctccatcagtggcgatctccacatcctgccggtggcatttaggggtgactccttcacacatactcctcctctggatccacaggaactggatattctgaaaaccgtaaaggaaatcacagggtttttgctgattcaggcttggcctgaaaacaggacggacctccatgcctttgagaacctagaaatcatacgcggcaggaccaagcaacatggtcagttttctcttgcagtcgtcagcctgaacataacatccttgggattacgctccctcaaggagataagtgatggagatgtgataatttcaggaaacaaaaatttgtgctatgcaaatacaataaactggaaaaaactgtttgggacctccggtcagaaaaccaaaattataagcaacagaggtgaaaacagctgcaaggccacaggccaggtctgccatgccttgtgctcccccgagggctgctggggcccggagcccagggactgcgtctcttgccggaatgtcagccgaggcagggaatgcgtggacaagtgcaaccttctggagggtgagccaagggagtttgtggagaactctgagtgcatacagtgccacccagagtgcctgcctcaggccatgaacatcacctgcacaggacggggaccagacaactgtatccagtgtgcccactacattgacggcccccactgcgtcaagacctgcccggcaggagtcatgggagaaaacaacaccctggtctggaagtacgcagacgccggccatgtgtgccacctgtgccatccaaactgcacctacgggtcctaataaatcttcactgtctgactttagtctcccactaaaactgcatttcctttctacaatttcaatttctccctttgcttcaaataaagtcctgacactattcatttga

SEQ ID NO: 294184 - DNA, 1000 bp, Homo Sapiens
ggcaggaggccaataaccccaactgctgtaactgcatcatagaccaaatctttacaggtggcctgcaatcagatgtcacatgtcaagcctgccatagtgtttctaccaccatagacccatgctgggacatcagtttggacttgcctggctcttgtgccacattcgattcccagaacccagagagggctgacagcacagtgagcagggatgaccacataccaggaatcccctcacttacagactgtctacagtggtttacaaggccagagcacctaggaagcagtgccaaaatcaaatgcaatagttgccaaagctaccaggagtctactaaacagctcacaatgaaaaaattacccattgtggcttgttttcatctcaagcggtttgagcatgtaggcaaacagaggcgaaagattaatacctttatctcctttcccttggagctggacatgactccgtttttggcctctactaaagagagcagaatgaaagaaggccagccaccaacagattgtgtgcccaatgagaataagtattccttgtttgcagtgattaatcaccatggaactttggaaagtggccactataccagcttcatccggcaacaaaaggaccagtggttcagctgtgatgatgccatcatcaccaaggctaccattgaggacttactctacagtgaagggtatttactgttctatcacaaacagggtctagagaaagactagtcttaccagaccacttactgaaaaaaaagtaaatgattaggcaaggattttgaagtgacacacagacctacttggaatggacaatgacagtaacacctatgtgacagctagtatcttgatataaagaacctattttagcatggcccatgggtctgtcggaagaaaaaaatgaatactaaccagtgaccattcaaccttaagaaatggggagagggagaagaggttgaaaatggtcacataaagcataatgaaatgaaaagaatgctttaggtggg

SEQ ID NO: 294185 - DNA, 1000 bp, Homo Sapiens; identical to SEQ ID NO: 119067

SEQ ID NO: 294186 - DNA, 756 bp, Homo Sapiens
cgcgacgcgggcgcaatggcggggacccggggcttgatgctgcttgggcctggcccagtggcgggtcctagggacgtgggtacctgcagaggccggcagatggagattcagaaacataaggacaacaagaaacttccccaaggtatcattatagtctttagacttcagacacacaccacacctcaaatatatacacaactgaaaggaaaattaaggaagtttttcaaagaaccctattccgagtaagaagtgtgttgcatgaatttctaagagccagaaaatgcatgacacaggagaagatgtaccctcatctgttcagtgagagatgtgcaaatcaacatcaacacagaactgctgaagaaaaaaaatatgtctctgaaaagcaacttattcactggagatgtgaggagccatccgcacatcacaattctatagacatcaaacgcatgaagcatttcggatctgctttaagactgaggcagactttccatctggacacagccgaccatccatgtgtcattacaatgaatccagcacttccctggaagctggaagggtcaaattcaacttcaactctgccacttcctgcttaacttgctgtttaaccttgggcaagctgccatcccacacgaggccgaaggtgtcggtttttaaaatacagaaatttggttccatgagggattatcaatatactgctggtgggccaaattccatctgctacttgcctttgtaaataaagttttattgaaacacaaa

SEQ ID NO: 294187 - DNA, 1000 bp, Homo Sapiens; identical to SEQ ID NO: 119069

SEQ ID NO: 294188 - DNA, 1000 bp, Homo Sapiens; identical to SEQ ID NO: 223489

SEQ ID NO: 294189 - DNA, 1000 bp, Homo Sapiens
tgagagcagtcctgcagcctcattccttagttcccggagctggcaagggctggagccccgcctgggtcagacgccagtgacagaagctgtgagtggaagacgagggattgccatcgcctatgaggatgagggaagcggctgataccatgtggggctggagacatagatggacttatgaatggctgctaggacctttagtgctccctgcaccaacctcccatccccctgccaagatccttgaaggaccctggaaggagggagagcaggcagcccttcacaggataggatccgtctctgtcctgtcctggcactggcacaagctcagcacatgcccagtaatgcgtgttgtttggctgatggaataaagggcttagggacttccctgaggcctctggacccatctgtcttcctgagggcagcccaggacctttggccaatcccagttcccaggctgcagttgagggtctgtccttgtcaaaaggcaggtgctagacagtctagaccagggtttctcaaactcgtacttgacatttggggccagataattctttgttgtggggctgtctggtgtatggtagggtgctcagcagcatccctggcctctgcccactagacatcagaagcactcccccagttgtgacaaccaaaaatatctccagaccttggcaaatgttatctgtgggggaaaattgccctcaattgagaaccactggtctagctagacctgcactgtccagtacagtagccactaaatacatgtggctaaacttaaatttaagttaattaagattaaaagctcagtttctcagtcacattagtcattcaagtgttcagacagccacatgaggggacagtgcagctacaggatatgccatcatggcagaaagttctattggttggacagcgttggtctatactgactcttatttctcagggagatcacagcaacctaaataaaccagataccttttctcttaaaaaaaaaaaaaaaaaaaaaaaa

SEQ ID NO: 294190 - DNA, 1000 bp, Homo Sapiens
aatcagtgcggaagtttctgcaaaggcagaaaaagtacatgagttaaatgaagaaataggaaaactccttgctaaagccgaacagctaggggctgaaggtaatgtggatgaatcccagaagattcttatggaagtggaaaaagttcgtgcgaagaaaaaagaagctgaggaagaatacagaaattccatgcctgcatccagttttcagcagcaaaagctgcgtgtctgcgaggtctgttcagcctaccttggtctccatgacaatgaccgtcgcctggcagaccacttcggtggcaagttacacttggggttcattcagatccgagagaagcttgatcagttgaggaaaactgtcgctgaaaagcaggagaagagaaatcaggatcgcttgaggaggagagaggagagggaacgggaggagcgtctgagcaggaggtcgggatcaagaaccagagatcgcaggaggtcacgctcccgggatcggcgtcggaggcggtcaagatctacctcccgagagcgacggaaattgtcccggtcccggtcccgagatagacatcggcgccaccgcagccgttcccggagccacagccggggacatcgtcgggcttcccgggaccgaagtgcgaaatacaagttctccagagagcgggcatccagagaggagtcctgggagagcgggcggagcgagcgagggcccccggactggaggcttgagagctccaacgggaagatggcttcacggaggtcagaagagaaggaggccggcgagatctgaacccgtctcccgggtgctgtaaatagtctgataaacgttcacacagtctaaaattaccctttatatttgctgaatacaactcatcttttgtagtttaaaatttctattgttttggagctagctgtgagtttctagaagtgtacagagttgctcctgtgttcccgggtcatgttgagtaggaataaataaatctgatgctgcctcctgaggctgcggggggtttaa

SEQ ID NO: 294191 - DNA, 1000 bp, Homo Sapiens
tgggaaagtggtttctacgtcactggacaccggttctgagcattagtttgagaactcgttcccgaatgtgctttcctccctctcccctgcccacctcaagtttaataaataaggttgtacttttcttactataaaataaatgtctgtaactgctgtgcactgctgtaaacttgttagagaaaaaaataacctgcatgtgggctcctcagttattgagtttttgtgatcctatctcagtctgggggggaacattctcaagaggtgaaatacagaaagcctttttttcttgatcttttcccgagattcaaatctccgattcccatttgggggcaagtttttttcttcaccttcaatatgagaattcagcgaacttgaaagaaaaatcatctgtgagttccttcaggttctcactcatagtcatgatccttcagagggaatatgcactggcgagtttaaagtaagggctatgatatttgatggtcccaaagtacggcagctgcaaaaagtagtggaaggaaattgtctacgtgtcttggaaaaattagttaggaatttggatgggtaaaaggtacccttgccttactccatcttattttcttagccccctttgagtgttttaactggtttcatgtcctagtaggaagtgcattctccatcctcatcctctgccctcccaggaagtcagtgattgtctttttgggcttcccctccaaaggaccttctgcagtggaagtgccacatccagttcttttcttttgttgctgctgtgtttagataattgaagagatctttgtgccacacaggatttttttttttttttaagaaaaacctatagatgaaaaattactaatgaaactgtgtgtacgtgtctgtgcgtgcaacataaaaatacagtagcacctaaggagcttgaatcttggttcctgtaaaatttcaaattgatgtggtattaataaaaaaaaaaaaaacacaaacaaaaaaaaaaaaaaaaaaaaaaaaa

SEQ ID NO: 294192 - DNA, 1000 bp, Homo Sapiens
ctccgccatttgggaaagtggtttctacgtcactggacaccggttctgagcattagtttgagaactcgttcccgaatgtgctttcctccctctcccctgcccacctcaagtttaataaataaggttgtacttttcttactataaaataaatgtctgtaactgctgtgcactgctgtaaacttgttagagaaaaaaataacctgcatgtgggctcctcagttattgagtttttgtgatcctatctcagtctgggggggaacattctcaagaggtgaaatacagaaagcctttttttcttgatcttttcccgagattcaaatctccgattcccatttgggggcaagtttttttcttcaccttcaatatgagaattcagcgaacttgaaagaaaaatcatctgtgagttccttcaggttctcactcatagtcatgatccttcagagggaatatgcactggcgagtttaaagtaagggctatgatatttgatggtcccaaagtacggcagctgcaaaaagtagtggaaggaaattgtctacgtgtcttggaaaaattagttaggaatttggatgggtaaaaggtacccttgccttactccatcttattttcttagccccctttgagtgttttaactggtttcatgtcctagtaggaagtgcattctccatcctcatcctctgccctcccaggaagtcagtgattgtctttttgggcttcccctccaaaggaccttctgcagtggaagtgccacatccagttcttttcttttgttgctgctgtgtttagataattgaagagatctttgtgccacacaggatttttttttttttttaagaaaaacctatagatgaaaaattactaatgaaactgtgtgtacgtgtctgtgcgtgcaacataaaaatacagtagcacctaaggagcttgaatcttggttcctgtaaaatttcaaattgatgtggtattaataaaaaaaaaaaaaacacaaacaaaaaaaaaaaaaaa

SEQ ID NO: 294193 - DNA, 1000 bp, Homo Sapiens; identical to SEQ ID NO: 293463

SEQ ID NO: 294194 - DNA, 1000 bp, Homo Sapiens
ctgttcatggagacatcagcaaagactgcaatgaacgtgaacgaaatcttcatggcaatagctaagaagcttcccaagaacgagccccagaatgcaactggtgctccaggccgaaaccgaggtgtggacctccaggagaacaacccagccagccggagccagtgctgcagcaactgagccccccttgcctgcccgctgcccccgcctcctccgcctgaatgacccgactggaatccactctaaccaatcgcacttaacgactcgggccaccactgggggggcagggggaggggtccaccatgatttctccatataattttgatcataggccggagtgagtcattccacctgcacctttctgtacaaatactaattcaattttaagtcttaagtcacttttttaatatatatgatcttctgctcttcccacttcctcccctttctactgctctcccattttcccttgctgggagtagccacatgctcttgccccccaacccttgtatatggggacagtggggtcagtgcagctaccctttctttccctcctgcggaacagcggacccagcaagagcatccacatcctcactttgttcggagtggtctttggtttgggcggtggggcagaccttgggaaggggcttaggaagggagaggcagctcttccttcagctggctctcatcaggctgcagccccctccccgctcccacctccctgctgggaaaccacagcattatcacagcattattgtgacagccacgaacccattgcccacaacccctccaccctcggtcaccccaacctctggctctgagccctgttctgaccaaatcatgatgatgagtatttgggggtgggtgggtaagggggggagtgggaggggacggaaccaactttttctgtattttgtattgtatgttttcttcaacatgtaaccaatcagtatcttgtcaatatagtcagccgatcgatcgacctcaaaaaaaaaaaaaaaaaaaa

SEQ ID NO: 294195 - DNA, 1000 bp, Homo Sapiens; identical to SEQ ID NO: 224704

SEQ ID NO: 294196 - DNA, 1000 bp, Homo Sapiens; identical to SEQ ID NO: 119070

SEQ ID NO: 294197 - DNA, 1000 bp, Homo Sapiens; identical to SEQ ID NO: 119071

SEQ ID NO: 294198 - DNA, 1000 bp, Homo Sapiens; identical to SEQ ID NO: 119072

SEQ ID NO: 294199 - DNA, 1000 bp, Homo Sapiens
tagaaaggtttaaaagaagtccacattgggtcacgtggcatcggctccctgggtttcgcagctgccaccgccacccgggtctggcttagctcccggatcctttaagatttggctccgccctgcgctctcgttggccaatcggcgccaagaccctgggggcgggggtcagcggctttgctccggaagccgcgctcttaggagtgcgcctggcgggacggtggggtctgccttggggttggacttagggttagggtctatgtcgcccccggtggtcacgagcatgctcccgccagcctcctcttgattgattgattgattgattgattgacaggtctcgctgtgtcgcccaggctgtaatgcagtggcgcgatcaccgctcactgcagtctccacctccaggactcaagtgatactcctgcctcagcctcttgagtggctcctgctcccgccaccacgcccggctaaatttttaattacttgtagaaatggggcggggtggggagtgtctcccaatcttgcccaggctggcctcaaactcctggactcaagcgatcctcccgcctcggctccctaagtgctggaattacaggcgagagccacagcgcctggcctcctcgtccttttcaagtggtcacaccttccaagaaggtcgcctgagaccctcctgaggggcaggtgctcgtcaaaggggcccacgtctaggtagggtctcttgagtcaggaaagcatagtttcacggtgttctgggcctctgaaagaagaatgggctgccacccagaccgctaattcatagatctgctgctgggaattaggggaacaatgcgtccaggttaggattcaggtctcacatcttcctgaaagtgagagccaacctgggtattagaaatctaattcctctcaaatatttgccttgggaatgctcccgggcaggtgcaaccccacccccagctccacacacctggacagaagcacagattaaaccctcttttgtttgtctttt

SEQ ID NO: 294200 - DNA, 1000 bp, Homo Sapiens
tcaggtggcacccagggcgaatggggcccagggcagaccttcagggccagagccctggcggaggagaggccctttgccaggagcacagcagcagctcgcctacctctgagcccaggccccctccctccctcagccccccagtcctccctccatcttccctggggttctcctcctctcccagggcctccttgctccttcgttcacagctgggggtccccgattccaatgctgttttttggggagtggtttccaggagctgcctggtgtctgctgtaaatgtttgtctactgcacaagcctcggcctgcccctgagccaggctcggtaccgatgcgtgggctgggctaggtccctctgtccatctgggcctttgtatgagctgcattgcccttgctcaccctgaccaagcacacgcctcagaggggccctcagcctctcctgaagccctcttgtggcaagaactgtggaccatgccagtcccgtctggtttccatcccaccactccaaggactgagactgacctcctctggtgacactggcctagggcctgacactctcctaagaggttctctccaagcccccaaatagctccaggcgccctcggccgcccatcatggttaattctgtccaacaaacacacacgggtagattgctggcctgttgtaggtggtagggacacagatgaccgacctggtcactcctcctgccaacattcagtctggtatgtgaggcgtgcgtgaagcaagaactcctggagctacagggacagggagccatcattcctgcctgggaatcctggaagacttcctgcaggagtcagcgttcaatcttgaccttgaagatgggaaggatgttctttttacgtaccaattcttttgtcttttgatattaaaaagaagtacatgttcattgtagagaatttggaaactgtagaagagaatcaagaagaaaaataaaaatcagctgttgtaatcacctagcaaaaaaaaaaaaaaaaaaaa

SEQ ID NO: 294201 - DNA, 1000 bp, Homo Sapiens; identical to SEQ ID NO: 116432

SEQ ID NO: 294202 - DNA, 1000 bp, Homo Sapiens
agctccaggagctgcaccgagctgggggcgacctcatgcaccgagacgagcagagtcgcacgctcctgcaccacgcagtcagcactggcagcaaggatgtggtccgctacctgctggaccacgcccccccagagatccttgatgcggtggaggaaaacggggagacctgtttgcaccaagcagcggccctgggccagcgcaccatctgccactacatcgtggaggccggggcctcgctcatgaagacagaccagcagggcgacactccccggcagcgggctgagaaggctcaggacaccgagctggccgcctacctggagaaccggcagcactaccagatgatccagcgggaggaccaggagacggctgtgtagcgggccgcccacgggcagcaggagggacaatgcggccaggggacgagcgccttccttgcccacctcactgccacattccagtgggacggccacggggggacctaggccccagggaaagagccccatgccgccccctaaggagccgcccagacctagggctggactcaggagctgggggggcctcacctgttcccctgaggaccccgccggacccggaggctcacagggaacaagacacggctgggttggatatgcctttgccggggttctggggcagggcgctccctggccgcagcagatgccctcccaggagtggaggggctggagagggggaggccttcgggaagaggcttcctgggccccctggtcttcggccgggtccccagcccccgctcctgccccaccccacctcctccgggcttcctcccggaaactcagcgcctgctgcacttgcctgccctgccttgcttggcacccgctccggcgaccctccccgctcccctgtcatttcatcgcggactgtgcggcctgggggtggggggcgggactctcacggtgacatgtttacagctgggtgtgactcagtaaagtggatttttttttctttaaaaaaaaaaaaaaaaaaa

SEQ ID NO: 294203 - DNA, 1000 bp, Homo Sapiens; identical to SEQ ID NO: 224706

SEQ ID NO: 294204 - DNA, 1000 bp, Homo Sapiens; identical to SEQ ID NO: 287368

SEQ ID NO: 294205 - DNA, 1000 bp, Homo Sapiens
ctagataattctgaaataatttggattctttcatttttcaggatttgagctcatcaattatgttaaatttcctatattctgttacaaatataatacagatttcataagtctgccttgattcactgctccctaatccagagcagttaaatttcaaaatcacatagttatatagcctacctgccaaaaaagaataacccatccctgtcttcttaaagtggtagggttttaaaattcatgatacaagtaacaaagtaagttgataacaaatactattttgaactgggcaaaatctagcccaatatgtaattgtgttccccttgtatctgagaggcctgtgttggacaaccatagtactctgctttcactgtgctcagataacctgaaatatatagttgtttctgagtagttctgagtaggaaagaaccaaatgtaaatttccttagagaccatcctggagaagacagttctaaatcggggcttgatttttcatctatgatcctagatgttctcctgaaagaatgactagcctttttataacgatacaaagttttttaaaaatacataaatgtcataaagtttattcctgtgtatacacactctgggttcaggaggttttgtgcttacatttcactactcaaatgccttcgcaaatctcagaacattcctcaccatcactgcaggcctgtgaacagataactttcatcaattaggatggctggctagtggcagggacttcatataaagaaatctttcccagaattgtttttccacattgccttctaatttgatcactccctataacagatgttcaaaattcggccacagctctcttatgaaggcagagtcagataaaatgatattctgcaattatctagatcataagcataaaataaatattacaaaaatgattgtatttaaagaaattttttaaaatccagaaagtcatttaaaatagaacctcatatagtatgaacaaactataaaaatattttacatttca

SEQ ID NO: 294206 - DNA, 1000 bp, Homo Sapiens; identical to SEQ ID NO: 119071

SEQ ID NO: 294207 - DNA, 1000 bp, Homo Sapiens
caggtacccgcaagatggagtacaagggcagcagctggcatgagacctgcttcatctgccaccgctgccagcagccaattggaaccaagagtttcatccccaaagacaatcagaatttctgtgtgccctgctatgagaaacaacatgccatgcagtgcgttcagtgcaaaaagcccatcaccacgggaggggtcacttaccgggagcagccctggcacaaggagtgcttcgtgtgcaccgcctgcaggaagcagctgtctgggcagcgcttcacagctcgcgatgactttgcctactgcctgaactgcttctgtgacttgtatgccaagaagtgtgctgggtgcaccaaccccatcagcggacttggtggcacaaaatacatctcctttgaggaacggcagtggcataacgactgctttaactgtaagaagtgctccctctcactggtggggcgtggcttcctcacagagagggacgacatcctgtgccccgactgtgggaaagacatctgaattcaacacagagaagttgctgcttgtgatctcacacacagatttttatgttttctttctcacccaggcaatcttgccttctggtttcttccagccacattgagactttcttctagtgcttttcagtgatactcacgtttgcttaaaccctttagtgctttgtgatagttcagtcccagggaaagagaaaactcgccctaggccctaggtgggaagatggtttgaaatttttgtaatcgagtaaggcacacccaaatgtaaaaatccttttgaatgatgcctttataaatctttctctcactgtctatttaagtgcaattaacatatgtcacgaacttgaaagttttctaaactcaataaggtaatgaccagttgttatttacagctctgtaacctcccgttgcgtcaagtctaaaccaagattatgtgacttgcaataaagttattcagaacagaaaaaaaaaaaaaaaaaaaaaaaaaaaaaaaaa

SEQ ID NO: 294208 - DNA, 1000 bp, Homo Sapiens
aaggtacccgcaagatggagtacaagggcagcagctggcatgagacctgcttcatctgccaccgctgccagcagccaattggaaccaagagtttcatccccaaagacaatcagaatttctgtgtgccctgctatgagaaacaacatgccatgcagtgcgttcagtgcaaaaagcccatcaccacgggaggggtcacttaccgggagcagccctggcacaaggagtgcttcgtgtgcaccgcctgcaggaagcagctgtctgggcagcgcttcacagctcgcgatgactttgcctactgcctgaactgcttctgtgacttgtatgccaagaagtgtgctgggtgcaccaaccccatcagcggacttggtggcacaaaatacatctcctttgaggaacggcagtggcataacgactgctttaactgtaagaagtgctccctctcactggtggggcgtggcttcctcacagagagggacgacatcctgtgccccgactgtgggaaagacatctgaattcaacacagagaagttgctgcttgtgatctcacacacagatttttatgttttctttctcacccaggcaatcttgccttctggtttcttccagccacattgagactttcttctagtgcttttcagtgatactcacgtttgcttaaaccctttagtgctttgtgatagttcagtcccagggaaagagaaaactcgccctaggccctaggtgggaagatggtttgaaatttttgtaatcgagtaaggcacacccaaatgtaaaaatccttttgaatgatgcctttataaatctttctctcactgtctatttaagtgcaattaacatatgtcacgaacttgaaagttttctaaactcaataaggtaatgaccagttgttatttacagctctgtaacctcccgttgcgtcaagtctaaaccaagattatgtgacttgcaataaagttattcagaacagaaaaaaaaaaaaaaaaaaaaaaaaaaaaaaaaa

SEQ ID NO: 294209 - DNA, 1000 bp, Homo Sapiens
gccaggtacccgcaagatggagtacaagggcagcagctggcatgagacctgcttcatctgccaccgctgccagcagccaattggaaccaagagtttcatccccaaagacaatcagaatttctgtgtgccctgctatgagaaacaacatgccatgcagtgcgttcagtgcaaaacccatcaccacgggaggggtcacttaccgggagcagccctggcacaaggagtgcttcgtgtgcaccgcctgcaggaagcagctgtctgggcagcgcttcacagctcgcgatgactttgcctactgcctgaactgcttctgtgacttgtatgccaagaagtgtgctgggtgcaccaaccccatcagcggacttggtggcacaaaatacatctcctttgaggaacggcagtggcataacgactgctttaactgtaagaagtgctccctctcactggtggggcgtggcttcctcacagagagggacgacatcctgtgccccgactgtgggaaagacatctgaattcaacacagagaagttgctgcttgtgatctcacacacagatttttatgttttctttctcacccaggcaatcttgccttctggtttcttccagccacattgagactttcttctagtgcttttcagtgatactcacgtttgcttaaaccctttagtgctttgtgatagttcagtcccagggaaagagaaaactcgccctaggccctaggtgggaagatggtttgaaatttttgtaatcgagtaaggcacacccaaatgtaaaaatccttttgaatgatgcctttataaatctttctctcactgtctatttaagtgcaattaacatatgtcacgaacttgaaagttttctaaactcaataaggtaatgaccagttgttatttacagctctgtaacctcccgttgcgtcaagtctaaaccaagattatgtgacttgcaataaagttattcagaacagaaaaaaaaaaaaaaaaaaaaaaaaaaaaaaaaa

SEQ ID NO: 294210 - DNA, 1000 bp, Homo Sapiens; identical to SEQ ID NO: 292102

SEQ ID NO: 294211 - DNA, 1000 bp, Homo Sapiens
cttcggggtatccatgctgcttgggaggttaagggagggggcatgaaatcaaaacgaaacaggaaatatgtgtcatattggatttggtcttttccgggtttattggcataatagttggaactgtctctctgggctatgagggtgctgtgttatttaaaggtggtctttcccagaacacctggccttttcttttctgcctctgccaaacatcacagcctttgggttggattagtcagcaccccttgggattgtgcagaagaggtttggggttgcatcgagtgtcacctgtggtgaacagaatctgagggacacaactctctcacaggcacttcctccaacctggagacagagttctcctggtgtgtgcccaggggtggaggagaaattgacagtctgcctctgaactttcaggactttaaaaagcactcatgtttccatcctcactgttgactcctggcttaaagggatctcccggggtgagtgaggaggcgggatcggaccctggcagtctgacggcagcacctgtgttcctctgcactgggccgtggatgacattacacaccttgccactcccacggtcctgtgtgttccggatattttaaaataatggctataaggttgagcacttcaggatacgctgttttgctgtgtgcagatggaggcagtggctggagtgaatgaacggcaacacttgctggcaaccggcagaagctgagagacagggaacaggctctcctccagagcctccaggagccaggcctttggacaccttgaatgtgggcttctgggagaccatgcgtttctgttataagcagcccagtctctggcagtttttacggctgccccggaacactcatctatacctgtctgacaaggtcaagctccaaggaagggactctctacatatctacattgtttgcagattttacaataatcatttattcttgcatggctgatcattgttaaccaatacaaataaaataataaagaaatgacccac

SEQ ID NO: 294212 - DNA, 1000 bp, Homo Sapiens
tctatttggtgggaggtgtggccctgttcttcctcaccccagttccatgacattggctggtataggagccacagtcaggaaagcacttgaggcagcatctgttgggccacccccggctcagtgctggaatgttgcagtgtaggtttcccagggaaggggggtgggggtaggtgggctccacaggatgggggaggagcatgtccactgagtatcttccttatgttgctgtgatattgatagcttttattttctaatttttaaaaaatggtcatattatgagtcaaagagtatcaaatcagtgttggatggaccacccaagggtgaggagaggggctggaagccctgggcattaggagaagggagtgggtgctggcatggacatgactggatagaattttctcaggagggagcttggtggattttgaaggtaaaactttctgggtttatcatgttttaattttagagacagggagtgatgaatcatcaccggttgtccccttatctaactccataaaagtgggaatttcaaaagaacacctcatccaaggagctggggcagacttcattgattctagagagacctgtttcagtgcctactcatccctgccctctggtgccagcctccttaccatcacggcttcactgaggtgtaggtgggtttttcttaaacaggagacagtctctcccctcttacctcaacttcttggggtgggaatcagtgatactggagatggctagttgctgtgttacgggtttgagttacatttggctataaaacaatcttgttgggaaaaatgtgggggagaggacttcttcctacacgcgcattgagacagattccaactggttaatgatattgtttgtaagaaagagattctgttggttgactgcctaaagagaaaggtgggatggccttcagattataccagcttagctagcattactaaccaactgttggaagctctgaaaataaaagatcttgaacccataaaaaaaaaaa

SEQ ID NO: 294213 - DNA, 1000 bp, Homo Sapiens
gcaggcatctgatttgcatattcattcatggaccactgtttcttgcttgtacctctggctgactaaatttggggacagattcagtcttgccttacacaaaggggatcataaagttagaatctattttctatgtactagtactgtgtactgtatagacagtttgtaaatgttatttctgcaaacaaacaccttcttattatatataatatatatatatatatcagtttgatcacactattttagagtcttaatgccaagtcagcagatttgctttatgaattacagggactagaaatgcccacattcaggaaatttgtaataacattgtctagacacctatcctcattctagtagaaagtgtgtacatactgtaaatatgtgtgattgcttgacttgaaaaggtttgaattctgaatgttataccatccttgtaagtaagtttgtaatttccaccataaattatggtaaatataaaactccagaggttgttctactccatacagttcacactgattgtgacacattcttagtagctagtgtctgttctagtcactgcactggagtctacgagccggaactcgctatatgcacgtgtgtgtgtccgtatgtaagaaagtgtgcaccgagtgactgaatggttgagatgaattggaatgctgaagactaacgaagaaactagagactgatatcgagcattctgcccacctcgctctgtatttaattaattgtgctatatgttgctttaacaacccattgagcagtcagggaatgtgagtaagcttgctgccaaaggtaactaggaaagcattcatctgctgcctccttgtttttgctcctagagagtgaaaatacaggcaattttactgtgagtgtttcactggaaatgtacaatctttgtgtgttagagtatttgttttagtaagaaatgtttacacagcttgtggaattatttcgtgggaaaataaatttttataacttctcccaaaaaaaaaaaaaaaaa

SEQ ID NO: 294214 - DNA, 1000 bp, Homo Sapiens
taatagctctggtgatcctgttggctttgggtttcctgacccatcccgcataggtagagcctcttgttcctaggcatgacctagggaaaaacccagctgccttctctgccctgtgcccactcccttctctactcttccccagcaccatgccaaaaggtcttatctgaaaggtaagaaataaacaatgaaagcgatgaggggaccatttacataaaacacagagcttagacactcttcccctcctatgaaataattggttgttggcaccatctcaccaccgcatatccctcaccccctcggcaagcaccaatccttggtgctgccgtttttaaaatcttccaaatgcctttttttcctcagaggcagagaatgactaagtacggggagcagactcctgttgtgcagactcctgtccccttggtttctgtgtttgtctctctgccatcttaggttgccatgagccatggtgtcaacatgcttagccccctctgtaactgcctccctttagttcaatggacagacctcccaaggcaaaaactaccttctgacttgggttgaggctgggttcccctctattgttcccctatcataagagctaggccaagcctatgggaccttgagtcatgcaggatgggatctgtggtcaaaggacaggcgaggagctgtgggcgcagggcctgccgccactgcctacatcttctctcttccccatcttgcattggaggtcccagaaaacaattagcttctggcaaagggggtacccacttctttccctgttgactttgctgtttcccaggctcctttttgtgtttttataactgtcaccagttagccactgtttaaattgtatatattgttctgaggcgcctggcctgtcccttcagtgagccatgcccacccttgtgttgtagtgagaagctgttgtcacgactaaccttctgtctctgaaattgtttgtttcaaataaagagttaaaattgtcaaaaaaaaaaaaaaaaaa

SEQ ID NO: 294215 - DNA, 1000 bp, Homo Sapiens; identical to SEQ ID NO: 224710

SEQ ID NO: 294216 - DNA, 1000 bp, Homo Sapiens
gcctgagcctgctgtcgctggggacgtgcctgggcctggcctgtggcagaaatctgaagctatcatggaacaattgaagtcttttcaaataattgctcatctaaagcgtctacaggaagaaattaatgaggtaaaaacttggtccaataggataactgaaaaacaggatatactgaacaacagtctgacgacgctttctcaagacattacaaaagtagaccaaagtacaacttccatggcaaaagatgttggtctcaagattacaagtgtaaaaacagatatacgacggatttcaggtttagtaactgatgtaatatcattgacagattctgtgcaagaactagaaaataaaatagagaaagtagaaaaaaatacagtaaaaaatataggtgatcttctttcaagcagtattgatcgaacagcaacgctccgaaagacagcatctgaaaattcacaaagaattaactctgttaagaagacgctaaccgaactaaagagtgacttcgacaaacatacagatagatttctaagcttagaaggtgacagagccaaagttctgaagacagtgacttttgcaaatgatctaaaaccaaaggtgtataatctaaagaaggacttttcccgtttagaaccattagtaaatgatttaacactacgcattgggagattggttaccgacttactacaaagagagaaagaaattgctttcttaagtgaaaaaatatctaatttaacaatagtccaagctgagattaaggatattaaagatgaaatagcacacatttcagatatgaattagtttgacattattgagattagactaaggtaatttttttaatgggacctctcatgagaagactggtaaatcaaaaataatgatattttggagcaaaagtcattttatatttaatcctattttgtacagtaaaaataaaactttaaaacaggttgattttccaaaataaatatgctaaaacctaaaaaaaaaaaaaaaaaaaaa

SEQ ID NO: 294217 - DNA, 1000 bp, Homo Sapiens
agccttgtccaaggagatggatttggcataaggacagctgttatttcctaagtgatgatgtccaaacatggcaggagagtaaaatggcctgtgctgctcagaatgccagcctgttgaagataaacaacaaaaatgcattggaatttataaaatcccagagtagatcatatgactattggctgggattatctcctgaagaagattccactcgtggtatgagagtggataatataatcaactcctctgcctgggttataagaaacgcacctgacttaaataacatgtattgtggatatataaatagactatatgttcaatattatcactgcacttataaacaaagaatgatatgtgagaagatggccaatccagtgcagcttggttctacatattttagggaggcatgaggcatcaatcaaatacattgaaggagtgtagggggtgggggttctaggctataggtaaatttaaatattttctggttgacaattagttgagtttgtctgaagacctgggattttatcatgcagatgaaacatccaggtagcaagcttcagagagaatagactgtgaatgttaatgccagagaggtataatgaagcatgtcccacctcccactttccatcatggcctgaaccctggaggaagaggaagtccattcagatagttgtggggggccttcgaattttcattttcatttacgttcttccccttctggccaagatttgccagaggcaacatcaaaaaccagcaaattttaattttgtcccacagcgttgctagggtggcatggctccccatctcgggtccatcctatacttccatgggactccctatggctgaaggccttatgagtcaaaggacttatagccaattgattgttctaggccaggtaagaatggatatggacatgcatttattacctcttaaaattattattttaagtaaaagccaataaacaaaaacgaaaaggcaaaaaaaaaaaaaaaaaaaaaaaaaa

SEQ ID NO: 294218 - DNA, 1000 bp, Homo Sapiens
aagcaggatcatgtggcgaagcatatgctccacaagggtggatagcttttttcatggaatatgtgaagagctggttttggggtccagtagtaaccttgcaagattgtcttgctgccttctttgccagagatgaactaaaaggtgacaatatgtacagttgtgaaaaatgcaaaaagttgagaaatggagtgaagttttgtaaagtacaaaactttcctgagattttgtgcatccaccttaaaagattcagacatgaactaatgttttccaccaaaatcagtacccatgtttcatttccgctagaaggcttggatcttcagccatttcttgctaaggatagtccagctcaaattgtgacatatgatcttctgtcagtcatttgccatcatggaactgcaagtagtggacactatatagcctactgccgaaacaatctaaataatctctggtatgaatttgatgatcagagtgtcactgaagtttcagaatctactgtacaaaatgcagaagcttacgttcttttctataggaagagcagcgaagaggcacaaaaagagaggagaaggatatcaaatttattgaacataatggaaccaagcctccttcagttttatatttctcgacagtggcttaataaatttaagacctttgccgaacctggccctatttcaaataatgactttctttgtattcatggaggtgttcctccaagaaaagctggttatattgaagacctggttttgatgctgcctcagaacatttgggataacctatatagcaggtatggtggaggaccagctgtcaaccatctgtacatttgtcatacttgccaaattgaggcggagaaaattgaaaaaagaagaaaaactgaattggaaatttttattcgggtaaaaaagtgatgcttttcaaattgatctaggataaagatgaagacctgacaattatcagagttatatgatattaataaaatgattagatgaaaaaaaaaaaaaaaaaa

SEQ ID NO: 294219 - DNA, 1000 bp, Homo Sapiens
gggttggttgttaaattaacaacctccacagtatcagattgagtgagctttgtctgctggaaaaacctgaaacgtcaactctgcttcaaggtcggcaagaagaacagaaggcggagacttggcagagagactcaagctgattgtcacaggctacagaggggccagctccagaacagtgaccagctacatcctgtccaagcagcccgagtgtggtcttggtccctgcagggcgatgtgggcatctggacctggggacgatgtggatgcacttcttggaaagctgttgtagcttgtgcctgtgggtggagaaggcacctgcccggtagactctcagctttctgacccccaggagcctctgcaaggcccctttgtccttggctgagccggacctttcttttggaaatctgtctgtctgttggcatcgctgttttcagaccccaggctgcagaggaggggagaagccacacaacaatctggacccaataaagtggagagaagggcgtctctacacagcccggccagcgtggagggccccaggacagggacccaaaagcttgacgtcactgaacagggctgggtactggcagaacaggaagatttggccagaggtgacctcagtgttccctccaggggcatccaggcccctctgacctggggagaagaaggcccatgctcaggcccacctccctcttcccatcagagcccatgcgtcctgggcaccaccacttccactctgcttttcgaggctctggagggctcttcctgctgtgaaaggaaaggagaagaaagcctgtgggcaatggcaacctctgagtctggcattcttgccaatggctggccagcgaggagaatctcccgagccctgacacacaaaggcattttgtggctgcagaggaaatgggttggctctgaacaaagatgcagtttctagggccgtggccccaaatcacttccccgagagtgaattttaacactgtaacaataaatactactgcacagc

SEQ ID NO: 294220 - DNA, 1000 bp, Homo Sapiens
gaatgctgactgcatgtcctggctcgtccagggagggaaggagcagaagcttcaccaggacacgagttctgttggcaattttatcagcacaaagagcatccagagtgacgagcgggatgacatcacagagaactacaagtatgaagaaggatccctccaggagaggcaggtgtttctgaaggctctgcagaagctgaaggctagaagcttccatggctcccaaagaggagcagagttgcaaccttccaggcccacatcactgagccaggacagccctcggagcctgcatacaccttcccttcgacccagtgatgtggtgcaagtctccctgaaattcaagctgctcgacccgcccaacatgggccaggatatatgctttgtcctgctggccctcaacatgtcctcccagttcaaggacctcaaagtgaacctgagtgcccagtctctgctgcacgatggcagccccctgtccccattctggcaggacacagcgttcatcacactctctcctaaagaagcaaagacctacccctgcaaaatctcctattcccagtacagccagtacctgtcaacagacaagctgatccgcatcagtgccctgggtgaagagaaaagcagtcctgagaaaatcctggtgaacaagatcatcaccttatcttatccaagcatcacgattaatgttctaggagcagccgttgtgaaccagccactctccatacaggtgatattttcaaaccccctctcggagcaggttgaggactgtgtgctgactgtggaaggaagtggcctcttcaagaaacagcagaaagtcttccttggagtcctcaaaccccaacaccaagcaagcatcattctggagaccgtccccttcaagagtggacaaaggcagatccaagctaatatgagaagcaacaagtttaaggacattaagggttacaggaatgtttatgtagactttgcattataaattctggaacaacgcgccagacgtgtgagtttc

SEQ ID NO: 294221 - DNA, 1000 bp, Homo Sapiens; identical to SEQ ID NO: 119075

SEQ ID NO: 294222 - DNA, 1000 bp, Homo Sapiens
gtgttgggcaggtctgggcgtataatttgaggagtggatggtggatgaaaagaaataataaattgtaatcagcagtaaaggagtgggcactgtttggactctggggaagcagtgtgatgttcaacagcatcgccatggtccctgcattcacaggtttctcagtgggaagcaggcccaggtcctcttacatttgacataagcaatttacctccccacatttccaggacctctatgacacttcatcagatacatattgctccaaattacttctcctggaatccctggttcctcagttgcaagacccttgccagtttttctgggagctaggaagaggtgaattaaattttctgagcactatgacttctttctttctaaagcctttcccttatgatcaacaagtggactctcctcagcaggtctttagagattatcctctcctgttattgctactttataggtacattaaatatactggacacaaatatatatgggatattaggctaaatacagtatacatgatatagcagggaatgttactagaagaaatatcaactgatgatatcctatcctctccaagctcctattccaggaaaaaagatccaatgttttttctaaagatgagcttccaaaacccacaactcctaaataatacagaaagttttgtgtttgactgtatacaatttttattgtgtttgttcaagctaagtggttcatcatggtgacagcatgaaaggaatgagtgtatgaaaaggtgaaggtgggagcaccttgacccagggatgtgatggtttattgaggagagataggagttgaagggagaggagacagcatgaacacctgcttgtccaattagcctcagcacattactaatctcagtttgttcctgctgtaacaaaatacctgagactgggtaattcataaataacagtctgaacttatttgtttatttaaaataataataaaataattaaaaatttatttatcacaaaaaaaaaaaaaa

SEQ ID NO: 294223 - DNA, 1000 bp, Homo Sapiens
tgctggcatctccaatatccagtctggctatgagatcccccaactgtcacagtacctggactacatccatgtcatgacctacgacctccatggctcctgggagggctacactggagagaacagccccctctacaaatacccgactgacaccggcagcaacgcctacctcaatgtggattatgtcatgaactactggaaggacaatggagcaccagctgagaagctcatcgttggattccctacctatggacacaacttcatcctgagcaacccctccaacactggaattggtgcccccacctctggtgctggtcctgctgggccctatgccaaggagtctgggatctgggcttactacgagatctgtaccttcctgaaaaatggagccactcagggatgggatgcccctcaggaagtgccttatgcctatcagggcaatgtgtgggttggctatgacaacatcaagagcttcgatattaaggctcaatggcttaagcacaacaaatttggaggcgccatggtctgggccattgatctggatgacttcactggcactttctgcaaccagggcaagtttcccctaatctccaccctgaagaaggccctcggcctgcagagtgcaagttgcacggctccagctcagcccattgagccaataactgctgctcccagtggcagcgggaacgggagcgggagtagcagctctggaggcagctcgggaggcagtggattctgtgctgtcagagccaacggcctctaccccgtggcaaataacagaaatgccttctggcactgcgtgaatggagtcacgtaccagcagaactgccaggccgggcttgtcttcgacaccagctgtgattgctgcaactgggcataaacctgacctggtctatattccctagagttccagtctcttttgcttaggacatgttgcccctacctaaagtcctgcaataaaatcagcagtcaaaacaaaaaaaaaaaaaaaaaaaaaaaaaaa

SEQ ID NO: 294224 - DNA, 1000 bp, Homo Sapiens; identical to SEQ ID NO: 119076

SEQ ID NO: 294225 - DNA, 1000 bp, Homo Sapiens
gctcactacgatatcaagttacactaagacttggaacactaacattctgtaagaggttatatagttttcagtgggaggggttgggatgggtaatctcattgttacatatagcaatttttgatgcattttatatgcataccagcaattattactgtgttcgcacagttctcacttaactggtgctatgtgaagactctgctaatataggtattttagaatgtgaattgaagaatggatcccaaaaacttcagaaagaggatagcaaaaaaagatctagtgcgattttatatatatatatatatatatatacatacatatatatatatcatatagcttaagctgatttaaaacaaaggccttagactaattttcgattttctttcttgaaataagctaatggcttgtttgtgtaaagcttttttattaaaagaaaaattttaaaaatcttgtacctagcacagtattgttatagaatatacatgtaacattttatatggtagtttaagtctgtcagtttcttaattgtggacaaattaacagttggctctggccttttgctgtaacatgcctgtgtcactcacttagccttggcatttgtgcagacataccattttcagttctgctgtcacttggaagttcaggctcagcatgaatttttggcaggtagctctaatacctggagttttctttgtttttttttcttttttttagttgaagtttatgagggaaataccagtgttcagttttgaactataatagtttgtatattcaacatttgaagtatattctattttgttgtactcttgtttcaaagtgtattcaagtaggttttctgaaatatagaaatgaaatttatcttctgttttggtctctggtgatattttaaacaatatttaaaagtcagtatagaagtgttttagttaggaagtgataaaacatctctcttctccttcccaactactgcatgaagaaattctacttccattatattaatatttgg

SEQ ID NO: 294226 - DNA, 1000 bp, Homo Sapiens; identical to SEQ ID NO: 117879

SEQ ID NO: 294227 - DNA, 1000 bp, Homo Sapiens
gtggccatggccttctcagctgaacaggacctgcagctctgtgttggggggtgccctccaagtcagcgactctctcgatcagagcgcaatcgtcggggagctataaccattgatactgccagacggctgtgcaaggaagggcttccagtggaagatgcttacttccattcctgtgtctttgatgttttaatttctggtgatcccaactttaccgtggcagctcaggcagcactggaggatgcccgagccttcctgccagacttagagaagctgcatctcttcccctcagatgctggggttcctctttcctcagcaaccctcttagctccactcctttctgggctctttgttctgtggctttgcattcagtaaggggaccatcagtcccattactagtttggaaatgatttggagatacagattggcatagaagaatgtaaagaatcattaaaggaagcagggcctaggagacacgtgaaacaatgacattatccagagtcagatgaggctgcagtccagggttgaaattatcacagaataaggattctgggcaaggttactgcattccggatctctgtggggctcttcaccaatttttccagcctcatttatagtaaacaaattgttctaatccatttactgcagatttcacccttataagtttagaggtcatgaaggttttaatgatcagtaaagatttaagggttgagatttttaagaggcaagagctgaaagcagaagacatgatcattagccataagaaactcaaaggaggaagacataattagggaaagaagtctatttgatgaatatgtgtgtgtaaggtatgttctgctttcttgattcaaaaatgaagcaggcattgtctagctcttaggtgaagggagtctctgcttttgaagaatggcacaggtaggacagaagtatcatccctaccccctaactaatctgttattaaagctacaaattcttcacaccatcaaaaaaaaaaaaaaaaaaa

SEQ ID NO: 294228 - DNA, 1000 bp, Homo Sapiens; identical to SEQ ID NO: 286997

SEQ ID NO: 294229 - DNA, 1000 bp, Homo Sapiens
acagattttttttaaaagtgaataatgtgttcaactcttaaattcatgctgtttcatcattgctggtgtattcatatgtgaaagcatgtgactaattgctgcataaaagatatgagattcttttttattaggcattatttatgaccttttctatgaaaagataaggacattaaaatgtaagatgcgtgaggaaaatttaggtagagaggctctttgtggttaacttataatattgagtgatgcatgaggtaggtgttcagaataatattcctctgcattattatgaatgaaaagcattcttaattttagttaaaattaagttagtcatatgttattttattaattgtacttctatgaaataatatgcagtctatttttaaattataaattatgtgtgaacttagcttttcaattcaacatttttaacatattaaatactattgtgaattcaatgaagtgttcttatgccactaactttaacctattcccttactcaaggatgtaggtaaaagatggtaacaatacactatttggtaagataatgtactgacatctctagcaatcttttttgccagtggctttaaattgccaataagttaaagaatattgttcctatgggttaaatttttattcttattttcacatttaaatttatttttcttaatttttgtggatacataatatgtgtatatatgtatgccatatatggtatattttgatgcaggcatactctatataataatcacattagaggaaatgagatatccattacctctagcatttattctttttattacaagcaattcaattgtacacttttagttatttttaaatttacaatgttattgattacagggtcatttttatggtcataataaaaaattttatacaaacgtgtaaaatctatacatttctgagttctgaataaatatttttaaaaattttaaaaaaaaaaaaaaaaaaaaaaaaaaaaaaaaaaaaaaaagaaaaaaaaaaaaaa

SEQ ID NO: 294230 - DNA, 1000 bp, Homo Sapiens
ggtgtgtttatgttcttacaagtcttctgccttttaaaatccagtcccaggacatcaaagctctgcagaaagaactcgagcaatttgccaagctcctgaagcagaagaggatcaccctgggatatacacaggccgatgtggggctcaccctgggggttctatttgggaaggtattcagccaaacgaccatctgccgctttgaggctctgcagcttagcttcaagaacatgtgtaagctgcggcccttgctgcagaagtgggtggaggaagctgacaacaatgaaaatcttcaggagatatgcaaagcagaaaccctcgtgcaggcccgaaagagaaagcgaaccagtatcgagaaccgagtgagaggcaacctggagaatttgttcctgcagtgcccgaaacccacactgcagcagatcagccacatcgcccagcagcttgggctcgagaaggatgtggtccgagtgtggttctgtaaccggcgccagaagggcaagcgatcaagcagcgactatgcacaacgagaggattttgaggctgctgggtctcctttctcagggggaccagtgtcctttcctctggccccagggccccattttggtaccccaggctatgggagccctcacttcactgcactgtactcctcggtccctttccctgagggggaagcctttccccctgtctccgtcaccactctgggctctcccatgcattcaaactgaggtgcctgcccttctaggaatgggggacagggggaggggaggagctagggaaagaaaacctggagtttgtgccagggtttttgggattaagttcttcattcactaaggaaggaattgggaacacaaagggtgggggcaggggagtttggggcaactggttggagggaaggtgaagttcaatgatgctcttgattttaatcccacatcatgtatcacttttttcttaaataaagaagcctgggacacagtaaaaaaaaaaaaaaaaaaaaaaaaaaaaa

SEQ ID NO: 294231 - DNA, 1000 bp, Homo Sapiens; identical to SEQ ID NO: 115901

SEQ ID NO: 294232 - DNA, 1000 bp, Homo Sapiens; identical to SEQ ID NO: 224714

SEQ ID NO: 294233 - DNA, 1000 bp, Homo Sapiens
cggtgaggtcaggagcccagctctccagggggcttctgccctgactgggaagggtgcctggctccctaaaacaatgtcaaagccagtcctgctgttctctgttgccagggggcaggtctgggcctgggccaaccacgtttgttatcatggctgctgccttctggacagctgccagctctgccttgagaggttgtgggacctctggatccagctgacctgacaggtcatctactcagggaggagccctgtgctcccagctcagaggacagtctgggccagaactggaaggagacatctgtcccgtctttgagtgacaagcccgggacaacagccagtgggcatcacggctctccagcactccttagccggaggatacagagtgatgggtgcatcctgaccaatgcgacaaccaacacgtgctctcacaaacccctgactcccgcactttccagtgccaaagtacaaacgctgcttggataaggagagcaaagcttctggaactttatttactctttctttttaattttcttttaagagactgggtcttgctatgttgcccaggctggtcttgaactcctggcctcaagtgatcctccagtttccatctccctaagagctgggattacaggtgtgagccgctgtacccgaactttttttgtttttgcttctggaactttgaaacacaaaacacaagttggcacttacaattttaaagatgcagccagctctaaacaacacacagagcacaaatatgctcctgacggactcaggaaaatgccaacagcagagcaccctggtgccaaggccttctcagcccatgccctggagggcattcccctggccagcctcagccccttgtctacttgttctccagcttctgggtagctgggcttctggaagggtggcagtgggctactccctgctcagcgctcccctgggaagggggtgaggagatgaaaatgaaactatgagctgtctttggaaaaaaaaaaaaaaaaaa

SEQ ID NO: 294234 - DNA, 566 bp, Homo Sapiens
tgcgctatggcgacacccagcctgcggggtcgtctggcgcggtttgggaacccgcggaagcctgtgctgaagcccaataaacctctcattctagctaaccgcgtcggggagcggcgccgggagaagggcgaggcgacttgcatcacggagatgtcggtgatgatggcttgctggaagcagaatgaattccgcgacgatgcgtgcagaaaagagatccagggcttcctcgattgtgccgcgagggctcaggaagcccgaaagatgagatcaatacaggaaaccctgggagagtctgggagtttacttccaaataaattgaataagttgttacagaggtttcctaacaaaccttacctcagctgaaaatggacaagtattttcaatgactgaaatatagcttctgacaactatgcagaggcattttagagacattggcattgccatgccctctttggagggtagaagaggcaaaacacttttttcaccctttggaatcatagtatgggtagaagttatgatttatcttgaaataaaatcctctgaacagaaaaaaaaaaaaaaaaaaa

SEQ ID NO: 294235 - DNA, 1000 bp, Homo Sapiens
cctagcaacaagtcactggatttttctctgtcagcacgcgtgtcagctgccaaagaatagacttaatgaagaagtgcccacatgctggcaggggccggcccactctggccagccagatactgctagattgtaatatttaaggtcgaatttcgacctgtggtacacagctgtgctgtggctcagtcagcaacctcagaactctgaaaaaacaaaacaaaaaaaaaaaaaaaagaaaaaaaaaacatgcacctgtttcactgtgaatagtgaatgtaaaggaaagaaaggaaaaactgaaagcttgttctatcacaggtatgagctgctatgatacatgaagaacattccatgaagtatgttttaaaaccttgttatatctgagaggctttaaaagcctattaactgtttcagggcaaccgcggtacagacgtggtctctgtgagacttccacctgaccccagttttaagtggtacgaatgttgtgcatttaatgttaaaggacagtctgcaataataaagtaagtagccaacctgggtgcccagcagtgctgagacctggctgctctattgtaagctttggaaacacaatttatgcaacagatgtccagatatgattctatttatggaaaaaagtttatatgtgttttacaaatggttttaccatcttatattaaaatgaccttttgacaggtgtgcactgttttgtctccagtgagcacataccatgcggattttatatgtacatcagtagtgtgaatccactggcacagtgtgtgtaaatgccagatgtggtgagattttatcttataaatgtgatcagataaaataactcctgacagaaactgtaaggaaaccagctgaatgtttgacctgatgactgatgttgtatggtttatgttaaatgtatattcttttaatcaatgaataaagcattaaaaatgaaaaaaaaaaaaaaaaaaaaaaaaaaaaaaaaaaaaaaaaaaaaaaaaaaaaaaaaaaa

SEQ ID NO: 294236 - DNA, 1000 bp, Homo Sapiens; identical to SEQ ID NO: 119081

SEQ ID NO: 294237 - DNA, 1000 bp, Homo Sapiens
aatttttgtatttatagtggagatggggtttctccatattggtcaggctggtcttgaacccttgacctcaggtcatccacccgcctcggccttccaaaacgctggatttacaggcttgagccacgcgtccggcctgaagtggtattttttagaaagtaactaaaccttttttcagtttaatgacccagggatgtatttctgaaggacttgggagcgatccttttaaggcaaacaagggagatagtacctgtatcttagtaggaaattaaataattcaaacatcaaatgtttcaaattaaaagctaccgacctttaaataattctgagccttgagaggaacgtggtcatgcaacaagagtccagtggcatgcaggcacaaggttttttcttttttgttttttgtttttttttgagacagtctcgctctgtcgcccaagctgaagtgcagtggtgcgatctcagctcactgcaagctccgcctcctgggttcacgtcattttcctgtctcagcctccccagtagctgggactccaggcacccaccaccactcccggctaattttttgtatttttagtacagacagggtttcactgtgttagccaggatggtcttgatctcctgaccttgtgatccacccacctcagcctcccaaagtgctgggattacaggcatgaatgaccgcgcccagccgcaggcgcaacttttttgagttttcctggccaggcgcagtggctcaagcctgtaatcccagcattttgggaggccgaggtgggcggatcacttgaggtcaggagttagaaaccagcctggccaacgtggtgaaaccccgtctccagtaaacatacaaagccattacagggcatggtggggcacgcctgtattcccagctacttgggaggctgaggcaggagaactgcttgatccggggaggtggaagttgcagtgggccaagatcatgccactgcaccccagcctgggcaacagagcaagactccgtacc

SEQ ID NO: 294238 - DNA, 1000 bp, Homo Sapiens
ctgatgacttcacagcagttcggcgggcagcctgtttggcagctggtgccctgcagatccgcgacaagatggtgcttgaatgcctcctgaacctgatgcagagagatccttactggaaaatcaaggcctttgccattcgagctttgggacagattgggcaagtaagtcccgagctgacggatcttctgctctgggctatccactatgaagagtcaccaggtgtacggctggaagcttgccgtagcatcctagccctgaaacttcaaggggaccgggtcagggacaccttcctagacgtgctgctcctggagaaccacgatgctgttctaaaggaaatgtaccagacaatgaagatactcaacttaggaaatgaaggaaaccaagaaatgcttcaggagatcaagaacaggattaaaacactaagccaaaaggacttgctgacacacaaaatactcaagctggagatggtcatgggaaaagtgagggaggaagcaaaacgtgtttacttgaaacccaaaggagaacaaggaccactaacactccagactttactccaagaaacttttcaggatgagatggttcttcctagaagaccttccgaggtttgtgacactgaagcagtgataaagcctgtgaagccccgcgcaccaaatccctggttacaaagttcagtcccaggcctaaccacacgaagcaaagttcgttcatcacttgtcaaagatctacgcacctcccccgagaaaaggattgctgtgggaccatttagatccgactacccagctctttatctgggtaaattctcagagagaacatttttttctcccatcatgtcttctccctctggaaagaaaggtgctcatctctaagctgaacacttgtcttacttcaagatgcaggaagcagtggacctggtcacattgggtctttttaattgatactgtacaatcttgttgtcactatgtttataaagagaaattatttaacaaaaaaaaaaaaaaaa

SEQ ID NO: 294239 - DNA, 1000 bp, Homo Sapiens
ggagattgtccgctcgagcctgaaggaccctgagaaaggcatgtggggcctcgttaacaatgccggcatctcaacgttcggggaggtggagttcaccagcctggagacctacaagcaggtggcagaagtgaacctttggggcacagtgcggatgacgaaatcctttctccccctcatccgaagggccaaaggccgcgtcgtcaatatcagcagcatgctgggccgcatggccaacccggcccgctccccgtactgcatcaccaagttcggggtagaggctttctcggactgcctgcgctatgagatgtaccccctgggcgtgaaggtcagcgtggtggagcccggcaacttcatcgctgccaccagcctttacagccctgagagcattcaggccatcgccaagaagatgtgggaggagctgcctgaggtcgtgcgcaaggactacggcaagaagtactttgatgaaaagatcgccaagatggagacctactgcagcagtggctccacagacacgtcccctgtcatcgatgctgtcacacacgccctgaccgccaccaccccctacacccgctaccaccccatggactactactggtggctgcgaatgcagatcatgacccacttgcctggagccatctccgacatgatctacatccgctgaagagtctcgctgtggcctctgtcagggatccctggtggaaggggaggggagggaggaacccatatagtcaactcttgattatccacgtgtggattatccaccatgccaggaagacccataactggttttaacactaactagagggaatgacttctttgcatagtgagtgacttgggccttcacaaacagggtgtggagtggcaggcagaggcctctaaatctcagggcaaacatggtgaatctatctctccggagataatttcatacagagattttaagaaaacatctttatattaaaaacagatctcatttgatccttaaaaaaaaaaaaaaaaaaaa

SEQ ID NO: 294240 - DNA, 1000 bp, Homo Sapiens
ggtgaatatggagcagtagcagaagcctcattccagaacccatctggccagagaagcagcagcatcctgggggatggccgtgcatggggtgtacactcgctataggcataggcccggcatggctgtcgctggacgccagctgtgcacacccagccacacctgctgcacgccgcgttagtgtgcggctccgggcctgagcattcgcaaagctcgcttctccagggagcctcctcttggctttggaaaagagcccagggacttaacgtgctgcctgttgtactctgtcccctcatgactttttagacacagggactaggacatcgaccaccctctgcccctcctgcagtcagaacccgagtagtgcaagaacggccacccggttttgccagcgttcagcgtctgcccatggacccataaggcacattagcgttgggggtctcttttcagcagcctcacagacattcccgtcctttctggttggtgttgactgtgtttcagcatcactctaccctcccatgtccttagcattgctgtgcgtgtttccaggcacttaggacacccttccccacgttgccatcttactgacagttcaaatgactctccttttttgttcgttagtaacaatcttcatttgacaccttaatacatttctgactgttcttaaaacagtggggatgcctatattttccttgagtttttgtgactgactttggctatatatacctttctggggttttgtttgttttttatttttattttgattaccgagggtatttggggtggggttgttttttgagatgtgtaattcttttatggagtttttaaaaagaattttcatattgtttttctaacatggcttcattaaacgtttaagtattttaaaaatatgtaatatttggaccagatgttgtgaataatagtagagataaagctattttattctgtatttttaaaactgttccgtacaaataaaagctctcctggacacagtaaaaaaaaa

SEQ ID NO: 294241 - DNA, 1000 bp, Homo Sapiens; identical to SEQ ID NO: 119085

SEQ ID NO: 294242 - DNA, 1000 bp, Homo Sapiens; identical to SEQ ID NO: 115676

SEQ ID NO: 294243 - DNA, 1000 bp, Homo Sapiens; identical to SEQ ID NO: 224717

SEQ ID NO: 294244 - DNA, 1000 bp, Homo Sapiens; identical to SEQ ID NO: 224718

SEQ ID NO: 294245 - DNA, 1000 bp, Homo Sapiens
gtgcatctacctggacccgaaggaggctgagcacctgggcacttccagctccctgcacctccggcataagcaggcgcagctgcaggcgctagagaccacagccaaagtcctcaagcagcgggtcgatagcctcaccgccaagcttcagggtgccgaagcgccggacaccgtcagggacccagctgtgggcctgctgcgctcgtgcccccacagcctacctgccgcccccacgctcgccacccccacgcttgccaccccagcctgccctggagccttggggcccaactggggcagaggggcacctggggagtgggtgagcatgcagccccagccccttctgcccccgacctacttcctggagggcgagacactgtcgtggggccccagctgggagcaacagcagagtgtgagcccgagggcccactgcgagagcaagccccgaggtgtgtctcaggctcctctcctgctgtgatggcttgggtcccccgtcccgtgctcccggctgaccagggagtgaagccaggtgccctcttctccaaggttttccagaggagggacacgtggacgtgaaaccagacaaaaggctgcagagaggcgtggcccccttccaggccctcagcccctctgcggggagctcatatgcgggcccagccacgctgcaccctatctggggctccctgggactggaggagacgccgtcggtcggaggggcagattctgtggcgccctgcaccccccggagctgcggtaagggcgaccctgcggacaggccctgggctggctggtcgggtggccggggcatccaccgagaacaccttccactgcctagcactcgagcttggccctacggggtagagaaatccttttccacgtggagagcatccacgcctcgttattaaaggttttagaggctaaaaaaaaaaaaaaaaataaaaaaaaaaaaaaaaaaaaaaaaaaaaaaaaaaaaaaaaaaaaaaaaaaaaaaaaaaaaaaaaaaaaa

SEQ ID NO: 294246 - DNA, 1000 bp, Homo Sapiens; identical to SEQ ID NO: 119087

SEQ ID NO: 294247 - DNA, 1000 bp, Homo Sapiens
atggtttttatatatatcaattctagactgttacaggtgacggacgcctcaagagagagaagagaaaatgaaagcagctggttttgcagaagtgtgtgtcgcatgcgccagttgggcctggaccctcctgtgtccatccctgttcccccaggggctctatcagcccctgtaccccacactgccctctgaagacaacacaggctcctgcttccacctcggcccttgcccagggtggggcctggccctcatcttgaccaaagctgctgtgtggcagctcggcctctctacgaccccatcttggtggctgcacactcttcctggcccgcacccccatccccagtccctgttccccaagaggatacagagcacggtgctggctgactcaactgtgcgtcccaggttcagggtcttacagagctccaccccctggggtcttacctcactgggaatgtgttttgaaaatgaatttgaagacaagccaacaaaccctgcactccaaaaaagcaaaacagaccctaatttttttgtgccaaaaactgtggacatgctggctcagcatcctcaggaccaagttgttgcttaatttattgttttttaataactaatccagataaaaagttgtggggcttcagggtgacctgggcccaaaggttctgaagggcagttcctggcagccccaggcttgctgtgggaaggggccgtgccgtcactttctcatcattccatggggtgtgtctgcctgggccaactctgcatggagaggccagggctggggacagtccgcactctgccaccctcctgccccttccacccaccccagctctatgtctgtgtctgaattgtggatcgtgcagccatggttattgtggaactgtggaacctgcagccatagttatttgactatatcttgaccgagggcttgcagtgcaaagccaggccagtgttgcgcattacttacaataaaagggatcatttatatcagaaaaaaaaaaaaaaaaaa

SEQ ID NO: 294248 - DNA, 1000 bp, Homo Sapiens
ccctggcctggccctaccgcccccagccctaccagccgcccgccctgggctgtggaccctgcgtttgccgagcgctatgccccggacaaaacgagcacagtgctgacccggcacagccagccggccacgcccacgccgctgcagagccgcacctccattgtgcaggcagctgccggaggggtgccaggagggggcagcaacaacggcaagactcccgtgtgtcaccagtgccacaaggtcatccggggccgctacctggtggcgctgggccacgcgtaccacccggaggagtttgtgtgtagccagtgtgggaaggtcctggaagagggtggcttctttgaggagaagggcgccatcttctgcccaccatgctatgacgtgcgctatgcacccagctgtgccaagtgcaagaagaagattacaggcgagatcatgcacgccctgaagatgacctggcacgtgcactgctttacctgtgctgcctgcaagacgcccatccggaacagggccttctacatggaggagggcgtgccctattgcgagcgagactatgagaagatgtttggcacgaaatgccatggctgtgacttcaagatcgacgctggggaccgcttcctggaggccctgggcttcagctggcatgacacctgcttcgtctgtgcgatatgtcagatcaacctggaaggaaagaccttctactccaagaaggacaggcctctctgcaagagccatgccttctctcatgtgtgagccccttctgcccacagctgccgcggtggcccctagcctgaggggcctggagtcgtggccctgcatttctgggtagggctggcaatggttgccttaaccctggctcctggcccgagcctggggctccctgggccctgccccacccaccttatcctcccaccccactccctccaccaccacagcacaccggtgctggccacaccagccccctttcacctccagtgccacaataaacctgtacccagctgtg

SEQ ID NO: 294249 - DNA, 1000 bp, Homo Sapiens; identical to SEQ ID NO: 119088

SEQ ID NO: 294250 - DNA, 1000 bp, Homo Sapiens; identical to SEQ ID NO: 119089

SEQ ID NO: 294251 - DNA, 1000 bp, Homo Sapiens
aaatcatacagcagaaaaaccttatgagtgtcaaacatgtagaaaagccttcagtcattttggtcacttaaagcaacatgaaaggattcacactggagagaagccgtatgaatgtaaggaatgcaggaaagcattctcttggctcacttgccttctacaacatgaaagaattcacactcgagagaaaccttatgaaggtaaacaatgtggtaaagccttcactcattcccgtttccttcaaggacatgaaagaactcataccgcaaagaagctatgtgaatgtaaggaatgtggaaaagcattgagttctctcagctccttgcacagacacaaaaggactcattggaaagatactctataaatgtgtggaatgtgggaaagcattcattaattttattttacctgagaaaattaaacaaatcacattggaaataaactctatggcttgggcacggtggctcatgcctgtaatccctaacactttgggaggccgaggtgggcggatcacgaggtcaggagatcaagaccatcctggccaacatggtgaaaccctgtctctactaaaatacaaaaacttagccaggcatggtggtgcgcacctgtagtcccagctactctggaggctgaggcaggggaatggctcgaacacaggagacggggattgcagtgagctgagatggcgccactgcactccagcctggcaacagagtgagactccatctcaaaaaaaataaaaaaaaagaaaaagaaataaactctatgaatgtaaaccatgtggtgaaggcttaagtgatttcagtttatttcaaatacagttttcccctgacatatgcaggggattaattccagcagtccctgatcatacctaaatccacacatgccaagtttcttttataaaattacatatttgcatgttatctacccacatctccctgtacactctaagtcatctctggattaaatacctcatgcattgtaaaaactaaaaaaaaaaaaaaaa

SEQ ID NO: 294252 - DNA, 1000 bp, Homo Sapiens; identical to SEQ ID NO: 224723

SEQ ID NO: 294253 - DNA, 1000 bp, Homo Sapiens; identical to SEQ ID NO: 224724

SEQ ID NO: 294254 - DNA, 1000 bp, Homo Sapiens; identical to SEQ ID NO: 119091

SEQ ID NO: 294255 - DNA, 1000 bp, Homo Sapiens
cgacggctccgtgaccctggtcctaccccagacccggggcccggcctccagccaccgagagtccccgcgcgggagtggcggcgcagaggccgccctggaggaggcggcccgtggccccatcctggtggacaccgggggcccctgggctcgggaggcgctgctgggggcgctggcggggcagggcgtggccccgggagacgtgacgctagtggtggggacccacgggcactcggatcacatcgggaacttggggctgttcccaggcgcggctctgctggtctcgcacgacttctgccttcccggaggccgctacctgccccacgggctgggtgaggggcagcccctgcgcctgggcccggggctcgaggtgtgggccacgccgggccacgggggccagcgcgacgtgagcgtggtggtggccggcacggctctgggcaccgtggtggtggcgggagatgtgtttgagcgagatggggacgaggattcgtggcaggcactgagtgaagaccccgcagcccaggagcggagccggaagagggtcctggtcgttgccgacgtggtcgtacctggtcacgggcccccctttcgagtgttaagggaagcctcgcagcccgagacggagggtggagggaacagccagcaggagccggtggtcggagacgaggagcccgccctgcactaatcagcctcgagagggactgcactcttgtcagggaagccctaacagcgaagagctgctggagacagagtcagagcagtcaagggtgggagcttccagcccttccaggaggccagttttctagtgaagacagagtgcacctgacactgccatcacatcgtcagtatcactgcctgtctctgccaccaaactaagatcaaaggaggggctcagctccctgtgcattctccctgggcctcagtaaaatgggagaaggttcgtgggaggggcctccaaaataaaaatggaaactgcattgaaaatcaaaaaaaaaaaaaaaaa

SEQ ID NO: 294256 - DNA, 1000 bp, Homo Sapiens; identical to SEQ ID NO: 119092

SEQ ID NO: 294257 - DNA, 1000 bp, Homo Sapiens; identical to SEQ ID NO: 224727

SEQ ID NO: 294258 - DNA, 1000 bp, Homo Sapiens
tgaaatgggaggatctcttgagcccaggagttggagtccagtccagccagggcaacacagccagacgcccttgttttttattttgttttggtttggttttttgttttttgaggagtttccctctgtcacacaggctggagggcagtggcgccatctcagctcactgcaacgtccacctcctgggttcaagcgattctcctgcctcagcatcctaattagttgggattgcaggcgcccaccaccatgcccggctaatttttgtgtttttttagtagagacggggtttcaccgtgttgtcaggctggtctcaaactcctgacctcaggtactccacccgccttggtctctcaaagtgctgggattacaggcataagccactgtgcccaggcagacccccttctttaaagatgtaaaacccggccgggcgcggtggctcacgcctgtagtcccagcactttgggaggctgaggcgggcagatcacgaggtcaggagatcgagaccatcctggctagcacggtgaaaccccgtctctactaaaaatacaaagattagccgggcatggtggtgggtacctgtagtcccagctactccggaggctgaggcaggagaatggcgtgaacccgggaggcggatcttgcagtgagcggagattgcaccactgcactccagcctgggtgacagagcaagactccctctcaaaagaaaaagaaaaaagatgtaaaaaccattcttagtttgtgggccttacaaatcaggccactggcccattgcttgtagttagttgatccatgtcatgcaccctaaaaatggctctgtcactgtgagtggcttcagtaggattttgagaataagtttatattcttgctaggtaaaacaaaacaaaaacgacagtaataccaaggaatttccccccccttttaccctccatttgtgtttattgcatatccactataacaacattaaaggacctttaaaaggaagtaaaaaaaaaaaaaaaaa

SEQ ID NO: 294259 - DNA, 1000 bp, Homo Sapiens
ccaaagggatcaggggaagcctctggcctggagggtatggggcacacttccccaagggcggacccagcaggaggaagcccaggagctgggtcctgccgcccaggagctgggccctgccacccaggccgggctagggacatggcagggcctgggcatcctggcgctggacttgggcgacctgggaggcacagggaggggagagatgggcggccccgccccagcgcagtgccggccacacccatgcactgaagctcctccctgccacaccccaaggcggttgccggagcttaagccccgcccccagcagcgagaacatcccacccctcccccccccccccccgcagccagtgctccttgtcaagctccccccgtcactccaggtgggagccaccccggtgagggggtgtgccacttgtccccagggcactcctctgggcatcccgggtgggggattttggggccgtggggggcagtctctggtacctgtgtgcgtcagggatgctctgcacctgcaaccaggtgtcgtccacgggcgggggcatggtaacagtggtcctgttgatgtcaccgatgatgctgagcgcctccttcagcgcgtggtgcatgtgcagcatctcgtcgtgctgctgtgcctgctctgccaactcctccatcagtgtgttctggttcccacatgagtacatattggccagcggctccgagatgatgaactccggggtctgagagtgggcaaacagggaagaaggttgggacctggtgcctgtgccgccctggctgccttgctgggcccttctgggactgtgcgctggacttggagccccttggagtatggcttttcacacgggcttctataccgcttcgactggaagatccacctccccactgccttttctcactcagatggggacaccgaggtccagaggaaaagacacctgtcaaatgtcacagatctgggaggggacttaagacctatcatgccaagaggaaaaaaaaaaaaaaa

SEQ ID NO: 294260 - DNA, 698 bp, Homo Sapiens
accccaccctaatcttgttatgcaaataggcttcccacttggcaggggccgtcttgtccactcgtttctgtaaacatgggtggcaaaaagagaagatggagctgccatttagaacatgcctaatcccagcttcatcttgctgagcaaaaatgaaggagcctggacccaactttgttactgtgagaaagggtcttcattcattcaagatggcatttgttaagcacctactgtgagtagatgatctcctgtcaaagacagttaacaaatcctcggaatattgcttcatgtacagttattggagatgagtaacttacattctcttaattgtaatggttccttggaaagtcatcgtggaaaatgaaggctggctcatacattttcccagacaggaatttggctgccaacagggaattctaaacaactaaaaactccagatgatgaatgcacaacataatgatggttaaattaaaaaaaaaaaagagcacgacaaaccttggaaatcaagaaagttctggaatgatgaagctgttcatgccaagaccgaaagtgctggcccagtatgagtccattcagttcatgccgtgacaattttcttggaactcctttttattgttagttctcacttgtttccatatttagtgaatgtacatttaattgcaaagctgtcattaataaaaattcttatagtacctcaaaaa

SEQ ID NO: 294261 - DNA, 1000 bp, Homo Sapiens
gctgcacaagaacctcctggtgtcctacgtgctccgcaacgcgcgccagctctacctgagcgagcgctacgccgagctctaccggcgccagcagcagcagcaacagcagcagccgccccaccaccagcaccagcacctagcgtacgcggcgccgggcatgccggccagcgcggccgacttcggcccgctccaacttggcggcggcggggacgcggaggcgcgcgagtcggccgcccggcaccagctgcaccagctccaccagctccaccagctgcacctccagcagcagctgcaccagcaccagcacccggcgcccaggggctgcgcggcggcggcggcggccggagcgcccgcgggcggcgcgggggcgctctcggagctgcccgggtgcgccgcgctccagccgccgcacggcgcgccccaccgcgggcagcccttggagcctctgcagccgggtcctgcgccgctgccgctgccgctgccgccgcccgcgcccgctgcgctctgcccgcgggaccctcgcgccccggccgcctgctccgcgccccgttcgccccctgcaagcgcgcccgcttcgaggacttctgcccggactcgtccccggacgcgtccaacatctcaaacttgatctccatctttggctccggcttctcggggctggtgagccgacagccggactcctcggagcagccgccgccgctcaacgggcagctgtgcgccaagcaggcgctcgccagcctcggcgcctggactcgagccattgtcgccttctagggacccccgagggcacagggacccggggccccgcggggctggggccagacaaagactcggcaaaggggcgagaggagggaacgagcgggcgccgggccactcggggctgagctgggggcgagcgggggcaggcggctgatgttttataaattgtaaaataaaaaaaaaaaaaaaaaaaaaaaaaaaaaaaaaaaaaaaaaaaaaaaaaaaaaaaaaaaaaaaaaaa

SEQ ID NO: 294262 - DNA, 1000 bp, Homo Sapiens; identical to SEQ ID NO: 117464

SEQ ID NO: 294263 - DNA, 1000 bp, Homo Sapiens; identical to SEQ ID NO: 224730

SEQ ID NO: 294264 - DNA, 1000 bp, Homo Sapiens
aggcctgatggggggcccctgcttctcccggtggggcagaggacccggtgcctgcctggcagatgtgcccacggaggcccccagctgccctccgagcccaggcctgcagcactgaaagacgacctgccatgtcccatggatcaccgcttcctgcatcttgcccctggtccctgccccattcccagggcactccttacccctgctgccctgagccaacgccttcacggacctccctagcctcctaagcaaaggtagagctgcctttttaaacctaggtcttaccagggtttttactgtttggtttgaggcaccccagtcaactcctagatttcaaaaacctttttctaattgggagtaatggcgggcactttcaccaagatgttctagaaacttctgagccaggagtgaatggcccttccttagtagcctgggggatgtccagagactaggcctctcccctttacccctccagagaaggggcttccctgtcccggagggagacacggggaacgggattttccgtctctccctcttgccagctctgtgagtctggccagggcgggtagggagcgtggagggcatctgtctgccatcgcccgctgccaatctaagccagtctcactgtgaaccacacgaaacctcaactgggggagtgaggggctggccaggtctggaggggcctcaggggtgcccccagcccggcacccagcgctttcgcccctcgtccacccacccctggctggcagcctccctccccacacccgcccctgtgctctgctgtctggaggccacgtggatgttcatgagatgcattctcttctgtctttggtggatgggatggtggcaaagcccaggatctggctttgccagaggttgcaacatgttgagagaacccggtcaataaagtgtactacctcttaaaaaaaaaaaaaaaaaaaaaaaaaaaaaaaaaaaaaaaaaaaaaaaaaaaaaaaaaaaaaaaaaaaaaaaaaaaaaaaaa

SEQ ID NO: 294265 - DNA, 1000 bp, Homo Sapiens
cagatgctggggcttcagcccgccgcagacttcacagctggccacaacgagcctgtagccaacggcagtcacaaggcctgatggggggcccctgcttctcccggtggggcagaggacccggtgcctgcctggcagatgtgcccacggaggcccccagctgccctccgagcccaggcctgcagcactgaaagacgacctgccatgtcccatggatcaccgcttcctgcatcttgcccctggtccctgccccattcccagggcactccttacccctgctgccctgagccaacgccttcacggacctccctagcctcctaagcaaaggtagagctgcctttttaaacctaggtcttaccagggtttttactgtttggtttgaggcaccccagtcaactcctagatttcaaaaacctttttctaattgggagtaatggcgggcactttcaccaagatgttctagaaacttctgagccaggagtgaatggcccttccttagtagcctgggggatgtccagagactaggcctctcccctttacccctccagagaaggggcttccctgtcccggagggagacacggggaacgggattttccgtctctccctcttgccagctctgtgagtctggccagggcgggtagggagcgtggagggcatctgtctgccatcgcccgctgccaatctaagccagtctcactgtgaaccacacgaaacctcaactgggggagtgaggggctggccaggtctggaggggcctcaggggtgcccccagcccggcacccagcgctttcgcccctcgtccacccacccctggctggcagcctccctccccacacccgcccctgtgctctgctgtctggaggccacgtggatgttcatgagatgcattctcttctgtctttggtggatgggatggtggcaaagcccaggatctggctttgccagaggttgcaacatgttgagagaacccggtcaataaagtgtactacctcttaaaaaaaa

SEQ ID NO: 294266 - DNA, 1000 bp, Homo Sapiens
atgtagtattttgatatcattaagtaaaccaatcagaaaactccttgagcaatagttgtttctttgtcagtttcagttacaatcatctttacccattaagacttacattaacattccttttatataaagagttgtatatgtccacctaaattcctatgtccacacttaacctttaaagatgtacattgagggaatatcaaaaaatagcgttcatggctacgaatatgtagaatgttaaaagcacagcaaactgcactgcacttataaagcaaatctattagaaaaaaagcatttttctaaatgctcaaatgttatcaaaatactatatttatagaagtaatcttctctgttaacagccaagatttgctgttagaaataactcttgtgagttttatattgtgctttttggaggttctaatcatttcagcagtagcgtcttaaacagcagtattactataagcagttgcttcaaaatgtgaattaacttgttgaaactgtggctttaacatccatgtgactagtgtatatggtatttgctctccattagcaaaataattcattgttaggtaaacttcattagtgcaaattgcagatctgtgagcaatgtttcctattgaatataaactactgtctaaaatatacatatcagcagcccagcctttatcaggaaaattatacttggcaagttgctgaaaatgcacaaagttatgaaagttaaaggtatgctgcaaataactagccattattctatgtattattaaatatttactagttctgttaaaagcagagcagaagttagacactaaggatctctttgtgaactctgtgttctctatattagattgctgtttatatgtaagaattttattgcttatgtggcatacaatatttataactataaactttatagaagtacagtattaaagtcagtggtacacagacattctgtacatatcctgtgaaacgtgctgtcatatgaaataaatatatctgtctttac

SEQ ID NO: 294267 - DNA, 1000 bp, Homo Sapiens
tacttaaaaaatgggacatttgccacccaggactgactgtacactccctgatcagccagcactctggaagctttgggatcccaggaaccatggaattattcccaaatggactctgaccagatttttgccatactggggggtggcgggatggaggatgggtactcaggcatgactgcgtatttattaaagtgtgtttttccacaatgtaccaaacaaggcataagcagcttctcctgctgactggccaatcactgcccatctgagagatgatttcctctggcccatatttgaatttattggagtaactcaaattgcctgaggaaaaatggaaaaattatccaccagtcgattcaaactgaatttcactctttataggaaggcagggcaaacttgtaggagtacgaaacattttcaataaatctacaaagggaagccttactacaattccaaaaatcatcatggttggaaatttgggaggagattatttgtgaacttgttacccttttggtaatggtggactaattgctgtatagttatttttgttttattattactgttacattaatttaacatgcatttatagaagaatacattcaaagcactgatgtaggagatacacggtacttggagcagtcagccagaaatcacagatactgctttcacttaaatggaaacaattctccgataatgctttgctttttttcttatgtcactcttgtgtactatctatttttctcctctctgggaccaagtttctttttataaagcaataatatctctgttttcatttcagaacattgtgctgtctgtcagcatatgtatatcagctacaaaatatattcaactttgacttcttttgacaaaggactttaggaaaaagaggaacaaagacattatttgagaattaaattatatatttttaatatgactgtgaccttgactgataataaagatgtaataagaattgcaagctaaaaaaaaaaaaaaaaaaaaaaaaaaa

SEQ ID NO: 294268 - DNA, 1000 bp, Homo Sapiens
gagagactccaccacctatgtcctcacagttaattatcgatttgtgtcagttgcccattttctcacttcctgtttgtgtgtcaaggggtattaataaatctttgcctatttaaagatattagccttggattttcaaatattgcatattttgacatgtaaaatttgttagttttattttttcaaccgatctgacctgtatagttgggcttgaggaagcttcctcattctacatgttactatggattttctaatattaacacagggttgtattttttccatataactttctattgaatttctttttccatatgataggtggtgaaggtttagcccagtaaagcagagaggttaagaggttagattgggggctctggagccagacctgtgtagatctgagtcctggctctggcacttgaaagccgtgtgaccttggttaagatacttagtccctctctgccaaatggagaaataagggcacctaccccatagggtagttgtgtgattacacaagttaatacacttcaatcagtagcaagaaagtgaatgtcaagctgtatttgttcaggcagccatatggtagccccacgtccttagtaaactgaggtattgaagtatcttctttttctttcagaaaatatttgtcaagcaccttctgtgttcaaagaactgttctagagctttgcatgctatggaggtctagaaattcacattatggtggcaggtgacagacaatacaaagagataaagcaatttcatatagtgataagctagggaggagtgctaaaaggagccaaggtgtagtggtgactggaaggtgaccagggaaaccactgtagggtttctaagtgatgagatctgtgacaaatccctgtggtcagcagcaggcattggatatgtaactttattctgtcccattgatcttgtagtcaaccctggtctgttctgtattgttttaattacataatctttgtaataatctttaaaaaaaaaaaaaaaaaaa

SEQ ID NO: 294269 - DNA, 1000 bp, Homo Sapiens; identical to SEQ ID NO: 119095

SEQ ID NO: 294270 - DNA, 1000 bp, Homo Sapiens
ctttctcgtatatacctgtatgctacagtttttcacatggaattccgttttctgaggtacagcacattttaggtaacagtatttaacttgaaattcatcatgggagtctgctgctataccaggcacaagataaaactccaaaatttctgtttacattgacctttacatttaaagctgttcatccatggtgcctccccaaatcataagaccaaagaccaccaaacgcagggtggactctgctcattattctttgacccagaaagactggagaaggtatgtgctttaagtgctgctctacctgaaaagaaatcctttaaattacctatggaagtgatgtcctcagataatcttaatgactattttggcatttataaatagaaatgattatggactttgatctgccatacggaggttcggaacctggagaacggctgtgataagtaggttttgattgagtgaaagcatgagcttgttcagagtgaggggcatagtgaaaaaggaacagccatgcctcaaaatcaaatcatttgcattcccacagcatcctgaataccgactacctcttcacttgctaaagcagctaaactgtgaagctctaagtggtttgggtttgttgtttaaccttagcgagatcctttaactgcagcaatattcaagccagatatttggaagcaaatgatatttcctcttgcagtgtccacaaatctgaatattaggggcatgaaattaggcttaccatctgatttgtaattacaattttggaattctctgttttagttgctgaggcctgagttttctggctcttaaagcatagatcatttcacctgatgtttttgaagcatcctaagtacagtagagtagaaaactgatttctttgttaattgtacactgaataatgccttttaaaaatcaaaataaaattaacaaataatggtgaaaaaaaaaaaaaaaaaaaaaaaaaaaaaaaaaaaaaaaaaaaaaaaacaaaaaaaaaaaaaaa

SEQ ID NO: 294271 - DNA, 1000 bp, Homo Sapiens
attattctattttactcacatcatctttccactacaaaagcccatggacaaaatagctacctaaatttgtttcggtaaaaaatttactgtaaaattgaaaaacagcctgaagctactgacattaagtgctgtttgcaggagcaaaccagtgattttctattaattgttaatcatggacagaagattttaggcagctcatttttttctaaagtgattcaaaatagttttgtgtgggaaaaagctcttctgctgattacatatagctataaagattaaaacctagccacctgctcagtttgatcttccccagctcagacctctcccttctgagcagatgatagaggtaagatgatacatgagaacctccaatggctcctgtcatcacatactgtataaaatccaagttcctcttactggctttcaaggatcctcctttaacttcctgttgccttgtctcatcagcaagatcataagtacctacaggtcaagcactgtctctcccttctctttagcttttcccttaggatctagcacattacccagcaaaatgtgagtagcaaggctgaaatgacatctcaataacttcaccaatgattgtaactcagcatcccttctccatcccagctgaaagcctgcttcaccatcctgcaagagatgttttttctttttgttagcatccattcccctttctaatgcagctcccaatgcataatgtgtgttttacttccctctttctgactccatcctcgtcaccagtgaatatttgtaccttctcttaaaatcttcaaaacacacttctaggaagtgctccttgattaatcctctaagcacttaaatgaaagcactttgcttatgcttatttcacatttgctgccacttgcctctttgaaatatgtaaagatacattacaagaaaaatgtacattttctcgtaacttgctattaatttttttctttatatatatatataaagtaatcctaagccaaaaaaaaaaaaaaaa

SEQ ID NO: 294272 - DNA, 1000 bp, Homo Sapiens
tgtatacatattgtgtatataacatatggatattaaaaatggggaattgcacattttaccttttggacagtaatttctatcacagttagaaggaaatgatagtcaaatacacgtttagattaaaactagtttaaaaaattataaatgaatctaatcaaaatgtgaatagtagtcaaaaggataatttaataagcattttacgttactaaatttgttcatttcaatattaactaaatttccctcatcaaagcaatctttgtgatattacttcgctattaaataaagaaaattggatgcaagacaatggagaaactttaaaactaaacaggaccaccctttattcttaaatttgtgtgtgtccaacagttgaattgaatgtctataaggtctaaaggtagaatgtgaatattgccacagagttcattgctctcagtataagattttactttattaatgcagaaggaatatggatatatttctttaagtctgcagatttttttattatggtgcagcttttttttaattatgtttttaaaattatacagttgaaaaatatgccatttcataaagtctgaggattttcgtcaaccttactgaaacacactggtgctttcatcatcagaggtcaaattattatgataactattccattaagtttgccaaacatttgtcgtggttaccagtgcagcctgtcaaattctgctatttgacacagctttggaaagatttagttcttggtttttccgttttgtattagaatgactgttacagttttatttggctgtttaaagccaaattcagctatttaattatggtttcatggacactgttgagcaatgtacagtgtatggtgtgcttacctgtccactctagagcattgcttacaggttttttgttttttaagatgctgtgctgtaaaatactgtcatacttgctatttcctggtacagtgtagtttttcccctttcatttgaataaaagcatggcaccaaaaaaaaaa

SEQ ID NO: 294273 - DNA, 1000 bp, Homo Sapiens; identical to SEQ ID NO: 119096

SEQ ID NO: 294274 - DNA, 1000 bp, Homo Sapiens; identical to SEQ ID NO: 222145

SEQ ID NO: 294275 - DNA, 1000 bp, Homo Sapiens
ttctacactgtggactttttgcggacttcgatggggctgcccgtggccaccctgcagcagctggaggcagccgcagtgaatgtctgcaaccagacctgggctcagctgcaagctcgggtgccagggcaacgggcccgcctggccgactactgcgccggggccatgttcgtgcagcagctgctgagtcgcggctacggcttcgacgagcgcgccttcggcggcgtgatcttccagaagaaggccgcggacactgcagtgggctgggcgctcggctacatgctgaacctgaccaacctgatccccgccgacccgccggggctgcgcaagggcacagacttcagctcctgggtcgtcctcctgctgctcttcgcctccgcgctcctggctgcgcttgtcctgctgctgcgtcaggtgcactccgccaagctgccaagcaccatttaggggccgacgggggcagctgccccatccctcccccaacccctgtatccccaccccgtactcccacccctcccacaacccctgtacctcccacccctgtatccccacccctccacccacccctctcccaacctctctccccgcccctgtatcctgcattcctccacccaccctctatcccccaccgctccaccccaccactgtcttctccatccttccaccccaccctcagcgtctctgcccctaaggcagcccaggaaataggaactgagactctggtacccacaggagcctgggtgggcaaagagcgctcaatccagctccttgaacccctccagcccgcttcagcctgggcatcactgcaggccccgtgctcctcctcctcctcctcagggctgggtctccagagagtggggccttggtcctgagaatcagcccttagaggctccttctgtgtagtctgggtctgtactggggagggtcacagcccacgggctggcagccagcccagcacctacttgtaaaaattttgtaataaaaagtttttcctagagacgtg

SEQ ID NO: 294276 - DNA, 1000 bp, Homo Sapiens
ggggcttggaatctggcatgaagccaaagggcatctctgagttgcagcatttaaatgatcccactcagagattcacacagaagactggacacaattccgaagagctgcccagaaggagagaacaatgtcatcactacccagtggcagacacctttcaccccagctacacaagagggggcagatgtgtgaggatcactgcagtccaggagttcgatgtttcagtgagctgtgattgcaccactgcatatcagcctgggtgacagagcaagaccctatctcaaaaatacagaaaaatcatcaaccacttgcagtcgtcgtagaaatcaatcattccctccagttatgtccctgacccacaggcttcatttgtgcaagtactggggctgtgctgtcagtaatgtgtgccgcttctgggaaggacgtccattgcccttgatgattgtggtaccatacacactgcctgtttccttgcctgttggttcgtgcgtgataatcacagggacaccgatcctcacttttgtcaaggacccacagctggaggtgaatttctacactgggatggatgaggactcagatattgctttccaattccgactgcactttggtcatcctgcaatcatgaacagttgtgtgtttggcatatggagatatgaggagaaatgctactatttaccctttgaagatggcaaaccatttgagctgtgcatctatgtgcgtcacaaggaatacaaggtaatggtaaatggccaacgcatttacaactttgcccatcgattcccgccagcatctgtgaagatgctgcaagtcttcagagatatctccctgaccagagtgcttatcagcgattgagggagatgatcagactcctcattgttgaggaatccctctttctacctgaccatgggattcccagagcctactaacagaataatccctcctcaccccttcccctacacttgatcattaaaacagcaccaaacttcaaaaaaaaaaaaaaaaa

SEQ ID NO: 294277 - DNA, 1000 bp, Homo Sapiens; identical to SEQ ID NO: 223274

SEQ ID NO: 294278 - DNA, 1000 bp, Homo Sapiens
accctgactctgcctacatctgccactgcccacccggtttccaaggctccaactgtgagaagagggtggaccggtgcagcctgcagccatgccgcaatggcggactctgcctggacctgggccacgccctgcgctgccgctgccgcgccggcttcgcgggtcctcgctgcgagcacgacctggacgactgcgcgggccgcgcctgcgctaacggcggcacgtgtgtggagggcggcggcgcgcaccgctgctcctgcgcgctgggcttcggcggccgcgactgccgcgagcgcgcggacccgtgcgccgcgcgcccctgtgctcacggcggccgctgctacgcccacttctccggcctcgtctgcgcttgcgctcccggctacatgggagcgcggtgtgagttcccagtgcaccccgacggcgcaagcgccttgcccgcggccccgccgggcctcaggcccggggaccctcagcgctaccttttgcctccggctctgggactgctcgtggccgcgggcgtggccggcgctgcgctcttgctggtccacgtgcgccgccgtggccactcccaggatgctgggtctcgcttgctggctgggaccccggagccgtcagtccacgcactcccggatgcactcaacaacctaaggacgcaggagggttccggggatggtccgagctcgtccgtagattggaatcgccctgaagatgtagaccctcaagggatttatgtcatatctgctccttccatctacgctcgggaggcctgacgcgtctcctccatccgcacctggagtcagagcgtggatttttgtatttgctcggtggtgcccagtctctgccccagaggctttggagttcaatcttgaaggggtgtctgggggaactttactgttgcaagttgtaaataatggttatttatatcctattttttctcaccccatctctctagaaacacctataaaggctattattgtgatcaaaaaaaaaaaaaaaaaaa

SEQ ID NO: 294279 - DNA, 1000 bp, Homo Sapiens; identical to SEQ ID NO: 224733

SEQ ID NO: 294280 - DNA, 1000 bp, Homo Sapiens
ccctgcagatgacttcgatatctaccacgtcctggcagagtgcacagattactatgatacccttccagttaaggaggctgatgggaaccagccccattttcagggtgtcactggcttgtggaacttgggcaacacatgctgcgtgaatgccatctcacagtgtctctgcagcatcttgccgctggtggaatactttctcaccgggaagtatatcaccgctctgcaaaagtttcttcttccaagcgattgcagtgaagttgccactgcttttgcctatctgatgacagacatgtggctgggagactcagactgtgtctcaccagaaatattctggtcagctcttggcaacctctacccagcatttacgaaaaagatgcaacaagatgctcaggaattcttgatttgtgtcctaaatgaacttcatgaagctctaaaaaagtaccactactcccggagaagatcatatgagaaaggatctactcagagatgctgcaggaagtggattaccactgagacatccatcatcacccagctgtttgaagagcagctcaattatagcatcgtatgtttaaagtgtgagaaatgcacctacaagaacgaagtcttcactgtcttctcactccccattccatccaaatatgaatgctcccttcgggactgtctccaatgtttttttcaacaagacgcactgacctggaacaacgaaattcactgctccttttgtgaaaccaagcaagaaactgctgtgagggccagtatttccaaagcaccaaaaataattattttccacctaaaaaggtttgacattcagggtacaacaaaaaggaagctgagaacggatattcattacccactcactaacttggacctcactccttatatttgctcaattttccggaaatatcctaaatacaacctctgtgcagtggtgaaccattttggtgatttggatggtggccactacactgctttctgcaagaattcagtcacccaggcctga

SEQ ID NO: 294281 - DNA, 1000 bp, Homo Sapiens
cgtggggggctttgacgggacaaaccgccttaattcagctgagtgttactacccagagaggaacgagtggcgaatgatcacagcaatgaacaccatccgaagcggggcaggcgtctgcgtcctgcacaactgtatctatgctgctgggggctatgatggtcaggaccagctgaacagcgtggagcgctacgatgtggaaacagagacgtggactttcgtagcccccatgaagcaccggcgaagtgccctggggatcactgtccaccaggggagaatctacgtccttggaggctatgatggtcacacgttcctggacagtgtggagtgttacgacccagatacagacacctggagcgaggtgacccgaatgacatcgggccggagtggggtgggcgtggctgtcaccatggagccctgccggaagcagattgaccagcagaactgtacctgttgaggcacttttgtttcttgggcaaaaatacagtccaatggggagtatcattgtttttgtacaaaaaccgggactaaaagaaaagacagcactgcaaataacccatcttccgggaagggaggccaggatgcctcagtgttaaaatgacatctcaaaagaagtccaaagcgggaatcatgtgcccctcagcggagccccgggagtgtccaagacagcctggctgggaaagggggtgtggaaagagcaggcttccaggagagaggcccccaaaccctctggccgggtaataggcctgggtcccactcacccatgccggcagctgtcaccatgtgatttattcttggatacctgggagggggccaatgggggcctcagggggaggccccctctggaaatgtggttcccagggatgggcctgtacatagaagccaccggatggcacttccccaccggatggacagttattttgttgataagtaaccctgtaattttccaaggaaaataaagaacagactaactagtgtctttcaccctgaaaaaaaaaaaaaa

SEQ ID NO: 294282 - DNA, 1000 bp, Homo Sapiens
ggaagacttctccattctatctttgtaaaacagacaagatatgcacttgacatagtagcaaattggttctgaattatgcaactgtttgctatttagtaaactagcaaatgatgcatgtattttgtttttcatgtactgggcaatatgagtaaaatctgtccctttttccccctttgaatgaggtcttccatgtttgagggaaagtcttgcactattgcatatattttggggacacagattttcatagtttccatttttggggggcttaaggattttttttttttctgtttgaaacagttttatactttctgatatagtacttgaaattcttaccagaaaattactttggagttttgaagcctttattaatactacttttaaagaagcagttgttttattgtcaatgttttttttcccccaagcatattttcttgtatttctgtttccatatatatatatatatataatttccaattcaggatattgccctgccatccatgaaaactgttctggcaccaaaagtaatgacaaatgttaagtgtaataatagaaaagtagagcaaagagccattcagcttcagtctttacataccatgaataaaacattaaaacatcatatggagaagtttacatggtgattgttcacctgcagtactgtggagttttaacattttgtcctcttttcagtgaaacagagtaaaaatattcatctaccattactgttatttgctgattttgttttattttttgatggtaatattctatccttatgacactattgcaaccaaattggctttaccatcttggctttagtaggtatagaagacaatggattaccatctttattgctgtaatgtgttaagcattatatgctagtagaatctagtttaattgtttcaggtggaaagtattctttgagtttccatattgaatgtgtttggactaaacaaacaataaactactgatgtctgcagcatttaaaaaaaaaaaaaaaaaaaaa

SEQ ID NO: 294283 - DNA, 1000 bp, Homo Sapiens
accggggcaagagggaaggtgaccgcccagctctcccacatcccactggatctggcttacaggggggtcggaagcctgtcctcaccgtctcgggggttgtggcccccgccccctccctatatgcacccctggaaccagcaagtcccagacaaggagagcggaggaggaagtcatgggaacgcagcctccagttgtagcaggtttcactattcctatgctggggtacacagtgagagtactcacttttcacttgtcttgctcttagattgggccatggctttcatcctgtgtcccctgacctgtccaggtgagtgtgagggcagcactgggaagctggagtgctgcttgtgcctcccttcccagtgggctgtgttgactgctgctccccacccctaccgatggtcccaggaagcagggagagttggggaaggcaagattggaaagacaggaagaccaaggcctcggcagaactctctgtcttctctccacttctggtcccctgtggtgatgtgcctgtaatctttttctccacccaaaccccttcccacgacaaaaacaagactgcctccctctcttccgggagctggtgacagccttgggcctttcagtcccaaagcggccgatgggagtctccctccgactccagatatgaacagggcccaggcctggagcgtttgctgtgccaggaggcggcagctcttctgggcagagcctgtccccgccttccctcactcttcctcatcctgcttctcttttcctcgcagatgataaaaggaatctggcattctacacctggaccatttgattgttttattttggaattggtgtatatcatgaagccttgctgaactaagttttgtgtgtatatatttaaaaaaaaaatcagtgtttaaataaagacctatgtacttaatcctttaactctgcggatagcatttggtaggtagtgattaactgtgaataataaatacacaatgaattcttcaaaaaaaaaaaaaaa

SEQ ID NO: 294284 - DNA, 1000 bp, Homo Sapiens; identical to SEQ ID NO: 224735

SEQ ID NO: 294285 - DNA, 943 bp, Homo Sapiens
aaatccgggcccttggtcccccgcgcgggcgcgggtggatctctcgggctctgacttgttttcgggtcaccttcaggcttcagccaggcacctgacgcctctttcccctcacggtgccagggccgggccgaactacatttcccaggaggctccgcggccaggtgcaaacagcgccgtgctgactacatttcccagacagccttgcggcggcccgggccttaaagcgtccatttcccagcggccctccgctgcgagaccgcagcccttctctggagtctcagagccgcaagacaccacgactcccagaggaccttgcgtcgggcaagaaagactacaccttccagaggcctctgcggcgccgcgacaggaagcggcgggcgagccgagtgtccttgcgcgtggatccgagcgaccatggtggcccgggtgtggtcgctgatgaggttcctcatcaagggaagtgtggctgggggcgccgtctacctggtgtacgaccaggagctgctggggcccagcgacaagagccaggcagccctacagaaggctggggaggtggtcccccccgccatgtaccagttcagccagtacgtgtgtcagcagacaggcctgcagataccccagctcccagcccctccaaagatttactttcccatccgtgactcctggaatgcaggcatcatgacggtgatgtcagctctgtcggtggccccctccaaggcccgcgagtactccaaggagggctgggagtatgtgaaggcgcgcaccaagtagcgagtcagcaggggccgcctgccccggccagaacgggcagggctgccactgacctgaagactccggactgggaccccactccgagggcagctcccggccttgccggcccaataaaggacttcagaagtgaaaaaaaaaaaaaaaaaaaaaaaaaaaaaaaaaaaaaaaaaaa

SEQ ID NO: 294286 - DNA, 1000 bp, Homo Sapiens
tatggctgctggcatctggcaattgttgtcccaggtatcatggctggctgagctagggtttctgattttactttcctcagccagtttctaggccctgcaaggccccatgagctacagtcgtttgaagttttactgagatataaattagaatggcatgtgctgcaaggcagatgtatgggagccaatcatttggctagtaaaggagcccagccaactggccagcagcttcagctcatcacagctttgttgttctcaacttgttgaatatcatgcattcattcattaattcaaccagtatttattgagcacctaatatgtgccaggcactgccactgcaatcttataaatggagttttaaatttgcaaatgtattttatttgtaattgttatttttatgtgtggaaaacagaatggattgctagtgttggtgagtaaaaacaaaaaaaaacaaatgacaaagaatgtgatagctcatattttagaaatggctttataaatcaccttggttccctatcagtagagctagtaaggcagcaccaatctctaaatatagaagaaatttccccaaaatgtaaaatgccagacatgtcccagcccgaactcccccaccccatggcctggaggtttctagatggaattggccacatttgctttagtctctctatccagctaaataggcttggggaaagctgtggtgctacagaaagtaccctagacttagaagcagtaatactggtttctagttctatttctgacactgcctccctgtgtggtcttgagcaagtcacttcacttttctgtgctttggcttcctctactctaaaaatgggataacagtatctatctgatctactgtgtaatgcttctctctgtgcctcagcttcctgatctgcaaaattggtttaataataatgcctacctcacagggttgttgtgaggatttgcctaaatatatatgtacagtgcctggcatataagttctcaataaatggtagatatt

SEQ ID NO: 294287 - DNA, 1000 bp, Homo Sapiens; identical to SEQ ID NO: 224736

SEQ ID NO: 294288 - DNA, 690 bp, Homo Sapiens; identical to SEQ ID NO: 224737

SEQ ID NO: 294289 - DNA, 1000 bp, Homo Sapiens; identical to SEQ ID NO: 119097

SEQ ID NO: 294290 - DNA, 1000 bp, Homo Sapiens
ccctccctcctgtttcactctttaaagcatgttgtcaacgttttcttaaactgaataataatcactcatcttctgtcaaagatgccatgcttcagctgtgactcagcagttccttaaatcacaaacaatggtaggtctattattttctccctggatacactttatcttcatccatttcccaatgttttgtcatggctatttctactcaaacactaatcccccattttctaatcaccattattaatcatatcaagtcaattagtttggtttcacactaataataatgacaaaaagcacatgcagagtaatacacaaacaaaaaaagtgacagttacttttttgtgacaagagcaatattgggtatgaactgattaatattaatctgaggtgttgctactagactgagggtttccaggagtagtactatgacatcatgtaaacacattcagttttcatgttggaatctaagatgtgtcccttctcccaaagggattttaatcattcttggcctctctactcactcttaatcaaagtgtggaggaggtggcccccacagcagggtttggaacctacagaccctggcccctgagacatgcagctgtcagacaagccagcatgtcaaacacaggttagagagactgagcttccagattgcatagccatttccttgactactgagtaaaggccaaggctaagatttagtaagcctagccctgaagcaagcaaagaatatggcagtgtaatgcaggtcatttagaaaaaaacaatgttgggcacaaagaaaatttagatctgacaagtataattttctaaagacattatttcaggattaacatcaatttcttagcagaggaaatgaatactattgtcagaaccatatctatatagtcaatcatttcctcttttaacgtctgtcttgttctctttttacccaccacatatgtataactatgtgaaaaattatatttgtgcataataaaatgtgataactttttacaac

SEQ ID NO: 294291 - DNA, 422 bp, Homo Sapiens
aaggagaggccaccgggacttcagtgtctcctccatcccaggagcgcagtggccactatggggtctgggctgccccttgtcctcctcttgaccctccttggcagctcacatggaacagggccgggtatgactttgcaactgaagctgaaggagtcttttctgacaaattcctcctatgagtccagcttcctggaattgcttgaaaagctctgcctcctcctccatctcccttcagggaccagcgtcaccctccaccatgcaagatctcaacaccatgttgtctgcaacacatgacagccattgaagcctgtgtccttcttggcccgggcttttgggccggggatgcaggaggcaggccccgaccctgtctttcagcaggcccccaccctcctgagtggcaataaataaaattcggtatgctg

SEQ ID NO: 294292 - DNA, 732 bp, Homo Sapiens; identical to SEQ ID NO: 31758

SEQ ID NO: 294293 - DNA, 1000 bp, Homo Sapiens
ttttctttgtttctaccattcatatttaaaatacagcattatctctaatttattccagcattattaaatatctactatttgcatggcactggctggggaatggaagagaatacatcttttctgctctcaaggagcaaaaaaatgtagctatagaaaaattgctcaatgtaaataactaatacttttaataatgtgactaatgttcagaaataatgtatcatcaaaatttcttacagttcattagtttgtaaatttaatgtaaatgttgagaatattattcttgtcataatgtaaagccacgttcttttactttaatctctggggaaaaaaatcacaaattattattattttaagacaaggtgtgcgacagttgaataaaaagttgagtgcattaatttctttaattaaatctaagctataattcaaatgaactttggaaaacactaactttagtctgattagttattagtagttaactgagtatctacaaaaaccatactttcattcccaaaactgacagtcattctcctttgtcccatgatagaaatatgaagattattccacaataccctccgtagacagaaaactttataaacccactaatgccaaagggcaaggtgataatcccctaacggaaaaacaggaagccatgctgttcttttcttgaatgccacctttgccgtcaccatagtgctgtgatctagggtaaggcagtttgttgttgttgttgttgttgttttaaataacagaacattcagataaatatcctaaagcagtataaaattggaagactagtgtctctactttaattaattgcacatgcttctatgttctacataaatcaaagccttcctttaagacccgttcttaccttcattcacgatttgctctcctctcacagtcttctggcctcggtccccttgtccagtattctcctttcttgtgtcctgacctggggagtctccagctccctccaagtgacagagaatcccgagtgctg

SEQ ID NO: 294294 - DNA, 1000 bp, Homo Sapiens
gatcagagctcatacccaaagcattacagagaacagcagcatcattgccctccccagctgaaaaacaagttggctagaagatacatggagaggaatggtgtggtcaacagttaatgaaacggttctatcatgcatgtgtaatgtggatggagacaattataagatttgactataactatttggagggtctttaacattgccaaaaaaacaaatatgttgatttttattttattttattttttattttaagaggcgggatcttgatctcacatgttgcccaggctggccttgaactcctgggctcaagcattcctcctgcctcagcctcccccatagctgggactaggggtgcatgccagcatacctggctacgttgactcttaaaatctatgttctcttattttaaagatacagtgctccccactgaaaattaaacctaaaaaatgtcacatattggtatgttgttaacctggtagattaaatcatgagaatgattagaaagacgggcaacacagcgggttacatccacactgctgatcacaccaacgacaggagctgataagcaagaaagcgtcacagccagcgtctgttcacccaaggttgacaagtgaagtttctctaatgttgattgttagccgatttgtaacctggcatttacttagcaactgccttatcaattacaggatttgccggtaaaagcagactcaaatataaaggtttttggcttaacttggtttattatagttgctctatgtttgtaaacagacaatctctaatgtctgattatttgtatcacagatctgcagctgccttggacttgaatccatgcaatgtttagagtgtgaagtcagttacttgttgatgttttcttactgtatcaatgaaatacatattgtcatgtcagttcttgccaggaacttctcaacaaaatggaattttttttttcagtatttcaataaatattgatatgcccagcctgataatttttaaaaaaaaaaaa

SEQ ID NO: 294295 - DNA, 1000 bp, Homo Sapiens; identical to SEQ ID NO: 119100

SEQ ID NO: 294296 - DNA, 1000 bp, Homo Sapiens
tacatcgaagactagcagggcaattccttgaagagctactcttccacctggaagccctctctggctaaggacaggcaggtgcccctctctccatcagaggacacctgtactggagagcaacacaggatggtctctgccatgaactggaggccaggaatctcctcactgaaaattacagtatggtaactttgcaaatggtggttgtttcttccaagactccagccctgattgcgcaaaactgaaaggcatgtgaagggaaggaagaggaagagtgcaaaacattgaagagagagctgagtgagctgaagagtgaggatatgagtagccccaacccaaacctggagatggggagaaacctacagaatactagccagagctcctccttgtcttggcagcctactagggacctggggaagcaaaaacgaaagctgggcaacatgcctgctttagaatgttttccttctacttacacatcttccacaggtctcagaatctttccttcctctcatccttttctcctatcttcatatctatcagagtatccactgtttattcaacaactactacttgatggtcagacacaaacaaacaagctaggtgctaattaataaagatacgagttttggccgggtgcggtggctcacgcctgtaatcccagcactttgggaggccgaggcgggcgaatcacgaggtcaggagttcaagaccagcctggccaacatggtgaaaccccatctctactaaaaatacaaacaattaactgagcatagtggtgggcacctataataccagctactccggaggctgaggcaggagaatcgcttgaacccaggaggcagaggttgcagtgagctgagatcgtgccactgcactctagccggagtgacagagtaagactctgtctcaaaaataaataaataaataaataaataaataaataaataaataaataaaaaataataatacaagttttcataagcacacttctaaaaaaaaaaaa

SEQ ID NO: 294297 - DNA, 1000 bp, Homo Sapiens; identical to SEQ ID NO: 119102

SEQ ID NO: 294298 - DNA, 1000 bp, Homo Sapiens; identical to SEQ ID NO: 119102

SEQ ID NO: 294299 - DNA, 1000 bp, Homo Sapiens
tggacaaacagatcacaatcatagatagtccgagcttcatcgtatctccacttaattcctcctctgcgcttgctctgcgaagtccagcaagtattgaagtagtaaaaccgatggaggctgccagtgccatcctttcccaggctgatgctcgacaggtagtactgaaatatactgtcccaggctacaggaattctctggaattttttactgtgcttgctcagagaagaggtatgcaccaaaaaggtggaatcccaaatgttgaaggtgctgccaaactgctgtggtctgagtggacaggtgcctcattagcttactattgccatccccctacatcttggactcctcctccatattttaatgagagtattgtggtagacatgaaaagcggcttcaatctggaagaactggaaaagaacaatgcacagagcataagagccatcaagggccctcatttggccaatagcatccttttccagtcttccggtctgacaaatggaataatagaagaaaaggacatacatgaagaattgccaaaacggaaagaaaggaagcaggaggagagggaggatgacaaagacagtgaccaggaaactgttgatgaagaagttgatgaaaacagctcaggcatgtttgctgcagaagagacaggggaggcactgtctgaggagactacagcaggtgaacagtctacaaggtcttttatcttggataaaatcattgaagaggatgatgcttatgacttcagtacagattatgtgtaacagaacaatggctttttatgattttttttttaacattttaagcagactgctaaactgttctctgtataagttatggtatgcatgagctgtgtaaattttgtgaatatgtattatattaaaaccaggcaacttggaatccctaaattctgtaaaaagacaattcatctcattgtgagtggaagtagttatctggaataaaaaaagaagatacctattgaaaaaaaaaaaaaaaaaaaaaa

SEQ ID NO: 294300 - DNA, 1000 bp, Homo Sapiens; identical to SEQ ID NO: 294299

SEQ ID NO: 294301 - DNA, 1000 bp, Homo Sapiens
cagctggcgagccggctccgggtgcggcgaggcccagccctctcggattgcgcgccggaccccgggacgcgctccatgcggccgctcagcatgtccgggcactttctgctcgcacccatccccgagtcctcctcggactacctactgcccaaggacatcaaactggcggtgctgggcgccggccgcgtgggcaagagcgcaatgatcgtgcgcttcctgaccaagagattcattggagactatgaaccgaatacaggcaagctgtattcacggctggtctatgtcgagggggaccagctctccctgcagatccaggatactcccgggggcgtccagatccaagacagcctcccccaggtcgtcgattccctgtccaaatgcgtgcagtgggccgagggttttctgctggtctattccatcacagactatgacagctacttgtccatccgacccctttatcagcacatccggaaggtccaccctgactctaaagcccctgtcatcatcgtgggcaacaagggggaccttttgcatgcccggcaggtgcagacacaggacggtattcagctagccaatgagctgggcagcctgttccttgaaatttccactagcgaaaactacgaagatgtctgtgatgtgtttcagcatctctgcaaagaagtgagcaagatgcacggcctcagtggggaaagaagaagagcctccatcatccctcggccccgctctcccaacatgcaggacctgaagagacgcttcaagcaggctctgtctcccaaagtcaaagccccctctgcactggggtgaactatctcagacagatgcctctcctttttaatacgcatttgtgcagctaaaagactgggcttctcgctttttaatcacacattcagagtttatttttataaaaaaattgattttcaagtacatgtgtatttctgaaaattcaaacagtgattgcctagaagctggataaaattttgttttgttttattaaaagaac

SEQ ID NO: 294302 - DNA, 1000 bp, Homo Sapiens
gttcagggctgtaaaccagccgcagtcttagagattaggttgggtgactgagcacatgctgcaatatcacaacaagtgggaattacagatttggcaggaataaagagaaaagccttcatgacctcctcctgtgtttacaagactcctccgagtctcctaccttcagcgttcatggaaatctcccattcctctggctggatgagaatttgctaaattcctctgcctcagtgcaagataattttgtttacaactatagctcacttttatgttttccagtcaaatctcatgagaccagcaggatgaacaggtaacagaggtcaaagagaaagaatgaatgcccacctatggatggaggcagtttagagaaatatgcttgtccaaagtcacaattaactgcactgacacagagaagcagatattgcacttttgctcaactaaataccactttgatgactaagaacgggccctctgggatcagacaaaggaaaatcacagtgccttctgggtatatcagaacctacctgaaattcacaaactctaaacaatgaatgctcaactctgttgtatgaagtagccacaattaccaaccttcctgcacaaatcaaacaagagatatcttaaaataggaatgatgctgaaactctacagcttttgtgtgaaacacatagaagaagaaagtaaaacaggacaaactccgtgggcaggctccacctgactagaggattccaatgaaggactcaaactggacaccaaatccacatagttctgcctggcagcttcctgaacggacgatgacaaacaacctcagcccatggtcaatgaataagcactttgagaaagttactatactaataactaacaccttgcaatgaagaaagaatagaagcacatcaagatcttgaagactccatttacaatggcttaatgagaagcacaaacttctttagaagtacagcaaataaaagcacagtaactagtaaacccaaaaaaaaaaaaaaaa

SEQ ID NO: 294303 - DNA, 1000 bp, Homo Sapiens
ctcccccaacacatgtgcccccaaaaagtgagccaggcacctctgtttcctgctgtttattgacagccgacggcagcgccttgcccagacctcccctgcccacctgctggagcccagcctgtgccgccctctgaggagaggcctggggggacagctgggcacgtccactcgcagggaaacacggggtgagacagcaggaaggggccctgcacgccgggacgccacctccgccagccgcctccacccgccccacaccacaatcgctggttttcggcattttttaaattttttttttaagaaacgtcaaagttgtgcccaacactgtggatcagcaaacacgatagaggagaccagtcagtacttcttggagggggcaggaggagagaggaaaagggagggcgagaatgaccacacaacacagccttggaccatgagcagaagcgtccgtgggaactccactggggtggatgggctgcctgcacagcccctggagagggggccaggcacaccctcagaggagctgcaagcccgtggcctggcctgctacatgccctgcttccacgtggctgccacgctgacacacccacattcaccaaacccacccgcgccctgggacgcagccacgccaggaggaggacacggccgccgagagcaaggcacaacctcgagttcttggggcgcagagaacttaggagagaagcacggaggagcccccggcagagcacccgcccccgggccccagccttccacctgtgctagcagcctggggcctccactctggccggaggaaggaccgcaggcagacagcctgggcctctaacagcttttgtccggagctagacttcgtgtcctttcagttggtaaatggttttctatagaatcaataatatttctttctttaaatatatatttgttaaagttatacctttttgtttctctggggaaatccgcctcagctcattcccaataaattaatactcttgatagcttaaaaaaaaaa

SEQ ID NO: 294304 - DNA, 1000 bp, Homo Sapiens
gggaagactctgctggcgaaggctgttgcaaatgagtccggactaaattttatatctgtcaagggccccgaattactaaacatgtatgttggtgagagtgaacgtgctgtgcgacaagtttttcaacgagccaagaactcagcaccctgtgtgatattctttgatgaagtggatgctttatgtcctcgaagatcagaccgagagacaggggcaagtgtccgagtggtgaatcagctacttacagagatggatggtctggaagcacgccagcaggtttttattatggcagccactaacaggccagatataattgaccctgcaatcctgcgcccgggccgcctggacaaaacactgtttgtgggtttaccgccccctgcagatcgccttgccatcttaaaaactatcacaaaaaatggtaccaaaccaccactggatgcagatgtaaatttggaagcaattgctggtgaccttcgctgtgattgctatacgggcgcagatctctctgctttggtacgagaagcttctatctgtgccctgagacaggaaatggcaagacagaagagtggaaatgaaaaaggtgaactcaaggttagtcataagcattttgaagaagctttcaagaaagtaagatcatctatatcaaaaaaggatcaaatcatgtatgaacgtttgcaggagtccctcagccggtgatgtctccagcagccggcttagaggagctagcccatcaagccggcagagaatcccccacacgctctgaaggacccactttcagctggacacaggcgcggcctcatgtaaacattttattttcaaatgaatgaggccaagctgaagctgaagctgaagattcttcccatctggccagccttgtgtgaaaatgccttcttcctctttaagaaaaaggacaatttttaaactgctgaaataaaatgactgttacatttttcaaataaaacttttactttgaactattttgactataaaaaaaaaaaaaaaa

SEQ ID NO: 294305 - DNA, 1000 bp, Homo Sapiens; identical to SEQ ID NO: 220453

SEQ ID NO: 294306 - DNA, 1000 bp, Homo Sapiens; identical to SEQ ID NO: 224741

SEQ ID NO: 294307 - DNA, 1000 bp, Homo Sapiens; identical to SEQ ID NO: 119103

SEQ ID NO: 294308 - DNA, 1000 bp, Homo Sapiens
agatggacagataaaaaagattttacgtttgtcttttggccataagtgggaaagttttctgtatattgcatagcattacacatttatgcctattttaacattaacttctaaagaagttttttctaagaaaatgtttcaaggcaatattttttttgaggctgccgaagacaaatgacaggattatgagtatacagtgtatgccttttccttcatgcagaattttgaaatgttttcagtttgtatattgcatattcacatgatcattgttcactattttatgaactggccttctcaatgtttgatgattttttaaaagctgttatgttgaattcagtaaaataacattaccttattttttttcttattcaaattctggaactatagcaaataattcgttaaattgtcatattcaaaacaaatgtggatacagtcttggttctccatctgtaattttttttaacagtttgctatagcttactgcttaactaattttaaataaggaaataagtatgttagatgcagtagacgatacaggttgcatgtggacactcagtcacattaacaacttgggaaaaaaatggcaatgttacggtgaattctcaggtgaacttttttcagttataaaacatctattttgaatctgtaaatattttaaatgttttattaaggcatgtaataaactattctttgaaacttgttgggtagaatgaaaattaaagccataatggtagaagatggcatactgattataaaagaagcagaaaaacattgatttttttatatctttcataatataattttctaacaatgcaataaaaccactaaacttttgtgtccatattttactgagaccatgtttcattaaaagcatagtttcatagtatttaatttacatttctccctaatgttcttacccaaatgtacctgaactaaaaaatgttagatgttggtgataagttgacagttaaataaaattctctaaaattgcttctaattgaaa

SEQ ID NO: 294309 - DNA, 1000 bp, Homo Sapiens
tgggaaccacgagtgtgccagcatcaaccgcatctatggtttctacgatgagtgcaagagacgctacaacatcaaactgtggaaaaccttcactgactgcttcaactgcctgcccatcgcggccatagtggacgaaaagatcttctgctgccacggaggcctgtccccggacctgcagtctatggagcagattcggcggatcatgcggcccacagatgtgcctgaccagggcctgctgtgtgacctgctgtggtctgaccctgacaaggacgtgcagggctggggcgagaacgaccgtggcgtctcttttacctttggagccgaggtggtggccaagttcctccacaagcacgacttggacctcatctgccgagcacaccaggtggtagaagacggctacgagttctttgccaagcggcagctggtgacacttttctcagctcccaactactgtggcgagtttgacaatgctggcgccatgatgagtgtggacgagaccctcatgtgctctttccagatcctcaagcccgccgacaagaacaaggggaagtacgggcagttcagtggcctgaaccctggaggccgacccatcaccccaccccgcaattccgccaaagccaagaaatagcccccgcacaccaccctgtgccccagatgatggattgattgtacagaaatcatgctgccatgctgggggggggtcaccccgacccctcaggcccacctgtcacggggaacatggagccttggtgtatttttcttttctttttttaatgaatcaatagcagcgtccagtcccccagggctgcttcctgcctgcacctgcggtgactgtgagcaggatcctggggccgaggctgcagctcagggcaacggcaggccaggtcgtgggtctccagccgtgcttggcctcagggctggcagccggatcctggggcaacccatctggtctcttgaataaaggtcaaagctggattctcgcaaaaaaaaaaaaaaaaaa

SEQ ID NO: 294310 - DNA, 1000 bp, Homo Sapiens
caaagcgttgagtcatcaggtatttagagcctagccagctacccagtatccatgctgccatatcccttcattgtaaaaagtacctaaacattcgtgaaatgattttttttagctgaaaaatgctggcaagaagaattttaaagcttaaaataggtggtaaatttgaagtatgagtgtgttcacgagaaacataggcttttcaaaaaaatttttattcaaggcaaagcaaggaacatcttgagatatgtctcaagaatataaagatgtattattttaagccaaggagctgaaatatatctcagtttataaattcaggtatattctttttgtctccatggcaaccataacttttgaaccaaaaaaaattgtttttacatctttatgctgaaaatgtgtttagattaggaatatggtcgggctgaatttgctgttgctccctaaccaaatccacctcttgttttccttgtgagtccatggctaaatcaaagctgcccctgagaagagacttaatccaagcctgattgtactagtggcatcacttagaagtaggctttccctcttcctagtagatctcaatgttttataattccttaaaacagctgaaaattgggacaacatactttacgcaatgaacagtagttaaataggaaataaactagttccatataagtatacacctagagttttaattacctttataatgtttcttaaaagtgaaacttagatacaattgtgattggatacttagatactaagtgaaacttagtgtaacaattttgatctgttaaattggattttacatgtacatttgaatgccagaatttctaaataaatcccctggttaggaaattttaaaagtcaaagcttgttttcttcaaccactaccttctacattggttgacttagaccgtaagctttttaagtttctcattgtaatttaccttctcatgcagattgctgatgttttattaaaccttatttttacaaaaatgaaaaaaaa

SEQ ID NO: 294311 - DNA, 1000 bp, Homo Sapiens; identical to SEQ ID NO: 224742

SEQ ID NO: 294312 - DNA, 1000 bp, Homo Sapiens
atggcagttccaaaggcacatcggccaggtgacctcatacatttgcctccataccttagaatggactttttgttaaaccgaggtggtccaggcaccagcagggacctgagcttaggacaagcatgcttggaacctcagaaaagccggaccctgaagcgccccacggtcctggagcccatcccgatggaagccgcctcctccgcctcctccacgagagaaggacagtcgtggcagccgggggccgtggccacattacctcagcgggagggagcagagctgggacaggcagctaaaatgagcagctcccaagaatcactgctcgactcccggggccatttgaaaggaaacaatccttacgcaaaatcttacaccctggtataacagacagcatgactggacagcggttgtaaatacaattcaaacaattcaatcaaagctaccttttttttacggaattccaatatttataattaaagaaaattgccaaaatatattaaaaaaaaaaaagagaaaatactgaaaccacagacagtgcaaagactctcctgctttttttctgtctgagtgtgagctccatccgcctgggcatctgattttttgggaaagaagtccagttttatgatcttcacaggctattgcatttttactgattttctacaaaagtgcatgggggggattaattaaaccttctgactggaagttctatcacacaagaggcaagaaagaaaacagggtgggtgggaaatcagcctatttgtgaatttaaaaggaacaccgatttgcgggcaggggaaaacttcagtcacgtttgcacacctttctttcccattagaaaccgggttctcaatttggtcttcttttgttgttaattaggatgagtgccgtcagtgaaggggtggggggaatcaatttggttttctctcttgtttcttttttaatttaatgagacactctttgcattttgtctaagcgaaataaaaaagaaaaggttgtctgccta

SEQ ID NO: 294313 - DNA, 1000 bp, Homo Sapiens; identical to SEQ ID NO: 119105

SEQ ID NO: 294314 - DNA, 1000 bp, Homo Sapiens
ccaccacgcccagctaatttttatatttttagtagagacaggattgcaccatattggtcagcctggtctcaaactcctgacctcaggtgatccgcctgcctcagcctcccaaagtgctgggattacaggcgtgagccactgtgcccagcccaggttttgaagttgtccgagatagcagtctgctctctactgccttataaaatccctgtgtgaagggatgctctcagtatcatttgcccttgcacagaatatccctggggtttgaggttctttgaattctccctctttgtcatctctttcgctgccacttctggctgtggtcactagcttggccatagcacctctcttctccacttctgatctgctgcttctaaccttctatagattgcagctggctttaaaatagattgtaaagtgtaaggcattcggttctgagacagcggcagagagagccatgcaaatgtttaggacaacccagtctttcttttttttttttttttttttttgagacggagtctcactctgtcacccaggctggagtgcagtggtgcaatctcggctcactgcaacctctgcctcccgagttcaagcaattctcctgcctcagcctcccgagtagctgggattacaggcgaccaccaccacgcctggctactttttgtatttttagtagagacagggtttcaccacgttagccatgatggtctcaaacttctgacctcataatccgcccaccttggcctcccaaagtgctaggattacaggcatgagccaccacccctggctgaaacccaatctttcaaaacatgaaagggggtgatggagaaaaccttagcttggttgtctaaagacatgggtgcaaactctaggctagctctgccaatcacttactgtgcgggtttgactcagtcccttcccctcattaggtcccagtttctccatttgtaaaacaagcaattgtgctacattgatggtttacatcaataaagtttgaaacggc

SEQ ID NO: 294315 - DNA, 1000 bp, Homo Sapiens; identical to SEQ ID NO: 119107

SEQ ID NO: 294316 - DNA, 1000 bp, Homo Sapiens; identical to SEQ ID NO: 117184

SEQ ID NO: 294317 - DNA, 1000 bp, Homo Sapiens; identical to SEQ ID NO: 288751

SEQ ID NO: 294318 - DNA, 836 bp, Homo Sapiens
ctatttgtctttaataatcctgggtaatagtcaactaataatcctgggtagtagtctggagacactcctagcggagtttactcgggagagggcggagaaatacatgacatgagcagtacaggctcatggttgggagctgagggaaggctgagaatcctcccggaacctctggattctgacgccccaggggttcttcacacaggctggccggtctcgggattgaagccggagacgtcagacgctaaggttgcttagactgcggcccacgtggaaggctcttagccaccctgcctggcccgaggagaaaaacaagcaaatcctagtgctgggcctggatggagcaggaaaaaccagtgtcctgcactctctagcttcaaacagagtccagcacagtgtggcacccacccaaggtttccatgcagtttgcatcaacactgaagacagccagatggagttcctggagattggtggcagtaaaccttttcggtcctactgggaaatgtacctatccaagggattgctgctgatctttgtggtggattcagcagatcacagccgattacctgaagccaagaaataccttcatcagctaattgcagcaaacccagtacttcctctggttgtgtttgcaaacaaacaggatcttgaagcagcctatcacattacagatatccatgaagctttggcattatctgaagtgggaaatgacaggaagatgttcttgtttggaacctacctgactaagaatggctcagagataccctccaccatgcaagatgccaaagacttgattgcacagctggctgcagatgtgcagtgaccaggactcagcccac

SEQ ID NO: 294319 - DNA, 1000 bp, Homo Sapiens
ctgctcctccaggacgggccctgccctcagccaggttcctgtgattttgagtctggcctgtgtggctggagccacctggccgggcccggcctgggcggatacagctgggactggggcgggggagccaccccctctcgttacccccagccccctgtggaccacaccctgggcacagaggcaggccactttgccttctttgaaactggcgtgctgggccccgggggccgggccgcctggctgcgcagcgagcctctgccggccaccccagcctcctgcctccgcttctggtaccacatgggttttcctgagcacttctacaagggggagctgaaggtactgctgcacagtgctcagggccagctggctgtgtggggcgcaggcgggcatcggcggcaccagtggctggaggcccaggtggaggtagccagtgccaaggagttccagatcgtgtttgaagccactctgggcggccagccagccctggggcccattgccctggatgacgtggagtatctggctgggcagcattgccagcagcctgcccccagcccggggaacacagccgcacccgggtctgtgccagctgtggttggcagtgccctcctattgctcatgctcctggtgctgctgggacttgggggacggcgctggctgcagaagaaggggagctgccccttccagagcaacacagaggccacagcccctggctttgacaacatccttttcaatgcggatggtgtcaccctcccggcatctgtcaccagtgatccgtagaccaccccagacaaggccccgcttcctcacgtgacatccagcacttggtcagaccctagccagggaccggacacctgccccgcccaggctgggacaggctgcaggtctcaggatatgctgaggcctgggcgttccctgccctgtgctgactctgttgctctgtgaataaacaccctggcccatgagggccgccccaaaaaaaaaaaaaaaaaaaaaaaaaaaaaaa

SEQ ID NO: 294320 - DNA, 654 bp, Homo Sapiens; identical to SEQ ID NO: 119110

SEQ ID NO: 294321 - DNA, 1000 bp, Homo Sapiens; identical to SEQ ID NO: 119111

SEQ ID NO: 294322 - DNA, 1000 bp, Homo Sapiens; identical to SEQ ID NO: 117842

SEQ ID NO: 294323 - DNA, 1000 bp, Homo Sapiens; identical to SEQ ID NO: 283854

SEQ ID NO: 294324 - DNA, 698 bp, Homo Sapiens
tcttaccacgcgtcgccccgattatggggcctcgcggaccgcaccagtgccggcgggagagctggcttggggcgctggcacctcctcttacagctttactcctgccagcttgggaaaaggccggagaaggtgaaattctgtgtgctccctccggcgagagactttgtcagctcccgcacagtaacgtggaagtccaagaatccgagtggaggctcaccgaggcgaaggggccaaccatgggaaaggagagtggatgggactcaggcagggctgctgtagcagctgtggtcggaggagttgtggctgtggggactgtgctcgtggcgctcagtgccatgggcttcacctcagtaggaatcgccgcatcctccatagcagccaagatgatgtctacagcagccattgccaacgggggcggagttgctgctggcagtctggtggctattctgcagtcagtgggggcagctggactctctgtgacatctaaagttatcgggggctttgctgggacagctcttggggcctggctgggttcacccccttccagctgaacaccacactgaggcagggagttggctctcttggtggagatgactttcctgggcctctggatgacaatcttccaaaggacaagtctcctactcccaaaactatttaaggaagcatgaaaaaataaagatgctggttatcttcaaaaa

SEQ ID NO: 294325 - DNA, 1000 bp, Homo Sapiens; identical to SEQ ID NO: 119113

SEQ ID NO: 294326 - DNA, 1000 bp, Homo Sapiens; identical to SEQ ID NO: 224747

SEQ ID NO: 294327 - DNA, 1000 bp, Homo Sapiens
accgcccagtccgcctgcccctctgggtctgcgccggtgtctgggtgctggccacactcttcagcgtgccctggctggtcttccccgaggctgccgtctggtggtacgacctggtcatctgcctggacttctgggacagcgaggagctgtcgctgaggatgctggaggtcctggggggcttcctgcctttcctcctgctgctcgtctgccacgtgctcacccaggccacagcctgtcgcacctgccaccgccaacagcagcccgcagcctgccggggcttcgcccgtgtggccaggaccattctgtcagcctatgtggtcctgaggctgccctaccagctggcccagctgctctacctggccttcctgtgggacgtctactctggctacctgctctgggaggccctggtctactccgactacctgatcctactcaacagctgcctcagccccttcctctgcctcatggccagtgccgacctccggaccctgctgcgctccgtgctctcgtccttcgcggcagctctctgcgaggagcggccgggcagcttcacgcccactgagccacagacccagctagattctgagggtccaactctgccagagccgatggcagaggcccagtcacagatggatcctgtggcccagcctcaggtgaaccccacactccagccacgatcggatcccacagctcagccacagctgaaccctacggcccagccacagtcggatcccacagcccagccacagctgaacctcatggcccagccacagtcagattctgtggcccagccacaggcagacactaacgtccagacccctgcacctgctgccagttctgtgcccagtccctgtgatgaagcttccccaaccccatcctcgcatcctaccccaggggcccttgaggacccagccacacctcctgcctctgaaggagaaagccccagcagcaccccgccagaggcggccccgggcgcaggccccacgtgagggtccaggaa

SEQ ID NO: 294328 - DNA, 1000 bp, Homo Sapiens
gtcctgaaaataacagagaaactgttatatctttttaatgatttatttgcaagtattgagatttgacctgaaaaacaatgaaacacatgaacacacttccgattttctcctcgctgattagcttcctgcctgctgtcagtgctggacgaagtgctataactactttatgtaacattacagaacagctagaggtcctggggtaagagaaaaaaagcacatcacaacaaatgtgaaagccttcattattacacgttccagtttgtctcgctgtgtaggcataagctaatggtttattttcagaaagctgcctgaaacgttgctttgtattcttctaggaagaactttaattcctcctgaggaactctactttctgagccaaactgctaattttctgcggaactgtctagaagatcattcaagagaccctgcagttgcactttctcgtaaaagttaaaaaaaaaaaaaaaaaaaaaaggtttttcccggcctttgaacattttgcctatgagagttttgcatatattttatacttgagtagacaactttaataatccatatttatactatcgcagaagtaagcatttggcaaacgttcagccattagcactcatttaaccctgttagcaatattcttttgaaaaaagtgccagtccttatgtgataaactaagaagcccattgaatataaaagtgtgtaggactgaaacagtgaccttatattattgctaagggaatatgagattaacttcctacaggggccaaaaccagagaaaggcttccagcaacttcgatgaaagtagtttggccacatgtcaagccaattgtttgtactatttatgtacctttttcataactggaattgccaaataagcatggagatctaaatgatgtacttgttagtgtattcattcatattgactgtaaaggattatttttcactcagtactgatgtccttggaaatcttacctggaaacatgtttgcaaaaaacaaaaaaaaaaa

SEQ ID NO: 294329 - DNA, 1000 bp, Homo Sapiens; identical to SEQ ID NO: 224748

SEQ ID NO: 294330 - DNA, 1000 bp, Homo Sapiens; identical to SEQ ID NO: 283589

SEQ ID NO: 294331 - DNA, 1000 bp, Homo Sapiens
tatctaaatgaatctgtgtaattgggcccagatgtgggtttgctcagtattagtagacaaggtctttgttcagacgattaggtgcctaactggcaaatgccttagtttcttaaaacgtattttctgatgtggctttacatttcaaaagtgaacttgattcaacctgagaaaactgattaaaaaattagtttaaatttgccagcagggaagtaaaataattatgggaagagtgtcttaagcctaatattaaatcagttttgttaaggggaaaactcaatagttctgttacttaggctgttagatccaagttgatttttgtgtctacagctaaattttgtttacaattaggctattttttaatataggatttagaaaccaagggtatgtgttttaaaattacactttttcttaacctgtctagctgtcggaaaaggtaacagaagatggaactcgaaatcccaatgaaaaacctacccagcaaagaagcatagcttttagctctaataattctgtagcaaagccaatacaaaaatcagctaaagctgccacagaagaggcatcttcaagatcaccaaaaatagatcagaaaaaaagtccatatggactgtggatacctatctaaaagaagaaaactgatggctaagtttgcatgaaaactgcactttattgcaagttagtgtttctagcattatcccatccctttgagccattcaggggtacttgtgcatttaaaaaccaacacaaaaagatgtaaatacttaacactcaaatattaacattttaggtttctcttgcagatatgagagatagcacagatggaccaaaggttatgcacaggtgggagtcttttgtatatagttgtaaatattgtcttggttatgtaaaaatgaaattttttagacacagtaattgaactgtattcctgttttgtatatttaataaatttcttgttttcattcttaaaaaaaaaaaaaaaaaaaaaaaaaaaaaaaaaaaaaaa

SEQ ID NO: 294332 - DNA, 1000 bp, Homo Sapiens
aagactgagaaatctctgcatccccagaactcagcaacccagctcttttatcatgaggagaggtagccatgctgactcatgaacaggtggaggaaaggggttgcaggtgaccagcatcttcaatctagttaccaccagcttggctagaattttattgaacgcaacttgctagttatgacagagaggaccagggtgagaactaatgctcaagagagcaagattctgtaatcctcttgccctctcacatcacaaattctgatatgccaaacatttggcccaatgagaatgactgatagacttgctgatgtgcatgtggggggatgaggtgtgtatatgcctttctcctgactggccattcagtgttcaggctgtcattcaaattggataggagaaagttggtgaggaaggaatggagagagcaggatccctggactccctggtccccaaactccttgactgtcacttgtaattgtatataatttttgtgtttcttgctccatttcctcatgctgtcatccttaaagtccatctgggaaggggaaaatgctgaacaccattgtatagtttcttcaactgtcccagccatgttgtacatagatatgtcatgttattatatatataaatatatatataattttgtacgttttcttcatctccgatcttctcaaattctgtactttttttcttttctgtctgagctgccttctctatcattcagcttgagtcctcaagactactggtcacaatgagtctgatttttaggaaggaataggaggagcagggaaatcagaaaaactgttggtctcactctgtctctctacctggtcatcttcaaggctaagaaaacaaacaagctacattctgtatttgccagtttccacagcatgaagtacatagcttccttagcaaggagtggtcattccaaaatccaaatgcaaattgctttgattaaacctagattattaaatccattcagaacagcaaaaaaaaaaaaaaaaaa

SEQ ID NO: 294333 - DNA, 1000 bp, Homo Sapiens
aggcaaagctaaaggccaaatacccaagcctaggacaaaagcctggaggctccgacttcctcatgaagagactccagaaagggcaaaagtactttgactcaggagactacaacatggccaaagccaagatgaagaataagcagctgccaagtgcaggaccagacaagaacctggtgactggtgatcacatccccaccccacaggatctgccccagagaaagtcctcgctcgtcaccagcaagcttgcgggtggccaagttgaatgatgctgcccggggctctgccagatcctgagacgcttcccctccctgccccacccgggtcctgtgctggctcctgccccttcctgcttttgcagccaggggtcaggaggtggctcgggtgtgggctggagaggcagaagccctttcctgttggtgtcccagcacatggagccccttgggctgagcaccaagaccttgaaccttttttgttttaccttttttccaaataacagttgggagaaatatcaatgaaattctgggggtgggggtggggttgaaagggtggggtgggagatatggaggagtatgaattagggcttggagttggtaaaaacattcctgactatccttcttaaccacgtggctgatgtggggtaggtatgaggggaaggaagtggagtagcctaatgaaaaggggttctagttgagctctgtagataaatgccttgtttcagtgtggttggagacctggtgtcagataaaagaaactccatccgcacagacagatgcaaacagctcctctagttctgcagagctagttgagaactcaacattaatcattttaaaaagtactgtccttgaaatagatttgctgtgggaagaagggcagtgagtgtgggagaaaggagccgtgagcgtggggaaccccacagagcccaaaggactttttcagtattcgaaataaacaaaacaaaaacccatgaaaaaacccaacccagaaataaaaaaaaaaaaaa

SEQ ID NO: 294334 - DNA, 925 bp, Homo Sapiens; identical to SEQ ID NO: 31773

SEQ ID NO: 294335 - DNA, 1000 bp, Homo Sapiens
ttaactttgactcctggaagtattgagtcttcctttcaaggaccataaggtacatcagttatcttgaacattctgacgtgtaaaggaccataaggtacatcatttatcttgaacattccgacgtgtaactcacagccgaagcactccatcccagatttgttgtctgggaacttaggatcctctaggaagctaatctgcttagtctatttttagaggattgatctctggcacaagcagcttcctggagttacctcagcagaagactagaattagagaaaagggaaagaccttttcttctagtaagtgtcaagtacagatgctctttgacttatgatggggttatgtcccagtaaacccattggaagtcaaatgcatttaatacccctgactggacaccacagcttagcctcgtccaccctaaatgtactcagaacacttagaattgcccacagttgggcagaatcatctaacacaaactctattttataatcgagtgttgaatatatcatgtaatttattgaatattgtacattatgttgaaattgcaaccatttcacaccattgtaaagtccaaaaatcagaagctgaggactgtctgtacatgacattgaatcacatgaatggattactagggcctgaggggtgtccgttctttagaaaaatgtagagtatatatatcttcagggctgtgaattccatactagttatcaatattttaagatcattctgtatatacatattttaaattatgcaagcaaactaggaggagaatgtgcaattttgagggatacctaatttgcattcggttaggggatatttttcaacctcttgctttatactctgatatggggtgtgtttatgaacttgttaatgttatttaatcatgcagatttccaatcagtgtattgctcatttactgacaaaaagggaaaatacgaaacacagaaagggaaaataaactgacttttataatgaaaaaaaaaaaaaaaaaaaaaaaaaa

SEQ ID NO: 294336 - DNA, 1000 bp, Homo Sapiens; identical to SEQ ID NO: 119118

SEQ ID NO: 294337 - DNA, 451 bp, Homo Sapiens; identical to SEQ ID NO: 119119

SEQ ID NO: 294338 - DNA, 1000 bp, Homo Sapiens; identical to SEQ ID NO: 117582

SEQ ID NO: 294339 - DNA, 1000 bp, Homo Sapiens
ccagcccggccgccgggtttgcaacgctccaagtcggacttgagcgagcgcttttctagggcagccgctgatctcgagcgcttttttaacttctgcggcctggacccggaggaggcgagagggttgggtgtggcccacctggcacgggccagctcggatatcgtgtccctggcagggcccagtgctgggccgggcagctctgaagggggctgctcccgccgcagctcggtgactgttgaggagcgggcccgggagcgcgttccctatggcgtgtcggtggtggagcgcaatgcccgcgtgatcaagtggttgtatgggctaaggcaggctcgggagagcccagcagctgaaggctaggcgccactgggcctggaattcgccacaggacggatcttacagaggcaagtggtccctggacctctcttgcatccattctctagacggccgtgtcagaggctccaccctgttgtgaacttggtatggaggcaaaggcttagaggctggaccagcattgttgggcaaggactgactctcgaagggttttgttcttggctttggacacctgagaaccccctcctcccctcccccaatacaaggtttttgacatgagtgtactcctgcttagttcctcttgtggggctgcatttgcggtgctttgccctccccactgtgagtgaggggccaagggatctcctcaatcctgtctccccagcggctctgtttcctccttccttccttggcctctgtcctttgctgacttcctcttccttacccagcagaactcaccctggggtcggggcagtggggaggggcctatccactgctcttcctagtccttggcagctggcctaggtgggcagactataggagggactggttaggagtctgcattgctttgacttccctctccttggttaataaacacaaatgcttgtttctcaaggaaaaaaaaaaaaaaaaaaaaaaaaaaaaaaaaaaaaaaaaaaaaaaaaaaaaaaaa

SEQ ID NO: 294340 - DNA, 1000 bp, Homo Sapiens
atttctgaacaaaagaaaactgaattgtaaagataaatcccttttgaagaatgacttgacacttccactctaggtagatcctcaaatgagtagagttgaagtcaaaggacctttctgacataatcaagcaatttagacttaagtggtgctttgtggtatctgaacaattcataacatgtaaataatgtgggaaaatagtattgtttagctcccagagaaacatttgttccacagttaacacactcgtagtattactgtatttatgcactttttcatctaaaacattgttctgggttttcccaatgtaccttaccataattcctttgggagttcttgttttttgtcacactactttatataacaatactaagtcaactaagctacttttagatttggaaattgctgtttacagtctaacaacattaaaatgagaggtagattcacaagttagctttctacctgaagcttcaggtgataaccattagcttatacttggactcatcatttgttgccttccaaaatgctgaggataatgtatgtactggtgtcaggacctagttctctggttaatgtacatttagtttttaatggtggaactttgttatattttgttaattacagtgtttttggttcattgagtgaagattctgccgggtgggatcttgcacctttgaaagactgaataattacactaccaagtaagcctgcaaatcattgatggcatgcagtgatgatgtgctcttacacttgttaacatgtattaagtgttatttgcaaaaggtagattatgtaaccaatcaggtacgtaccaggcagtgatgtgctaatacactgatcaggtttagacaatgagctttggttgtgttcttgttagtcctaatattggttttcagtttggaattaataaagcagttgacattcaaaaaaaaaaaaaaaaaaaaaaaaaaaaaaaaaaaaaaaaaaaaaaaaaaaaaaaaaaaaaaaaaaaaaaaaaaaaaaa

SEQ ID NO: 294341 - DNA, 710 bp, Homo Sapiens
tctaggactcagaaatatagatgttagtaagagcaaacagacataacagataacacatacaaagtgcctaccacatgctaaccactgctgcaggcactttctatagaagaactaatttaatcatcaccataaccctatggggtagatgatatttttacaacctccattttacagatgaagaaactgaagcatagacctgcttatgtgagaagaaacgcagggagacagttcagtcactgcaatcttcatgcccatcagtttcttgtgagaagaaaacaagaaaacaaggactgaaatccacacaggaaggtggcagtgaactccacagacggacctggacgcctcaacactcctggccttacctcccttgctgaacgtctcaagtttctctgcgttcaggactggcaacgcctgcttcctcctctgagctgtcaagtaggaagtccgggctgctctgctagaaagagaagtcatgtgcaggagcactgaggcatcccaggtgtgacactcttccacctagagcattccgtctctcatcctctgccatgtgacgctgggcttctttaacaaattaatcccaagtgcaagacatttatttcttctgtacctaatgacctgagcaatccttctctgctgaacctggtagtgtcatctttagaagtgaagacacaattaacacatggtcatttcttcattatatcgttgttact

SEQ ID NO: 294342 - DNA, 834 bp, Homo Sapiens
gctgatggtggaaggagaatgagtctctgatgcctttggacttgatgctggaaagacttaagactttgggggactactggaaagcttatgtgagaagaaacgcagggagacagttcagtcactgcaatcttcatgcccatcagtttcttgtgagaagaaaacaagactggcaacgcctgcttcctcctctgagctgtcaagtaggaagtccgggctgctctgctagaaagagaagtcatgtgcaggagcactgaggcatcccaggtgtgacactcttccacctagagcattccgtctctcatcctctgccatgtagcaaactgctatgcatccttcagctgcaagggattgaatgctatcaacaaccatacaagtggagaagcagatgcttccctagctgagcctcaggctttttgatggaattgctacaacttggtgcatgcctgctcctaaaagaaatactcaggaattgtctcataaagtcctcacctactggcaaaaacaagatgttctactcccaggttgactttttcaagccccaagatgttgagtcagccattctccaaggatctcgatttccttttaatggaaaataacattaaacaccaaatataagcctcgctgtcccacatgcgtattggggacaagatgaaacctgcttccaggctactttggcagcagaactgaaaaaggctttttttccagatatatgatttctcatcgacagggttgcacagccctctttattgttcgtgtaaatgacacccttggatctgaacaatacacaccaggacaattgtgtgcaacagttctacaaactgatatttctaatta

SEQ ID NO: 294343 - DNA, 1000 bp, Homo Sapiens
tgttggaacgtctagggagaaggttgactttttgcacttctgtatatagtcaaaagagagaaacctgtataatagtaagatcttattttgaataaaaacgtctataattacaaggagttttgttaaggctaatacaatgacagactgagcaaaattgcttgcaaaagtggcacagagttagcactccataccccttcaaacatgttgctttgctttcttgtggacagcttgtagtttgccaggattttttcagctggaaagatacgccatcctttcaaaccctcatgactgacaaaaactccatggggccaaatctgcctgaagatcattaccaaaaatagcaggtacttctaccattaaggtgaaatcatggatcagatattccttacatttttcaaaactactgcatgtttaaaacttcaacaaaaaaagagagaaagaactatactaagaacatatattattcagatcagtttctgccaatttcagtggtttattgttcacaaaaaaatcttcaaaacaagtattgactttcacaaaatttaaatcataaacaggcaaaccaaacagcacactgtagctatagttgttatgtgattgttttttaattgctgtaggatcctgttctttcagcaggtgaaaaataaaacgcagttcaaatttcatggttttaattttcaactcagaagcactcaaaaatgcaaaatgtgataatgggcacttgtttaaaagaattagtgtatccagccttcactccagctggttaaaaatgttgcacttatcagcaaccctaccactttcatctgctgaaaggacaaatgtgcttggttttactattatgtaatcacaacttactttctgcttgtagttgcttaaaattatgtattttgtcttgggctgcaatttgttttatgcttattttattattactgcagtagttgactttgctgtatggaaaaataaagtgaaattgccctaataaaacttctctttcttaagt

SEQ ID NO: 294344 - DNA, 1000 bp, Homo Sapiens
ggttgactttttgcacttctgtatatagtcaaaagagagaaacctgtataatagtaagatcttattttgaataaaaacgtctataattacaaggagttttgttaaggctaatacaatgacagactgagcaaaattgcttgcaaaagtggcacagagttagcactccataccccttcaaacatgttgctttgctttcttgtggacagcttgtagtttgccaggattttttcagctggaaagatacgccatcctttcaaaccctcatgactgacaaaaactccatggggccaaatctgcctgaagatcattaccaaaaatagcaggtacttctaccattaaggtgaaatcatggatcagatattccttacatttttcaaaactactgcatgtttaaaacttcaacaaaaaaagagagaaagaactatactaagaacatatattattcagatcagtttctgccaatttcagtggtttattgttcacaaaaaaatcttcaaaacaagtattgactttcacaaaatttaaatcataaacaggcaaaccaaacagcacactgtagctatagttgttatgtgattgttttttaattgctgtaggatcctgttctttcagcaggtgaaaaataaaacgcagttcaaatttcatggttttaattttcaactcagaagcactcaaaaatgcaaaatgtgataatgggcacttgtttaaaagaattagtgtatccagccttcactccagctggttaaaaatgttgcacttatcagcaaccctaccactttcatctgctgaaaggacaaatgtgcttggttttactattatgtaatcacaacttactttctgcttgtagttgcttaaaattatgtattttgtcttgggctgcaatttgttttatgcttattttattattactgcagtagttgactttgctgtatggaaaaataaagtgaaattgccctaataaaacttctctttcttaagtaaaaaaaaaaaaaaaaaaaaa

SEQ ID NO: 294345 - DNA, 1000 bp, Homo Sapiens
tgatgacaaatattacgtttatctagttagaagctaatgttttgtacattttttgtatgaggaagtgatgtagcttgccctgattttttttttttttttttggtcagctttaatatatttatgccagaattttaaaaccaacaaaattttcttgttcaagcgtgcattgaagaaccacatttattcaatggttgacgttgttttgtgatatttgtacacaaattttcttttctcagttttataaacacagaatataacaattcactttaaacttttattaccacagttgctgcctcctccagaatttttgaattttaataaaaggcaaacttttgagctgcaggaaggacaatgttggttaataataaatctcaaagtcaattgtagaaaaaaaattgtcttcaaaaagaatgttgcactctgatctcttaacaaattgttacgttcaaagtttaaagtgatatattaacaaagtcacctagttatacaaacaattgtcagagaattctggatttggagggtattggggttatatgattctttcttagataatggcctctactaaataactcaagatctttctggaatgtcttctggcaggcaggtgccactgtcagcttttctccaaaaagcagccaacatcagcctcccctgtcaactcaacagttttgtatctcatattatatggactttatatgaaaatgaatattttacagtttgcacagtattattttacagaaaaggaatcagagaatctacaacatagggccccagaacaacagtttcactttgtggcttttaattattctagaattttaactgcatctcatttttctagcatggtgagaactaatatgtaactcctttgattgaaggagctcttttgtccgtacctatcagaatgttttcttgacacttccatgttggctcttctcagctttttttgtacatattttttttttctaaagagaagaaaaagttatcacaaaatgtaaaaaaa

SEQ ID NO: 294346 - DNA, 1000 bp, Homo Sapiens; identical to SEQ ID NO: 119121

SEQ ID NO: 294347 - DNA, 1000 bp, Homo Sapiens
gtatctaacttgtattactttggtagtttcatctttatgtattattgatatttgtaattttctcaactataacaatgtagttacgctacaacttgcctaaaacattcaaacttgttttcttttttctgtttttttctttgttaattcatttaaactcattgaaaacatagtatacattactaaaaggtaaattatgggaatcactgaaatatttttgtagattaattgttgtaacattgtctttcttttttttcttttgtttcatgattttgatttttaaaattattagcacacaactattttcagccctttaataatggagcatcaaaaacatcacctgtaaccccaagcaaatatagaagactgtattttttactatgatatccattttccagaattgtgattacaatatgcaaagagtcataaatatgccatttacaataaggaggaggcaaggcaaatgcatagatgtacaaatatatgtacaacagattttgctttttatttatttataatgtaattttatagaataattctgggatttgagaggatctaaaactatttttctgtataaatattatttgccaaaagtttgtttatattcagaagtctgactatgatgaataaatcttaaatgctttgtttaattaaaaaacaaaaatcaccaatatccaagacatgaagatatcagttcaacaaatactgtagttaagagactaactctccacttgtatgggaactacatttcactcttggttttcaggatataacagcacttcaccgaaatattctttcagccataccactggtaacatttctactaaatctttctgtaacacttaaagaattccctcattcattaccttacagtgtaaacaggagtctaatttgtatcaatactatgttttggttgtaatattcagttcactcacccaatgtacaaccaatgaaataaaagaagcatttaaaaggaaaaaaaaaaaaaaaaaaaaaaaaaaaa

SEQ ID NO: 294348 - DNA, 1000 bp, Homo Sapiens; identical to SEQ ID NO: 224751

SEQ ID NO: 294349 - DNA, 1000 bp, Homo Sapiens
aagtacttcttccagcgaccctcatgctgtgccatgtacagttcagtaatactttgctagacattccagcaagtaaagtctttcaggtccattcagatttcagtatggagaaaggggtttatgtctgcataatcaaggttcgaccgcagtcagaggagctgctacaggccctcagtgtggctgacacctcagtctatgggtgggctacactggtcagtgaacgtagcaagaatggaatgcaacgaatcctcattcctttcatcccagccttttatattaaccagtcagaattggttcttagccacaaacaagatatcggggagataagagtactgggagtggacagagttcttaggaagctagaggtcatctccagctccccagttctagtggtcgctggccatagccactctcccctcactcctggcctggccatttactctgtaagagtggtcaacttcacttccttccagcaaatggcatcacctgttttcatcaatatttcctgtgtactcaccagtcaaagtgaggcagtggtagtgagggctatgaaagataagttgggtgcagatcactgtgaagattccgccatcctcaagcggttcactggctcttaccagatcctgctcttgaccctctttgcagtgctggcatcaacagcttccatcttcctagcatacagtgccttcctaaacaagatacaaacagttccagttgtgtatgtaccaactctaggaacaccacagccaggttttttaactccacaagttctccccctcacttcatgagtctacaacctccattggcccaaagtcggctgcaacattggttatggagtataaggcactaacctctgcttggacaagtttctcttaactgcaggggaatgaagatttctagtcctcgacaagaagcctaacagcaacttctacattaagtttccagataaggcttctgagaactataaataaagcatcctaagctgcttcttaaaactggt

SEQ ID NO: 294350 - DNA, 1000 bp, Homo Sapiens; identical to SEQ ID NO: 119122

SEQ ID NO: 294351 - DNA, 1000 bp, Homo Sapiens
tctgggcggctgaattgattttgtactccctgcccctgcagcttggctccgtgcggagcgggccgcctcagtgtctgggccttccctcgcctcacgccattaccctcttctgccccctgcaggtggagggctcttcctccagtggctcgtaaggaggaaagcaaccccagcctctgttctgccctttccaaacctcctcccatcttaagcaaccccctgccccaagagtgaggcaaggaggtccagcttggggtcaggtgggcccacgctgtgtcccggccccgcctcccgtcccccgtgtcgtccccctgtgcagggggttctgtgggggtcttgtgtcacaggctgcacaaagactttcctcaaactaatattcagggatttctgtcctgcagggtggggaggtggcagctgcctgccctgccaaggatcttgctgtggacgaaatatctgggggttagggggacagttgtagcatctgctggcattcgggtgcctcccaggacctgggagctgactctacagagaggtctggtgccaagccaggcaccttcctgagttctcaggactcccacctctgccccaagggctttgggcagggacctaaaggggaaagagtcctggatccatctctagccaaatcacaccccagagccagaggcctggggacctccttgccttccccgtcccccacagcaaggtcaacactactacgccttagccacccctcaccctgctgactgcgacttccctctgcagcacagggcaggcagccacctatcccccacaagacggaacccgggaggggagtagagggcaccagggaatgctgtgagggacttcagggtgggcaaatgcagaagggagccagtgtcgcccctaccccatcccacagccatttttctctcgggttctacccaccactgtgtcggatttttcttaaataaatggaagcggtcagactggaggtgggggcagcagctcccatgaacagagagta

SEQ ID NO: 294352 - DNA, 1000 bp, Homo Sapiens
gcgcgaccccctggatgaccctgacacccggcaagcgctgctcgagctgctgggcgcctgccaggaggcaccacgcccgcacttgggcgagttcgaggccgacccgcgcggccagctgtggcagcgcctctgggaggtgcaagacggcaggcggctgcaggtgggctgcgcacaggtcgtgcccgtcccggagcccccgctgcacccggtggtgccagacttgcccagttccgtggtcttcccggaccgggaagccgcccgggccgttttggaggagtgtacctcctttattcctgaagcccgggcagtgcttgacctggtcgaccagtgcccaaaacagatccagaaaggaaagttccaggttgttgccatcgaaggactggatgccacgggtaaaaccacggtgacccagtcagtggcagattcacttaaggctgtcccccagcccatcaccctgtgtaccagtggccagaggacctgctcaaacctgaccttatcctgctgctcactgtgagtcctgaggagaggttgcagaggctgcagggccggggcatggagaagaccagggaagaagcagaacttgaggccaacagtgtgtttcgtcaaaaggtagaaatgtcctaccagcggatggagaatcctggctgccatgtggttgatgccagcccctccagagaaaaggtcctgcagacggtcccagctgggaggaaccttataccatccttctctccacctgctcggcagtgaagtttgtgggactggaatcttggattcatcacactcgagtcaaggcctggaatgacccctgacatcccagaagaacatctcagatatcagtgtgaaaagtctggggatttcaaactgaaaatccaaaagataagtaaatgagtgggaactctctgttcagttcaatcccacccttccttaccagatactaaagtcatttctacctttcctcttgagatttgctgttagatattagaacttctctttgtcacat

SEQ ID NO: 294353 - DNA, 1000 bp, Homo Sapiens
gtaagttcagaatccttttttaagtgatgactactgatgaaataatgttactagtagctgaattttagacttgatgctatgttgattaatatttaaatggtgaaagtaattaggcaaaataagcaattctgcttttctgttgctttcagaatttttaggctgtaaaattgtctcaggcaggaagtcagtctatatctctctcaagttcttattgtaggtcatttttttttcagcacagctctaatttttaaatatttggtataacagcttctggcatgtgacctagttaatgttgaaaattaactgatgaaaacccttgtagatctgctaaacttctctataaattgctagaaatatacagagcaatgagatatagaaaacaccttagcttgttggttattaatagagctctaattttaactgtgaaatcatggagtttctttaaatgttttcctagagtgttcgttatcatgaacattagaaatagcattattccttttcttctaccacatgtcttgaacattcacatgggttaaagaagatggaaactgatactactgacaatcaagctgctttctgactttcataattttctttatattgtggatagcattttgaaggtgaccgtgattctgtaggaagagctgtaatcaatatttttcaaactctaagagtacagaggttagtaagatttctttttttttactttttgttacgtcaagtagcttattaagaaaaagattcatgacttaaactcttaattctcagttgatacaaaggcttataatcatgtgttttaaaattttgatttcattttcgttccttgaaggttaaagaatggaaactggggataaaaattaatacactgcagctttgccaaggtctgtgatatggttgtaaccttttaaagactactaaagtcataatttgaaatttttactaaaataaaacatatgtgtctatggttttcaaaaaaaaaaaaaaaaaaaaaaaaaaaaaa

SEQ ID NO: 294354 - DNA, 1000 bp, Homo Sapiens
agctggagctgagggccctgtcgcacgtcctgaagacccccatcgaggtgatccaggccgactcgcccaccttgatcatcggggaggagtacgtcaagaagccgatcatcctggtctacctgcgctatgcctacagcctcggcgagcactacaactccgtgacaccgctcgaggccggcgccgccgggggcgtgctcccgcgtctcctgtaggccccaaggcgctgagcagccccgggaaactgtcgccgtcgccgcatctcctcagtaggctcagtttattttccccttttgcttttctctgtttttcttttccttccttttaatcaaaactacccgcccccgccccgcccccgctttcctaaccttgctgctttcacagggtgggaaacgaaattcgagggaaattccccggaaatatgagggaaatctctgcattgcaccaccagaggggcataaatttgaaagttctaacctcttcttgcccttaagggtcttttacctccctcaccaactaagatttggtcatgttgcgtataacttcaccacaaaaatggaaatattggccgggcgcggtggctcacgcctgtaatcccagcactttgggaggccgaggcgggcggatcacgaggtcaggagttcgagaccagcctggccaacatggtgaaaccccacctctacaaaaaatacaaaaattagccgggcgtggtggcaggcacctgtagtcccagatactcgggaggctaaggcaggagaatcgcttgacgggaagcggaggttgcagtgagccgagatcgtgcctttgcactccagcgtggaagacagtgagactccgtctcaaaaaaatgaaaaattagccaggcaggttggcgggggcctgtaatcctagctacttggggtgctgaggcaggagaatcaactgaacccgggaggcggaggctgcagtgggccgggatcatactactgcactccagcatggaagacagcgagactccgtctcc

SEQ ID NO: 294355 - DNA, 1000 bp, Homo Sapiens
ttctttcctaaatactttcattgttgctactaatcgtagtgccattattgttgagtactttatgatttgccaaatacttttgtcccaatttttaattttgcaaatttttgagtctccaaaaatgttaaatagtagcactcacctacattcacttcttattaagattttgccccatttacttcatatttgcacatttttgatgaggcatttgggagtaaatgcagacattatgacactttgtccttaaatatttcagcagcatcctcctaataaggactttcttcttaaacatcagcaccatcacatctatgaaaattaaaaataattatttaatactatctaatatctagccaatacttagactttctcaattgtactcagatgtgttttataccttttgtaaatccagaattcaatcaaagttcatgcatttatttggttctcatatctctttagttgtttttatctataactgttccaccaccatgtttttcgtgacgtggacattttgaagaatagaggacggttgtgttaaaaaatgcctcactttctaggcttacatattgtttctttataatgagatccaggataaacatctttctcaagactattatgtagatgatgtatatttcttatttgcttatggggggaaacattaggttgtctcattttggatgctgatcattttgatcttttgattaaggaggtgagtgccatttccattgtaaaggtacattttcctctttgtaattagtaataatctgccgtgtaacaatttgagactctgtaaatatcctattctccaattaactttcacccaatcattttagcatccatagatgattcttttctttttggaaacaattattaaaataaagagtggctgggcacagtggctcatgcctgtaatctcaacactttgggaagctaagatggacagatcacttgagcccaggggttcaagactagcctgggcaacatggcaaaactccatctctac

SEQ ID NO: 294356 - DNA, 1000 bp, Homo Sapiens; identical to SEQ ID NO: 119124

SEQ ID NO: 294357 - DNA, 1000 bp, Homo Sapiens
catgcttatttgtaaacaacaaagaagagtatatgtacctgctcaaaatttttttgataatcgcttatataattaatttctaatgatgaggacatgtaaaagttgccagtaagaacatagtatgcatttaattaaatcaagatggctaatggaattaactttctcccctgttcttgccaggtggaaatgatttaagcatttctccttgcagttgtattgaagtaaattaccataggcatcaagatggctgcatcacattttcaaatgattttatattcagttgctacttataaagcagcattcaaaaagtcttttacactgtcatgttggacacaagcagactcagcttttatcaaaacttgtttaaataaaaaattgacagtagctgggttattaaattatgcaactgaaactcctgaattatatcttttctgtatcccttaataagattggagaccactgccgtttaggataatacaataataaaacgttttaatcagtactaaaactttaattaagccaataatgatgcatgcctgttgtagctgacagcatgggtcagtacatccttcggcgagtgccttactctaattgaaaccaagcacacgtaaggtacaatatgttagactctgtgattttgttttcaaaatcctctgttatggctatatttaaatttattttaaatattcctgtatgtattcatctaagcatttgggcatttggagtcttaatatacaagaaacacgtacttaaatttttatgcttatcaccgcaatgatggcaaacagtgattttttttttcatagtttaggtgtcattgttgccagcacctttagtgctcagtcttcagtgaaaaatataaagtgccaaaaaaatcttgcaagacagaatccatacttaacactctttccaagacactgtgaccatgtacagtagctatttcctgatgaccaaatctctcaacgaatcatgttattaataaatatttttagcactcatc

SEQ ID NO: 294358 - DNA, 1000 bp, Homo Sapiens; identical to SEQ ID NO: 224753

SEQ ID NO: 294359 - DNA, 1000 bp, Homo Sapiens; identical to SEQ ID NO: 224754

SEQ ID NO: 294360 - DNA, 1000 bp, Homo Sapiens
tcaatgaaaacaattatgttttactagagaacttggagtgttcagccccaggatacaatgatgacgttaccttgtttagtagaactgatgactgaagtctctagaaacactgagttttaaccaatatgagacacacgaagaggaaaatgaatgcttgcttcttggaagaactgctaggaaagttagcatttttgcagttctaactaatttagatgtgaggccaagtaaaaatgccatttttttggccattgaatttgaaaatcaaattgattatcctccagaatttctacaaactttgaaatactctctaaggatcaaagaagtcaaagagctatgtgtgtctcagaataatctccttcttctggtcacagtatctttgtctctgccaggtggctcttcatttctttggtagctatttttagacttacagtcattcaccaatatacagttagcagtgttccgatagacacagtatcagtcatattctccgttgagtcataatttcaaactcaacaagatttcagaaaggtataatcatgtaatttctcatattaaaactgagaagagaggccaggcatggtggttcacacctgtaatcctagcagtttgggaggccaaggcggacagatcacttgagctcaggagttcgagaccaccttgggccacaaggcgagaccctgtctctacaaaaaatacaaaaattagccaggcgtggtggcacatgcctgtagttccagccacccgggagcctgaggtgggaggattgcttgagtctgcgaggttggggctgccgtgagcccagattgcgccattgtgctccagcctgggtgacaaagcaaggccctgtctcaaaaaagaagaagagaaagggccaggggcttttgctttaaaaaactttttttaaaacagaagtgaaaccacgggtgctttgttcttccttctgcacctccttcttaaactagatagctaattagttattttaagaaaaaaaaaaaaaaaa

SEQ ID NO: 294361 - DNA, 1000 bp, Homo Sapiens
actatcctgaatcagtaaaaatttcctagtggagagtgatgggaaatcgaatccaaactggcttaaacaaaaatgagaatttattgattaacatgactcaggagaccagaactctatagagaacatggcctgacagtgggggaagagaggtgtttcctcaaaaagaaactgggtgcagctttcccagaagaatcagttgctcaatatataataccctgatgaatttagttaccattctatgtctcttacttcctcattcgtcaaagtacatctgtgatatttaaatgcaggtctgttttcaaggtcagtttccggaaacagtgaccctgagaaggcttcctcctgagtatgcataaacattcacagcttgcatgcgtgtgtgtgtgtgtgtgtgtgtgtgtgtgtatgtttgcttgcactgcataaaaacaattgcaacatcaacagaaataaaaattaaaggaataattctcctccgactctgccgttccatccagtgaaactcttcattctggggtaaagttccttcagttcttgttcatagataggtatatacttcataagtcaaacaatcaggctgggcgcagtagctcatgcctgtaatcccagccctttgggaggccgagctgggcagatcacttgagatcaggtgttcgagaccagcctcaagacctccaacatgggccgggtgcagtggctcacgtctgtaatcccagcactttgggaggccgagacggacggatgatgaggtcaggagatagagaccatcctggctaacatggtgaaaccccatctctactaaaaatacaaaaaaaaaaaaaaattagcccggcatggtggcaggcgcctgtggtcccagctactcgggaggctgaggcaggagaatggcgtgaacctgggaggcagagcttgtagtgagccaagtgccactgtgctccagcctggacgacagagcgagactctgtctcaaaaaaaaaaaaaaagaaaaaaaaaaaaaaaa

SEQ ID NO: 294362 - DNA, 1000 bp, Homo Sapiens; identical to SEQ ID NO: 224755

SEQ ID NO: 294363 - DNA, 1000 bp, Homo Sapiens; identical to SEQ ID NO: 119125

SEQ ID NO: 294364 - DNA, 1000 bp, Homo Sapiens
gtgcgatgagtgcgcactgggcgccaccgtggatgcccccgccgccaagcccctggccagcgcgcctggcggaccgggctgcggcccaggatccgatcccgtggtgccccagcgcgccccctcgggcgagcggtccttcttctgcccggactgcgggcgcggcttctcccatgggcagcacctggcgcggcacccgcgcgtgcacacgggcgaacggcccttcgcctgcacgcagtgtgaccgccgcttcggctcgcggcctaatctggtcgcccactccagggcccacagcggcgccaggcctttcgcctgcgctcagtgcggccgccgcttcagccgcaagtcgcacctgggccgccaccaggcggtgcacactggcagccgcccccacgcctgcgccgtctgcgcccgcagcttcagctccaaaaccaacctagtccgccaccaggcgatccacacaggctcccgccccttctcctgcccgcagtgcggaaagagcttcagccgcaagacccacctggtgcggcaccagctcattcacggcgaagccgcccacgcggccccggacgccgcccttgcggccccagcctggtccgctccccccgaggtggcgccgcccccgctcttcttctgagcctagttctcacgaggaccctttcttgcccacagtttcgagaggcccgtgccatgagaccgcctggggtgagcaaggcgacctgggctgctgcccgaaggtttggccgccgcgggacacctgtttccttcccgcagtgtctgcgtccgcacagcatacccagctcggacctcctaggacagagactcagcgaacccttgctgggaaccgctgagctgaagttcttggaaggctcccacccaggtgccccgttggaaagcagatatttcccggacccagcgcggcctcaaccagggcaggaaagagtggttatttatgtacttaaagtttcattaaagttaaaatcggaaaaaaaaaaaaaaaaaa

SEQ ID NO: 294365 - DNA, 1000 bp, Homo Sapiens
taaacatctttaaagtgctattattctatatctgttggatgagtcattatttttgaaatgataatcctagcatgaactctgatctatggtgttggattctgtttcttaaataactttaaaattaactgttttcccttgagatttccttctcctatgtaggtatttgagctattgttctaagtttacctgtaagtataaaccttgggagaatctaagtaaacatatttctaaaagcatagttaccttcctattttctggctcttaccttcttggagtatttaaatgcccatttgccaaaagcagacctgaacatcaagcctgttaattcttcaaagaatttaggtatttgtttcaccgaaatgaagtgacttattagccattcagcgtattagtattacagaggctcttgctcagccacatccattcattgatttttatggctactcttcccagttacattttatgcatctgtaagctttccttccttagcaaaattgcattcaaaaatgtgtaaaaatgagtaaatacagaatatcactacagagacttgtatcctcaggtttattgatttcacattgtgaaataaacagcaaaggtcttagttttcaagtgaaaactttttggtaatcacaaaattacctgacacataccacgcttaaaccaacccccaaatttagcatattcattttgccatgagccagtcttgagattttcttaaaagatttcttattttgcctctgatgtagtgaaaaacggggtaagtatgctaactttcttgtatatgttggggggtacttattcaactccatttcttgtccttacaagatttataaatgtggtatgtttatagtgtggatatatatgttgccactgcaaaggtggtgcatatgtatatatgtgcaaaatgggtaaggcctgttctaactatgaaatttttctaaagacaaattcaataaaatttaatactgaatatttaaccaagtcaaaaaaaaaaaaaaaa

SEQ ID NO: 294366 - DNA, 1000 bp, Homo Sapiens
tgccggtgactacccccaagtcatgaaggactacattggaagaaagagtgcagagcaaggcctggagatgtcgaggttaccggtgttctcactccaggagaagagctacattaaaggcacatccgatttcttgggattaggtcattttactactcggtacatcacggaaaggaactacccctcccgccaggggcccagctaccagaacgatcgtgacttgatagagctggttgacccaaactggccagatctggggtctaaatggctatattctgtgccatggggatttaggaggctccttaactttgctcagactcaatacggtgatcctcccatatatgtgatggaaaatggagcatctcaaaaattccactgtactcaattatgtgatgagtggagaattcaataccttaaaggatacataaatgaaatgctaaaagctataaaagatggtgctaatataaaggggtatacttcctggtctctgttggataagtttgaatgggagaaaggatactcagatagatatggattctactatgttgaatttaacgacagaaataagcctcgctatccaaaggcttcagttcaatattacaagaagattatcattgccaatgggtttcccaatccaagagaggtggaaagttggtacctcaaagctttggaaacttgctctatcaacaatcagatgcttgctgcagagcctttgctaagtcacatgcaaatggttacggagatcgtggtacccactgtctgctccctctgtgtcctcatcactgctgttctactaatgctcctcctgaggaggcagagctgagacaggattatcaattttggagcttcataagagaatcttcaggatcttcctcccttttctgctttgagggtttccatacattgctgttttcaggttctacaataattacctttttttctctttctctttttggcttgtgctgggatttaagaattagaaaataaaaataagcagaaatta

SEQ ID NO: 294367 - DNA, 500 bp, Homo Sapiens
gggggcccgccatcttgattctttctcactgaccaagactcagccgtgggaaatatgagtgagcttctaagagcaagatcccaatcctcagaaagaggaaatgaccaagagtcttcccagccggttggatctgtgattgtccaggagcccactgaggaaaaacgtcaagaagaggaaccaccaactgataatcagggtattgcacctagtggggagattgaaaatcaagcagtgcctgcttttcaagggcctgacatggaagcttttcaacaggaactggctctgcttaagatagaggatgagcctggagatggtcctgatgtcagggaggggattatgcccacttttgatctcactaaagtgctggaagcaggtgatgcgcaaccataggtttcaagcaagacaaatgaagactgaaaccaagaacgttattcttaatctggaaatttgactgataatattctcttaataaagttttaagttttcgaaaaaaaaaaaaa

SEQ ID NO: 294368 - DNA, 1000 bp, Homo Sapiens
agcacacggaagctttcgtggtcttctacttccctctcacccactgtggaaccacaatgcaggtggctggcgaccagctcatctatgagaactggctggtgtctggcatccacatccaaaaggggccacagggttccatcacgcgggacagcaccttccagcttcatgtgcgctgtgtcttcaacgccagtgacttcctgcccattcaggcatccattttcccacccccatcgcctgctcctatgacccagcccggccccctgcggcttgagctgcggattgccaaagacgagaccttcagctcgtactatggggaggatgactatcccatcgtgaggctgctccgagaaccagtccatgtggaggtccggcttctgcagaggacagaccccaacctggtcctgctgctgcaccagtgctggggcgctcccagtgccaaccccttccagcagccccagtggcccatcctgtcagacggatgccctttcaagggcgacagctacagaacccaaatggtagccttggacggggccacacctttccagtcgcactaccagcgattcactgttgctaccttcgccctcctggactcaggctcccagagagccctcagaggactggtttacttgttctgcagcacctctgcctgccacacctcagggctggagacttgctccactgcatgtagcactggcactacaagacagcgacgatcctcaggtcaccgtaatgacactgccaggccccaggacatcgtgagctctccggggccagtgggctttgaggattcttatgggcaggagcccacacttgggcccacagactccaatgggaactccagcctgagacctctcctttgggcggtccttttgctgccagctgttgccctggtccttgggtttggtgtctttgtgggcctgagccagacctgggcccagaagctctgggaaagcaacagacagtgaatgggcccaataaacaatcatttcaaacctactga

SEQ ID NO: 294369 - DNA, 1000 bp, Homo Sapiens; identical to SEQ ID NO: 224758

SEQ ID NO: 294370 - DNA, 1000 bp, Homo Sapiens; identical to SEQ ID NO: 119126

SEQ ID NO: 294371 - DNA, 1000 bp, Homo Sapiens
ggtctcgaactcctgacctcaagtgatccactggccttggcctcccaaagtgctgggattacaggcatgagccacctcacttggcccaattttaacttaattatctctgtcaagagcctatctccatatacagtcacatcctgagctactagggggtaggacttcaacatgcacttctgcaggggccgcagttcagccaacatcatctttttttttgagatggagtctcgctttgttgcccaggctggagtgcggtggtgcaatctcggctcaccacaacctccacctcccaggttcaagtgattctcctgcctcagcctcccgagttgctgggactataggtgtgcgccaccatgcccagctaattttgtatttttagtagagacaggctttcgctgtgttggccaggctggtcttgaatgcctgaccttgccgcccgcctcggcctcccaaaatgctgggattacaggcgtgagccaccgcgcctggcctcagccaacatcatctaagggctctcacggagggcctcccagctgcccgccctgtgggcatttgcacatatcctgacaagcctgaaagaagctccgggtgcccattgttcagtccaggtgcccattgttcccgggactgaggcccgggaaagggaagcgacgtgatagggccagcagcagaccctgggcctttctctagactgagcaccattccccgtgggtgtgctctcagcgccgcaccgaccttcacactgcagagatggatgccaactccctggcaggggcaggactgctgccgagcagccccacctgccctcccagccacaccccaagtctgtaagggccgctcccaggaacacctgctactgcacactccaaaccaataaagttttatattttgtttacttaaaaaaaaaaaaaaaaaaaaaaaaaaaaaaaaaaaaaaaaaaaaaaaaaaaaaaaaaaaaaaaaaaaaaaaaaaaaaaaaaaaaaaaaaaaaaaaaaaaaaa

SEQ ID NO: 294372 - DNA, 1000 bp, Homo Sapiens
caggcgcctggggctcggctgcgtcgttgggtcgcggaccccagggtggcccgggactgtcccgcaacggtgtgggaccggcgccatcgctgagcgagctggatctgcggccgccatcgcccatcaacctgagccgcagcatcgacgccgcgctcttccgcgagcacctagtgcgagacagtgtgttccagcgctgcggcctccgcggcctggcctccccgccgcctggaggcgctctgcggccgcgccggggcagccatcccaaagccgagctcgacgacgctggctcctcgctcctccgcggccgctgcaggtcgctcagcgacgtgcgcgtgcgcgggccggtcccacagcacgtagtggaagcacccgacggggcagccgctgcggcttctggcagctccctcgacagcttctccaggggttcactcaagatcagttggaacccctggcgccacgggctgtcatcagtggacagtctgcccctagatgagttgcccagcacggtacagctactgcctgccccgaccccagcccctgattctaccgccgctcggcagggggacggccagggagaggtccagccgcgcggcaagcctggggaatcccgcagcgcctccagtgataccatcgagctttgaagagcggtcctgacgcagggccaggaccctgcccgatgcccacatggcatggcctactgggacagttgagcctttaaaaaatgggcatcctggccaggcgcggtggctcacgccaggaatcccagcactttgggaggccgagccggcattttgcacagaggccgtgtcttatgcggaatacagggtgggtgtgcatggattcgggcatgaagaacagggagcaggtgccccagactccccaacgtggagtgatgagcctcgcttgtctagattgtcctctttgtgccaaagaaataaacccttaggacttggaaaaaaaaaaaaaaaaaaaaaaaaaaaaaaaaaaaaaaaaaaaaaaa

SEQ ID NO: 294373 - DNA, 1000 bp, Homo Sapiens
aaacttcatttaatagtttaaacaagattggttttgttttcaatttttattcactcttcatagaatcacaattacctttatatatcatatgttattggaagagattcctcagtaatctccaatctctcatagtgcctcacagggttggtcaatggcttttggaactggaaggaccttagaacttatctgttatgctcctgatagccaatagcagatagaagcttgcaatcaagagggtaggacatgtgttcttcaatggatatcaaaggaagaggttgcaaaccaaagccatttggcaagccctgtagcctgggccatttaagacaggggcggtctcagccaaattgcacccatttaactatcccaaagagccacagtgcctacaacccaggccctaagttgatgaagaaaaagtcaaggaaggaggtgatacaattggaaatattcccatcaaatggttaatcttatttagaaaatgggcatattagaaaaagtccttccaagatgattttggataataaaagttgtatttgtggaaattggtattatctctgttttatgcacttacatttatcccttacattttgtttttagtgaccctacatgacattaaatttaaagtaaaacattgtttaatgttaccttttggcttgagaatgtctttcagctccagaattattgttactcatattttaatcagtaagtcatttaagctatgacagagtaggaattgagaaattatttcatatgctacagtattgaaatgtggatgctgccttgttttataagaagatgatcaaggtttgtgtgcccattacctttcctctgcctgaaagacgtgtctcaagaaaaataaattctattttagatgcaggtactgcattttattctaagaattgatatcaattcaaaacatagaaaactgtaaaagataaatcaggagatggctgattcataatgggtaataaaataaatagcactttcgaaaaaaaaaaaaaaa

SEQ ID NO: 294374 - DNA, 1000 bp, Homo Sapiens
agcacctggaggatacctgctacctggtgaaggactttagtacgatggtcaagacaagaaccgtggagtcagaatgcctgcatgcagatctcatcaccatggagtctcgctctgttgcccaggctggagtgcaggggtgtgatctcagttcgctgcaacctctgcctcccaggttcaagtgattcttctgcctcatcctcctgagtcgctgggattacaggtgtgaggtatcatgcctggcccaagatttactttatttgatattaatatagccacatctgcttacttttaaaattaatgtctgcatggcatattattgctattccttaatttccaatttacctctatcattatagcttacccactgatgtagctttagcagctgctgtcccagttctcaaatatccaggctagcttggtggcccctttatccatgggtcatttatttaatccaatctgccaatccctgcctttaattagtgtttttaaaccatttacatttaatgtaattattcatagtttaatctgatgtctgttattttattttttgtcttctccttattttctgtttcttttttgctcttgtctttcttgtcttgttttttctcttccctttaacattttttagatctccttttgattaatttatagagtttttgattatatctctttgtatgaactttttagttattgctcaaatatcacattttatatttataacacaggctactgatgttgacattttaacagttcaagtgaagtgtagaaatcttacccattatccctccctattaataatataattgtcttaaatgtcttttcctacatatatttataacaagtatatgagatagccttacaatttttgctttaactatcaatcatgcattaggaaactcaagaagaaagggaaatgtatttaattcatattttcactctttttaaaatgaatttcataaaatctagattggcaaatttagaaataaaatttctaaatgtt

SEQ ID NO: 294375 - DNA, 1000 bp, Homo Sapiens
tgctttttaagaaaaatttgggaaatatatatgtttctgtgatatacatatatacatatatatgtatatatatacacacacatacatatgtgtgtgtgtagtatatatatatatacacacatatatgtttctgtgttcctcttttagcttgaggggcttgtttattatcttgctctgtgcctcatagggaataaacacaatgaagtccagggttgtacaacattccctttcctaagctttgaaatgtcagtatagattattaagtggtttatattacagaatctgggattcagcagactttcagtgtaaatgcttcctccatttctcctgagagtgggtgattttaattctatctctgaccctggtcctaggtttctaggagagttttgtttaactaagaaattgacagaattcataggtgtgggtgtagagttcaccaagataagattatgaatataattaaaggtctgcattaaaaggtgaatgattgaagagtgttaaagcattagacttagcacattcaataaccttttcgtactccattgttaaccaatgtcatttaaattttgagtactatttgcttttattgcttattttcattttagtgtgcacagtttctcggtatctctattggtcaaagaatattaaatctgtctctgaattacttcaaattctcaggtgaaacctattggtgtgtgtgtgtgtgtgtgtgtgtttattttgcatttcttgttgcctttttgttttaatgtctacataaaatatttctaaaattgatgtttgtaacaatttgggtttcatgaaacaaaaaggaacattactatacttagtgttgttgacttttcttttcctgtcatctcctctttactggattgtaccaatacattttagaagtgaactggacttggttggcattttagtttaatgactgaaaaagtaggttgaaagctctctgtattttagttaacaccttgaataaaatggaaaaagcagttatagc

SEQ ID NO: 294376 - DNA, 1000 bp, Homo Sapiens
ccgagagaggccaggagcctgtgaagcaagctgactttgttcgcagcaagtctttcctgataacccctgtgaagcccgctgtggaccggaagcagggggcaaagctcaacttcaaggaggggctgcaaagaggaatctcattgtcccatcagaacttggctcagtctgcagtgatgatggagaaggaactgcatcagctgaagagagccagttatgccagtacagatcagccatcctggatggaacttgccagaaagaaatctcaagcttggagtgacatgccccagattataaaataggtgggcagtgtgctgataaagcatgtccactaccctgacaagccacttagttaaaaactgccagtgtattgtggcaaacaaactgtgaaacttaaagattgattttatcatcaagttatgacgaacttggggaagaggaaggaaccaggcaaaacaaagaggataaacacacagccatactcctgggccagagggcccagaaacaagaacaacattgaaaaagtccaggaaccagttcctgtgcccaaaggtacgaatgtgtcttttcgaattcccttgataaagaagcctcagacaaggaagaaaatagaaatgaaattggacacataaataggacacccagcaaaggccagaagagaagcccttctaggagaagggacatctgtgcttccagctgagatcagcccatgtctctggtcgctctcttgcctgtggatcctgtcttctttcatgtttactacgaggcatgacattcatggcaaaacagggatgccgtttccaagagcagctataaaacaatctgttttcctaaagacagccactctgagaaggagatgaaggaacacggcagggttcatcaattcatagactgtttccaaaaataatttttaaacttttccactaggcatctgtgtctttaaccactgcacaatgcattgcctgtttaataaaaggtttcaaacatgaaaaaaaaaaaaaaa

SEQ ID NO: 294377 - DNA, 1000 bp, Homo Sapiens
agaaccagaatctttgctttgttcacttatgtatccattcctaggcctagaaaaatgtctgacgcatagcagcaattattcattgaataaatggacccagcaatagtacattagctatgccatatgcatacattaaaaatgtagattattgactttcaaaagataattaatgtaacttcttactgcttctgaacatgtttgtgagttatattgctgagggacctttatcttctcattctttcatcttaatccaatgttattaaaactgaaactgaaatcaccaatattattccatatttaaaaataacatctaccttataaaaattatcattgtgctgcatttgagaatagactttttaggtaataatggtataatccatagggtttttgagggcacagaaggattcatgctaacagaacattttattttctattttccaagagctataaaacatgatattatatgatactataaggcatatttttattttccataattttttctaaaaaaaattagtgttggttttccatataacttttaactttataagtaaatatttgtctctttcagctccagtttcatgtgaaatagagtttccagatttatgtagcatggaaagttttaatacgtcagttactgatttttgccagtcattttctcaattatttacttcttttatctttagttgattttttttgtagtgacaagttttgtttctattctcatttccttttgtgtatattctatgtagatttcgtttttggttactatgaaaattacatataacatcctggagttataacattctgatttgaatttatttcaacttaacttcaatcacataccaaaattctactgctatataggtctactctttttaggttattgatgtaacaaattgtatctttattcattgtacaccacctaacagatttataattacattttatgcatttgtcttttaaatcctgtagaaaataaaaagcggagttacaaacc

SEQ ID NO: 294378 - DNA, 1000 bp, Homo Sapiens
ggtaggcagagggaccatgcactttgttcacatctgaagggaggaggcaggtgtgccctgcgcctccccctccttctgtgctggagagggtggccctgcgtcccatgcctgcgctggcttctgtttcagaggctgaggggatctggcggtggagcgctaggatcagacgcccccgcgatgaccagctcccccgtctccagagtcgtgtacaacggcaagaggaccagcagcccccgctccccacccagcagcagcgagatcttcaccccagcccacgaggagaacgtccgcttcatttacgaagcctggcagggtgtggagcgagacctgcgaggccaggtgccgggtggcgagcggggcctggtggaggagtatgtggagaaggtccctaaccccagcctgaagaccttcaagcccatcgacctgagtgacctgaagcgccggagcacgcaggatgccaagaagtcctagagcgcccggtgcccctccccggcctccggaagatcagggatcaggaggggagaagaaggagcctctgctgcctcccaggctgctgggactgggctggttttgtccttgaagtggtcaggatacaggacaagggcagccccaccccatccagcctgggctccccgcagacccttgctgctcccgtggcctggacacgctggggagcttctcacacctacccctaccgtccagcctggcctcttccctgaatcagcttcaagatggcaccagctctttgggcctaggatactgccgggccccccaagggggtccccagcaaccaggcctggcctcctggtgtctgcggtcacagtggcccctgggcaggggcacccaggctgaccctgaggtgctgctgctgggtctgtcttggctctggggtgtgctgggagggtcaccaggtcccttttccttcctgtgccctctgaaagctaagtgtctgtgtggctgtggagctcgagggtctgtgaataaaggcggcggcactggg

SEQ ID NO: 294379 - DNA, 1000 bp, Homo Sapiens
gattaaatgctagtaaaagctgcctcatacatactgagtaaaataaatacggaattgtattttttttgtaaagggtgtgattttacttttaaagccactcctttgcaacaggaaaagtctgttttgtgttctcacccaaaggttttaaataaggtgactcttactattgtcctgcttatcttgtggtctgaacatgactcttcaaactcccaaaacaattgaaatatttcttttttttttttttttttttggagagagtctcgctgtgtcgcccaggctggagtgcagtggcacaatcttggctcactgcaacctccacctcctgggttcaaacgattctgctgcctcagcctcctgagtagctgggattacgggcgcgtgccaccatgtccggctaatttttgtatttttagtagagacggggtttcaccatgttgaccaggctggtcccgaactcctgacctcaggtgatccgcctgtctcggcctcccaaagtgctgggattaaaggtgtgatccaccatgcccgggctgaaatatttctcgtaatagcagaatatttcatggccgaactcttgatagtgacaaatcagtaaatacaaccaagaaaaagaaaatgaggggtcagagttgcaataccccaaatgaaaaataacagttttttcagggctttttggtaccagaactcaggcacttggattttatgaccttatactttttctgcatctctctaaaacttgtgttttcagaccatcctgtgtatagagcaggagagtttctactgcaagtgacaatcagaggtgactatctatatttgcacttaaaatcaaagtagttcaacatgcaaatgctagggtctagccctgggtaagggccatgctggtgtactgtgttgtgatgatggaagcagtaaatcaaaattatggaaatttgcactgttgaaaagcatgctttagctttattttcaattaaaaacactgtttaaaaaaaaaaaaaaaaaa

SEQ ID NO: 294380 - DNA, 804 bp, Homo Sapiens
cacagctcccttcccaggacgtgaaaatctgccttctcaccatgaggcttctagtcctttccagcctgctctgtatcctgcttctctgcttctccatcttctccacagaagggaagaggcgtcctgccaaggcctggtcaggcaggagaaccaggctctgctgccaccgagtccctagccccaactcaacaaacctgaaaggacatcatgtgaggctctgtaaaccatgcaagcttgagccagagccccgcctttgggtggtgcctggggcactcccacaggtgtagcactcccaaagcaagactccagacagcggagaacctcatgcctggcacctgaggtacccagcagcctcctgtctcccctttcagccttcacagcagtgagctgcaatgttggagggcttcatctcgggctgcaaggaccctgggaaagttccagaactccacgtccttgtctcaattgtgccatcaactttcagagctatcatgagccaacctcaccccacagggcctcagtcgccaccatgtgggcctctccagtgcaaaccaccgagcattccaccatgaccggtcacagctacaaatccagagaccatcaatcctgctagagtgcagggtggcaagcacccaagggtggctgaccaagactgcagagtctcctccatcttcaggtccattcagcctcctggcatttaactaccagcatccagtggtccccaaggaatcccttcctagcctcctgacatgagtctgctggaaagagcatccaaacaaacaagtaataaataaataaataaactca

SEQ ID NO: 294381 - DNA, 1000 bp, Homo Sapiens
aggagttatagacattggagggagcagagactggcacaggacctcttcattgcaggaagatggtagtgtaggcaggtaacattgagctcttttcaaaaaaggagagctcttcttcaagataaggaagtggtagttatggtggtaacccccggctatcagtccggatggttgccacccctcctgctgtaggatggaagcagccatggagtgggagggaggcgcaataagacacccctccacagagcttggcatcatgggaagctggttctacctcttcctggctcctttgtttaaaggcctggctgggagccttccttttgggtgtctttctcttctccaaccaacagaaaagactgctcttcaaaggtggagggtcttcatgaaacacagctgccaggagcccaggcacagggctgggggcctggaaaaaggagggcacacaggaggagggaggagctggtagggagatgctggctttacctaaggtctcgaaacaaggagggcagaataggcagaggcctctccgttccaggcccatttttgacagatggcgggacggaaatgcaatagaccagcctgcaagaaagacatgtgttttgatgacaggcagtgtggccgggtggaacaagcacaggccttggaatccaatggactgaatcagaaccctaggcctgccatctgtcagccgggtgacctgggtcaattttagcctctaaaagcctcagtctccttatctgcaaaatgaggcttgtgatacctgttttgaagggttgctgagaaaattaaagataagggtatccaaaatagtctacggccataccaccctgaacgtgcctaatctcgtaagctaagcagggtcaggcctggttagtacctggatggggagagtatggaaaacatacctgcccgcagttggagttggactgtcttaacagtagcgtggcacacagaaggcactcagtaaatacttgttgaataaatgaagtagcgatttggtgtg

SEQ ID NO: 294382 - DNA, 1000 bp, Homo Sapiens
ggagacagaggacatggatttggtttccagcttaaccagttaggactctgtcctctgcattctggaaccatgatgcctgcctgcctgcctcacagggctgttgtgaggaccagatgagatgatgtatgttcatacttttggaatctctaatttaaagtcttaatattttgtcttctgagtgtgaggggataaacctggatgtagactattaagcagcataggagaaaagaacaatagaatctaatggactgggtttgcaatctctctctaaatgcactgcttcagacaaagtgaaatccaaaggtgtgaaaaagtatagctgcaaattggaaaaatgtgtttcaagagtcgtctttttggccaggcatggtggctcacacctgtaatcccagcactttgggaggccgaggtgggcagattgcctgaggtccggagttcaagatcagcctggccaacatgatgaaaccctatctctactaaaattacaaaaattagccaggcgtggtggtacacgcctgtaatcccagctactcaggaggctgaggcaggagaattgtttgaacctgggagatggaggctgcagtgagctgagatcacgccactgtactccagcctgggcaacagagcaagactctgtctctaaaaaataataataataataataatttttttaaaaagaggtgtttttgaggtcttagatgttcaggttgatgatcctgcagagggaaactttccatgggggggtggggagagagagttttccatccacaatatagaaacagagaagcactgtgctccctctgcaggaccagccttcccttatctaaggggcatggagctcagggaggctttattccatatgcacgggagaatcaggcagaatgaacccctacccatcttttttggcttttcagtcattttgtgctgttttctctggttcattaataaattgaaactgccctccaaaaaaaaaaaaaaaaaaaaaaaaaaaaaaaaaaaa

SEQ ID NO: 294383 - DNA, 1000 bp, Homo Sapiens; identical to SEQ ID NO: 224762

SEQ ID NO: 294384 - DNA, 1000 bp, Homo Sapiens
ggcaagacagagcatttccactattatgctcccccccccggccttttttttttttttttgagacagggtctcactctgttgcccaggctggagtgcggtggcgcaatcatggctcactgcagcctcgaccttctggggtcaagtgatcctcccaattcagcctccaaatttctttaaacaaaaaaaaatgcaagaaaggcaaaacaagatatttatctgggctgagagggtaaagagaagctctatctttgagctgagacacaaaatggaaagaagaggcagcagcagcggcagtagcagttctgcctttccaaaccttccctatctaagtgctttcaagatatgctgaaagtcatgaattgaagtgtggttcccacggctttagtccttgtatgaaggtccttttgctagaacttacttcctttccagcccatatggttgacctgggggtccaggcagttctcaagggaaccacaggattccatgtgatctgggatcccagttgatgatccctcttctggtcacaagctgaattggacccaaatctgcaccctaaactcccctcttgccagatcctgcccagtcagtgccgtcccctcagactgggtgggcagcctgggcttcctgctgagacgggacccccccctctcttcttgatctcactcccaggaaagacactgaaggagcagaggtgtggacgccacatactggacggggtttcaccatctgctgggacgggacaccctctcttcttgatctcactcccagaaaagacactgaaggagcagaggtgtggacgcctcatactgctagagacggggtttcaccgtgttggccaggatggtctcaatctcctgaagtcgtgatccacccgccttggcctcccaaagtgctgggattacaggcgtgagccactgcacccggctgaaattgtatactttaaagggatgaattttatggtatgtgaattatgtctcattaaaaaaaacaaactgttaag

SEQ ID NO: 294385 - DNA, 1000 bp, Homo Sapiens
gcccctgggcctctccacaccccagcctgacccaccttccagaactctcgaaagaagccaggcagagcaggatccagcaccacgcggcgtctacgtctgctctggcccaagcagcacccccaatccgtgcgtgcaccccacgaattgactccctatccaccgaggaccaggatggaggaggacttctcctcccagatgaagaagatggccttggccatgggcacgtccctatcagacaaggacattgagctgctgcccacggacatgagacaccacgggtccttcaactacctcaagttcttcaagcacatccgcaagctccacgcctcgggccagctggacgacgccatccacacggccttccagtccctggacaaggacaagagtggcttcattgagtggaatgagatcaagtaatggctggcggccagggaggggtggggcccaggccacccagaccacgccgaatgcccacatggcggacccggccttcccccaccgggtccccgctggccttgcagctggcagggctgggccagaaccagctagaagcccaggaggcccagaggcccaggctcccggcccgaagtgcccttgcctacaaggtggggggcgaacggctcgtgagtcactgggcactggccggaagccccttggccctgactcgagcccccttggccccaggtacatcctgtccatcatccctagcagcgggcccaccaccccgctgacagacgaggaggccgaggccatgatccaggcggcagacacacacggggacgggaggatcaactacgaagaattttctgaattgatcaaaaaggagaaaattccaaagaagaagtagcaccatgactagccctggccagccaaggggctcccatggggtaaccggggtgaccacgcacctgggcagaagccgttggggccggtaagaggcggcagccgtgagggtggacccagcttttgaaggaaaatggaagaaaagcagcattaagtg

SEQ ID NO: 294386 - DNA, 1000 bp, Homo Sapiens
aatgttcctgttgaagcccagggctgaggctgggggtccatatctgagtgtctctttgagatgagaatctcctgccctttcgtggacggccttgcctcttcgtgagtggacacacagatgtgcctcaaacaggattggcaccctggatgcagcaagttcccaggggtgcaagtcaggctgtttctagagtgaggacttgggcttgccctagtagatggtgagctgggaggatgctcagagcttggtggtgggaggtctcccactcctggggttgaaaggatcttcactaagttcctgatcatgactcttgggaagtgatactagccctgaggaccctggggctggtgttgaacctgggatgaaatatcctggcgcctgtgaaccacaaagagctgggactgggctccttttcctgcggcctcaaacttctgggctcaggtgatcctcccatctcagcctcctgagtagctgggactacacatgcgcaccaccatgcctggccaattttttgtagcatttaaagagagggagtctcactatgttgcccaggccagtctcaaactccttgcctcaatggatcctcctacttgggcttcccaaattgtgaggattacaggtgtgagccactgtgcctggctcaaaattattattattatttttatagagatgaggtctcactctgttgccgaggctggtctcaaactcctggggtcaagcaatccttccgtgatggcctcccaaagtgctgggattacaggcgtgtgtcaccgtacctggccgatatttttatttttatttttactttccccatcttttccttttttttttttttccaaacaaaagctttgaaagtggtgacagaaaaatttccctttgagctagacctctagatctgcctcgcacagaaatacattaagtgggctggtctcatgtagtccccacatcattgcaaattactaaacccacactcaacagaaacaaagcatacatcattattctc

SEQ ID NO: 294387 - DNA, 1000 bp, Homo Sapiens
ctttctctaagacgcgctacagcccttcctagcagagtttatccattcgtccccaagagcagctagaagagatttgaggtcatgacctcccactgccgctcaggggctgaccctatttaggaaaccaaagagggtgggttgaacctactctcacggacttggatccagtgcgcacacttgcctgcggaaaagggctctccccagccacccggagatgggggtaagaggaagagcagaggcttggggtagggccacctggtgtttaaacaggcactttctccttctctggggcttatttttgttcagaactagaccagagtgtttgaacctcctttgcaggagggctgggaatcctctttagagcacttaatcctatttatcccctggaatgtgcgtgctggccagtaggagggctggctttggcagctccctgacccccgcgctgcccgcccctccggggtaatgtggcattactggcccacagaggttttgagccaatcagctctgagactgggttagaatgtaacagctttaacttgggatttaagaagcttttaaaaggtaataatcctctgaaagaaaaatgacgtaaccacagcgtgtactatgaaagctgttattttaataaagaacgctgggccatgaactcatacctgccaatgagtcaaacatagtatctttatgtagatacttagattactaaatatatatttcatctacttctgaagttgatagtcttccccccccccccacttttttcttttttgaggcaggtggatcacctgaggccaggagttcgagaccagcctggccaacatagcgaaacccgatctctactaaaaaatataaaaattggccgggcatggtggcgcatgcctgtggtcccagctactcgggaggttgaggcaggagagtcgcttgaatgcaggaggtggaggttgcaatgagcaagattgtgccactgcactccagcctgggcaacagagcaagactctgtctc

SEQ ID NO: 294388 - DNA, 1000 bp, Homo Sapiens
gtctttaacacctgtgcatcctgtgcctgtaatagcccccagggccctacgctgccctgcttttttttttttttttttttttttttgagtcaaagtttcactcttagtacccaggctggagtgcaacggcgtgatctcagctcatcgcaatctctccctcccaagttcaagcgattctcctgcctcagcctcctgagtagctgggattacaggcaggtgccaccaaaaaaagaccaaaaaaaatttttttttttttttggtatttttagtagagatggggtttctccatgctggtcagactggtcttgaactcccaacctcaggtgatccgcctgcctcggcctcccaaagtgctgggattacaggcatgagccaccgtgcccagccaaatttttttttttgttcaatgttgcccaggttggcctcaaacgcgtagccttgcctccttgtgacccaggacaaccggccagagccaatgcagctccctgtcctgcttagttgagccagttcagcattgggaagcttacccagggaaagactgatggatgtatttcactcaattgccagcctgtagaggctataaatgccttctggtgtttgtggacacctttattgggtgggttaaagcctttcctacaagaacagaaaaggcccaggaagtagccaaggtacttcttaaaaaaaaaaaaaaaatcatcccggccgggcgtggtggctcacttctgtaatctcagcactttgggaggccgaggcaggcggatcacgaggtcagagaattgagaccatcctggctagcacagtgaaatcctgtctctactaaaaaagagaaaaaattaggtgggtgtggtagcgggcgcctgtggtcccagctactcaggaggctgaggcagaagaatggtgtgaacccgggaggtggagcttgtggtgagctgagattgtgccactgcactccagcctggacaacagagcgagactccgtctcaaaaacaaaaaaaaaaag

SEQ ID NO: 294389 - DNA, 1000 bp, Homo Sapiens
tggtggggctgaggctgtagttggggccataggacgccgacaaaggcagcgctgcatggtggtgctacttcatgtgttatgagagtggatgctgaggtgagggggatgcggacatggggtaggatgacctagagaaacttatgatgtctgcacacaaactggccgctagacggacgctgaggacattttccccctgaggcctctattcaaggcttcctgggggccatctcagcaaacaggagactacaggggactggggatcagggtgtggcctgtgagtgtcagcctcctcctcggaaaaagaaaagctttgggtcaactcagcatcatgtttgcagatgctgacagacgggatcctaatgagagtcaatgtgtgctcactgccagctcctgggctgtgctctggtcagccaggtgtgagggcctggcctggggtcacacagctgactcaggagaggaatgcccatggttctcagcattggaaggacaaacctaggatgatggctttccagtggcactcgttcaggttttcgtccaagtctcagcttggccaaggcctgtcgctcactcatttacaaaagtcgatgtgaggaggagcctttacacctgtggagacagtgatagctttggagcagataaggtggagctgctcatttttgctggatttggtggccgctccccgcccccacccccaccccctccatctcacctttcccttgttatgcctcctcaattggaggctggacagagagctgaataggaaggacttgccattacctaaggccatgtgtgacagcctcctgaggacctccccaacccagtgtgatgggcctgcatggcagagacaaaagggtagactgggggtcatttgcttcctgtggccttaagcctactaggccccatccttacctgagacctcacctccaagaaattaatggtcttttcaatggagaaaaaaaaagactagtatttgcaacttaaaatagatgtagtttccttt

SEQ ID NO: 294390 - DNA, 1000 bp, Homo Sapiens
accacccggcgggtaccccgagtccggcgcagacaaaggatttagaaagagaatcacagtttaaccggcgggtccaggggaccagggcgtcggaggcttgctcgcggccccgagctctcggcctccacccaatttattggtttaccagctcttcgttcttagggcaaatgggaggggtgagaagggatgaggaaaaggattaatcaatgaaggagaactcgtgactcatttaataagatgtgtagccgtggcggtttctgtgaatttcctctagcaaaggcgtgtgtctaaactatttaagatctttaccttatccggactgaaatgcgtgggagcgggtttcaggagcagccaagatgtttgattgtactccactgcttcaagggagtgttatctccgccagcacctgtggcatgcgtaaagacatgaaggcaaaaaggagacttttctcctcagaggccgcccatggcttcccatggatgtctcacgcaggggggaccaactcatctggcattccagaaactctctttcccacatatgtccccctttttttgtctctattaattttttttttttgagatggagtctcgctctgtcgcccaggctggagtgcggtggcgcgatctcggctcactgcaagctccgcctcccgggttcacgccattctcctgcctcagcctcccgagtagctgggactacaggcgcccaccaccacgcctggctaattttttgtaattttagtagagacggggtttcaccgtgttagccaggatggtctcgatctcctcaacttgcgatccgtccgcctcggcctcccaaagtgctgggattacaggcgtgagccactgcgcccgactctattaattttttttttattaataaccgccattgctatttcgttcactgtgtctggcttctctaccaaggcgccgtcggcatctgtagactaaaaataaacagcataaacagacacaaaccaaaataaaatttgcaattgttg

SEQ ID NO: 294391 - DNA, 1000 bp, Homo Sapiens
agagcctccctccagttttcctgtgctcctttaacatctgcccgaattcaagcctctgtctcttcattctgtaggctacttcagcggtttcctagttggtcatccttcttccacccccctccccagccacactccctccacccccagtgatcattctaaagcagcagttaatcaattaccaaccttccctggcctccactgcccagatggcccactctcctccactgctgtgcagtcattcacagtttggcctctggccccatccctgtctccatctcccaagggactcccatgaccctctgccacagagatagttttggctcctggcatctgtttcacttgttgcttttggaatatatgattcatatacttcagtcatgcctagaggaggaagaggaggaggaggacatggggactgtcaaggaaatgctaccagatgacccgactctcggccagccagaccaggcacttttccattctctgaattcctcactgtcgcaggcgtgtgccagccccagcatggagccactgggggtgatgcccacacacatgggccagggccgatatcccgtgggtgtgagcaacatggtcctcaggatcctgggcttcctggtggacactgccatgggcaataagctcatccaggtgctgttggaagatgaaaccactgaaagcgcagttaaactcagccttcctatgggacaagaagccctcataaccctaaaagatggacaacaatttgtgattcagatatcagatgtaccccaaaactctgaagatatttatttcagagaaaacaatgctaatgtgtgagattatttatttgaatagagaataagaaaactgatagacttgcattcttaaaaatattaaatactaaagtttttctattgacgaaagatgatgttatgtatataatagatgtagcattgtctattttatgtttatatgtatttcaaggaggtggtttcgataaaatatgtaaactgatttggagaat

SEQ ID NO: 294392 - DNA, 1000 bp, Homo Sapiens
ggggcttaagggaaaggccaaagccgctacctgtccaattctgtcctctcctggaagtgactgtcccttcacggaaggacaaacaaggacaaggacaaggaactgacggctccccaggaagtgtcaaagtgtatagatttattttaacgtagtttagctttttgtttgaaatgaaaattacacagagttcccgtagactcttccccgggcttcccttgatgttaacatctcatgtgacttatgttgtacaattatagaaactagtgggttttatttcgaggaaaattggggagccattgagacgtaagaaaggcagcctcagcacattgagttccaccctttaaattcgtttatggggttttctgatgggttagcacattcatccatgtattcctggattgatttacccacagatctgtctatttatttatttattcaatatgcatttagtgactgctgtgcgagtgtctggctggatgctgctggggaagaagtgaagatgatgctgtccacctaggttttcagggacccccctggagaccctgtggccccgttaccacccctcaagaatccccagattggaaaccactgcggtgatccctttgttggttcaaccaccccagggcttccctataatttccaagcaggaagtgacctgcagcactggtttggtgatccgccttctgcctccctctgtattttgggacaacgtcattagctttgagcatcaggaacatgacagagagaggacagaaacccggtgcagccgaggacagccagctgagcccttgctgagccagcgagatgcagcgtggtgccaccacatctggtctccaggagtcccaggagctcagacgtccgtcgtcttgtgacttcatgctcccctctgccgcgctcacgtgctgggcctgggcagaaaggcaacccaggaaatccattaaagcaagccaagacgacctttgcagcgtaacccaacgattccctaataaatcatgtttcc

SEQ ID NO: 294393 - DNA, 1000 bp, Homo Sapiens
gcaaagctgcttacatagatatccttgggacggtccttcaagtgcaatgtacctgtaggaccattacacaaagtgaggaatctttgtgtaagattttccagcacatgcttcatagaaaatcatgtttcaattatccaaccctgtctaatgtcaaaggcatggcattgtatacaagaaaacatgcaaacaaaatcactttaactggatttcattcccccttcaatggagaagtaatctatgctgccatgtgcatgacagtcacctgtggaatccttctgttggttatggtcaagcttagaacttccagaatatcaagtaaagcaagagatccttcaccgatccaaatacctggagaactctgattcattaggagtcatggacctataacaatcactcttttctctgcttttcttctttcctcttttcttctcttctctcctctcctctcttctcctctcctcccctcccctctctgtttctttttctttttcttttcttttttgtggtggagttttgctcttgttgcccaggctgcagtacaatggctcaatctcggttcactgcaacctctgcctccaaggttcaagtgattttcctgcctcagcctcccgagtagctgggattacaggtacccgccaccacgcccagctaatttttttgtatttttagtagagatggggttttgccaaattggccagggtggtctcaaactcctgacctcaggtgatccacccacctcggcctcccaaagtgctgggattacaggcgtgagcaaccacgtcaagacaacaatcactttctttaaagcaaatcctacagctggtcaacacactattccatctgtcatcgagaaagaaaatgttaaaatagacttaaaaatattgctttgttacatataataatatggcatgatgatgttatttttttcttaatactcaagaaaaatatatggtggtatcttttacaacactggaacagaaataaagtttcccttgaaggc

SEQ ID NO: 294394 - DNA, 1000 bp, Homo Sapiens
gcctgggcaatgtagtgagaccccatcactactaaaaatacataaattatcctggtgtggtggcacacacctgtagtcccagctgctcgagaggctgaggcacgagaatcagttgaactgggaggcagaggttgcagtgagctgagatcgtaccatggcactccagcctgggcgacagagcaagactctatctaaaaaaaaagcttgttaatagaacaaaatcattcatagttccattcactgtgctatcccagcatctcagtccttcctccatgcagtctctcgcccagccaggtgagagcatgagcacttccctgagtcctcaccagccctccccatttgtcctccaagactccactcaaacatctcctcttggtgccttcctgggccctccccagctccagctctcccagacctaccctctgtccccaggttgtattccactgccctttgccctctggtgacctcttcctaaacttgaagccctgcctccctgaaggctaattaagggttgcagtcctccttctgggctaactccaaggtccagcagagtgtccagcaaaagtaggcgttagagcattcaacagcatgaattcactaacgagcggggctgtgggcatgaatttcagcttgagtgcatatcctggatcaacggcatttgtgttatggggtaaaagtaagggtgggatatggggaatttgctcattcttttcaaactttctagcccttgaatagcctggaaagctagaaatactcttcattcattcattcatttaaggaatattagttgagtatgacaggcactgagtatgcagaaatcaaggcatgtacttgctgttcgaggccctgtggaccaacatcggcttctcagatggcttcctcacttcatgcctccagaaagcatattgcccggtgatgaaaaggatcagaaaatatacactatatttattagagaagactaataaatggacacttaattcaaaaaaaaaaaaaaaaaaaa

SEQ ID NO: 294395 - DNA, 1000 bp, Homo Sapiens
ttaacatgtcattgtggtttacaaatgaaaattgaggccgggcgtggtggctcacgcctgtaatcccagcacttttggaggccaaggtgggcgaatcacaaggtcaggagttcaagaccagtctggccaacatggtgaaaccccatctttactaaaaatacaaaaaattagctgggcgtggtggtgggcgcctgtaatctcagctactagggaggctgaggaaggagaatcgcttgaacctgggaggcggaggttgcagtgagccaagatcatgccaccgcactccagcctgggcaacagtgtgagactccatctcaaaacaaacaaacaaacaaatgaaacaaatgaaaattgaaacttcacccatttatggctattgcctaaagaatttataaatgcctgggtcattgcaagcatattgctgacatgtctctcggtctgcgttaccctggtggacatcacgacactcacctgacaggcagcagcttccttccagtaaaagcaaagaatctgaaaggaatggaaaaggctccacacagtgccattttatagaaggaaatgcaacaaggtcacagaccagaaggacagcagcccaggccggctgggcatggaggaagtcccaagatgctgctgggcatgaacagacctcctcatacagtgtgcctctgaagaaataatgcaattgtgtggggccagaggagccacaaatagaacaaagggaggaaaggaaaaatcaatatgcagtaaagaggaggaagggagcccggcgcgatgtctgaatctcgctggcaagaaaaggaaacaggtggtctaagcaggcaacccttcaccccacattgtaatgctggggcatggacgtgttccatagatcactcactgagaagtcttcacaagaacactccaaggcagacactactatccatcttccacacactgggggattgagagtcagaaggattatacagcttgttcaaattataaataaaagccctgagatttg

SEQ ID NO: 294396 - DNA, 1000 bp, Homo Sapiens
ctacagccctgtcctgctggaggtgcttcccaaacaagctgccttgaccgtgctggcacaaggcctccacgaccccagccctgaggtccgcgtgttgagtctgcagggcctaagcaacatcctcttccacccagataagggaagcctgctccagggacagctgcggcccttgctcgacagcttcttccagagcagcgaccaggtgatcgtgtgcatcatgggcaccgtgtcagacacgctgcaccgcctgggcgcgcagggcacagggagtcagagcctcggcgttgccatcagcacacgctccttctttaatgacgagcgggacgggattcgggcggcagccatggcactgttcggggacctggtggcggccatggcagacagggagctgagcggcctgcggacccaggtgcaccagagcatggtgcccctgctcctacacctgaaggaccaatgcccagctgtcgccacgcaggccaagttcaccttctaccgctgtgctgtgctgctccgctggcggctactgcacaccctcttctgcacgctggcctgggagaggggcctcagcgcccgccacttcctctggacctgcctgatgacccgcagccaggaggaattcagcatccacttgtcacaggccctcagctacctgcacagccactcctgccacatcaagacctgggtgacactcttcataggccacaccatctgctaccacccccaggccgtgttccagatgctgaatgctgtggacaccaacctgctgttccgcacttttgaacatctcagaagtgaccctgagcccagcatccgggaattcgccaccagccagctctccttcctccagaaggtgtcggccagacccaagcagtgacctccagccatcctcccccacccaccgccttcccctcccgtgtccacctggtcagccctgccccatccgccccccacagagcttggttgcataacgtttttccatttgaaagaaaggtctagattc

SEQ ID NO: 294397 - DNA, 1000 bp, Homo Sapiens
tggaaaacaaaaatggggcatttgttgatttatttattttctgtctctaattagttacctcagtttgattgaagccagtggagttgtgcttttcctctacttctacttcctctcccccacctttttctgcccagtgtaggtgtattcttaaattcagacgggaagattctttcacatatcactcagttacctcccaatctgggggagtttttcttacaacttgataccagataccattaattttacattcctgaataaaggcctagtacccacgcatatttcaaccatgcatatatcaagttcaaccgagttttaataggggattaaaaaaacaagctgttaggtttccatgggcactggttctcataggttctattggtgataactgctttaacatggagcaagagtttgtgaatcaggaaatagaataaattaaaatttaaaatatatagaggaatcctcttgattgctcagcatgatgttagataaatgagtttgtcagaaaatatcagtatacgctgtttaccaatgttatttatttacattcttctaaagccattatggatattgtattatgagagctaaacctaaataagttatcctgttccctaggaccttctctgtaaatagtgaattttagacgagtggtctgtcctaaatcttaaatagaaaaaaaaactaaagcgatttgcttaagccattgtacattataaagagctgttttgttttgctttgctttgctttgttttgtttttttaaagctgcattcagagctacaaaggaataggaaagtagggtagtgttggattctggttttatgtaactctaaaataaatgtatctctttaatatctcagttgtagggattttgtcaataccaaagcagactgagttgtggttttgtaaataaagttttttctaaaaatgaccattcttcctttaattttttgttatgcccacatattgtatgtaaaaatataaataaatagtacttaaagtat

SEQ ID NO: 294398 - DNA, 1000 bp, Homo Sapiens
tttataacaacccactgtcacaggaactaatccattcctgagagaactaatccagtcttgtgagactgagaattcactcactcctgcaagactgccaccaagccattcatgaaggatccatccccatgacccagacacctcccactaggacccaccttccaacatttggggatcaaatttcaacatgagttttgatggagacaaataaaccacatccaaaccatagcacagggactgctaaataccccaacaacagaaatagaaagctcccctaaacaccttctttaactgagacctggctgtctcctgagaaccccacttcgcctgtaggcctctcctcagagattctttccctcccccaaatacttctgcatctggaggtggagtgggccccttctttgctccccactgcaccttccagaccatgaccgctgtacctctcaggcacttccctccattctatccttttgcccaccccctagtcttgcccaaatccaaatcacttcaacattcatgtgaaagatctatcccacttcccacacttcttgtttcttcggcctactcacctctgttgccctccctttctgctccagtcacccactctcagggccccaagtggatcttgcgatggcccagaactgctgcaccactgaaatcttaacttcaatccccacaacctcacatctttctaactttcccatctgattacttcattacactgttcagctttgttgagacttgtatgagctcatcacaaaagaagaaatcccaatgtccaataaacatggaaaggtgcttaacctcatctactgtcagggaaacgaagaatgagggagaatggggcatgaggaaggagcatgagaaaactttttgaggtaatagatatgtgcattatcttgattgtggctctggtttcaaggatgtttactaatcaaattgtcacttaaaacgtgcagtttgttgtacatcaattatatatcaataaagttgtaaaatatac

SEQ ID NO: 294399 - DNA, 1000 bp, Homo Sapiens
ttggttttaaaaagaagaagatggttgggagtgtgggctccagattagctggtttgtacatcaaaggcacgctcccaggagaattgtttgccaccccgcccccgacccgtgtgtctctctctctctctctctctctctctctctctaggaatttgctagccctgaatggggtgacctctttggatcaaggacccaaatgttagcgcatgaagaatacagaaaataagaacatatactcaatacaaggttatgctgcagtaacaaacaatcccaaggttgcagtggctttttacacaactaaagtttctttgccaatgctgcacattcactgcaggttggaggaggagggcgggtagtctgctcactgtaatcactaagggcccaggatgatggaagtttcatctcaacacatgcctccacaatcaccaaggcagggaaagggactatggcaaattgcacctgtgatcttaaagctcctgcccagaagtaacagtcaaatcatatgggcacacctaaccatgaaagggcagagaagctgaatcctaccatgtgccaggatggaagagaagtgggatatttgtgattagttctgatgactactgacacctgtcattggaaccaaaagattcctcttttgcttaagcaaaaggaagaagaattgttcaaaagaattgtggccaggtgcagtggcttgcgcctgcaatcctagcactttgggaggccaaggcgggcagatcacttgaggccaagcgtttgagactggcctgggcaagatggtgaaactctgtcgctacataaaatacaaatatcagctgggcatgctggtgtatgcctgtagtcccagctattcaggaggctgaggtgggaggacttcttgagcttgactgaggtggcagtgagctgagatcgcaccactgctctccagcctaggtgacagagtgagactctgtctcaaaataaaaataaaaaagaattgtaataatacatgccccaacacccc

SEQ ID NO: 294400 - DNA, 1000 bp, Homo Sapiens
aaataagtaaaccttgatttctgctatcaattactctcttctcctacttctgtactactgcttttctattgtgagtttgtttagttcattaattggtttattcattcattcaacaatcatatactgattagctactctgaccaggtccagtactaactctgaagaagttatgcccatcccatcttcaccccaagccttctccttttgagactcctcatccagtttctttagttcttcatatatcactgtttttcagatctctggctatccttgccattgacctcagaaatcctgtatttgaccttaaccttcttatacccagtccatacccaaagtgatggaaatggaatagatttctttttaaagttttaaacgaatattttgactgaaaaattttggcagtcttgtatgcaaatgacactgcagagcattgttttctcccccccacgtaggagattttattcaactaaggcacaggcatattaaaagactttcagtataaggaaaaggggtagtttattccctccaaatttgactacagctcgaaattgtctttattaatgcaaagttcttttgtcaccttgactttgggacactgttaccaaacctcgtgggaaatatcaagttccagaagattgaatacatgcaggaaacaaatgttttttgggccctagagtgaacatttggtccatatgaaaatgaccaggaagacaattaggtgaaggttttttaatgatttgtgctacgtcagtctcttcccataagacatattcaaagttttaacttttccttaagaggcttccatggggagcaagcatttgataattcatcctttaagaaaaacaccaccgtacactgcttgaagagttcctcttctattacttaaaacgtttttattgtgcaacatttaaggcatacaaaaacatataaagaataccatgatgaaaatctatgactgtattaccaagcttaagaaataaaacagttgagtgatctctca

SEQ ID NO: 294401 - DNA, 1000 bp, Homo Sapiens
cttattattgctttcattatttaacttttctcatattttttgtattgtctgtaactatactgtaagctccatgaggaattgggtcacccaaagtgccagcatactgcttacatgttggacttcagaaaatatttataacaaaaagtttagttgaaaaatatcatgtaattcagtgttagccaatttagaaagtgatgtttgcatactatacattaatttataaactttaaaaactattctattagacacaattgtaaaataactcccctacatacacagactcccccttaccattcctccttcaacaggtcttcttagtataatccaggtccccttctgttagaaagaaggaaccggaaaatgtgttcatagtaaggttttagtagcaatatatttattatccatcccagaatatttgcattttaaaagaagtctgaataaataaaataatgggtaaaccaaagaaatcaattaccaatgatgaaatctcaggagtctgactctagaataaacaaaacatatttggggtaggagggctcctgtacctccaaaccacacttcacaatatcataaccacttctctcacatacaagtttatacttggttgcaaaacccaacacatagaatctacaacagtgaatttttattgggagaattttcaaaagttgttttcatgctacatcatgttcacaatggcggagttctgtgtattggaactgactgatattactaccaacaggaaagtggtatcagagtcagataaagaggaccaagaagaagtcaaaactttggactaatttgcttgacacatggcagaggatggctcacttataccttcactttggaaacaaccttctcttagatcaggatcattgagatcactggcaacattatagtagacaaagaaatacaagttaaatacgcagacttccaggaattttaccagttagtgagtacttgtgttaaaataaagaaataaaggttaaatatgcaggcttct

SEQ ID NO: 294402 - DNA, 1000 bp, Homo Sapiens
gatatctgctgttaatggttctttctcttaccaagtgctgttgggggtttttcagaagtcacatcatatgactgaaacttatctcctgtctgatttctcctcaacttttgggattctacagattctcaccattaggatttcagtgtctggcagtcctctgggaaactactttttaaaaattatggtaaaatacacataacaaaatttttcatcttaaccatttttaagtgtaaatttcagtagtaagtacattacattgttttgcaatcaatctccagaactattttcatcttgcaaagctaaaactctgtatctgtcaaacaatgactccccatttcctctttcccccatcacttagccaccaccattctactttctgtttctatcagcttaagtcttctaagtaactcatgtaagtgaaatcatacagtacttgtccttttgcgactggcttattccgcatagcataaagccttcaatgtttatttatgttgtagcttgtgtcagaatgtccttcctttttaaagctgaataatattccattgtatgtatataccacatttttttagtccacccatcgatggacaccagggttgctttaacctgttgacttgtgaataacgctgctatgaatatggctgtataaatctcttggagataacctgctttaattattttggctatatatccagaagcaaaagtgccaggttataatttaatgtttaatttggcggggggaaccaccatattgttgtctgtagtggttgcattattttacattgccatgaaaatttcactagggttgcaatttacccatatccctatagtatttgttattttctgggttttttttttccacaggagccatcttaatggatgtgaggtgatctcttaatatagttttgattttaatttctcaaatgattagtgatattgaatgtcttttcatatgtttgctggacatttgtttatgttttatgaagaagtatctattcaagtc

SEQ ID NO: 294403 - DNA, 1000 bp, Homo Sapiens
tattataatgcaggcaatcaattacacatccccaatgctggccggcccgcaggaaatttatatgctcagcacaaaccaatgtgaaaatggaatctcatttgccaaatgtctttctccccgtacagcacgatgattacagtctgtgtttgtttcaacagtcgtgtacaactgacagtgccatcatttactgcctggctcaggtcacgttactctaaggctttatttatggtgttacgaagggcagcacaggaaaaggacaagggtgtctgtcagggatggcactgtgttaaaaagtgggcgtgcaagggccgcattcccgggcagccgctgcaacctcagcccctgggcccttacctccgcagcctctcccagcatccagctacccagactccaaggccccaggcgagagccagctctcggtacctggagctccacaggtcccagaatcggggtgggtcagagttcaaattctggttctgctactgtctaattgcgtgctgcagggactcaatctcttcatctgggaaatgggagtaataacccttggcaggaatgttgcgatcctctgggatgtcagaggtgttgatgaatgttagttcccgggacttcggaaagaggtcccgttggaagagatgtgaattggaattcacaccctatattaaaatctcctccaatcttcacctctgagacatggctgtctcaagactgttttgtttcccttcctggtggaattttgcacttttatgtcctgtgtagcagcaggtagtgtggctttgagaaaataaaatggccaccttgctccgctgttctttctttgtaaaaaaaaaaaaaaaaaaaaaaaaacggcatagcaatcttggcctttctagctgtgtgaccccaggccggtcaatccctcctcctctccaagcctcggattcctcccctgagaagtaaagaaaataactcctaaactgcctcccgaggcttgctggcaggatccaaggtgtccagagatgtt

SEQ ID NO: 294404 - DNA, 1000 bp, Homo Sapiens
ccgagttcacgtgattctcctacctcagcctcccgagtagctgggactacaggcgtacgccacaacgccaggctaatttttttttatttttggtagagacgggggtttcaccatgttggccaggatggtctcaatctcttgacctcgtaatctgcctaccttggcctcccaaagtgctgtgattacaggcgtgagccaccgtgcccagcccgacatagatggtttttttagggttacagcgacttcttgttgaagttgtctcacaactacctgataaagtatttttgatactgattttgtaaatcaccttattattaaattttcaataatatctaactctaacatacacttggaaaaatatcacctcatacacaattcaccttcttttcctcatgtgtacatattcctatttattactgaatccagttaaggacacagcaggtgttatcttcctgccaaatagatattctgttactagacgacagttttagcccaccattcagtcatctgctgataattcggcgatgcttaacaacctgctgaagtctcaagaaagcagtggatatgtgagtgaggctggcagtggtcaattctacactgaggaacgtttccctctttttcctctttttttattaggagctcaaatcaacctcaggggtcctcagttattcacttgcctgtccaaatctttccaatagattcctgtctcagaataaaagaaaaattccaatggcttttaaggccctgtaggtaacctcctgacctcagctgctatgagtctctctcctacttatggcatttctactatatgtgaatcccacctcccctcatttgtctgaaaaaggtcacagataactacacttatcattgctggacaaagctctatccaaatgatggtcagtgagccttcaaataaaaattataagcaaattatatgtaataatagtaaattatgtataccagtgggaaaaataaatcaaatatggttttggtaaaattc

SEQ ID NO: 294405 - DNA, 1000 bp, Homo Sapiens; identical to SEQ ID NO: 119130

SEQ ID NO: 294406 - DNA, 1000 bp, Homo Sapiens; identical to SEQ ID NO: 224767

SEQ ID NO: 294407 - DNA, 1000 bp, Homo Sapiens; identical to SEQ ID NO: 220454

SEQ ID NO: 294408 - DNA, 1000 bp, Homo Sapiens
ggacccaggaggtccctgccggaaggcagaggttcaggtgagagtggctcacctctgagctggtgaagtgaggacttgcctgtgacatgacccagggatctgctgctggcttctggagacagggccttgggctgacttctcaggttgattgaggcctcctgactagcggtgttcccaggctagaggtgattggctgcaacaaagatgcttctattagtctattagcagtgccttcgggaccctgggattttgctctctctagaaaggtgttttttatttttttattttttatctcccccttttttcctggctttgctccagggtttgtgtatttgcctgtttattgtcctgctctttttttttttggatgaaaactccagcctttcctgactcacctccatcttcggttcttcagttttctgagaagagttgggatatgtgggaaggggcatgggagctcggcagcctccgcctgccaggaaggcagtttcgcctctgcaggaaagagcagagcccgtgggaagccctgggtgagggtggcgcagccggcccagcacgcatggtattgccagccacggggggcctgcgtgtagtctctgctccctgcatttcaccttctttgttgactttccttccctgttttcccccatctgtttgccagaggggtgggactggcaacagaacagccgtggctgctttatctctcctctccacggtgtactcaggcctgagtggtgactcacgggagcctggccacctcgcagctgttcgccccctcaacctttgaactggaactgctggctcacacagggttttcgacaactgcagctgaatctcatggaaaagctggattcctctgccttacgcagaaacacccgggctccatctgccaggtgcttgccactggtcctggcagaaatggcggctgctgaaagtgaccttccaaatccttggtggcacttcagcgccacaggctctccaataaaaaccctttacacac

SEQ ID NO: 294409 - DNA, 1000 bp, Homo Sapiens
aggcaaacagagaggaggcccaccccacattacatacacttcccgagggcccaggccctgcataggctcttggctaagatgctgctttcagagttggagaggggagctgtttgctgagttttctgacactcttaactgttcaactgggcagagttgtggtttgttcagagaagaagcttgtatttagggaaaaagtcatggacaatgaatttctaactaatagaacatatttcagaaaggctgtacgatgaagcagaaagagctgaaaatttgggtttggaagacctgggtccaagtcctgttgtcgcaacataccagtggtgtggtcctgggcaggttactgtgagcctgtttcctcacctgtacaatgggtatagtaataataatgatcataacttacagggttgttgggaacccttgaatgaaagaatgaatctgaccagatgtggtggctcacgcctgtaatctcagcactttgggaggctgaggcggagagatcacctgaggtcaggagatcgagaccagcctggccaacatggtgaaaccccatctctactgaaaatacaaaaattagctgggcgtcatggcagtcgcctgtaatcccagctactcgggaggctgaggcaggagaatcgctggaacccgggaggcagaggttgcagtgagccgagattgcgccattgcactccagcctgggggacagaggaagactccatccccccccacaaaaaaaaattaatctgaagcatctgaggctgggcgcagtggctgtaattgcatccaagagttcaaaaccagccttggcaacatagtgagaccctgtctctccaaaaataaaaaataaaaaaattaaccaggcatggtggcacatgcctatagtcccagctactcgggaggctgaggtgggaggactgcttgagtccgggaggttgaggctgcagtgaattatgattgtgccactgcactccagcctgggtgatggagcgagaccctgtatcga

SEQ ID NO: 294410 - DNA, 1000 bp, Homo Sapiens
gcctcagcctcccacgctcaagtgattccacagtctcagcctcctgtgtagctgggatcgcaggtgtgcgccaccacgcctggctaactttttgtactttttatagagacggggagtttttttgtatttttttaaatagagacgatgtctcaccatgttgcttaggctgttctggaacttctggactccagtaatcctcctgcctcagcctcccaaggtgctgagactataggcatgagccaccgtgcccagccatataattatcttaagataaatttctatacatggaatttttatacgtggaatttctatacatgaattaaagagcacagatttttgtatgttggttgcttggtttttagaggcagtatctcactccattgcccaggttggagtgcagtggtgcaatcatagctcaccgcaccactgaattcctgggctctaggagtcctccttcctcagcctcctaagcaactaggactacagagtacatatgtttttaagatctttgatatcttataccttttggggactgtatcagttaaaaactctaccagtactgtagaaacatgatcgtgtctctgtttccttgccacactgggcattaattacttgatccattaatgagttaattgcaccctcaataagagtatggtaaagtgtgacacatttacactacagaatattatgctgtaaagaataaggatgtaggccaggtgaggtggctcatgcctgtaatcccagcactttgggaggccgaggcgggcggatgacgatgtgaagagatcgagaccatcctggccaacatgttgaaaccccgtctctactaacagtacaaaaattagctgggtgtggtggcaggtgcctgtggttccagctactcgggaggctgaggcagaggaatcgcttgagcctgggaggcggaggttgcagtgagccaaaatggcgctactgcactccagaccggggacagagtgagactctgtctccaaaacaaaac

SEQ ID NO: 294411 - DNA, 1000 bp, Homo Sapiens
ccatgcccccatcagcatggaggggctgacgagggaggggcgggtctcttggaggacaggcagcagcacagtcctcatgagcgctggaccccctcaaatgcccggaaaagccacttgacctccaggtccccgttcccacttctgaaatgcgggcaccagccttgccccatggggtggcgacaggacaggcaggagggcaggccgcctctgcaggctgagcaggtgtactcgacctaccgtgtggcttggggaacccctttccctctcgggactcctctagaagttgaggcccatgtgcgtggcgagcatcagctatctgacgagtgggcactgggagggtgaggtgggaggaggctgggtgcccggggcagggagttcgtgggccaggacacccaggtggccataaatcctggctgagcctggggatggcaagtgtgggcccaggcagggacgagagggtctgagcagtcaacgttgggtgtcgcaggccccagctcatgccctgtccgtgtgagggggccatagctcagagattcccggggccggacctccaagtcttgtagcagctaaagttcactctgcctcccactccgaggacagaggccctgcttcaggcccgtcgctcctggggtccaggcccctgctggggctctgggccgacagcctgtttgcctgtaagtgcatggggcctgctggggccgccccttctcagcccttctgcagtggctctccagccagacccactgcccagcactgcaggtttccaccaccgcgtggccccgaataattcccctgtgaagagttcctaagggcacagatgccatgtcggggcgtggaggtttctgactagaggcagagcccgagtagaaacaggtctgaacggatggaactgcaggctgggccccggggtgggatttggaacttcctcctctctttaacaccaacttacaaccaaaacgtctacatctgttttaaaaagattaaaataaccctcaaaatg

SEQ ID NO: 294412 - DNA, 1000 bp, Homo Sapiens
tctccccgcaccctcttctcccctcttccactccccaccgtcttcgcccccgatcgtcgtcttgcccacccccttctcgcgctctccaactgcctttcacctagaagcgctccacgcgtgcgcccggctgtgtccctgcgcctggtgtgtctgtgcgcccaggcagccccatgagctgggcccctgagctccgccccaacagccaacaggagacccaggagagtcgctgccagggccatcacggctgccgccgcccccgcccccgccgctacctcagaactgaacagtgttggctgcgggcgaaagacactggggcccggaagactgcggggagagggggaggaggggacggagagggtgggaaagaccttggaaagtgggatggggagaaaggtggggaagaagacagtggggagaaagtgcagggagaagacagtatggtagagaagacagtggaggaaaacggtgaggagaaaggagggtggaaaagaagacgatgaggacaaggccgggcgcggtggctcacgcctgtaatcccagcactttgggaggctgatgcgggcggatcacaaggtcaggagttcgagacctgcctgaccaacatgctgaaacccagtctctactaaaaatacaaaaattagctgggcgtgatggcgagcgcctgtaatccagctactccagcgcctgaggcaggagaatcgcttgagccccggaggcggaggttgcagtgagctgagaactcaccattgcactccagcctggatgacagagaaggtcatgggaacatacagagacctacagggaagacggccatgggacaagggaggcagagtctggagtacgctgcctacagtcacggaatgccaaggacagctggaaaccaccagaagctaagaaggagattttacctgaaagcctctcaaagaaatcaatcatactcacacctcctttttgaatttctggcctcgtgaatggtgaaaaaataaatttctgtcgtctt

SEQ ID NO: 294413 - DNA, 1000 bp, Homo Sapiens; identical to SEQ ID NO: 119131

SEQ ID NO: 294414 - DNA, 1000 bp, Homo Sapiens
gaggcaggtggatcacctgaggtcaaaagttcgaaaccagcctggccaacatggcgaaaccccgtctccaccaaaaatataaaaattagctgggtgtggtggtacagacctgtaatcccagttatttgagaggctgagacaggagaatcgcttgaacccaggagatggaggttgaggtgagccaagatcgtgccactgcactccagcctgggtgacagcgtgcgactccatctcaaaacaaaaagcaaacccaaaaagagttggccagagggatatgcagatgtgattagggctaaggacccacacagcccgaggtgggtacggcccctaggcctggaaacacttctggcctgcatgagaagtggtgacggtgggcgtgggtcagaggccctgaactggaggaaggggccacgagccaaggagagtgggggcctccagaagtggggaggagcggggaagcggcttctcccccaggaactctgacgtggcccagatttcaatgcagacttgaatggggcctctaaccgtgagaggataaccgtcattttaaagagaaagacacgtgtctggcctacgtcacaagatggctcttgccacacagtacgctccctgatgtggggtctgcgccacagggctgggggcactgcctgggagaaaaggaccgagacctttgcacactcgacgtgccaggtcccctgtggccacagtgcctgcctggagagcacccgggacgcagagctgctggtggccctggggacagcaggggggacccgggcaacgtccccccaccccccagagctctgctctgaccgatgcccccctgcggtggggtgggcagtttccttaaagacacagccgccagccgcggagtctgcgcgtgttgtttactgttggtcactctctgctcttagcttcacattaccatttcgtgttttgtcaaagtccgtctcaattcgcgtttggtaaaataaatagataatgagcctctaggccggcgctc

SEQ ID NO: 294415 - DNA, 1000 bp, Homo Sapiens
gagaagaggggtgtgtgggtggggcagggaccactagggccctgtagagcatgggcttgggctacacaacagggctgcccctcctgggctagaggcagtgccctctgcaggagctgagaatgtccagtcctgagaaaggacgtgtatggcccagggtgggtgactgggccccaaaagcagtcctcgagggagtgaccacattaccaggccaggatcctgagacctgcccagtgcactgagggtgcacctggggcctgtcccacctgatgtccccaagtgccccgcaaggtctgatctctcagcctccatctacctcccccggggggtgggggcttgctttgagctgtccccacctttctggatagaactaatgtacttcttacatatattgattgatgtctcatgtctccttaaaatgtataaaagcaagctgtgggccaggcgcagtggctcacgcctgtaatcccagcactgtgggaggccgaggctggtggatcacgaggtcaggagatcgagaccatcctggctaacacatagaaactccatctctactaaaaagtacaaaaaattagccaggcgtggtggcgggcgcctgtagtcccagctacctgggaggctgaggcaggacaatggtgtgaacccgggaggtggagcttgcagtgagccgagatcgcaccactgcactccagcctgggcgacagagcgagacgccgtctcaaaaaaaaaaaaaaaaaaattatctgggcatggtggtgggtgcctgtaatcccagcctttcaggaggctgaggcatgacaattgcttgagtctgggaggcagaggttgcagtgaactgagatcgcgccactgcactccagcccgggtgatagtgtgagacgccgtctcaaaaaaaaaaaaaaaaagcaagctgtgtcccaaccaccttgggcacatgtcgtcaggacttcctgagaccatcacgggtgcatcctcaaccttggcaaaataaactttctaaatt

SEQ ID NO: 294416 - DNA, 1000 bp, Homo Sapiens; identical to SEQ ID NO: 224768

SEQ ID NO: 294417 - DNA, 1000 bp, Homo Sapiens
catcaatcccttttataaggtgctaatcactccctaaacaccccatctcttattactgttgcactggggattcagtttcagcatgagttttggagggatacagacattcaaaccacagcattgtgcacactcctttttctatggaatggccaaggtgcagctatttgcagaggctctgacagagctccgctgtggagctggggtgtccacatgcctgtatggaagaactttcatggcaccggagcctggtgggaagagaagtgggctgggctatagactgggcaccagggactatcacctcgtgccaccacatttagtgtagagttccagagaggccacaaattcttcatttgaactggactccccagcctcatgttcctctgcaggatgtaaaaggtaatgccagcagacgttggcagtgctggagacacctggtgggcagaggttacctggctggagtggcaggtgtgaggagatgcctcccagcataaggaatgtgggcttctgttggatctcttgttccaggcctcacacatgttcaaggcagcctgggtatgtcttggcccattcaatccctcaaagccctgtttaattctcatcttgctgtcacctatgtggtgccaagaaacaagtcaccaaaataatgaaatgcctacctaagcttaaaaacaaaaccatgaggtctttctaaataaattatgaaaaagtgcaaactgcaggtccctgtaatgatttcaaagactccgttccaacaatgcattaatttaaaaagggagtataaggcaaaggggggtgattagaagaggaaggcagctgacatcaaactgaatataccaagtttcctcctcaaaaacgagtgtgcattatttgtggtgaccattcttggtattgttctattacgtaaaacacagcatagcatcattcttttagatgccattcatttaatatatgggcaaatgtacatggttaggctagactggagcacttgtctacactgctt

SEQ ID NO: 294418 - DNA, 1000 bp, Homo Sapiens
ctcgttctttcttttagcatgtgaattccttggtggaagatttgctgtcttctttggtcttactcaacccaaatatcagtatgtgttaaacgagttctataggatacaaaacaagaaaagtgacaacaaaagtgaaaggagaggatcaaaggcccaggcagctgaggttcctaatgaaaagtgtcacttggaggctggggtccaagagtatggaaccatacaacaggatgtgacagaggccattcctcagtgaagcacctcatccagggagggtctggtggcagatcctagctcatgatggcagcaaagactgcagtttccctggatctgttccttggccattgattaccatggcaacaacaccagaggtagcacttctgagccagatctgatcctaatctctgtgtgacttagtctcaagcatccaggaattacaagcaataatgagagtaattttggacactttctcagaataatttctatattcaagccaccccacctcaactccacccctgtgatacaagtcccatgagtactgacatttgcacagtagcataaatgccttaaggaactttgggactgggagtttttggctgaaatcctctgtcatgggacgagggtacagtaaagaagctctattcctcagaagaaaatttgggcaccgcaaagtctaaataaatcccctttcaggatttgatatagtgtgtacttccaacaaccatcctggcgtagttggggattgttttacaataagtaaacattgctaataactgtgttacaagatcattatcaagatctttaagaattaggtacatccctccaaattaaaacaattgataaataatataagctctagaaaaaaatattaatggattattttcttatttatttgtcaagaaattttcaaaacctggaaagatcgaacatggaaatcattgttagataacacagggtgtgctggccaaagtaactgtgatacattaatagcaaaaaacaaacc

SEQ ID NO: 294419 - DNA, 1000 bp, Homo Sapiens
tggaaacactcttttagtagaatttaaaataagaaatttctgagtccttgaggcctattataaagaaatgaatatccctgataaaaactgacaacaaattatctgtgaaaatgctttgagatatgtggattcatctcgcaaagttaaacccttgttttggttcagaaggttgaaaatactctttttgtaatatctatgaagggatattttggagcccatagaggcctatactaaaaaccaaatatcccaggataaaaactagaaacaaggtatgtgagaaaatgttttgcaatgtgtagaatcatctcacagagttaaaccttgttttgattgggcaggttggaaacattctttttgtagaataaaagaagggacattttggagctcattgaggcctatagtgaaaaaccacatatgccatgataaaaactagaacaagctatctgtaaaaatcttttgcaatgtgtggtttcatctcacagagtttaacctttattttgacttagcgctttggaaacactatttttctagaatctgcaagggtacatttcaaacccaatgaggcctgtagtaaaaaactgaatatcccacgatgaaaactagaaactagctatctgtgaaaatgctttgagatgtgtggattcatctaatggagttgaatgttagttttgattcagcaggttggaaacttagcagtttggaaacattcattttgtagaatcaaagaggggacttttcttagccccctgaggcctatagtgaaaaatcaaatatcccgtgataaaaactagaaacaagttatctgtaaaaatgctttgcaatttgtggatttgtctcacaatgttaaacctttgttttgatttagtaggttggaaactctctttttgtacaattgatgaggagatatttcaaagcccattgattgaggcttgtagtgaaaaacctaaaatcctaataaacactataaagaagctgtctctgaaaaaaaaaaaataaaaat

SEQ ID NO: 294420 - DNA, 1000 bp, Homo Sapiens
accatctcacatcagttaaaatggcgatcattaaaaagtcaggaaacaacagattctggagagaatgtggagaaatagaaatggttttacactgttggtgggagtgtaaattagttcaaccattgtggaagacagtgtggtgattcctcaaaaatctagaactagaaataacatttgaccctgaaatcacattactgggtatatacccaaagattataaatcattctactataaagacacatgcacacgtatctttattgcagcactattcacaatagcaaagatttagaaacaacccaagtgcccatcaatgatagactggactaagaaaatgtggcacatgtacaccatgggatactatgcagccataaaaagaatgagtttatgtcctttgcagggacatggatgaagctggaaaccatcattctcagcaaactaacacaggaacagaaaaccaaacaccgcatgttgtcactcataagtgggagttgaacaatgagaatatatgggcacagggaggggaacatcacacactggggcctgtctgggggttgggggcaatggaaaggatagcattaggtgaaatacgtaatgtagatggtgggttgatgggtgcagaaaaccaccatggcacatgtacacctatgtaacaaatctgcacgttctgcacatgtatcttagaacttaagcataacaaaaaaatatatttctgggcagaggaaaaatactttgaaatttacatttaatccagtaaaatttcagtgcattaaattaaagcttgtaatataataatgataataacagacagcatttaaagagcacctcttgtggataatcaagttattgagaaattatgtgtgttatctctgggataaagattgctgcatccttatattcttgtgtataaacagaccctgtatatgtaaaaaaaggaaagagaaaagtatttttaaatgcactaatttgtaattaccacataaactattactcatggaagatt

SEQ ID NO: 294421 - DNA, 1000 bp, Homo Sapiens; identical to SEQ ID NO: 119132

SEQ ID NO: 294422 - DNA, 1000 bp, Homo Sapiens; identical to SEQ ID NO: 224769

SEQ ID NO: 294423 - DNA, 1000 bp, Homo Sapiens
cgacccttccctcacagccctcggaggacggcctggaatccactcttccctcacagccctcggagggcagcctggaaccgacccttccctcacagccctcggagggcggcctggaaccgacccttccctcacagccctcggagtgcgacctggaaccaacccttccctcacagctcttggagggaacccaccctgcccacaccttgacctcggacaggtggcctctagagacctgtgcagtgagttcctgctcccagcctgtggtccttccatgtggaagcaaagcaaactcctccaggcacattcaccgccattggcatgggcctccgacactgaccagggcctcccgtcacctctgcccctgcccaccactccccagcccaggtaccatgctgtaaaaacagcctcaaaaagaacatgaggtccacagctcctccaggagactgggccagccccaagcacatccagagaggtggctcctctgactggaggctcacgccaaagccacacagagacagctgccattctcgctcgctcatgcttcccccgagcctaaaccctgaccagccagctctatacatttacatctttttctggcctcacacactgtctagaatgtccagtcgaatgttgagaagtcgtggtcaaagcagaaagcccagctttatccccagtcttagtgggtacgtgtttgctgtttcacgttaagatactggctggcagtggggcacagtgactcacgcctgtaatcccagcactttgggaggccaaggtgggtggatcacaaggtcaaaggattgagaccgtcctggccaacatggtgaaaccccatctctactaaaaatacagaaattagctgcgtgtggtggcggacacctgtagtcccagctactcgggaggctgagaccggagaatcgcttgaacgtgggagcagaggttgcagtgagccgagatcgcaccattgcactccagcctgggtgacagaacgagactctatctc

SEQ ID NO: 294424 - DNA, 1000 bp, Homo Sapiens
caggaagtatatacacaacaaacaatttttcctctctgcaaatcggattattcccttgcgcaccccctgcaacccccatctatgatgtcaaactcaatggactgttgaactaatagcctgggagtcaccagcgtgagagtgtgtatgtccacgctgtgcaacttgaattaggctggccaccacggctgtgtacagctaccccaggaagagcccctcccctcctcagcatttcagtggaaaacgtgctgactgggacccagctacaggaatcacatttgggcagagagaatggcttatccttttcatgaggggtcttgactcaagaacacttgccaattctgcttgaccgtttcccattctttacggtttttcctatcactccttagactaagaaagaaaaatctgtaggaatgattcggtgggatttctcttttgttcctaaataaaccttatccctggatgagctcgttcacactagggaagttactaccactggctttgaagccaggcagatctgggtgttccttcccatgtctttatttgctttgtgggggatcttttcccagcttttctgctttcatccttcttagtgagagcttcttcagctgcagaacaggggcaataatgcctaccttgctgggttgcagcagagaatgctgcttatgcaggaaaataaaaaaacacatagcacacaatgggagcttaatacataagaattataaacagtcttttgtgtatatatcaatgtatttcatgtccttaatgtttatttaaagcaagtacattcttttgaattaagcataaaaaggtcataaaatgccagagatgtgcttatttgaaatgtttgcaatgctttgcaattgttttaaaataaggagatgatataacagggtgttagctccgccactaattagttacgtaatcttagattatgtcacttccctgggtctcagttgtaaacagttgcttaataaataatgtttgttttgctgtcatcaat

SEQ ID NO: 294425 - DNA, 1000 bp, Homo Sapiens
acatggagggaaagttctacagaggaggcacagtgggcttcaggaacaccctgcttgagaggcctgtgagagggattgttttctactgtttgacattcacgtaacctcctaacgctgtctggggaagatgctaccccctgctctccccgtctttcctgcactctcagcaatgggatgggctgactgatgccctgtgggctggaaagctgaccacagttgctgcagaccagaccccctcacatagtgagtgctgggctgaggaatccaggagagcccgaggggggacactgaaggtgtatcgttggccctgccagctgcaagtgaactgcttctgatgaattttaatagggagaaagaagtatttgctaagaatggcaatcctgatgctcagccttcaactcatcttgttattaataccatcaatatcccatgaggctcataaaacgagtctttcttcttggaaacatgaccaagattgggcaaacgtctccaacatgactttcagcaacggaaaactaagagtcaaaggcatttattaccggaatgccgacatttgctctcgacatcgcgtaacctcagcaggcctaactctgcaggaccttcagctatggtgtaatttgaggtcagtggccagaggacagatcccgtctacattatgagtgaagcggagagctactgcagggttctgagcagagtcctaatttatattttagaagaatcatcatggctcctagattaggaataaaacgaaggggcccagggatggaaacgatgagtccagttgggttactgcaaagatccaggccagaaatccaggcacagtggcacacacctgagtcccagataattccacctactggtcctgctctgtggcctactggtccgagtccagccccgactgatttctgggcctgtaatgtctaaaaacgctccctgctgatgttttgcaagtgactgtgttacttgaaggcagttcctaggataaactagtcgctttatc

SEQ ID NO: 294426 - DNA, 1000 bp, Homo Sapiens; identical to SEQ ID NO: 224770

SEQ ID NO: 294427 - DNA, 1000 bp, Homo Sapiens
attggataagactggaagactggatgtaaaacccctagaggccgttgctagaaattcatttcagaatataagaaagcctgatattacaaaggtggagctcttaaaagatgttcaaagtaaaaatgatcttattgttcgattagtagctcatgatattgatcaagtgtatttggaaaattacataaaagaggaacgagattctgatgaagatgaagttgttttaacacagacttttgcaaaagaagaaggcatcaaagtatttgaagatcaagtgaaagaagtcaagaagccaatacaaagcaaactttctcctaagtcaacactaagcacgagcagcctgaaaaaatttttgtcactaagtaaatgttgtcagaccacagccagtgcaaatattgaaagtactgaagcaatctcaaatcaggtaatagaatccaaggagacacatgttaaaagagctgttgctgagcttgacatggccacaccaaagacgatgcctgaaacagcctcttcatcttgggaggaaaagccccagtgtaagaaagaagaaaagaatcttgttactgaaccaacacattacttcatacacagaattatgagttcatcttcatacaaccaagaagatctcatttcatctactggtgaggctgaagattgtcactcagacccaagtgctaaaatattagaagaaagttctcaggaacaaaagccagagcatggaaacagtgttaagtttatcaccatctttgaaagatccaaggatgttcttggcagtgcaaatccctcaaaggaagtcatttcagaaactcccaagcccgatgtctccaaacaaggatctaaaatgctgacaaaaatgtcttcagctttgtcaaaggtgttttctcaatgtaacaccaatatttccagatcttcctcaccagctcaccaggatgaacactgaagcttttgtacctgatataagtatgcttacttcttttagaaaataaaatggtttttaaagcat

SEQ ID NO: 294428 - DNA, 1000 bp, Homo Sapiens
cctctctctcccacatggaaacccccatcagcacctcccccaactcacaaggcatcccgtcaacatcacagtcccgaccttcccacacggacaagctcacgggaccccccgatggaccaggacagcgtgagcactaagacatgccctgagactcacaggaagagcggaccaagaagacgggaacagcacggggccctgggagctgcaaatgcccacgataccgtgagagatggagaaaggtatgacaggaggagcagaccaagaagacgggaacagcacggggcactgggagctgcaaatgcccacgatactgtgagagacggagaaaggtatgacaggaggagcagaccaagaagacgggagcagcacggggcactgggagctgcaaatgcccacgataccgtgagagacggagaaaggtatgacaggaggagcagaccaagaagacaggagcagcacggggcactgggagctgcaaacgcccatgatactgtgagagacggagaaaggtatggccatggcggacacaaaatgttactcaacatttatcacaggcctaaatggagaacataacgctatcaaacccttagacaaaaacacaggggaaaattcgtacggcctggggttaggcgaaaagttcttagacatgacaccaaaagcatgattcataaaagattgacaaattaaacttaatcatacatttaaaattataattctataaagcaatataaaaatccaaagagaatgaaacacaaactatggtctagaaataaacatttgtgaatcacacgtctcacagcctactggcacgcaggatatgtgaagaaccatcaaaacttaaccataagaaagtaaaagccccagtattaaagagagggccaatattggaacggaggcctcatcaaagaaggtataaggagggcatattgcccgagaaagaggctcaacgtcatagagatgctggagaaatgccaatcaacagaacctctgcaaatctatt

SEQ ID NO: 294429 - DNA, 1000 bp, Homo Sapiens
gtaaacagaggcactgagatttgttctcttttggtttgaccctagaaccctctcctaacatttttttttattttgactcttgtttggcagaataagtagcaaggacaccatcatctttgctgaggaaagatgactattattagtagtaggcaagtggagagtcgtcagtgttccatcagcttttcccctgtgtctctcatcccatgaatgaagagcagatgtgaaaattgctgccagccactcacttgtcagatgagaactgacttggctgtgctcattacaaaattaatttttaggcttattacaaaattaataaggcatgtgaaatatagatgtcctcaagatttataaactttaatttagaagtgtctttgattctaatacaaatctatttttacttacagtaagatagcaaagaaaaaagtctctggaaagattctggatatgtctaaggaaaatttgattagatgggccagtgtttcagtaacacacacaagaagcttctgaataacttgtaaaagtgagatgatgtgccccactttgatttaaattccattacatgtatcctcaggaattagcaaaaaaatttttttttcataataaaactcattagatgattttgacttataaagaataacttgtttgagaataaaatttgtctggacacaagtattggttctgtaaaatgaaaggaaatatctaaacttctgtgcaactctccgttaaagataatcctaaggctacttcagatatatttttgttattcaggatatggaatgagcatgaacgtttgcattttaatggtcaaaagaaccattaaggagagaagctcccaaaatataataagacatgactagtttcaactctatgttgcctctgtatgtttggaattccttgtaattccatatgtatttggatgatgtttacctttgctgtatctttgatgaaatgatgtgttaaactaacttcctgcagtaaataaaggaggaaattgtaaagc

SEQ ID NO: 294430 - DNA, 1000 bp, Homo Sapiens
agaaattacttgtgaagcaacatagggggttgttggttgggtccacttttaggatgaagtcagaagggatcgtgagtgatgcttggccaataagaatgtattgatttgatttactaattaatttcatttccagacaccaatatatgcatagccttgtttgaagaaaattaaggagaaccattttgtaaatggcaatgagtgtaagacacttaactatcttcctgctctccctggcgtgggcttccgcgctccctgactctgcttttattaaaggtgtctgggaaggcatttgtccttcggcttcccagctggcttcttgccttctcactcactgcctcccgtagcctgtgggcagaatccctcaccgtgcccaccttgccctgctctcgtctgacctcacctctgtttccaggatttgctatggctgtcccctgccagtcatgctctgtgcttgctactctgagtgtgtccctggtcccactctcttgcagcctctgtgtcttagcacatgctgccctgatggcccaagggcccttcccctttgtttctgtctggggaatgttctgtctcctctttcttgaacctccttatattccctcaagaagacttaaggcaaaaacaaacctgaacttactatgtgtggtatttttgtgttataagtgtaggacctagtcatagtaacacatttcaaaaatatggaaccgtataaagaaaatgagcatcactcataaatcactatttagacacaagcattgtttacgtttctaatattctttctttagtggtgcttttcatgattttatgtgcatttgcattttactgactaaatattactatacaaacattttcatatcttgccacttcacctaacaatacagcacaagcagcttctcatggcattaagaattgtttgtggcgtgaacccgggaggcggagcttgcagtgagccgagatcgcgccactgcactccagcctgggcgacagagcgagactccgtctc

SEQ ID NO: 294431 - DNA, 1000 bp, Homo Sapiens
ccaaaacttgatctcacattgctctgtttctttctctgcctccatgcttgatgcatttacttaatctttcgcaggatgggtcattactttttgcaatagcacactcaaaggtaatgaccaagataaattgaaaagaggattcaacagtattcattgtaagattgaatgggatataaaatacgtaatcagcacttgtgaggaatatcactagattctcttcttcctactccccctcctttttttttttttttttttttttgcattaaaacccgggaatttgatgttgattgtggcctaaatgttaagcatattctggattttctacaccgttctgacaccacaggtacttgtttctttctcagaaggcaggtgaagctcagctgtgtggggctgtgcttggtggcagtgtgggaaacgtgtggaactcaccatggtgttagcagcttttactagccgtttgcttggaaaacagtctccgatctgcacttgcacacccaccacgatgccttctccccatggctctgtggacaccaggaggtcagggcacagaggacgtgcgacttgtgctcctgtcttgctgcacagtctaaagacctcacgtacgttttgaatgttcaaccactattagagtgagaaatggcatccaagatgcttttactgaggaacattgacaactggaaaacaaatcaagcttggattccagggaacactgtccagatttcctgttttatgaattttaccattcactcttaaggctgttaggtttgaataacttgataaatgatcaagagaaaaccatgcagcattatgttcactgccaagtaatatggacgtagaggatggaagaattctgtaaaaccacttctggagttcaacatttaaccgagcacattttacttacctgttaccagtgtgtcgcttggaatgtcttctattaggcatttctcctcacgttcccctgcgtggaaataaaaggcagttgaaaatggaaaaccaaaac

SEQ ID NO: 294432 - DNA, 1000 bp, Homo Sapiens; identical to SEQ ID NO: 224771

SEQ ID NO: 294433 - DNA, 1000 bp, Homo Sapiens; identical to SEQ ID NO: 119133

SEQ ID NO: 294434 - DNA, 1000 bp, Homo Sapiens
tggacattgtgactctgagtcaagtgagaaacagagagactgatggagaagtgtgtgtgtgtgtgtgtgtgtgtgtgtgtttatgtgcatgcagtgtgcactcactcagggggccagggtcctgaatttagaaacactaccaccaagaaggcattatgcctaccctacccaggcagtgggggctggagccagggcctgggggctggaaccagggcccagggcctggaggggatggtaagcctccagccccaccttctccaggaaggggttggtggtctggcacgggccaagcgtacctggccatccacaatgctcacctccaccacggtgatctctggccgggtaagcagctctcggccctcttggctgcctagcttccagaggcgggactcttgctgcattcccagaagcttcttcaactccgactccaggaaacctgagagccagagagatggcaagggacagggagatggcagggaacaggcaggagtaggatggagcagcccactgggaacccaaggacccggaggtgcaaccgctccctgagcctcatcccagctctgtgtggttcctgctcaccctcagccacagccctctcttcttccaggacgtagagccagccaggtaccacccctccttcgccctgccttccccaggaagctcactctttgagggccttctctggcagcggcagcatgagagcctgcgtcttcacccactggggacagcatgcaaggggcaggtatttgcccccaccaccaaccaactcaagagcctggatctggaacccaaactgcctgcactcaagtcccagctctgcccatcactagctgtgtgacatcgggcaagttctcactgtgaactggagatggcaataggacctacctcagagtcgtaaaatgcaggattttatgaaaagtgcttaaagagggtctgccccattaatggctatgtaaatgtgaaccacgattttcatcatattatgtatgctatcaccact

SEQ ID NO: 294435 - DNA, 1000 bp, Homo Sapiens
aaagttgtacttcaatgaataccatcaagaaagtgaaaaacaaactcacagaatgggagaaaatattttcaaattatctatcttataagagacttgtatacagaatatttaaaggactattacagcttaataataaaaacacaacccaatttcaaagtggacagaagattcgaatagacatttattctaagaagataaacaagtggccaaaagtatatttaaaatgctcaaaataattagttattagagaaatgcaaatcaaaaccacattgagcacatcatatccattaggatgactaaaatcaagaagtaaggcaataacaagtattgatgaggtaggttaggaactctttacacattgctgatgaaaatgtaaatgatgcagctcttttggaaaatagtctgacagttcctaaaaatgctaaacttagtattagcattttgattcagtaattccactgctaggtatatactcaagagaaatgaaaatatttatccacacaaaactgtacaaatgttcatagcaatattattcataatggcaaaaggtagacacaatccaaatgtccatcaactgatgaatggaaacataaaaagtggtatatgcatacaatggaatattattcagccattaaaaaggaaacaagtactgatacatgctccaatatggatgagcattgaaaatattttgataagtgaaagaagtcatgaaagtgtacataattgcatgattctatatatatgaaatgttcagagtaggcaaatatgtagagacaggaagtagatgagtagttgctgaggattggtgggttaggggatgaagccagggaatggagtcactgctaatgatacagaagttctttcagggtgatgaaatgttctgaaattgattatggcaatcattgcacaactttgtagtatactagaaacttttaaattgtacacttttaatcaatgaattgcttggcattatatcacaataaagctgttaaaaacaaac

SEQ ID NO: 294436 - DNA, 1000 bp, Homo Sapiens; identical to SEQ ID NO: 119134

SEQ ID NO: 294437 - DNA, 1000 bp, Homo Sapiens
tttcagtggttcagtttttctccactgtttccaccaaaataccatcaacagtaaggaagaacaatgtggaccaccagaaggctggagtgttttctgaagctgctcctgcttggactttggttggaagtcgtgattgtctgagggttcatgctggcgctcccccagtgaacctagctcacctaccctctgctctggctctagtctctcttcccttcttctaagggaggctactgctgtgctcagtgcggagctgggttcaaggagagctggggctctgaaggagtcgtggggagaaggctgacatgagtcctgagtgagtggacctgctctctctggccctgaaggggtcaagaggcaactgggtgtgtgggctgagtctttcctggccctgaagctggaagtagaggctttgtgcaggatcctcagcaggggactaaaagcctgtgctttcataacccgagccacactggcaagtgcgctgcctcctcccacctttgagacagttgccttcaggagcacatctaccagaagccaacaaagaaaagcaacagcctcttggaggggcctttctccagggagagaagggtgaggcagcacaggcagagctggtgtaggagacacaagacagtatgaatttcaaaatcagagcattgaaggagattcaaatatggcacaaaaagagtttctggagctaaaaatcataatttcctaactaaataccattcagtagattaactgaaaaagtggaagatcaccgtgaagatatggtcagctctcctggagggtcaaagggcagacagaccccttgatgaaaagggtggtatagagcaaatgtagaaagagatgggaagcaagtagaaatgggtaaggaacatgggatggatcctaaaaccttgactcgtgaatagagaaaccttgacttgcagaaagaggaaaaaatagaaccaacggaggagaggtgaccatgatactaacaataaaagaaaacttccctgaactg

SEQ ID NO: 294438 - DNA, 1000 bp, Homo Sapiens
acccatctgacaggaattcccgtaccaagtggtcagtcagtgaagatctctttccactggtaactttatcaagaaagtaagatacaagactgtatgtaaagtatattatcctatgtgaaatcaagggacagaaaataactggaaggaaatattccaaaatgttagcagtagtttctcccggagaatgtgatgtatacatttggatgggtgatatataaagtacttttcatagatctgggcaagagatattttagagggctccacataccacaatcacccacaaataaatgtattaaagagcacacagatgcctttatcactcaggatgtggcactcagagctggcccagcatagtctataacacttaacatcactctcatgaccacactgctcaggtcctagggaagtgtgcctctgtatctcttccctgtatccttaaaagaaaagatgacctaatttgaaagttgataaaaatcagggattatgatgatgttgcttcagaattcttggaggacgtaagagaaaaatagtgctgggttatgagaagaacaaaacttaccaaattcctccctgaagataacataaatgcaatagattcttttacaacaaagtgtcatttctcaataatgccaagaatcctttttcatgcttctcttcttgttcacattcctggttcccatgctactcaattaacataatattcagaaaagttgcagatggtgatttaggaacatgttgtaatattaacatttcatattacccttaaatttgcatgcatgcatcatatgtgtatcatggtaccaattctttatattggtaactaggtggatatagaacatttacaatgtgaatagtgttatctctataaaaacaagatttaattaaaatgttcatatatgaaatgaaattttggcatatattaattataacttggattttaccttttaaagttaatagatcattttgaatattttaaaagactttaataaacatataaaat

SEQ ID NO: 294439 - DNA, 1000 bp, Homo Sapiens
ccggcctgcagttggacactcttgactgattaaacattaataggcaattctaacaaaaacagagaggatggcaactccataggaaggagggccacatgtgggggtgaattccaagtcaaacattttccccaaagaatttgttgttaaacttttaattttgagataactgaagattcacatgtagtggtcagatataatatagcatgatcttctgtgccttttacccagttttctccgtcataacatctgcaaacgtagcactatattacagtatctcaaccagtgtataaatgcatacactcaccagtgtcactggggttcctccagtctcagttcatttgtgtgcatttattttccgtaactgtatcactgctgtagagtaggatggccaccttgacagtcaagaggcagaacagctccacacgagggttcctgtcttccttgctcctggaaccattaatctgctctccgtctctacaattttatcctttgagactgttacataaacaaaaccacacagtaacctcacaaggcatttttgcactcagtaaaatgcccttgagacccattcacgttgctgtgtgtatcagagcccgttcctttccatagctgagccgtgttcctggtgtggacacaccactgtttaatcagtcatcgtcgaaggacggctgccttgtcccccattttcgaccattacaaatgaagcttccatgagcattcatgtacaagtttctttgtgaacttaagctttcaagaaattaaaaaagaaatgttttcaaatgcttgagcaaatagccaagatcccagggcaccgtgggaaagtgtggaagtgaggattttttttttttttttgagatggagccttgctctgcactccagcctcggggtcaagagcgaaactctgtctcaaacaaaaagaaagaaaggaaggaaggaaggagggaaggaaggaaggaaagagagaaagaaaagaaagaaagaaagaaagaaagaaagaaag

SEQ ID NO: 294440 - DNA, 1000 bp, Homo Sapiens; identical to SEQ ID NO: 224773

SEQ ID NO: 294441 - DNA, 1000 bp, Homo Sapiens; identical to SEQ ID NO: 224774

SEQ ID NO: 294442 - DNA, 1000 bp, Homo Sapiens
gggtggggcatggccactaactgggaaaccttggccacggacagggattctctctccttcccattctgaaatcctatgatctggtgaactgaggttcatgctcacttttttttttttttttaagacagagtctcactctgtcacctaggctgaagtgcagtggtaggatcttggttcactgccaacctccacctctggggttcaagcaattctcctgcctcagcctcccgaggagctgggactacaggaacgcaccaccacatccggctaatttttgtagcttttagtacagacagggttttgccatattgctcaggctggtcttgaactcttgacctcaggtgatccgcctgccttggcctcccaaagtgttgggattacaggcgtgagccaccgcacctggcccatgctcacatttttataagcacaacggcagtaaccaacagagccatttttctgaggccttcctgtgcccagcactgggccaagcccttgacttaatccttattatcccaacaaggttggagtcagcaggcctgggttcttgtctcagctctgacacttactagctgggggaaaaagggggaggatgtgggtgggcagtggcagaaccttctttaggccccagtttttgcgttttgaaggcagggctttggagggatgaatcacaaatcagtatgctgtgtgaaagcagccagacacgaaagagggcacccggcgcagtttcattcacatgaagttctagatgaggcaaatgagtctacgctggaatcagagccggggctgtggtagtttcagaaagggggcagtttggaccgggaaggggcaaaagggggctgcgtggggtgacgggcacgtttcatcttgattgtggtggaggccacaggactgtacatccatttgtcaaaacgcaacaaacggtacatttaaaaaggatggattctactgtaggtaaaatatgcctcagtttaaaacattcttagtaaaatatgggctttgg

SEQ ID NO: 294443 - DNA, 1000 bp, Homo Sapiens
ctttgccttgctgtacttggagatgcggaaagggggcctgcggaaccagtggctgcagctctacggtgggcgggctgcggggcggagacccaggcacccccgcttcgggtctgggatgtcacccctgtgcctgcaccagccctttctgcacgcggaaggtggaaccgctggctcctggtgtctgtggccgcgggtcccggcccctccctgcccctctctccctctcttcgcccctccagccccttccctttagcttacccgccctccccaccttcagctcgagcgcccgagctgtttcccgaaggcgcccagaagatgcagctactggcgccccaagtgggcctgagccccagccagggcgtcctgctgccgaagtcgggtgagcggtgccggcagccctgctgggagggccaggccccgggtcacacccctgctggaagggccaggccctggtcactccactgatctcagattcgggacagaagtgcccggggcagacccagcctgtctgggtcgggggagggcgagacgttgcccaggccggtgttcctaggaggagatcgccttggggcaggtcgggggcctccgtcccagggaagggggcgcggggtggcgcctcaggctcgatctctctgcagaccagtgtgcgggcgcgctctcccgggtgagtagaccatggccatgcggagccgcggaccatgggccctcccagctcggtgggctgcaccgcggggccctctaccttcggggcagctagggacgacagcgggggtgatggggcacccgggcggatccgagccgcagcagcctggggaaccgcggggctgcgcgtcgggagggggcggaggcaggggacgccgcccacctgctccttgttttgcagtgaggggtccagcccctgagtgcccgcaggggtcagctgctccgtgcgcccagccctgcccaaagagccccctccctccacaccctggccccaagcgcaataaacaccctgaatgcc

SEQ ID NO: 294444 - DNA, 1000 bp, Homo Sapiens; identical to SEQ ID NO: 119135

SEQ ID NO: 294445 - DNA, 1000 bp, Homo Sapiens
aaaagggtaagggttagtttcagttttaggattagagctagaattgggttaggtgagaaagaaagttaaggttaaggctagagttgtctttaagggttagggttaggaccaggttaggtcagggttggattgggtttagattggggccagtgctggtgttagtgatagtgtcaggatggaggttaggtttggagtaagcgttgttgctgaagtgagttcaggctagcattaaattgtaagttctgaagctgatttggttatggggtctttcccctgtatactaccagttgtgtctttagatggcacacaagtccaaataagtggtcatacttctttattcagggtctcagctgcctgtacacctgctgcctacatcttcttggcaacaaagttacctgccacaggctctgctgagcctagttcctggtcagtaataactgaacagtgcattttggctttggatgtgtctgtggacaagcttgctgagtttctctaccatattctgagcacacggtctcttttgttctaatttcagcttcactgacactgggttgagcactactgtatgtggagggtttggtgattgggaatggatgggggacagtgaggaggacacaccagcccattagttgttaatcatcaatcacatctgattgttgaaggttattaaattaaaagaaagatcatttgtaacatactctttgtatatatttattatatgaaaggtgcaatattttattttgtacagtatgtaataaagacatgggacatatatttttcttattaacaaaatttcatattaaattgcttcactttgtatttaaagttaaaagttactatttttcatttgctattgtactttcattgttgtcattcaattgacattcctgtgtactgtattttactactgtttttataacatgagagttaatgtttctgtttcatgatccttatgtaattcagaaataaatttactttgattattcagtggcatccttat

SEQ ID NO: 294446 - DNA, 1000 bp, Homo Sapiens
ataatcatttatttttgcagatcaaataaatcagagtttacaatgcacaggggatcatttatttagcattcccttgctagaagcccgtgtgccaggcactgtgctaggcgtggtgggcagtataaagaaatctgtctccacagccacacaaccagagggtgcacatgacttgatccctatgaccaagtcaagttggtgttgcccaaatcgcagtttgacataagggtcccacaggcttccccaccccccgcccccactcactgccccagggaccaacttcctaccctcacccaaggctttagaggacctgtagcatgtctttttcaacctgtcagtatccccttctgcttaacacacccactgagaaaaccctgtttgtagttcactttgactcttgaatgtgtcactttactggcaagagacttcctttgatttctactgtttacaaataaaactcagccagtctcattctatatcccaaacgtactgaatgaaactgattttggttccacaagcagtgtttgggtgttgccttcctgaaggtgaccaagcttccaaagctcgtcccactggcctctgtacatttccctgtggttctccgtccttccctggcgagggagctgggactgaagctttcccgctgtttccctgcctgcaaaagcagccccaagagctgcgcattggcttccctcagcaatctgtcctgtctgtgctcccattcggtccacatagctttctttgcctctctgaggcagacaggaagtgtctaattacgattttgtggcctgggttttgttgcataccacagattgtctatgtaacatgtagcgcacacctctcttggtgctatttcattcctgctgtaagagaatgacaaaaatattcatgtatagccaattgattgtgacgtgcttgtggtctgtgcttgctcagaaaaacaaacaaacaaacagtttttccaattataaataaatgctaaagacgaacaccaaaaaaaaaa

SEQ ID NO: 294447 - DNA, 1000 bp, Homo Sapiens; identical to SEQ ID NO: 119136

SEQ ID NO: 294448 - DNA, 1000 bp, Homo Sapiens
tgcgggagctggacgtggaaaatgccaagctgtacctggacttcatcgtactcgggattttcttcatctccctccgcctcattgcctattttgtcctcaggtacaaaatccgggcagagaggtaaaacacctgaatgccaggaaacaggaagattagacactgtggccgagggcacgtctagaatcgaggaggcaagcctgtgcccgaccgacgacacagagactcttctgatccaacccctagaaccgcgttgggtttgtgggtgtctcgtgctcagccactctgcccagctgggttggatcttctctccattcccctttctagctttaactaggaagatgtaggcagattggtggtttttttttttttaacatacagaattttaaataccacaactggggcagaatttaaagctgcaacacagctggtgatgagaggcttcctcagtccagtcgctccttagcaccaggcaccgtgggtcctggatggggaactgcaagcagcctctcagctgatggctgcacagtcagatgtctggtggcagagagtccgagcatggagcgattccattttatgactgttgtttttcacattttcatctttctaaggtgtgtctcttttccaatgagaagtcatttttgcaagccaaaagtcgatcaatcgcattcattttaagaaattatacctttttagtacttgctgaagaatgattcagggtaaatcacatactttgtttagagaggcgaggggtttaaccgagtcacccagctggtctcatacatagacagcacttgtgaaggattgaatgcaggttccaggtggagggaagacgtggacaccatctccactgagccatgcagacatttttaaaagctatacaaaaaattgtgagaagacattggccaactctttcaaagtctttctttttccacgtgcttcttattttaagcgaaatatattgtttgtttcttcctaaaaaaaaaaaaaaaaaaaaaaaaa

SEQ ID NO: 294449 - DNA, 1000 bp, Homo Sapiens; identical to SEQ ID NO: 224776

SEQ ID NO: 294450 - DNA, 1000 bp, Homo Sapiens
aaaaggcattgattcccggagcaaagggaggggagggggcccggtaatgtacatagctgtcaagttaagatttagtttccttccttcccctctgacccctaagctttcacttttcctttagcttccctttcctccccattcccaccctcagccgggctcaggcaatagtatattataaagaaaatgtctacattaagcaccaggactgcaagaggccatagagaatagtccccggaaagtgtttatgacaggtacccctcgccagtcggcccatttctcaccctttggttaaccattacattttccaggacagagcatttaatttactttttaaaatgaccctcgctggccgagcataagtacgttaaaatctttaaatgagttttttttaaaaagctaacgctttcattccctgccccgcccccacccgtacacctttgacttgtgacattttcaggatttacaaaggatctgggagctgtccagccaggtctggtgctgaagtcgcctcaccgttctgattacttcctctagttgtgaaggcagaggaggggctgttttggaaagtgactattctggcttttggttgggttctttcttctttttctacaatcgagttagcgtgtactattggttttcttattattaaacattgcataagttaccttttttgtaaaaaaaaaaaagtattaggtgatgtgcagtactgaaagtgcagtatctaaccaactagaacgtttgttttatttttagaacaagtgcacctttgttatatatttagtatattggtaccaaatacagaaaaaaactatagttctgtactatgtcctccaaactgtatattattgttcttaatttccagctgttgatataatggttaccactggatgagaaattcagtggtgcagacctggcttctgctgtttccagaagtgttcttttgtaccttattctgtagtagactgttataaaaagatgacacacaaaaaaaaaaaaaaaa

SEQ ID NO: 294451 - DNA, 1000 bp, Homo Sapiens; identical to SEQ ID NO: 224778

SEQ ID NO: 294452 - DNA, 1000 bp, Homo Sapiens; identical to SEQ ID NO: 224779

SEQ ID NO: 294453 - DNA, 1000 bp, Homo Sapiens; identical to SEQ ID NO: 119137

SEQ ID NO: 294454 - DNA, 1000 bp, Homo Sapiens
atgtgttccgagctttaattttttgtttacaaattgaacagtgttacatgggctgtccagtcctgattatagagaggaagaaatggtaacagtatggcagataagaattacaattatagaaaatgaggggaaaataacaaacctgttttatgaaaattcactggtgctgtttacattggaataaaaagctctataaggaggaaaggcctttatctaattcttatctacagacacttacttccagtgaccatattttactaaatcagcttattttttatgtctaaagcaacagctgttctgaaaaatcaccaaaagaaatgcactttgctagcaggatttgttttggctttgggttttgtttttttgttttttttttttttcagtggcataacagtttttggaaccttgattcttgtgtcacacaaaatgaatgaagtagcttgatgtggagccttcatatgttaaatattcctgcactagtgatggtcacttagaatgtttatagaaatgtggataataactaccaataaactacttgaggcactaggagaacagtatttgactttgaattttaatgtatttccacttttgctgaagcttttaatcagatgtgtaaaaacaattgaccagctaggctatttagtcccatagtagttcagatctgcttagatgtgacaggcattgaaggctgtttttttttttttctcccttcactgatactgaaatcatggtatctgctgcaaacatgagtagatccatgatggattaataaagcttgctgaaaaaaaaaatctgtgtatcagttagatttaccagtttgcctgtactttctgtctacctactatgtaaaatagtgctgtttttaagtatttcaaaagcttgtgtgttgaccctttgtagcctaagtacgtaaacaaattaatgttatctaagtttttcatatttcatggacaacaaaagagaaaatggtatgaacactgtacaaactttgatttataaa

SEQ ID NO: 294455 - DNA, 1000 bp, Homo Sapiens; identical to SEQ ID NO: 119138

SEQ ID NO: 294456 - DNA, 1000 bp, Homo Sapiens; identical to SEQ ID NO: 119139

SEQ ID NO: 294457 - DNA, 1000 bp, Homo Sapiens
cgttcgcttctttggccaccaccaccagagggcctggattccttctgaaaacattcaagatatcacagtcaacattcatcggctgcacgtgaagcgcagtatgggttggaaaaaggcctgtgatgagctggagctgcatcagcgtttcctacgagaagggagattttggaaatctaagaatgaggaccgaggtgaggaagaggcagaatccagtatctcctccaccagtaatgagcagctaaaggtcactcaagaaccaagagcaaagaaaggacgacgtaatcaaagtgtggagcccaaaaaggaagaaccagagcctgaaacagaagcagtaagttctagccaggaaatacccacgatgcctcagcccatcgaaaaagtctccgtgtcaactcagacaaagaagttaagtgcctcttcaccaagaatgctgcatcggagcacccagaccacaaacgacggcgtgtgtcagagcatgtgccatgacaaatacaccaagatcttcaatgacttcaaagaccggatgaagtcggaccacaagcgggagacagagcgtgttgtccgagaagctctggagaagctgcgttctgaaatggaagaagaaaagagacaagctgtaaataaagctgtagccaacatgcagggtgagatggacagaaaatgtaagcaagtaaaggaaaagtgtaaggaagaatttgtagaagaaatcaagaagctggcaacacagcacaagcaactgatttctcagaccaagaagaagcagtgggtaaataccagtcttttttagacccttatttctgaaaatgtaccacaggtatgatgcccgttaattcagaaggtagctgtggcacatgcagaagatgtttctgaaataagatcaaatgtgaaatggtcagctttagttttaaaaattttattaaaagtcctatgatctctcaaaaaaaaaaaaaaaaaaaaaaaaaaaaaaaaaaaaaaaaaaaaaaaaaaaaaaaaaaaaaaa

SEQ ID NO: 294458 - DNA, 1000 bp, Homo Sapiens; identical to SEQ ID NO: 119141

SEQ ID NO: 294459 - DNA, 1000 bp, Homo Sapiens; identical to SEQ ID NO: 119142

SEQ ID NO: 294460 - DNA, 1000 bp, Homo Sapiens
ttcggggagagccgggccagcaccttctgcggcacccctgactatatcgcccctgagatcctacagggcctgaagtacacattctctgtggactggtggtctttcggggtccttctgtacgagatgctcattggccagtcccccttccatggtgatgatgaggatgaactcttcgagtccatccgtgtggacacgccacattatccccgctggatcaccaaggagtccaaggacatcctggagaagctctttgaaagggaaccaaccaagaggctgggagtgaccggaaacatcaaaatccaccccttcttcaagaccataaactggactctgctggaaaagcggaggttggagccacctttcaggcccaaagtgaagtcacccagagactacagtaactttgaccaggagttcctgaacgagaaggcgcgcctctcctacagcgacaagaacctcatcgactccatggaccagtctgcattcgctggcttctcctttgtgaaccccaaattcgagcacctcctggaagattgaggttcctggacagatcaggctagccctgccctccacccacacctgcccgctccccacgataagcaccagtgggactgtggtgacttctgctgctggccccgcccctgcccccagagcgtccttggctgccgtctggccgggctctcatggtacttcctctgtgaactgtgtgtgaatctgcttttcctctgccttcggagggaaattgtaaatcctgtgtttcattacttgaatgtagttatctattgaaaatatatattatatacatagacatatatatatatataataggctgtatatattgctcagtagagaaaaaccatgggggactggtgatatgttgatctttttcaaaaaaatatatatatgacaaaaaaaaaaaaaaaggagcacaagctgtttgaaccaccaggtttatttgtgtgtctaaataaacaccaaatagtaccaaaaaaaaaaaaaaaaa

SEQ ID NO: 294461 - DNA, 1000 bp, Homo Sapiens; identical to SEQ ID NO: 115694

SEQ ID NO: 294462 - DNA, 1000 bp, Homo Sapiens
tcctcatctccaactatgtgacataatttatttggtgctaatattgaagtaatatttatttgctatattttatttcttcccactcttagctgaaaaatggaatttctatagccctggggtgaggagaacccgggaacagtgagccagtgactgctggttctccactttccccaccttgttagccaaacatgttattgaggatgaggcaatcggtgatatagcccaccacagagaatggatgactgttggccttttctccaatctcaaagtgacagatttgggctgattctttttttttttttttttttttttttggtaccccattcctgttgaatgggctcagtcttgacaaaccaattccctgtaactttttcacaattcttgactctgagaaaaagcagcactgtagggacctgaactctccattctaccagttcacccttctgacctgttctgctcagcctgtggtgaggggaacagatggaagaaggctttccttggggtttgaagaggaagccagttgtgggagtctctttgttacaccccctcccctccagaccctctctctctatgccttcctcctcactgcatatttatttgcgatttgtagcactgatctatggtacagttgttttgtttcttaaacagaagtaggtaagggaacctcagtaataatggaaatctgcctcagtctcctgtttggaaatgatgagaggtgagataagtaatgtttatatacctcctttcttctgtgatgattataaggtatacgaagctggacagattaaacattgagccctgtgcaaaaaaaaaaaaaaaaaaaaaaaaaaaaaaaaaaaaaaaaaaaaaaaaaaaaaaaaaaaaaaaaaaaaaaaaaaaaaaaaaaaaaaaaaaaaaaaaaaaaaaaaaaaaaaaaaaaaaaaaaaaaaaaaaaaaaaaaaaaaaaaaaaaaaaaaaaaaaaaaaaaaaaaaaaaaaaaaaaaaaaaaaaaaaaaaaaaa

SEQ ID NO: 294463 - DNA, 1000 bp, Homo Sapiens; identical to SEQ ID NO: 224783

SEQ ID NO: 294464 - DNA, 1000 bp, Homo Sapiens
ttctggtcacaaaaagatcaccacacttctaaataaagaccaatacaattctaatagtaaagattgaaataaaggcaagctacacatacctttaaaagagattaataacaagtaagataattatttacccaatttttggtgaatcagtatgtgatggtggttgtcctgctggtgggttagatcaaggaataaatgtttgcaaaacgaaccttgtcaggagcacctcctaccaccacgaagttcagaacagtcaccaatgtggcaggcttgctaggccctctcataccgcatcatttattgtcatgcatttggatgattattgtatgccttatgaatttttactttacaataatttgtattcattcattcattcattcattcatattctaatgtgcttattctagttcagggtcgtgcgtggccagagtccaccccagcaactcagtgtgcagggcaggaaccaggcctggacggggtgctattccatcgcagggtgctcacacacccccacacccacccacccacacacaacactgggacaattcagacacgacagctcacctcacttgctcagctttgggatgtgggtgggaactggagcacccagagaaaacccatacagacagtggccttgcccaggaatcagtcttgtttcttttttgtttttttgtttgtttgtttgtttgttttgagactggcgcaatcttggctcaccgcaacctccgcctcccaggttcaagcaattctcctgcttcagccttcctggtagctgggataacaggcatgtgccagcacgcccggctaattttttatttttagtagagacggggtttctccatgttcgtcaggctggtctcaaactcccgatctcaggtgatctgcccgcctcggcctcccaaagtgctgggattacaggcatgagtcaccatgccctgccgaatcagttttgtttcttatcggtgttataataaaatgacattaaacaaaacattatttaagg

SEQ ID NO: 294465 - DNA, 1000 bp, Homo Sapiens; identical to SEQ ID NO: 224784

SEQ ID NO: 294466 - DNA, 1000 bp, Homo Sapiens
ttgtgtctgctgtcaccagcaccctcggaccagggttgagaactcagagccaccctttgagactgaagcaaggcaaagtgttgtctgattctattttctgggtattttaggaagagttgggagttgccaagagtaaccatgaaattgaacgaaaggatgaggttcatgggtgagatacccatcagtacattttcttgacttttctgttaagcctatcagaagaaagagcaactcccaaataggttttattttcttaagagttaccactatgtttggaaacagggggtatcgactatatagttgaaagggtcagaaataccattcacacccttcttacccaagtcaattggaataacttgtcttcaaacactttaggctctctaaagtgaccttctagctctgctcatttgcttgatgcatttctgagctttcctgggctgagctgaaggcccagaatcccgctagaatatatcctgactgatcagaggatatgacagcttaccagctaagagtacctcccaggaaacagtctgactaatgtggaacctgcaactgtcagtgtggctggggtctttttaattccagtgagaagctctggctgagaagaaaatcaccactattaaaaaagctgctccccaagcagattagctctctgttaggattttactagtggccattcagcaaggacctctctttacagtggcacttcataggcacactctaaggagaaagtgcagagtagaattccttcagggcataagccaaaatgactctttttctcagggacctgcatgggcctccagcttgtctattggaattgttaagtgaagcctctcacttagtgcctcattagcagagatttcctccaacccagcttttctgtgctcttggtattttactacttgatgtggacctcagagaagctgaactgtaattgaaaatgtttccgatgtgtggaagaaatgaagactgctttgtgaaaaaaaaaaaaaaaaaaaaa

SEQ ID NO: 294467 - DNA, 1000 bp, Homo Sapiens
acctgcagaatcctaagcgagccagacaggatcccacatagcagcagcgggaagtgtgccaaggaagctctgtggcgttgtgttattggtagacaccctcagcctcatcatttgactacctatgtactactctaccccctgccttagagcaccttccagagaagctattccaggtctcaacatacgccgttccaccaattttttttttagccccaccagcttcaggacttctgccaattttgaatgatatagctgcaccaacaatatcccgcctcctctaattacatatgatgttctctgttcaaaagtaattggcagtgattggccaggcgcagtggctcacgcctgtaatcccagcactgggaggccgaggggggcggatcgtgaagtcaggagatcgagaccatcctggctaacatggtgaaaccctgtctctactaaaaatacaaaaaaaattagccagccatggtggcgggcgcctgtaatcccagctacttgggaggctgaggcaggagaatggcatgaacctgggaggcagagcttgcagtgagctgagattgcgccactgcactccagcctgggcaacagagcgagactccgtctcaaaaaaaaaaaaaaaaaaagtaattggcagtgactatgggcgcactgcctaacatttagccctgccccatatggaacatgttaaaaaaaaaaaaagccaggccgagcgtgttggctcacgcttgtaatcccagcactttgggaggccgaggcgggtggatcacgaggtcaggagatcgagaccatcctggctaacacagtgaaacgtgtttttactaaaagtacaaaaaactagctgggcgtggtggcaggagcctgtagtcccagctactcgggaggctgaggcaggagaattgcttgaaccggggaggcagaagttgcagtgagccgagattatgccactgtactccagcctgggtgacagagtgacactctgtctcaaaaaaaaaaaaaaaaa

SEQ ID NO: 294468 - DNA, 1000 bp, Homo Sapiens; identical to SEQ ID NO: 224785

SEQ ID NO: 294469 - DNA, 1000 bp, Homo Sapiens; identical to SEQ ID NO: 119144

SEQ ID NO: 294470 - DNA, 1000 bp, Homo Sapiens; identical to SEQ ID NO: 220614

SEQ ID NO: 294471 - DNA, 1000 bp, Homo Sapiens; identical to SEQ ID NO: 224787

SEQ ID NO: 294472 - DNA, 1000 bp, Homo Sapiens
cctggctgagcccctgcaggagccccggccacacacagcaagaaagatacatctgaccagcctcaacgtcaacgtatttcccctctcaccctggcttccaggcagctctgaaatacgtcccacctgtgcagctatgtgactccctcccacacacgcttaagacacctctgcatgcagtcaaagccactgtcacaagccggcaggcactggtgaggaggcactaaggagactctgacttttatttcgcctctctccttggctgccaggaagctcatagctatttatactcagaaagtttaacgctgctttctttctctttgcgcgcgtcacacttgcttggagacactgtcatgaacgagcatgacaccctgctgccctgggtacccagaagatcatctgtttacttcccagacactgtgctgtctctgctctctgctactcacacacaccctcatgtgtgaagggcagagacactgtcacaaacaggcatgccccttagaagacatgcctaaccaggcactgtaacgtaccaacgtaccaatttccccttttcccctggctaccaggaaactcggagacaatcttttcagcctcagcatttctggctggatttccacccatcaacacgtgcttgctcctcctttttttttttttctgaggtagacccttgctctgtcacctaggctgaagtgcggtggtgcaatcatggctcactgcagcctcaaattcctgggctcaagcgatcctcccacctcagcctccacagcagctggaactccaggtgtgaatcaccatgcccggctaacttttaaattttttgtagagatggggtcttgctacgttgcccacactgctctccaactactggcctcaaacgatcctcctgcctcggcctcccaaagcactggaatttcaggcatgcactatcgtactggctgttcaccccccttttattcctctttaatttttacaagcactttttaaaaaaaaattttacttt

SEQ ID NO: 294473 - DNA, 1000 bp, Homo Sapiens; identical to SEQ ID NO: 224789

SEQ ID NO: 294474 - DNA, 1000 bp, Homo Sapiens; identical to SEQ ID NO: 119145

SEQ ID NO: 294475 - DNA, 1000 bp, Homo Sapiens
ctgtgtgtaacgaaatatcctacagtgagaagacacagcgttttggcaacaccatggaaagtgggcttaaaaaagggttttctcagtgaaatttttgggcatcatgaagaacgatcaactatcttctaatttgaatctatagttactttgtaccatttgaaatatatgtatatatatatatataatattttgaaatattatctattctcttcaagaaatgaacagtaccacagtttgagacggctggtgtacccctttgagttttggatgttttgtctgttttgctttgttttgttagtcatttctttttctaacggcaaggaagatatgtgcccttttgagaattcaagatggcactgacacgggaaggccagctacaggtggactcctggaatttgaggcatcataatgatactgaatcaagaacttccttctgcttctaccagatggcccaaggaagcacatcgtcctgttttattgctttctaccctgtgcaatattagcatgcaagcttggcttacatagtcatactttatattcaattgatatataataaccgttctaacctcttccaggaaaatatttttagaactactagcttttccacttagaagaaaatgaggattcttaagggagccactccaccatgctattaagactctggcagagttatgggtaggatatggatccctacatgaataagtcctgtaaatacaatgtcttaaggctttgtatagctgtcctagactgcagaaatgtcctctgattaaatccaaagtctggcatcgttaactacatagtgctgtagcaacaagtcttatcatggcatctctttctatgtttggtttgctttttccaagagtattcaggtctcctcttgtgagataggaaggccatgaaaacaattagatttcaagatgatctatgtgaccaaatgttggacagccctattaaagtggtaaacaacttctttctaaaaaaaaaaaaaaaaaaaaaaaaa

SEQ ID NO: 294476 - DNA, 1000 bp, Homo Sapiens
atctgtggcctccaaaagcatccgccgctttcttgaggtttttatggagtctcagatgtttgctggcttcatccaagacagggagctaagaaagtgtcgggcaaagggcctttttgagcagcgagtggagcagtacttagaagaactcccagacactgagcagagtggaatgaataagtttctccgaggtttgggcaacaaaatgaagtttctccacaagaagaattaagcctccttctcagtagcagagtccagtgccttgcagagcctgaagcctggggagaaggcccagcctgggaccctctgggctgctgtggctcctctgcccccacagatcctatcctccaagccagcccacctctgccttcatcatatcccaggatactgtttgtaaataatctgctgtaagctttcttaactgttttttgtaacaagcaaagagaatatggcaaatatttgtatattcccaaggggccgggtgctttcctgtcctgccagagcatggatgaagtttcgctgggtgctcgtgactggccagttttgtgcagctgactgtctcagccaaaccactgatcttccctggaggccttcggcctgcctgcctgcctgaggtccccgctgccagtcccgggccctggagagcagatgctgtcttgttatgtacaggaggaccttttaaaaaaatcaagtttctattttttgctggtagtccgcatacccataccctctgtttttgaaaggcaaaggccaatcagtccccatttgtagcatggcaccagggtcttaggcctagtcctctcattcctcccaccctccgagatggtcagtgtgtcatgggaagcccacccccagctctgccagtgctctctgggcctggctcccagtcagtggtggccacgatgcggtacagggcatccctccttcccatctacgggtgttctcaataaacaatgtacagttgtttgggcccagaaaaaaaaaaaaaaaaaaaaaaaaaaaa

SEQ ID NO: 294477 - DNA, 1000 bp, Homo Sapiens
agatgctccagagtttggtggtaaaagacccacatttggaaaatcttgacaccattattaagcttccactgcgattccaaagacttggacacctagtggctctgatggcactgctctgtggggacccacaggaaaaggtggctgaggaggctgcagagggcattcactccctgctgcatatcaccctgaggctgaagtatatcactcatgacaagaaagatcagcaaaacttgaaaagagcattgacaaaatgtcgagaattcctggagctccacagctctgccgctaaatgcttctacaactgtcccttcagaattgcccaggtctttgaaggttttcttgattcaaatgagctctgccagtttataatgactacatttgataccctgaaaaacctgaaacatccctgcatccagcgatcagcaggagaattactgctaactttggcgaaaaatacagagtcccaatttgagaaggtgccagaaattatgggagttatctgtgcccagttatccataatcagccagcctagagtccgccaacaaatcataaataccgtgagtttatttatatccagacccaagtacacagatatagtgctcagcttccttctgtgtcatccagtgccgtataacaggcacctggctgaggtgtggagaatgctgtcggtggagcttcccagcacgacctggattctgtggaggctcctgaggaagctgcagaaatgccataatgagcctgcacaggagaagatggcatatgtggctgtggctgtaagcccttgagctttgcccctctaatgtcagcccctcccaggatgactgaccccacaccccagtggagagtgttccttttggtccctctcaaagcctgcatctgtcatccatttataagtctacagtgtttctgccaagggattgacatggagggagctggggagagtgaaggagtcagaatgccttaatacaaactcgtccaacctgcaaaaaaaaaaaaaaaa

SEQ ID NO: 294478 - DNA, 1000 bp, Homo Sapiens; identical to SEQ ID NO: 224791

SEQ ID NO: 294479 - DNA, 1000 bp, Homo Sapiens
tactacagccagtagagtaactggagagtcatgtgagatacaggtccatcctatgtttgaaccatctcaagtttacagtgactatagacctggactagtacttccagaagaagctcactattttattcctcaggaagcagtgtatgtagctggggtacattaccaggcccgggtggcagaacagtatgagggcattccatacaactcatcagtactgtcaagtcctatgaaacagatacctgaacagaagccagtacaagggggccctacttcaagttctgtctttgaatttccatctggacaggctttcctggtaggacaccttcagaatctaagattagattctggattgggtccgggatctcccctctctagtatttctgcacctatcagtacagatgctacacgtttgaaatttcaccctgtctttgttcctcattctgcgcctgctgtgttaactcataacaatgagagcagaagcaactgtgtatttgaatttcatgttcacacaccaagctcctcttcaggagaaggaggtggaattttacctcagcgtgtttaccgaaatcggcaggttgcagtggacttgaatcaagaagaactgcctcctcaatcagttggattacatggctacttgcagcctgtgactgaagaaaagcataattaccatgccccagaattgaccgtttctgtggtagagcctatcggacagaactggccaataggaagcccagaatattccagtgattcctcacaaatcacttcttcagaccccagtgattttcagtcacctccccctacagggggagcagctgcaccttttggctctgacgtctcaatgccctttatccatctgcctcagacagtgttacaagaatccccacttttcttctgtttcccccaaggaaccacatctcagcaggtcttaactgcctcattttcttcaggaggatctgcacttcatccacaggttataggaaaacttccacaattattttaa

SEQ ID NO: 294480 - DNA, 749 bp, Homo Sapiens
gacaagcgctgcggcatttgtccccgcgacagcaccgctgccgccgtctctaaggtcgcccgggtcccaccgccgccaccatgcctcggggaagccgcagcgcggcctcccggccagccagccgcccagccgcgccctctgcccacccgcccgcgcacccaccgccctcggcagccgccccagcccccgccccttcgggccagccggggctcatggctcagatggcgaccacggccgcaggggtagccgtgggctcggctgtgggacacgtcatgggcagcgccctgaccggagccttcagcggggggagctcggagccctcccagcctgctgtccagcaggcccccacccccgctgccccccagcccctgcagatggggccctgcgcctacgagatcaggcagttcctggactgttccaccactcagagtgacctgtccctgtgtgagggcttcagcgaggccctgaagcagtgcaagtactaccatggtctgagctccctgccctgaagaggtcggtgcagactcgggggccagtcctgcacccacctctacccctcgccgacagccagaccacaacaccagattgtacccagatagctgggattggaagtgaggaggtttctcaccccacagataacccaagacacaaatgtgcaattaaaagtttattttagaccacaaaaaaaaaaaaaaaaaaaaaaaaaaaaaaaaaaaaaaaaaaaaaaaaaaaaaaaaaaaaaaaaaaaa

SEQ ID NO: 294481 - DNA, 1000 bp, Homo Sapiens
cccatctgccgcttccgcacgcaccaaaaaggagactaactacccagccccgtccagtcatgcaggtgcaggatgatggagtcaacctcatcccctttgccaagtgttccagggtggtcagccgatctccacccccaaggttgccttcccagagcctcagacccatgccccagcgttatggagatgtcttctggaagaaccttaatcaaaggcccacccccacttggctggaggagcagcacattccacccatgctgctcccaccccctgaaatgctttggagaagaaagaagaggaggccatgtttggaaggaatgcagcagcagggccttgggggagtccccgcccgggtgagggctgtcacttaccacctggaggacctaagaaggcgtcagagcatcatcaacgaactgaagaaggcccagtggggcagctctggggctgcatctgagccagtggtgcttggcgaagacggctgtggattccccagcaccaatgaataccctgatctggaagaggagagagcaacctatccacaggaagaggaccgttttctcactcctggcagggcccagctgctttggtctccctggagccccctggatcaggaggaggcttgtgcctccaggcagctgcactctctggcctcgttcagcactgtcacagccagaaggaacccccttcacaatccctgggggatggagttggcagcgtctgaagagtaaggagaaaccaccaatgccgagaggctagtggtgccccagggacccaagactagttccgtcactagagtcaccctcattgctgacatgaaggcgtttccccttccttcgtctctccaactgcctttcccatcctctgaactaggcattaacagcccccgtgggctcccatctcaacccaccgctctcacaggagcaccccaagtcctgttttcctccaggccccgctcctggccttgtattctctctgctctgttattaaaaagcaagcaagtgga

SEQ ID NO: 294482 - DNA, 1000 bp, Homo Sapiens
aagctgcaggagatctaccaggagctgacccggctgaaggctgcagtgggtgagttgccagagaaatccaagctgcaggagatctaccaggagctgacggagctgaaggctgcagtgggtgagttgccagagaaatccaagctgcaggagatctaccaggagctgacccagctgaaggctgcagtgggtgagttgccagaccagtccaagcagcagcaaatctatcaagaactgaccgatttgaagactgcatttgaacgcctgtgccgccactgtcccaaggactggacattcttccaaggaaactgttacttcatgtctaactcccagcggaactggcacgactccgtcaccgcctgccaggaagtgagggcccagctcgtcgtaatcaaaactgctgaggagcagaacttcctacagctgcagacttccaggagtaaccgcttctcctggatgggactttcagacctaaatcaggaaggcacgtggcaatgggtggacggctcacctctgtcacccagcttccagcggtactggaacagtggagaacccaacaatagcgggaatgaagactgtgcggaatttagtggcagtggctggaacgacaatcgatgtgacgttgacaattactggatctgcaaaaagcccgcagcctgcttcagagacgaatagttgtttccctgctagcctcagcctccattgtggtatagcagaacttcacccactctacaccccgtgcacccttttgactggggacttgctggttgaaggagctcatcttgcaggctggaagcaccagggaattaattcccccagtcaaccaatggcatccagagagggcatggaggctccatacaacctcttccacccccacatctttctttgtcctatacatgtcttccatttggctgtttctgagttgtagcctttataataaagtggtaaatgttgtaactgcaaaaaaaaaaaaaaaaaaaaaaaaaaaaaaaaaaaaaaaaaa

SEQ ID NO: 294483 - DNA, 1000 bp, Homo Sapiens
gaaactgttacttcatgtctaactcccagcggaactggcacgactccgtcaccgcctgccaggaagtgagggcccagctcgtcgtaatcaaaactgctgaggagcagaacttcctacagctgcagacttccaggagtaaccgcttctcctggatgggactttcagacctaaatcaggaaggcacgtggcaatgggtggacggctcacctctgtcacccagcttccagcggtactggaacagtggagaacccaacaatagcgggaatgaagactgtgcggaatttagtggcagtggctggaacgacaatcgatgtgacgttgacaattactggatctgcaaaaagcccgcagcctgcttcagagacgaatagttgtttccctgctagcctcagcctccattgtggtatagcagaacttcacccacttgtaagccagcgcttcttctctccatccttggaccttcacaaatgccctgagacggttctctgttcgatttttcatcccctatgaacctgggtcttattctgtccttctgatgcctccaagtttccctggtgtagagcttgtgttcttggcccatccttggagctttataagtgacctgagtgggatgcatttagggggcgggcttggtatgttgtatgaatccactctctgttccttttggagattagactatttggattcatgtgtagctgccctgtcccctggggctttatctcatccatgcaaactaccatctgctcaacttccagctacaccccgtgcacccttttgactggggacttgctggttgaaggagctcatcttgcaggctggaagcaccagggaattaattcccccagtcaaccaatggcatccagagagggcatggaggctccatacaacctcttccacccccacatctttctttgtcctatacatgtcttccatttggctgtttctgagttgtagcctttataataaagtggtaaatgttgtaactgcaaaaaaaaaaaaa

SEQ ID NO: 294484 - DNA, 1000 bp, Homo Sapiens
ccaccgccctgatgctgcccgtgaagccccccgcaggctcctggggggcccagatcatcgggggccacgaggtgaccccccactccaggccctacatggcatccgtgcgcttcgggggccaacatcactgcggaggcttcctgctgcgagcccgctgggtggtctcggccgcccactgcttcagccacagagacctccgcactggcctggtggtgctgggcgcccacgtcctgagtactgcggagcccacccagcaggtgtttggcatcgatgctctcaccacgcaccccgactaccaccccatgacccacgccaacgacatctgcctgctgcggctgaacggctctgctgtcctgggccctgcagtggggctgctgaggctgccagggagaagggccaggccccccacagcggggacacggtgccgggtggctggctggggcttcgtgtctgactttgaggagctgccgcctggactgatggaggccaaggtccgagtgctggacccggacgtctgcaacagctcctggaagggccacctgacacttaccatgctctgcacccgcagtggggacagccacagacggggcttctgctcggccgactccggagggcccctggtgtgcaggaaccgggctcacggcctcgtttccttctcgggcctctggtgcggcgaccccaagacccccgacgtgtacacgcaggtgtccgcctttgtggcctggatctgggacgtggttcggcggagcagtccccagcccggccccctgcctgggaccaccaggcccccaggagaagccgcctgagccacaaccttgcggcatgcaaatgagatggccgctccaggcctggaatgttccgtggctgggccccacgggaagcctgatgttcagggttggggtgggacgggcagcggtggggcacacccattccacatgcaaagggcagaagcaaacccagtaaaatgttaactgacaaaaaaaaaaaaaaaaaaaagaaa

SEQ ID NO: 294485 - DNA, 1000 bp, Homo Sapiens; identical to SEQ ID NO: 224793

SEQ ID NO: 294486 - DNA, 1000 bp, Homo Sapiens; identical to SEQ ID NO: 224794

SEQ ID NO: 294487 - DNA, 1000 bp, Homo Sapiens
gggctaccggccccaagacaggacagtctctaaggccatgaccgcctactggaccaactttgccaaaacagggtaagacgtgggttgagtgcagggcggagggccacagccgagaagggcctcccaccacgaggccttgttccctcacttgccagtggagggactttgggcaagtcacttaacctccccctgcatcggaatccatgtgtgtttgaggatgagagttactggcagagccccaatcccgtgcacgtgcacagccagtgcccagtatgcagtgaggggcatggtgcccagggccagctcagagggtggggatggctcaggcgtgcaggtgcagagcaggcttcagccccctgggagtccccagcccctgcacagcctcttctcactctgcagggaccccaacatgggcgactcggctgtgcccacacactgggaaccctacactacggaaaacagcggctacctggagatcaccaagaagatgggcagcagctccatgaagcggagcctgagaaccaacttcctgcgctactggaccctcacctatctggcgctgcccacagtgaccgaccaggaggccagttccatgccctccacaggggactctgaggccactcccgtctcccccgacaggcaactccgagtctgcccccgtccctgcaacgggtgactctcaggatgcccctgtgcccctcacaagtgactctgaggctgcccccgtgcccccctcaggtgactctgaggctcccccgtaccctacgggtgactctgaggcccgtgcccaccttgggtgacactgaggctgccccatccccgctacgggtgactctgaggccgcccctgtgtcccccacagatgactccgaggaagctcagatgctgcagtcattagtttctagtgtcccatcagccttggtctcaagaggccgagagggtgcaaccccaggggctcccctcccatcttgagctcttcctgaataaaacctcattcccct

SEQ ID NO: 294488 - DNA, 1000 bp, Homo Sapiens
attttaaaaattaagatgaaattcacataaaataaaattagccattttaaagtgtacaatttagtggtgtgtggttcattcacaaagctgtacaaccaccaccatctagttccaaacattttctttttttctgagacggagtctcactctgtcacccaggttcgagttcagtggtcttgaactcctgatgtcaggtgattctcctagttccaaatgttttcattatctccccccaacaaaacccatacctatcaagctgtcactccccataccccattctctttttcatctcagcccctgtcaatctggtttttgtccttatggacttaccaattctgaatatttcctataaacagaatcacacaatatttgattttttttttaaaactaagccttgctctgtctcccaggctggagtgctgtggcgtgattttggttcactgcaacctccgccttccaagttcaagagattctcctgcctcagcttccaagtagctgggattacaggcatgtggtaccacgcctggctaattttcttgtatttttagtagggacatgttggccaggctggttgtgagctcctggcctcaggtgatccacacgcctcagtgtcccagagtgctgatattacaggcgtaatatgtgatcttttgtgtctggttcctttcacgttgaacgctatttttgaggttcgtgcctgttgtagaccacagtcacacactgctgtagtcttcccccatcctcattcccagctgcctcctcctactgtttccctctatcaaaaagcctccttggcgcaggttccctgagctgtgggattctgcactggtgctttggattccctgatatgttccttcaaatccactgagaattaaataaacatcgctaaagcatgacctccccacgtcaaaaaaaaaaaaaaaaaaaaaaaaaaaaaaaaaaaaaaaaaaaaaaaaaaaaaaaaaaaaaaaaaaaaaaaaaaaaaaaaaaaaaaaaaaaa

SEQ ID NO: 294489 - DNA, 1000 bp, Homo Sapiens
gatcaaggaggttgtaaaatattagtagtctataagggacatgcactagcttttgtcagaatatacaattttgagaaaaactgaaggatctttccaatggtacagtctttgaagtgtttaatagaaattcttagaacattttattatataagagttttgaatatcgtaagtgtcataataacattactgtaaaaaaaaaaccttgacaatgaaaaatgtgtgtctaaaagagacataatccttatctttagggtcatcataatcttgttatgttctttctttctgtcatataatatatcccttgcttatgggtaggtaagttgttttgccacttaatgaaatgacattttaggtcattctgagttatttcacattactatttaaagggcataagaaaaaaccaacctaagaaaaaggtggccttggttaaccaacctaaaaaaagaaactgaaacccaaaaaaaaaaggaaattccaaaagaagaagaaaaaccaaccggcaaaaaggttaaaataaatgggaattaataaatggatccatttaacaaatatttattgagcacgtaccatgtgccagggattattttagatattggggatgcagcagtgaacaaaatgaagttctaacatgtgaggttgaaacagaaaggaaacaactaaataagtacatctatactacgtcagataataaatacgagagagacaaggcagggctgggtacagcagctcatgcctataaccccagcactttgggaggctgaggcaggaggattgcttgagctcggaaatttgagaccagcccgggcaacatagcaagacctcatctttacaaataattaaaacattagccaggcatggtgatgcgcaactgtggtcccagctacagttgctgaggtggggggattgcttgagcctgggtagtcaaggctgcagtgagcagtgattgtgccactgcactccctcctggacaacagagcaagaccccatctcaaaaaaaaaa

SEQ ID NO: 294490 - DNA, 1000 bp, Homo Sapiens
aaattagaaaggataaagttggtaaacattttatatttaatttatttttctttagactgtggactcctgtcagtttaatacatattagtatctagatttggaaaacccaaacagataaaggtttatgcaaaatttgttttgtgtttaggaactactgaggatcaaagtaatccatgcaaatgtagcagtgaatcattttacctttgataaagctaaatcaggctgtgaaattttctttatactggatgacaactatggaaagagtattgttgtttacttgtattatggagttaggagtttccttttcacaattgtcacaaattgtggaagccacagtgttctgtgattgtgcatttttaaaaaaacagccagaactcatctaggtaaatttcagttcctaggtataattcatattatattcagggctgatggttgtacatgtaagtgattgctggtttcagttgcagctttttataaaagaggctgagaaatttataaaccttttttcttgttgcctttttcctaaagtaaaaactaagaaattatgtactagatctttgcatattgttttatgttgcgtagcataacaattttcatctttaattttacatttcctaattgtatgttttaagatcaaacattttgtttcacagcttttcccttttttaagtaaggctttgtatttttttctgaattattttatctctcgtgagtatatttatccagaaagaaaacttgtgttgtataaattttaaaatgagaaatctaaaaaataaaactctccaaagtctctggaatttgaaacattttgcataacaaataaaagcctgtataagatatagccagctatggtctgtgggccaaatccagcgtgctgcttgctttttatggcctgtgagctaaaaattgggtttaaattttaaatggttaaaaaaatacttttatgatacatgaaaattaatgtatttagtgtccataaagaaagttttattggaataca

SEQ ID NO: 294491 - DNA, 1000 bp, Homo Sapiens
ttgtagaagccacagtgttctgtgatacaattgtgcatttttcaaaaagcagccagaattcgtctaggtaaattccagttcctaggtataattaatattatattcagagttgatggttatacacataagtgatggctggttttagttgcaactttttataaaagggactgagaaatttataaacctttttctcactttttttctaaagtaaaaactaataaattatgtaccagatctatgcatattattttatgttgcataggataaacattctaatctttaactttacattgcctaattatatattttaagatgaaacatttgttttacagctttccccctacccttttttttttttttctggagacagagtctcgccctgtcgcccaggctggagtgcagtggtgtgatctgggctcactgcaacctccgcctcccaggttccagccattctcctgcctcagcctgccgggtagctgggactaaggcgtgcaccaccgtgcctggctaatttttgtatttttcagtagagacggggtttcaccatattggccaggctggtctcaaactcctgacctcgtgatcctcctgccttggcctccgaaagtgctgggattacaggcatgagccaccatgcctggtgcctttccctttttttaagtaaggaaatatatttttttctgaattattttctctcatgcgagtatattgatccagaaagaaaacttgcattgtatatattttaaaatgagaaatctaaaaaaaagagaagtatccaaagtctctggaatttgaaacactttgcataacgtattaaagcctgtataagagacagccaactatggcctgtggaccaaatccagcctgctgcctgctttctgtgtcctgtgagctaggaattgtgtttataattttaaatgctttgtttttaaagacttttatgatacatgaaaattaacatgaatatttagtgttcataaataaagtttattggaacaca

SEQ ID NO: 294492 - DNA, 67 bp, Homo Sapiens
ggatcgatgatgagaataattgtctgaggatgctgagggactcattccagatgtcaatctgaggtcc

SEQ ID NO: 294493 - DNA, 1000 bp, Homo Sapiens
acatttaccttcattccacagccctgagttactgggtgagtccaagacatctcctcaatataaagtagcacactgcgttactatatgttgcaaccgggagccagtacagactttattcacctcacagttgcaagtgttcaatgcagtcacaatgcccctcagcagtgctcatgtgctgcctgtttttaggaagtattcacgtctaagtggtgtgtatatcttataggaacacttagtatttttaaaacctgattaattaaaaaaaattagtttctaggcagtcccaaatatagtattaaaggccaactgcaaagaaggaacactaagtgttttttaaaccttattaacataaaaaacattagtttttaggcagtcctacattaggtattaaaggccaactgcaaagaacactgagcgaggctctgtagatggatgtaataaaaatctataaaacaatgtgtttaaacctaagaattctactgctttccaattccttccctctgctccttttcctaacctcctgcttctccagcccttccctctgtccctttcatccctcaggccctcctctccccttagtccccaccaccctgtcacttctaaattgtggctctagcattgtcccattacctgctacgtgactgttctctccacagtggtcctgctcctgtgagtcagagtgtgtcatttcctcacctaaaacactccagtggctccacctcggtcttgtgaagcttctagaatgtcaggcacgtgagcatatgagggcatacctggttcatcttaggcactaaatttttgttgactgaatgaatgaaatatgaatgtattaaattgcatcacagaaagttataaaatgtaaaacactgaaaaattaagaaatattttattttatgtaactagtgtgcatatcaattcattccgagtctgttgagcctgtgtatgaattttataagattgcataacaaattatcacaaacattgactttaaacaacaccc

SEQ ID NO: 294494 - DNA, 1000 bp, Homo Sapiens; identical to SEQ ID NO: 220456

SEQ ID NO: 294495 - DNA, 1000 bp, Homo Sapiens; identical to SEQ ID NO: 224795

SEQ ID NO: 294496 - DNA, 1000 bp, Homo Sapiens
ctcagcttctccttgtaaattcctggtgagtgcctccaggcctactgctgtgctgtttctttttcttcttcctgctgcactgaacccctgccctttcattcttgggcctgtgctaatttctgtgcattcccaactgtgatttttcaccaatttaggggaacctcctctgccagggcctgcttctccccagcagtgcttgcaggggcctgggctggctggcatccctgggtcgatgggtgctcctctccctgcaggctggccactcagtactccttgtccctggcctcgcagcccacctgggaaggtaagaagctgccctgtcctgctgtgtggaccccaaggcggcggagaggctgaggacccttctgtgtgggagactggggggaccacagactcgggcaggtggggggaagagctcctgcctgatgttccctgtgcctccctcctccatcgcctgcagccacagtgaccagccaccaggtgtgccatcgtggaggaagtccaggttggagaggtggtcttctgtaagcaggtccatctctccacccactgaggcccctttctgcctgtgacagccccacctcgagggtcatggcacagccatcagctgcagctcccagcatgctactgccacgccccgagtgtccgtctgggcactggtccatgacctgttgtctttctgtatctactttctgcagcccctcactgaggaggcctcctgggtttgtccagtgcctgctattaaagctttgctccaagttcaatgcctcgtgtgatctggtctgttcattggtttggggcagtgtgggctgagggactgggataggtggagagtttattgagtgtttgggtattggcttgtcacctgccaatctgttctgcccactccatccaggcctggggctcctagaagaccagaggggaggaggaggaaggattaagggtggagggaagggacagccccttgtattgggaaaagtttctaagaatcagcccctga

SEQ ID NO: 294497 - DNA, 331 bp, Homo Sapiens
ggatgtgaggcgatctggctgcgacatctgtcaccccattgatcgccagggttgattcggctgatctggctggctaggcgggtgtccccttcctccctcaccgctccatgtgcgtccctcccgaagctgcgcgctcggtcgaagaggacgaccatccccgatagaggaggaccggtcttcggtcaagggtatacgagtagctgcgctcccctgctagaacctccaaacaagctctcaaggtccatttgtaggagaacgtagggtagtcaagcttccaagactgcagacacatccaaatgaggcgctgcatgtggcagtctgcctttctttt

SEQ ID NO: 294498 - DNA, 1000 bp, Homo Sapiens; identical to SEQ ID NO: 224796

SEQ ID NO: 294499 - DNA, 1000 bp, Homo Sapiens
atactgcttcgtgactgtgctttaaggaatttttgcttctaggagatgattgtgagccaggcagaggtgaaggagcaggagcaaatagccaaggcacagttcacagtgctggattttcttgtggatatagctgcattgttgttccttctgccttgtccaactgcttcctggtatccctaccctcaccttttcgttatcttttcatctctctaatcattgagaaaaagagtacaaaaagccagattttgcagttccctattttgtattccaggttgaagagtgctctggctgtagagggtccccacgatctgtcatctagtaactcaccagatacataagatattttgcctgctatgaagccattggagaatcaggtccagctgtgtcctacagatttataccctcactttggatgcactgtgaatcttgaaacaattcattttatacttaaccctttaagtataaagtatatacttcaagtataaagtgtaaggttgcttcatttcatgggcccacccaggatttaaaggtgtattccctgaaagaattggttccttccggtgggttcctggctgacttcaagaatgaagctgcagacacttatggactgggaggaggcccacgagaaaaacaggaagaacaagagaaaggctgaggctctagtggctgctttgcagacttgcagagtccaggatcccccaggaacttccactgattgctacctgttaccagtgttaaagccagggcactttaagaagaattgcccaagccacaagaaaaagccaccttgaccacttttgtggtgaagaccactggagattgcactactgaccaccaagacagagacacaatagcgaatctagaagtggaagtgtgagagatacctgcagctgttaagatgtctgggaatagacacacaaactctctctcccagataagcaacacaaagcagcacagagcaacagagactgaaagtctgcctacctgatcagggaataag

SEQ ID NO: 294500 - DNA, 1000 bp, Homo Sapiens; identical to SEQ ID NO: 119151

SEQ ID NO: 294501 - DNA, 1000 bp, Homo Sapiens
cttaaaagtaaaataaaattaaattaaaattaaaaaccagatcttgcaagaactcactgtcagaagaacagcaccaagggtatggtgctgaaccattcatgaaggagccatcctcaagatccagtcatctcataccaggtccacctccatctaatattgggaattacaattcatcatgagggttggtggagacatggatccaagccatgtcacatattatcctgactgtagtggtttaagataacaatttttatctcacaatttattttgaatacaggcatgatttagctgtgtcctttggttcagtatctcttcaaagctgtaatcaggtttttcatgtgtttgtcatcaactgaaagattgactgagtatggttctgagatctctcaggtgattattggcagaattaagttccttttcgattcttggtcttatttcttcacccatctactatagtgcattcttgccatgcagccctttttatggagcaagtcacaatacagcagcttgcttcattagggcaagcaagcaagacaagctgcagcaaatgcaagtaacatggaagtctttataatctaatcatggaattgacatagttaaaaacaaatcattaggtaggctccaaattgatcagaacatggttattggacaaaaccatgactgtcaggaggctgcatcatggggagccattttacaagcagcaccatgggtgttatgggggattttattacatttgttctgctcttaagagttgaaagtctttaaaaatgtgtaagtctgtcgtttgttcttgacttctgtcatgttttcaagaatgcattatgcaatgatgtagaatactgtttgtaaagtagttgtctagactctagtgaaaataattacagataatctcagttcatcaacgaatcggtatattaatgtcatatttaacagttataggaataaactaagcataataataaatgatgatttgaatgttaaaaaaaaaaaaaaaaaaaaa

SEQ ID NO: 294502 - DNA, 989 bp, Homo Sapiens
aagaattcggcacgagcaacggcagagctgtgcagaatgcttgtcagatccttctgaaacgccttgagcccatcattaagaaacatccggaaggtaaatgggaagactggatagaagctgcatttgaacaaagaatcagtctctcagccactggatacttcaggggctacaaggccttcatggactgggagaagggggtgggggacccatttccttactatgtctgcagagctgcctgttctgaggttgaaattgactgcctgacaggtgctcacaagaaaatcagaacggacatcatcatggatgcatgttgcagcctaaatccagccattgatattgggcagattgaaggtttgtttattcagggaatggggctttataccactgaagaactgaaatattccccagaaggtgtcctgtactctcggagcccagatgagtacaaaattccaaccatcactgatgtcccagaggagttcaatgtctccttgctgccatcatcacaaaccccactaaccatctattcgtctaagggcctcggggagtctgggatgttcctggggtcatctgtgttctttgccattgctgacgctgtggccgcagtgcgaagagaaagagacatagctgaggacttcacggtgaagagcccagcaacgccagaatgggttcgaatggcctgtgcagatcgattcacagaaatgcaatgattacaatcacctgcctctggacagatgccctcctcagatgggcagggccgggaaaccagcaccctccacccactccaggaactcctctgtgcggatcttggcctagagatcccaagagatgaccctgagacatttaaaccttggtctatccctatagcataacactgctatcattccctaaaaggtgtttcagtttttcacaagtaaaaagatggcttgttaatcctaactgggttccaaacttatattcttatactgttgtagaaaaaaaaaaaaaaaaaa

SEQ ID NO: 294503 - DNA, 1000 bp, Homo Sapiens
atgcattgttaataaaaacacacacacacacacgcagaaacacacacacacagaataaataaaatgtatatatttccatcttgttccaagtaaatcattccatatcctcagccataacattttaataaagataaaattaatttaaaatagataatttagttgactcatgtgcccaaatacatagattttgcaagtagctattgtgacaatagcagctaatatttattgaaaacgtactatgtgccaggaaagatgctaagggcaccatctttttaactaaattggtcatcccaacaagctgcaagaggatgttgatgtcctgattttatactttgtgaaatagatccagagatgttaaggaggtgctcaaggtcacacagcatagtacagcacttgaaattagttttttttttctctcttttgtgttatgagttgaagtggatccctaaaaatgacataagccccagtggtccaggcacagtgccagctttatccagcatagtgggcactgagttgggtttattttcatttaaaaaatggacaagaagcctgggcaacatggtgaaaccctgtctccacaaaaaatacaaaaattagcccagcaaggtggcctagggctcttgtcctggctacgcaggaggctaaggtgggagaatcactttagccccggagacagaggttgcagtgagctgaggttgcgccactgcactccagcctgggcaataaagagagaccctatctcaaaaaatgaataaataaatagttaaaataaaataagataagagaggttgaatgctggtttgaggccacataccttagaggactggctggttcacagacatcttttcactgcatgccaagctaagtcaaataagctagagtgacagtagaatcccaatctatgacttctggtgttctaggtcttgtaacctaagcaggaggttggaagtgggaagatgctgaaccttcagggaaggtgttgtcagcgaggaggtcggca

SEQ ID NO: 294504 - DNA, 633 bp, Homo Sapiens
atgggtgatgttgagaaaggcaagaagatttttattatgaagcgttcccagtgccacattgttgaaaagggaggcaagcataagactgggccaaatctccatggtctcttcgggcggaagacaggtcaggcccctggacactcttacatagccaccattaagaacaaagacatcatctggggagaggatacactgatggagtatttggagaatcccaagaagtacatccctggaacaaaaatgatctttgtcggcattaagaaggaagaggctgggcacggtggctcacgcctgtaatccgagcactttgggaggctgaggcagacagatcacgaagtcaggagatcgagaccatcctggctaacacggttaaatcccgtctctactaaaaatataaaaaattagccgggcgtggtggcaggtgcctgtagtcccagctactctggaggctgaggcaggagaatggcgtgaacccgggaggtggagcttgcagtgagccgagatcgcgccactgcactccagcctgggtgacagagcgagactccatctcaaaaaaaaaaaaacaaaaaaaaaaaaaaagaggaagaaagggcagacttgatagcttatctcaaaaaagctactaatgagtaa

SEQ ID NO: 294505 - DNA, 1000 bp, Homo Sapiens
ctttgggcctattaaagacacctgctcagtatgatgcttctgagctaaaatcttccatgaaggggctgggaaccaacaaggactccctcattgagatcatctgctcaagaaccaaccaagagctgcaggaaattaacagagtctacaaggaaatgtacaagactgatctggagaaggacattatttcggacacatctggtgacttctgcaagctgatggttgccctggcaaagggtagaagagcagaggatggctctgtcattgattatgaactgattgaccaagatgcccgggatctctatgacgctggggtgaagaggaaaggaactgaagttcccaagtggatcagcgtcatgaccgagcggagcatgtcccacttccagaaagtatttgataggtacaagagctacagtccttatgacatgttggagagcatcaagaaagaggttaaaggagacctggaaaattctttcctgaacctggtccagtgtattcagaacaagcccctgtatttcgctgaccggctgtacgactccataatgggcatggggactcaagataaggtcctgatcagaatcatggtctcccacaatgaagtggacatgttgaaaattaggtctgaattcaagagaaagtatagcaagtccctgtactactatatccagcaagacactaagggtgctgtacctgtgtggtggagatggctgaagtccgacacagcacgagcgtccagaaatggtgctccccatgcttccagctaacaggtctagaaaacccgcttgtgactagcagtccctgtggctgttcctgtgaggatgacgttagcattacccccaacctcattttagttgcctaagcattgcctggctttcctgtctagtctctcctgtaagccaaagaaatgaacattccaaggaattggaagtgaagtctatgatgtaaacactttgcctcctgtgtactgtgtcataaacggattaataaactgaatttgtacttt

SEQ ID NO: 294506 - DNA, 1000 bp, Homo Sapiens
caaacctgttttaagggcaacctgcctttgttctgaattggtcttaagaacattaccagctccaggtttaaattgttcagtttcatgcagttccaatagctgatcattgttgagatgaggacaaaatcctttgtcctcactagtttgctttacatttttgaaaagtattatttttgtccaagtgcttatcaactaaaccttgtgttaggtaagaatggaatttattaagtgaatcagtgtgacccttcttgtcataagattatcttaaagctgaagccaaaatatgcttcaaaagaagaggactttattgttcattgtagttcatacattcaaagcatctgaactgtagtttctatagcaagccaattacatccataagtggagaaggaaatagataaatgtcaaagtatgattggtggagggagcaaggttgaagataatctggggttgaaattttctagttttcattctgtacatttttagttagacatcagatttgaaatattaatgtttacctttcaatgtgtggtatcagctggactcagtaacacccctttcttcagctggggatggggaatggattattggaaaatggaaagaagaaagtaactaaaagccttcctttcacagtttctggcatcactaccactactgattaaacaagaataagagaacattttatcatcatctgctttattcacataaatgaagttgtgatgaataaatctgcttttatgcagacacaaggaattaagtggcttcgtcattgtccttctacctcaaagataatttattccaaaagctaagataaatggaagactcttgaacttgtgaactgatgtgaaatgcagaatctcttttgagtctttgctgtttggaagattgaaaaatattgttcagcatgggtgaccaccagaaagtaatcttaagccatctagatgtcacaattgaaacaaactggggagttggttgctattgtaaaataaaatatactgttttg

SEQ ID NO: 294507 - DNA, 1000 bp, Homo Sapiens
agggcagtgcagaagggaaatgtgggtttgcagcccccatacagagtccctactaaatgctagtccatggaagcatccaggagggaggctgtaccctgcaaagccacaggtggggagctgcccaaggccatgggagcctacccctggcatcagcatcacctgggtgtgagacatggagtcaaaggagatcattttggagctttcagatttgactgccctgctggattctagacttgcatggggcctttagcccctttgttttggccaatttctcccatttggaatgggtgtatttatccaatgcctgtactctcattgtatccaggaagtaactcacttgtttttgattttacaggctcataggcggaagggacttgccttgtttcagatgagactttggactgtggacttttgagttaatgctgaaatgagttaagactgtgggggactgtcaggaaggcatgattggttttgagatgtgaggacatgaaatttgggaggggccatgggtagaatgatatggtttagctgtgtccccatgcaaatttcatcttgaactgtagctcccacaattcccctgtgtcatgggagggacccagtgggaggtaattgaatcgtgggggcgggtccttcccatgctggtcttgtgataatgaataagtctcacgagatctgatggttttataaagaggagttcctctgcacaagttctctctctttgccttctgccatccatataagatgtgacttgctcctccttgccttctgccatccatataagacgtgacttgctcctccgtgccttctgccatgattgtgaggcctccccagccatgtggaactgtgaatccattaaacctctttcctttataaattacccactctcggatatatctttattagcagtgtgacagcagactaatagagggattaaagataaaaattttggctggatgcaatggctcacgcctgctatcccgctataaaaaagaaaaaaaaa

SEQ ID NO: 294508 - DNA, 200 bp, Homo Sapiens; identical to SEQ ID NO: 224798

SEQ ID NO: 294509 - DNA, 1000 bp, Homo Sapiens
atttggtacattcctcccatttactttattattgtacacattaaacacacagtagcaaattttgaacgatgtgatataatctaacaaatctgagccagttattagagttgcagaatagaaacttgaagtgctaaatggaaaaatccaaaggaaattttttaaatgcagattctagctgaaaaattcaactataagaaaatcgtatttatataacatttactatttttgaagactagtaataattttaattctttaaaaagtgaaagcttgttgtaaagatattttctttttgttattagaaggaaatacagagagaaaaatttatttctttcatgggcatttggtaatttcagtctttgactgatttgtaagcctagaatatactaagctgaatagcagctctttggcctcagaattttcagtagccagtatttctgattaactaagttgaaactcttattagaaactttcagttggtattactgtattctagaagatataaatgagaggtttggcttcatctcagtttagaaatttattcaaagctaaagatgtatatgtatatatatatacttttgtgtgtatatatacacgtatgtgtgtatgcagtttttcaggttatatatagagtttctataaggattttttaaatggacaagcaatagggggttgaagtgtttatctgatttgttaaaattttgtgtataaccagatttttaaaaagtgatagtcacagtgctaagtgatctagttggctgctattacaccttagaaattgagtttacacacacacacaattacctgtttgtatggtgctcatttcttattctcagatataatgtgtgaccgtgatacagtgagaaagattctaccaaccactgtttcactactttttagtcaaaattgggtatgttcttagtattcattagtgagaatcataaagtattttgtagaaggcccaaatcacagaataaaggactaagagtggattcactgacat

SEQ ID NO: 294510 - DNA, 1000 bp, Homo Sapiens
aaccccccgatcatgtctttcacagtggtccattcatttattctgatatcttggattacaagaatcttcgggagatcgtggtaaacaaccgcatcacctggctgtttcattacagcgctttgctcagcgcctttggagaagcaaatgtttccctggcgagagcagtgaatataactggcctgcataacatcctggatgtcgctgcggaacacaatctgcaattgtttgtgcctagcacgattggggcttttggacccacctctccccggaacccaacccccgatctctgtattcagagacccaggaccatctatggggtgtccaaggtccacgcggagctcatgggagaaactatgcagtccagattttccatgatgccacaaagcatggcaaattcgagtgcaacctggaagcctgcacgagactgcccatgatgtacattgacgactgcctcagagccaccctggaggtcatggaggccccagctgagtccctttccatgaggacctacaatgtcagcgccatgagcttcacacccgaggagctggcccaggaggtcctcaagcacgtgccggaattccagatcacatacaacgtggatgccgttcgccaggccatagcggatggttggccgatgaactttgatgacagcaatgctcggaaggactgggggtggaaacacgactttgatcttccagagttggtgactgccatgttgaacttccatggttctgaaagcagagttgcccaagccaactgaaagaatctggaagaggagctcctgtgtcctggtccactgtcaagggagaactgtcacaactccaaggctaccggtggttattagttttctgctcacatgtttgtgtgtggcgttgctgggatgtgccttgtgttgctacacaaacagcgatcccgaagtctgccagcaagatagatggcctggagtccagaacagactggattagtgaaagctactgcagtgctttggacacttactatg

SEQ ID NO: 294511 - DNA, 1000 bp, Homo Sapiens
tgggtaatccagtgtactggtttttcctaatgtatttggtactatagtgtatgaaccgagaataatcgagtcaagtgaaacccccttttccagtcataaaatgtctcattcattatactaaaaggagctgttcttttaaaaaagccttcttatttttctactaaatttttagataagtataacctactatattcctcaaatctaggcttacatttgagaagggtaagctgtgttttttcctccgaagagttgggctgtgatctttacaacgagacgtcgtttttcccagcatatttctgttttctacctaaacattaagatacacatttttctaggcattagaaatagtacaatattgcctgtggtctttccatttgacacctgtggctggaatatatgtgtcgctccagaatttatatgttggaatttaaatgcccctgtgtgatagaattaaaaagtggggactttgggaggaggttaagagtgcaattagagaccttataaaagaactcaatggaagtagctaggctttttagcccttccaccattagaggacactgtatttgtcctctctggagaacacagcaacaaggtgccatcttggaagaagagacccaccttcaccagacattggacctattagtgccttgatcttggacttcccagtgtctaaaactgtaagaaatttatttctttccagtttcataagttacccagtccaaggtactgtgttatagcatcaggaacatactgagatggcatatttattgtggaaattttggtcctcatacttaatgaatgggcttcaagtatttcgttagtttttaaaaacagggctcctcctttacaattgatctcatttttattttttaaaagttagcttttacaacatagaactggaaaaaatctctactcagacctctagagtgtcctagattttgtggcagaatcactatggataatttataggtgcttgtgatctcatctgtgtattatttac

SEQ ID NO: 294512 - DNA, 1000 bp, Homo Sapiens; identical to SEQ ID NO: 119152

SEQ ID NO: 294513 - DNA, 1000 bp, Homo Sapiens
ctccctcttgaggtcacagatgttgaagttggaatctcgctccttcccctgactaccatcctaggctgggcctcaagactagtgaggcctgtccccaccatccctggccttgttgtggggctcaggaactcagagtcccagtgttgagtctgggagcactaggtcttcatagttccaggcccagagctacagctgggctgggagcatgtgtgtgcactgtaagaaggagctgatgatactggccacgtgctggggttcgctcatgtggacacagtgattgcctgggacttccacaaactggaactgctggagaggggagggggtgggtggtgaggtgtggccagaggagcctagggagctccatgggccccggggtcagggccctcccacagcattccagctccctgcaggtcaggagcgcctcccacagtgagtttcccccacactcggctccttggagccccgacagtccatagcaccccaggaggtgtctaaccctagggacttggaggcctcccaggggtctaggccagctgagttgtgaagttgcatggcagggacagggcggggccgaggccagggttgctgtgattgtatcagaagaggtacccgtgagaaaagataatgagatgggggcgtgaacagcctgcagacttgtgtctgccttcaagaagccagacagggccgggcgcagtggctcacgcctgtattcccagcactttgggaggccaaggcaggcgggaggccaaggtgggcggatcacgaggtcaggagatcaagagcatcctggttaagacagtgaaaccccgtctctactaaaaatacaaaaaattagccgggcgtggtggcgggcgcctgtagtcccagctactcgggaggctgaggcaggagaatggcatgaacccgggaggtggaacttggagtgagccgagatcgggccactgccctccagcctgggcaacagagcgacactccatctcaaaaaaaaaaaaaaaaaaaa

SEQ ID NO: 294514 - DNA, 1000 bp, Homo Sapiens
tgagaactcctcctcctgggactctcagaggatccagaactgcagcccatcctcgctgggctgtccctgtccatgtatctggtcacggtgctgaggaacctcctcatcagcctggctgtcagctctgactcccacctccacaccccaatgtgcttcttcctctccaacctgtgctgggctgacatcggtttcacctcggccacggttcccaagatgattgtggacatgcggtcgcatagcggagtcatctcttatgcggactgcctgacacggatgtctttcttggtcctttttgcatgtgtagaagacatgctcctgactgtgatggcctatgactgttttgtagccatctgtcgccctctgcactacccagtcatcgtgaatcctcacctctgtgtcttcttagtttcggtgtccttttccttagcctgttggattcccagctgcgcagttggattgtgttgcaattcaccttcttcaagaatgtggaaatctctaattttgtctgtgacccatctcaacctctcaagcttgcctgttctgacagcatcatcgatagcatgttcatatatttcgatagtactatgtttggttttcttcccatttcagggatccttttgtcttactataaaattgtcccctccattctaaggatttcatcgtcagatgggtagtataaagccttctccgcctgtggctctcacctgccagttgtttgcttattttatggaacaggcattggcgtgtacctgacttcagctgtggcaccacccctcaggaatggtgtggtggcgtcagtgacgtatgctgtggtcacccccatgctgaaccctttcatctacagcctgagaaacagggacattcaaagcgccctgtggaggctgcgcagcagaacagtcaaatctcatgatctgttccatcctttttcttgtgtgggtaagaaagggcaagcacattaaatccctacatctgcaaaaaaaaaaaaaaaaaaaaaaaaaaa

SEQ ID NO: 294515 - DNA, 1000 bp, Homo Sapiens
tccaggccatgggtaagaagaaagtgttggtcaaggtgcatctcaaggacaagtttgtcatagatgtggacaaaaatatcagcatcagtgatgtgacacccagttccttggtggttctaagaaatgacagctacactttgcacaagatcctacccaacaaggtggactcattggtgtcactgatgatggtgaagaaagtaccagattcagcttatgaaatgattggtagactggataggcagatcaagaagatcaaagaagtgatcgacctgcctgctaagcatcccgagctcttcaaagcactgggcattgcacagcccaagggaatgctgcttggaagagactgttggcctgggctctggctcatcatagggactgtgtacctttattcatgtctctggctctgaattggtacagaaattcattggggaatttctgtgatggcagagaaaatgctcatctgtcatcttcatggatgaaattgactcttttggctcctcagagctggagggggatgctggagggaacagtgaagtgcagcagatgatgcttcgagggtggctttgaggccaccaagagtatcacggtttatcacggctgctaatacgattgatatcctggactcggcactgctttgcccagggcacattgacagaaaaattgaattcccaacctgcaatgagtaggcctggctggtcactttgaagattcattctcagaaatgaacctgacccaggggatcaacctgagaaaaattgctgagcttatgccaggagcatcaggctgaagtgaagggcatgtgcacagaaaccggcatgtatgccctgagtagcgagtccatgtcactcagaaggactttgaggtagtccaaagtcctatctcatgccaaaggacagtgaggaaaaacatgtccatcaagaaactatggaattgagggcacatcctttgtgtgtatccctacaataaaactcagtgggacaagcaaaaaaaaaaaaaaaaa

SEQ ID NO: 294516 - DNA, 1000 bp, Homo Sapiens; identical to SEQ ID NO: 119153

SEQ ID NO: 294517 - DNA, 1000 bp, Homo Sapiens
gatattaaactcagggttattggacaggatagcagtgagattcatttcaaagtgaaaatgacaacacctctcaagaaactcaagaaatcgtactgtcagagacagggcgttccagtgaattccctcaggtttctctttgaaggtcagagaattgctgataatcatactccagaagaactgggaatggaggaagaagatgtgattgaggtttatcaggaacaaatcggaggtcattcaacagtttagacattctttttttttttccttttccctcaatccttttttatttttttaaatagttcttttgtagcatggtatttaaaacggaattgaaaacaggcactccatctctttaaaacatctggtaatttgaattctagtgttcattattcattattgtttgttttcattatgctgatttctggtgatcaaggctcaggcctcttcatattgccctctccttttataaaaattatgtgtgcacagagaggccacctttttcaggactgtacattttcagatgataagattgaccaatgcaagtattcataatgactttccagttggccctgattttcaaccatgtgattgtttcactcctggactatgacttttggtgggagatggaagttttttagagaactgagctgtggaaaaatgacctctccttaacaacttgaagctatttttaagatttgagggtctggaccaaaagaaaaggagcatcaggttaagtcaaggtgacagataaggttgagagtaacgactaactccaaagatggcttccctgaagaaaagacatttgaagattttttttttcttaatcttgtcagaagatcccagaaaagttctgattttcattatcaataaaggtatacatgcagaaatgaatacaacagaatactgctcttttttatttgtactttttggcctgggatatcgggttttaaatggacattgtctacaccagcttcattaaaataaacaatatttgtaaaaa

SEQ ID NO: 294518 - DNA, 1000 bp, Homo Sapiens
ctgcaaagagtctgtgactctgaaaaggtctaaaaaccactgcttcacatatatgtatgtatctttgtttgctggaggataagacactgaaaatgatatttatagtgatttacacaatagaaatgaggggtcaatttttacataaaaaagaaaaaccacgtattttttaaaaaagaaaaaactattggatgggctgggtttagtaactcatgcctgacatctcagcacttcaggagtacggagcaggtggaccatgaggtcaggacttccagaccagcctggtcaacatggtgaaaccctgtctctcctaaaaatacagaaaattagcctggcatggtggcatgcacctgtaatcccaactactcagctgaggcaagaaaatcgctggaacctgggaagtggaagctgcagtgagccgagatcaggccattgcactccagcctgggcaatagggcaagagtccatctcaataaataaataaataaataaataaataaataaatacctatcggttaacttgtattatctattaactaaccttcaataatctaacatttaacttggagttttaataaccagatgtgtaattaattggagatttttttaagtggaaattgcagtgtttgctccattttaagatgcatagctacatggttattttgtctccattgcttttgagggtgaagttcaacaacactccaccatgtctgagaatgtgtgtattctaacctgtaacaccacctatgttatgcatgtagatatattgccgcatatctacattttttgtagatatataaaaatctttatatattatttaatatgcaattcttaatgactattaaaatttagcatagtgtaatctgaaaattagtgtttcataagggaattgtaagaattctatattatgttaacaaattttagagataatgtattttcctgatgtgtcactttttgatatcataaatatttgaatttgtttgaatggaaaaaaaaaaaaaaa

SEQ ID NO: 294519 - DNA, 1000 bp, Homo Sapiens
agtggccctgcactcaagctccgcaataatcagtcaactcagtgaaaacatcaattcactgctgaacccctggccccagagcccccagcagggccctctgaggtggagcagctacaagatgagaccaaccacctaaggaaggagctggagagtgtgggaagacagctccaggctgaggtggaaaacaatcagatgttgagtctcctgaacaggagacaggaggagaggctgcaggaacaggagaggctgctggacaaggggtaggagctgctggaacaggagaggcttcaggagcaggatgagaggctgtggcagcaggagactctgtgggagctggagaggatgctggagctggagtgggaagccctctacaagcagcaggccgagccccacagcagctttgaggagctggaataatgagaacaagagtgcactgcagttggagcggcaagtaaaggagctgaagcttggagaacctggaagctaccagccagcagaaacagcagctaaagcccagttgagcctcatggctctccctggggaaggatatggaggaggacatctggacaatgaggaggaggcacctcggcccatgctgaacattccaggggacctggagagccgggaggccatggtggcatttttcaactccgctggagccagtgcccaggaggagcaaagcgtgtgctgccagcccctggctcacccagtggcctcatcccagaaaaagccagaggcagcggccccagccccagagactgggggtgaatctgtgtgtggggacacccactgggccctgcaggaggccatggagaagctgcagcaactttatggaaggagaagatggacctgaaggagctggtggagaaactagagcttcagttcatccacctctcaggacagacagacaccatgagaaagtacatcagccagggggcagtgccaaagacgcagcactgggagaggaggacatcgtcaggctggcccaggaccaggagga

SEQ ID NO: 294520 - DNA, 1000 bp, Homo Sapiens; identical to SEQ ID NO: 119154

SEQ ID NO: 294521 - DNA, 1000 bp, Homo Sapiens
tccagtcatgccccctcccattccaggcattcctctgggaaaattaccaggcactcccccaggaaagccacctggaaaagagccatactgagctcctgactgtcgtctggcttcttcctccctctgggctctctcatgctcttctcgagccttcttaactcgttctattctttctttgatctctcactcttcacattttcgctcatactttctccgatgttctgcaattttctgtgccctatgttgaacttctttcagcattgcactagcatcttcatcataatccaatttacaggcaagggcaagatcatgggctgcttcttcccagtggcctagaagtctgtatgctttcccctgccacttgtgaggctgagctgaatcaggatttatttcaatggctctgtcacagtctcggatggcagcatttggcttctgtaatttgacgaagacactggccctcttggcatacaaaatggccaagcgaggattcagcttgatggcatctgtgaataagtcaacggctttctggagttcaccatcatttgggtctccaatagcagccactttttatcatttgcctgatccatcatctcctccgttatctccgcattttcatctcccgtttcttgaggagcatcagtgtctggttcaatcacaccttctttatcaatttctagatcactttcctcacttgatgtttcatatgcctttaagtcttcctccaccttcttactatcaggtttttcttctttggtattttcttctgatttagctttctgagtagcaggtggtactttacctcccatgctctccacccactccctcagaagcgcatttcctcggtgtgcagaacgctcggatcctgcttacacatcttcacaaaggcctgaagctcgttcactttgcgggggtccatggtagggaggtggtgggcgaagctggggggctgcagcccggttccaggcccaggcgctggctcggcgtgactgcgcagaagggg

SEQ ID NO: 294522 - DNA, 1000 bp, Homo Sapiens; identical to SEQ ID NO: 119155

SEQ ID NO: 294523 - DNA, 1000 bp, Homo Sapiens
gtgctgtgggtgggagcacccatcctgtcctggagccaatggtgtggtaatgtggtggtgcagtcctcgggatgttctcagtaccatagaaagccaactggtagatccaaggagaggtctagattatgagaataccagattctctttttggccacaatacttactaattagctgtgtatctttttgtccagttgtaagatttctctgtgaaacagtccttttctgaaaatgggatgtctacttcttttgtaaagtgtaaatgcattggggttaaatctacaaatctaaggaaactggtaggcaatctctccaaaggtggactctgcagcaggggtaaagcctaccagccaaggaatccgaaaggtgggcagagcaggggcttggaaggaatctggttcctcagtggcagtggaagcaggatcattgttgaaagtgtggggttgtccatttttccagttgtctgagagcttgtctttccttcagtctgtatattgtgaatgacaagctgattgtgaggaatgccagcacgaaggagacccagagtgccttctccatcccagtgcctgcaccctcctccagctccttgcctaccctctcccagaagcagcaggaaatggtggagactgtctccacccagtctgggatgaaacttgagcagtctcagaagtgccttcaggacagtgagtagaactacaccaaagctgaccaggttttcactattctccagaccgaaggcaagatctcagtggaggccttcaagcaaatcccctaaaaggagcccttcgatgtcttctttgtcctcattcacatcctctttgtttcctctttttaccagcctaaggccgtgcccaggactggggttggcagcctggctcaccggaaagccaaagttaacttgcaggccgggtaacataaccacttgaagaaccagttgttctgtgtattcgccccactcatgatcaccatttattttcataataaagagtgatgttacatgttg

SEQ ID NO: 294524 - DNA, 1000 bp, Homo Sapiens
acaaaacaaaacaaaacaaaaaccaggtgtggtagcgtgcatctgtagcctcagctactcagaagcctgaggcaagaggatagtttggacacaggagatcgaggcggcagtgagctatgatcgtactacggcactccagcctgggcgacacagcacttttctgtttccagacaacaacaagaaaacaaaaagatggatagaataatggcaataaaatggagaaaaagtaggctgactcaggaaatgcttagaaagtgcagccatacctcaaagatattgtggatttggttccagaccatcacaataaagcaaatattgctataaagcgagtcaaacaaattgttttgtttccttgtgaatataaagttatattgactgggtgtgatggctcatgcctataatcccagtactttaggagatggaggcgggaggatcacttgagatggaggttgcagtgagccgagatcacgcgactgccctccagcctgggcaacggagtgagattcagtctcaaaaaaaaaaaaaaaaaaagaaaattagccaggcgtggtggtaagcacctgtaattccatttactaaggaggctgaggcagagaattgcttcaacctgggaggcagaggttgcagtgagccgagatcaggccactgcactccagcctgggcaacagagcgagactgggtcttaaaaaaaaaaaaaaaaggccgggcgcagtggctcatgcccgtaatcccagcactttgggagaccgaggcaggtggatcacaaggtcaggagttcaagaccagcctggccaagatggtgaaactccatctctactaaacatacaaaaaatagccaggtgtggtggcatgtgcctgtaatcccagctactctggaagctgaggtagggaattgcttgaacctgggagttggaggttgcagtgagctgagatcacaccactgcactccagcctgggcgacagagctagactctgactcattatgggtgtgacattgaaa

SEQ ID NO: 294525 - DNA, 772 bp, Homo Sapiens
  misc_feature (689)..(689): n is a, c, g, or t
  misc_feature (714)..(714): n is a, c, g, or t
aaagcgttctcggcggcagcgcaacaactagaaccgtgagaacgcgtccagcaaccgcgacccacgacgacgtcacctcgggcacgcccaaggagaagaaagcccagacctctaagaagaagcagggctccatggccaaggcgtagcggcaggcgtcccccgcagacctccccatcgaccccagcgagccctcctactgggagatgatccgctgcgacaacgaatgccccatcgagtggttccgcttctcgtgtgtgagtctcaaccataaaccaaagcgcaagtggtactgttccagatgccggggaaagaacgatgggcaaagcccttgagaagtccagaaaaaaaacagggcttataacaggtagtttggggacatgcgtctaatagtgaggagaacaaaataagccagtgtgttgattacattgccacctttgctgaggtgcaggaagtgtaaaatgtatatttttaaagaatgttgttagaggccgggcgcggtggctcacgcctgtaatcccagcactttgggaggccgaggcggtcggatcacgaggtcaggagatcgagaccatcctggctaacacggtgaaaccccgtctctactaaaaattcaaaaaaaaaattagctgggcgtggtggcgggcgcctgtagtcccagctattcgggaggctgaggcaggagaatggcntgaacctgggaggtggagcttgcantgagccaaggtcgcgccactgcactccagcctgggcgacagagcgagactccatctta

SEQ ID NO: 294526 - DNA, 1000 bp, Homo Sapiens; identical to SEQ ID NO: 224800

SEQ ID NO: 294527 - DNA, 1000 bp, Homo Sapiens
aggttggaatttctcaagagaacaagaaggaagtggaaaagaaactgactgtgaagcccttagaaaccaagaacaagttctcccaggtgaagctgttggcaggagctgtgaagcgtaagagctcagagagtgacaacagtgtgaaaagactgaaaccggaccctgagccagatgacaagaatcaagagccctcatcctgcaagtctctcagaaacacctccctgagtggctcctccatccactgcccctctgctgcagtctgtatcagcatcctcccaggcctgtgcacctactctgggagcagcaactctgagtccagcgcagacagtgaaggcaccatcaatgccaccggaaagattgtctcctttatcttccaaaccaataccttccttgaggcccctagtttctctgtccttacacagggagctcctccccaatggtagatcggaccattcacgctgccttacaggcattatgtccctcaaaaaaaaactcctttgcctgcatcctgtgcacaacatgacatttttaaccaatccaatctaaaaatgtgctagaatccatctgtggcctgaatcgtgtttggtttctcgttctactccagtgcagatgaccaaacctgtcctgctgccactttcctcactgatattgggaggagggaaaggcccagctgaagttctactaaaaatgccctaggagaataggcaccggtcgacttgccaaagggtttaggcttcattgctttctgttttttacttttccccaacaacacaaagaagtaagggcagttattggacaggtgttatttaaacattctattgtagatgaatgtgttgtttggttctactgcattgtggagcatgtgggggaagagaactgacccgggtgatgaaatggagcccttccctggaactcaccagtccttgatgttgtgtgactaagtaaagatgataaacgtcatctgctgggggtgtcacttcacacttggcatgcactgtga

SEQ ID NO: 294528 - DNA, 1000 bp, Homo Sapiens
gggctgggttgatcctctgacctggctaagcttccaaggccctcctggagggccaggaatcgggccgggggttgggccaggctctgaggtgtgggggattcccccttgccccccgccgtatgagttatgtggggggatggcgtactgtgggcctcaggttggagtggggctagtgccccaaggcggcttggagacctctcagcctgagagcgaagcaggagtcggggtggagagcaactccaatggggcctccccggaaccctgcaccgtcccccctggtgccgtgaagctggagaaggagaagctagagcaaaacccggagaagtcccaggacatcaaagctctgcagaaagaactcgagcaatttgccaagctcctgaagcagaagaggatcaccctgggatatacacaggccgatgtggggctcatcctgggggttctatttgggaaggtgttcagccaaaagaccatctgccgctttgaggctctgcagcttagcttcaagaacatgtgtaagctgcggcccttgctgcagaagtgggtggaggaagctgacaacaatgaaaatcttcaggagatatgcaaagcagaaaccctcatgcaggcccgaaagagaaagcgaaccagtatcgagaaccgagtgagaggcaacctggagaatttgttcctgcagtgcccgaaacccacactgcagatcagccacatcgcccagcagcttgggctcgagaaggatgtggtccgagtgtggttctgtaaccggcgccagaagggcaagcgatcaagcagcgactatgcacaacgagaggattttgaggctgctgggtctcctttctcagggggaccagtgtcctttcctccggccccagggccccattttggtaccccaggctatgggagccctcacttcactgcactgtactcctcagtccctttccctgagggggaagtctttcccccagtctccgtcatcactctgggctctcccatgcattcaaactga

SEQ ID NO: 294529 - DNA, 1000 bp, Homo Sapiens; identical to SEQ ID NO: 224803

SEQ ID NO: 294530 - DNA, 1000 bp, Homo Sapiens; identical to SEQ ID NO: 224804

SEQ ID NO: 294531 - DNA, 1000 bp, Homo Sapiens; identical to SEQ ID NO: 224805

SEQ ID NO: 294532 - DNA, 76 bp, Homo Sapiens
gctgtacatgatgacaactggctccctctactgaactgccatgaggaaactgccatgtcacccttctgactacagc

SEQ ID NO: 294533 - DNA, 1000 bp, Homo Sapiens
tgtaagcctcacttaaaacttaattgcctgtgacatgaaagagccaaagcatggtacttttttttttttccttctttttgagacggagtttcgctctgtcgtccaggctggagtgcagtggcatgatctcagctcactacaacctctgcctcccgggttccagagattttcctgcctcagcctcccaagcagctgggattacaggcatgtgccaccacgcccggctaatatttttgtatttttagtagagacagggtttcaccatgttggccaggctagtctccaactcctgacctcaactgattccacccaccttgacctcccaaaatgctaggattacagacgtgagccaccacgtctggccacttttgattacctcaagtaatataattacctccagtgaagggccagttcaccttccagcaactctcctacagagaagggtaaaatcttcactggtcctaagtcgacctctgcttgccctactttactctctccttcatgggtataaagtgacgactgtattcaaaaccctctgattctctccacactatttaatgagctcctactatgtgccaggccctgtcctaagtgttgtgggtgtgacagtgaatgagacagaaagtttccgtgctttcatggaggttaaattctgggcagggagaaatggacaataagcaagtaaaaaaatgaaagataattttcaactggtgaagagggctatgaaaaaaataaaacagggtagtgtgacactgccatagaaggtgtctttagttggggtggccaaggaagggatgcctgaggaggtaacacttgagcatgacttaagtgaccacgaggcaccgggcacaaaacatcccaagcagaagaaacaacaaattctaaagtgggaatgagtctgggtgtttagaaacagcaaagggggccaggcatggtggctcacacctgtaattccagcactttgggaggccaaggcagacagatcatttgaggacaggaa

SEQ ID NO: 294534 - DNA, 1000 bp, Homo Sapiens
gggtgcacacagccctcttggaccccgggaccggctcaggctcaggctcggcgtcagcaaagggacctgcgcggcgccctggggcggaggaggcccgacggtcagtggccagtgccgtgcggctgacggaggtcggggcgcaacgggaccgggaggagcgcccagggcgggggtgccaggccccctccaaccgcgggcggccgcggcggatgggaagccgtgcacgacgagcacaatctccatggggaggagaacaggaatgttcctgtgagccccgccgcgccctaccgccagcgcagcccagcatcgcgggtcccctcctatcccaccggagaacggggtcctcactcccagcttcagccgagccctggccccgcaactgcctgaaggcacgccccctgcacctgcccacctcaggtcccgcctccagcccagtggccaagatcgcgggtctctacaatgacttggagccaccccggaagaccatgcgcagaggggtgctgatgaccctgctgcagcagtcggccatgaccctgcccctgtggattgggaagcctggtgacaagcccccacccctctgtggggccatccctgcctcaggagactacgtggccagacctggagacaagccccaggaggactattctatcctgtttgaagacacctcctatgcagacggctactcccctcatctcagtgtggcccagaggtacctggtagcttctaaggagcccaagaaaaagtgacgctgcccggcggactcgacgtcctccaccatcttggggcaggacagcagaggatgtgctgggattaaacagacatcccccctccacacatctcctgggttttacttctccaaacccttctcccctccccagatatggtgacctggggagctgaaggctgggggagaggtgaccatatgtggccccaccgggcattcactctttcagctcagagtttctcttcctttccaatacaggctctacatgaacacaaa

SEQ ID NO: 294535 - DNA, 75 bp, Homo Sapiens
gtcagatgatttgaattgataagctgatgttctgtgaggtacaaaagttaatagcatgttagagttctgatggca

SEQ ID NO: 294536 - DNA, 993 bp, Homo Sapiens; identical to SEQ ID NO: 119160

SEQ ID NO: 294537 - DNA, 1000 bp, Homo Sapiens; identical to SEQ ID NO: 224808

SEQ ID NO: 294538 - DNA, 1000 bp, Homo Sapiens
aaagcagacactactccagtatgtcccagtagaacactcatttgcaatgtgttgagctccgttaagcacacacacactcacacaacaggcttacgaggctcaggcctggcgggtcagaaagcccactccctctcccaaggccactggatcccaggagaagcccagactggcgatactacaaaggtctccagggcctggcagaccccagagtcaggcctgctgttaaaaagtgagagtgctgctgttccattcctggggtcccaagcacttccctttaccccaggacccagggcagcctgcagggcagctggcggtggccttggccatttgcccccagcctccagctggctcctgagctctgcaccagggggtttggggaccacacaggcacctgccttcctagatttccctggctcacttttctgcaaacactggatctgccaggcctggggattggggggcaggaaagaggcccccatccagccccctccaggccagtgtgcacagtgcaccgaggggtcatccgcacagagcgaggtgcaagctcgatgtgtaacctggctgcggcacccgacatccccggtctcggggtgttgatttatttctgaataactttttgggtatagaaaccaattttttttaatatatgacatgtatatgtacacactcatgtgaaatatgtatactttggggggatctatttatgttccagtgggagtcactctcttctgtcgggaatcttatctgctgctttgtgtctttggtcagattcctgacaatttagtttcctgttgtaaaggtgcttttcctggggtgaactaaacctattgattttttttttttaagatttttttttccttttgatttaatatactgagaaagaaatgggagacttttgaatgttaacaagatccattttaggagtgtttggggttgtgtattaaatagccattcattctggaactcaaggacaggactgtaataaaatggaatggaaccg

SEQ ID NO: 294539 - DNA, 1000 bp, Homo Sapiens; identical to SEQ ID NO: 224810

SEQ ID NO: 294540 - DNA, 1000 bp, Homo Sapiens
gcggagcgcacgtgtgtccagagccagaaggattacatatggagcctggatgccacgtccatgaagttcccagcccgacttatcatccaggtctgggacaatgacatcttctcccccgacgacttcctaggggtcctggagctggatttgtctgacatgcccctcccggctcggcacgccaagcagtgctccatcaggatgatggacgccgaccccaagtggccctatttcatccaatacaagcacttctccctctttaagaagaagactgtgactggctggtggccttgccaggtcctcgatggtggcaaatggcgcttgtcgggcaaggtgaagatgagcctggagattctgtcagagaaggaagccttaatcaagccagccgggcgaggccagtcggaacccaaccagtaccccacacttcatcctcccctacgcaccaacacctctttcacgtggctgcggtcaccagttcaaaacttctgctatattttctggaaacgctatcgcttcaaactcatagcctttatggtcatatcgattatagcacttatgctgtttaacttcatctattcagctccgcactatttggccatgagctggatcaaacctcaacttcagctgtatcctcccattaaaatattcaatatcatcaattcactaaacaccagcaacgccagctcttccatccttcccacccaggatccaaacctaaagcctacaatagaccatgagtggaaactccacccaggacccacaaatcacctgagtgatattttcccagaacttccagccccaggagactaattagtccatgctgcctggctttcctcctgctaccaacagccctccccttgggctggctaccagttctttgtttctatcttctagaatatatgcaagatgctaggaatattctggctattgtgttcagaaatcactttcaacaagacgagcagagctgtaattttccactgaaataaacaagttctataacaga

SEQ ID NO: 294541 - DNA, 1000 bp, Homo Sapiens; identical to SEQ ID NO: 119161

SEQ ID NO: 294542 - DNA, 1000 bp, Homo Sapiens
tttctagatctgctcatcagcacttaaccttccctcctctaaaggttactaaagaagcctgaagtaggtaaagagtgctcctcagcttcttatccttccactctttacccagcagatttcattcaatgccttagccaaggagtccagcacctgtctcccctgctaataattgtccttagagatgctagtactttaatccaggtatagcagtttcccgttattttcttgcttgtcgttcccctacatttcctcctgatttcccaagactctctttgtggcttttgagggtcagccaaggagcaggcaagtgagtgaacaatcctcaggaaaagaaggaccattttagcttaacacttccttttttttttttttttttttaagaagaatataggtaaacaggtaatgattcttgattggagataccatttgactcttgatgagagttgtacgaagatggaaatgagggatgattccaggcgttttagggggaaggctgcagataccattctaacccccaagatactgtgttctcaagacctcttagaactaggtgttgtcagggataatttgaggagggcttagtcttcagaacaatcctgcagtcttgacagaaatctaaaatctccaaaaactcctaccctttaaccttaccctagggggaactgatctatgaatattacatgtgtgattatgaaaggtgaagttgagtgagaggagttgaggaacgtggaagacagtgagctctcaccctaacactataagaagcatgatctcaatagaccaataattcacctttttatacatctgtaaataaatggaatgtttttaagaatataattatgtcagatttagcattttcttttatatattaaatatatatatctttccttttctgctttcgaaaagtgactatttttttagaaatctaagaacagaagtttggtgattgaaaggtagaatatataaacctgaaataaagcagttaaaacaattaaagcag

SEQ ID NO: 294543 - DNA, 1000 bp, Homo Sapiens; identical to SEQ ID NO: 119162

SEQ ID NO: 294544 - DNA, 1000 bp, Homo Sapiens
gtgtgaggggagcacaaggcagctgggccgtcccatcagctcctggacctgcctgctagacctggagggactcaacatgcggcacctgtggcggccgggggtgaaggccctgctgcggatgattgaggtggttgaggacaattacccagagaccctgggtcggctgctcatcgtgcgagccccccgagtcttccccgtgctctggacactgatcagccccttcatcaatgagaacaccaggcggaagttcctcatctacagtggcagcaactaccagggacccggaggccttgtggactatctggatagagaagtgatccctgacttccttgggggagagagtgtgtgtaatgtccccgaaggagggctggtccccaagtccctctacatgacagaagaggagcaggagcacacggaccagctgtggcagtggagtgagacctaccattcagccagcgtgctccgcggagccccccacgaggtggccgtggagatcctggaaggagagtcggtcatcacctgggactttgacatcctgcgaggggacgtggtgttcagcctgtaccacaccaagcaggcgcccaggctgggcgcccgggaaccggggaccagggccagcgggcagctgatcgacaaaggctgggtcctgggcagggattacagccgtgtggaggctccccttgtctgccgggagggggagagcatccagggctcccatgtgacccggtggcccggcgtctacctgctccagtggcaaatgcacagcccccccagcagcgtggcctgcagcctcccgggtgtggacgatgtcctgacggctctgcacagccccgggcccaagtgcaaacttctctactactgtgaggtgctcgcctctgaggacttcaggggctccatgtccagcctggaatcctgcaccagcggcttctcccagctcagcgccgccacctcgtcctcctcctccggccagtctcatagcagctccctggtctccagatag

SEQ ID NO: 294545 - DNA, 1000 bp, Homo Sapiens; identical to SEQ ID NO: 224813

SEQ ID NO: 294546 - DNA, 1000 bp, Homo Sapiens; identical to SEQ ID NO: 224814

SEQ ID NO: 294547 - DNA, 1000 bp, Homo Sapiens
gaaatcactgacacaaaaagttcaagctggtgcctatcctacagaaaagggtctcagcttcttggaagtgaaagaccagctgctgctcatgtaccttatggatttgacccacctcattctggacaaagcctcaggaggatctcttcagggacatgatgcagttttgagactggtggagattcgcacggttttggaaaagcttcgtcccttggaccaaaagctgaagtatcaaattgacaagctgatcaagactgcagtgacaggcagccttagtgagaatgacccacttcgttttaagcctcatcccagcaatatgatgagcaagttgagctctgaggatgaggaggaagatgaagcagaagatgaccagtctgaggcttcagggaagaaatctgtgaagggagtgtctaagaaatatgttcctccacgcttggttccagtacattatgatgaaacagaagctgagcgggagaagaagcgtctagaacgagccaagagacgggcattgagcagctctgtcattcgtgaacttaaggagcagtactcagatgctccagaggaaatccgtgatgctcggcatccccatgttacccgccagagtcaggaggaccaacacaggattaactatgaggagagcatgatggtgcgtttgagcgtcagtaagcgagagaaaggacggcgaaaacgagcaaatgtcatgagctcacaacttcattcccttacacacttcagtgacatcagtgctttgacagggggaactgttcatcttgatgaggatcagaatcctattaagaagcggaagaagatacctcagaaaggtcggaagaaaaaaggttttcggaggcggcggtgattatgggtgtacatatttgtatattttttgtcatcctgagatacttctaatttcattgtatataggtggttttccctggaattcattaattgtttgctttggacatgtggaaagagccttactaataaaattgattttgcttatgaa

SEQ ID NO: 294548 - DNA, 1000 bp, Homo Sapiens
aagaccttccctcggaaaacacagctcattatacatcagagaacgcatactggagagaagccctataagtgtggtgaatgtgggaaaactttctgccaacagtcccacctcataggacatcaaagaattcatacaggagaaaaaccttatgtgtgtactgactgtgggaaggccttttcccagaagtcacacctcactggccatcaaagacttcatactggagagaaaccttatatgtgtactgaatgtggaaaatccttctctcagaaatcacctcttatcatacaccagagaattcatacaggggagaaaccttatcagtgtggtgaatgtggcaaaaccttctcccagaaatcactcctcattattcatctgagagttcacacaggggagaaaccctatgagtgtactgagtgtgggagggccttttccctgaagtcacatctcattctacatcagagaggtcatactggagagaaaccctatgaatgtagtgaatgtggaaaggccttctgtggaaagtctccactcattatacatcagaaaactcatcctagggagaaaacccctgaatgtgctgagtctggaatgacttttttctggaaatcacagatgattacatatcagagaagacacactggggagaaaccctccagatgcagtgactgtgggaaggcattctgccagcatgtatactttactgggcatcagaatccatataggaaagacaccttgtatatatgctgattgtgggaaggcctattcccagaagtcagtcctcattgtctatgggaaaactcacattgaatagaaatagtgacaacttctcaactgtagaatagactaatatgttcctcagtatacatgattacccttccacagaatgatctgcttaggccctcagaatattttcaaccccacaaatatggaatcaatttgctcaccctcaaactgtctcagccctcttcacagaataaatgtatctggaagaattagcact

SEQ ID NO: 294549 - DNA, 1000 bp, Homo Sapiens; identical to SEQ ID NO: 224815

SEQ ID NO: 294550 - DNA, 1000 bp, Homo Sapiens; identical to SEQ ID NO: 224816

SEQ ID NO: 294551 - DNA, 1000 bp, Homo Sapiens; identical to SEQ ID NO: 224818

SEQ ID NO: 294552 - DNA, 1000 bp, Homo Sapiens
ctatgcagagccaccttttggattgcatggttggactgagatctattgggagaaattatatatgtatatatatttatacaacttatgtatacatatatatatgtatacacacagacacacacacacaccaccaacaaccaccactacaccacacatgcttataacaggcactagaataaagagggacaacaaaatacacagccagagcagcaagccttagcattaagaatatacaatatgccggaattggggttcgtgcctcctagcctaggaaacttaaaagaaatatccttttgacacaaaacacaaaatgttttccaaaacaattgacataatgatacattacgcctttgcagtgagctaataataagctaacctttgtgcacaaataacattatatatattatatatctattctgcataggtattttgactttgtgcaggacagaaagttgtgtaggtatgactgttctacttttcagttttctttttttttaatatattttattttctctagaaattactcaaacaaaagcagccttctatcttgccttgtcttaatgctttaaaataaccaaactggagatctaactaccaaactgttcattatattattaaataccaactttggttacagtatagtgtctttactttagctgatggttctgtaaccttgtgctttttaaagcaatttttatgttttggtgcaaaagttgtccagtgtctcttgttcccttcactagagaacatgcttagaggtatgtttgtaggtatttttgtttagaagaactatttcatgcgctccattttatttattataataggtaaaaagaaaaaaaaaggttgtaattcatcacccatgtaaacatgctcatgaagttgaaagtaattaagatttgatacactgatatcaatttatttatgtaactaaatcactgttttataaacttgttaatgatcaacaatttttgttttgattaaaattagttttttgaaagtt

SEQ ID NO: 294553 - DNA, 1000 bp, Homo Sapiens; identical to SEQ ID NO: 224819

SEQ ID NO: 294554 - DNA, 1000 bp, Homo Sapiens; identical to SEQ ID NO: 224820

SEQ ID NO: 294555 - DNA, 1000 bp, Homo Sapiens
atggggattttttgatcctcaaatgcaagtaaactaccttctaatgcttcacatgacagattaaataaatggaagaaccttttcaattctgatgtttaaaaaatgaataaatacttgatcctttgtccatatttcctcttaatgggtaggactcatagaagatgtccttagaccagtcacgcttcatggggactagggcatgttggtgaatggtttttactaaagttaggcaactttggcttgattcacccctaaatctatgaatgtatattgtgagccagcagtggtagaatggaagtcataagatctcctcagcattgtgatataaatatagctatagttaggcaatttgaacatgtaggcaaaactctcctaatcaacacacatgtaggctatatgctggtacatgctttaaacatggaggtaaccccacacgagacattcagtgacaggtaatatgctggatttgtgcagtaccgatttggctcagctggaggaacatgtcccggaattcctctctctcatggttctggattggagtaggtcataaagaaatttgcattaatttgatcagcagctattttatactcataaggtcagtgtacagacccaagcatggtgacagcttgaaaatatgactccaggccaaaaaggggagctagaagagaccagagacagctccctggacccagagctcttccagctcctgccagcctcctccttcagctttgcaaagtactggccaggtgtgtgtgcagctccatggcaaccagcatcagcttttcctgagatcacacacagcattgcagtggaggccgtgagacagacatgggttctgtttgttcttatggacttcccttcatccttgctgcattcacagtcgacctacagtgacttcaggcccagaaccagatgcagagggaacagcctggcctagacttctccaccagcacccacaattgtgtaaggctgaagctctataataaatctttattctgtc

SEQ ID NO: 294556 - DNA, 1000 bp, Homo Sapiens; identical to SEQ ID NO: 224821

SEQ ID NO: 294557 - DNA, 1000 bp, Homo Sapiens; identical to SEQ ID NO: 224822

SEQ ID NO: 294558 - DNA, 1000 bp, Homo Sapiens
tatatagagtctgcctccaatcctgctggcttcagcctggagaagggatatgggagctggagctttgatggatgaataggtgttcaccggatctgggcagaggggtcatccgctccccaggtgggcactgataaaggaaggtacaggcctcacctggaactgccaaggcagcctccagaaatgctcggctgtctcggggcacgctccagtatgccagtcctgcgggattacgtccagctacttccagaaacactcagtgtcccctcccctcaggctctgccttggcctggccttgtccagtctaccctggacaagatgccgtgtgtttgaggcccagcagagtaagcccttggccgtgatgtgtctgaaacacctgttaggggttccctccatatgtcagagcctctctgggatgaagttcaagccagaaaacccagtcgaggctcaagtttgaatttcagcttcactgtgtggctctgggaaaatggctttcccactctgtgcctcagtttccttgtgtttacaagactaatcccattgactgtttattaagcacctactgtgtgccaagcgcttttacgtggcttctccctcagccagccttgagaaggctggaggtggtgtcatcacctccattttacagacaaagcagctgagaccccagcgaggggcggagacctgtcccacgatcacccagcaggagtcgtggcagaacggagcatcagccagaccctgttgtgggcgttgtcatcaagggagcttgaatggagggtctggtgtcagatacagccgactccagccccagctcatcccccatgatgctgtgtgacccactgggcactctggtgagggagctttccagacatcaacagcccactctgcttccctttctgagtcccctgtccagcactgcctagtgttggagggtagaccaaggctgtgcatgattcaccccctccttccatcctggagctggcagtgaataaaagcccgtatttac

SEQ ID NO: 294559 - DNA, 1000 bp, Homo Sapiens
catagtttaaaaattgttacttaatttgttgcccccatgtaaaaattggcaagttcgcacagaaatctggatttacagtttcttatgaaaaatcacaggaccaggtggtcctgggtctccatgatttcctgtgaacctcgtctggagttgaagagaggatgctcctctgcataaaacctgtgccctccagctcactgtagtctccaccactcccttttgtctttcacatggaggttgaaggatatttgtcatttctggtcacacttgtgctcctagtttttgatagtggatttcagaggaaggtgagatattttttgtactccagtctctaaaaataaataagcaacaaatgatagacttcactctctcactctgatggagaattctgtatctttctaggccgtaagaagaacaataaaaaattgggttgtgctctgccaaaaagtgtctgagaggctgaggactcttgaaatcaaatcacaggagaaatgattgaaggaagtgtgagtgttaagcctattgatgagaagaaaaggctcaggggtgaggtggagagggagacatgacagctttttgtaagtctttcaagggccatcatgtagaagatggagtagctttgtgctttttagattccaagaatggaagttgaaaggtaccagttttagctcaatataaagaaaaagactgcagaggtagtgagttctttggttgagcttccagacatgtgatgttgctaaagatcctgactccaccttcctcaccgtttgaccttgggcaaattacttaccatctctgagcctagtttccttatctataaaatggggatggtaatgatacagtggaaacgtacttttctagagatttgttctaaagtcacagcaaacggcagaactaacaataaccaaactactccctaatccttgaaaatccccagtctcactgggtcatccagattgcgccactgcaccccagcccgggtgacagagcgagactccgtctc

SEQ ID NO: 294560 - DNA, 1000 bp, Homo Sapiens
agcaatacccctcccagagcagcatcagggccgcagctatgcatgtgagagtgccaagtgggtgcccacgggcatcccacatcatgccaaccccagagcaggaaggcagagacatggggcctgggccacagattctccccgtgcacagctgtgcaattactgtgagcggggcggcccgggccaggccggctccccaccgggcgctgctgggcagggttccggcgagggatgcgggctctgggaggagaacgcgcagctccaggacgcggtgcggcggctgcgcgcggaggtggagcagcatcagcaggaggcgcagaagctccgagaccagcgcaggttcctggaggagactcagcaagcccagcgggccagggaggtggagacactgcgccaggaacaccggaaggagatgcaggccatggtggcagatttcagtagtgcccaggcccagctccaggcccggctggctgccctggaagccgaactgaaagattccggagagaagccagggaagggagcgtccaggcccgaggaccttcagctcattggccgcctgcagacccgcctgaaggagagagaggacatcatcaagcagctcacggaagagagaagatttcactacgcagcattccccagtgccatgtcccaccggaatcggtctttctctttcaatcctcacccgggatatttgaccccttccatgaagaaaaagaaggtggaggacgtgcccagccgcgtggtcagcgtgccgaacctcgcctcctatgcaaagaactttctgagtggcgatctgagttccaggattaatgcccctccaataactacatcacccagcttggacccaagccccagctgtggccggacctacaaacccaaccagtctacagatgcaaaaactgccacaaggaccccagatggtgaaacggcccaagccaaagaagtccagcagaaacagggctctccgcaccaggaatggttcaccaagtacttttctttctaa

SEQ ID NO: 294561 - DNA, 1000 bp, Homo Sapiens
agaaacacagttatttgtgaaggtttttctttgccttgttttgaaggtggcctgagaatggagcttctctttttcttgggataatagatacatcaacttttacaagaaaatctctgtctcttcaacaatgatgtccagtgtgtgctgctgagtggtacaaaaggaaatagtacttgattcctgttagaaacaggagtggtagaaccacagtcttcccaggccgcagcctctgtttatagaagcttctgaatgtagaaaagctgttgaatttcatttaaatgtaaataaccttttaaaaagcgtatggagttagccagttccccctagttaatggacataggaagacatttgctgaaatggtagggtggccactttgtgaccatgatgttgcaagttgccctccctggcatggtgagttggcttccagagctgtgggtagaggacatcgcctcacggcactgaggcaccagccgctgcctacccatcaatgcaagcaaaacagctactgactttgtgtagcagggagattggggactctggttccctcgccaagtgtggcagcctgtgcagtgttgggggcttacttggtatctgttggagaatgaggtcctgtcctgctttcacccatgacccatctagcttcagctgtatccattttcttctgagcccatcttccattgtcctcaacgagtttctttggtctttactgaaagaagatagtagaaatttaaaagttgagagaagactagaaatggaactgattagaaggggaggttcaaactgtcaatgcacagacttttcaaagaagttgtttatattttccaatggcaaactgccctttctggaatgttcagagatgatgtgtcatggaaccttcaaacaagtctcttgttcggatgataataggtagtgtccttttagtatgctggttgatctttcatagtgttagtgttttgttacttaaaaaggaaatcagctataaataaaatgtatttttgta

SEQ ID NO: 294562 - DNA, 1000 bp, Homo Sapiens; identical to SEQ ID NO: 119164

SEQ ID NO: 294563 - DNA, 1000 bp, Homo Sapiens; identical to SEQ ID NO: 119166

SEQ ID NO: 294564 - DNA, 1000 bp, Homo Sapiens
aatgtaccaactcaaacactttttggatataaaagaagtagaaacagtaagacactgaataaaataaataagataaactgccaacttagctaattaaagctattccaaaaatattgtacttaccaacatttaaagcttaaaaacattgggtactgaaagaagagaagtttagctaattggcagaggattgcactaatacaatcaagttttcaagtttatgacccttgctagtatattaccttcaatatctcagagatgttttgtattatttgttttgttttgcttttttcctagttgtctttatagctgtttcaccctaagccccttcaaactctcaatgaaagcaggttcttgggataaacttccagaatagagacaaggtataccctttgtgcctttgcattatcaactctttgttcacctgatgggaagttcttcgtttttcaaaatgtagcaagggagaaagcccaggacgcctttatatgctgttagtttccttacctgctgatagagattctgacacacagtcaaatcatacatgggctgtcagagctataaattagaaggctggcctctaggcttctcctctgtggcttatagccagttgtaatatacatgcattcctatactctagagatgaagtggtaagcatagctcatatgaacactgctctgaactcctctgacttagcattcaacttaagtcaagaaatacttattggctgggcgtggtggctcacgcctgtaatcccagcactctgggaggcagaggtgggtggatcacaaggtcaggagattgagaccatcctggctaacacggtgagaccccatctctactaaaaatacaaaaaattagccaggtgtggtggcgggcgcctgtagtcccagctacttgggaggctgaggcaggagaatgtggtgaacctgggaggtggagcttgcagtgagctgagatcgcaccactgcactccagcctgggtgacagagcgagactccatctc

SEQ ID NO: 294565 - DNA, 1000 bp, Homo Sapiens
ggctgttggccagagacttacttgtaactctctaaatgaagtttttttgatcctgtaatcactgaaggtacatactccatgtggacttcccttaaacaggcaaacacctacaggtatggtgtgcaacagattgtacaattacattttggcctaaatacatttttgcttactagtatttaaaataaattcttaatcagaggaggcctttgggttttattggtcaaatctttgtaagctggcttttgtctttttaaaaaatttcttgaatttgtggttgtgtccaatttgcaaacatttccaaaaatgtttgctttgcttacaaaccacatgattttaatgttttttgtataccataatatctagccccaaacatttgattactacatgtgcattggtgattttgatcatccattcttaatatttgatttctgtgtcacctactgtcatttgttaaactgctggccaacaagaacaggaagtatagtttggggggttggggagagtttacataaggaagagaagaaattgagtggcatattgtaaatatcagatctataattgtaaatataaaacctgcctcagttagaatgaatggaaagcagatctacaatttgctaatataggaatatcaggttgactatatagccatacttgaaaatgcttctgagtggtgtcaactttacttgaatgaatttttcatcttgattgacgcacagtgatgtacagttcacttctgaagctagtggttaacttgtgtaggaaacttttgcagtttgacactaagataacttctgtgtgcatttttctatgcttttttaaaaactagtttcatttcattttcatgagatgtttggtttataagatctgaggatggttataaatactgtaagtattgtaatgttatgaatgcaggttatttgaaagctgtttattattatatcattcctgataatgctatgtgagtgtttttaataaaatttatatttatttaatgcactct

SEQ ID NO: 294566 - DNA, 1000 bp, Homo Sapiens
tgcctcccctcccgccggccaacccctagtccccttcctgtctccacttgcattcaggggtggctgctgttctgagaacattagaactgggaagagagatggagtcacatggatttttggtgggcattattctaaactttcgtatccaagttagtcccccttattccactgtggcattgccgttctaagcagttacctgatgcctgctgctgaagagctgctcacaggaggcggcggcggccctggcactgccccttgcattaggtcttgtgtttgatgtgttcttgtgaatttactttgtcagaacaaaatatttacgcgttgggttcaggaatttcttttagctccccatctggctgtgaaattcaggaaacctcccgttgcctagtaatcaccccatgtaggtgtacattgtgacaaagtgcatctgaccactaaggggcccccttggtgaccccagcacattcacagcagtgttaaaatggcctgcattttggagatgctggctggcctttcagtgcctcccaggaagacacatggcctttccctcttcagatgcctgaagggagtgctttgaggcaggtgatgtgctgggagtgtgggcggcctccctctggccccggggccctctgtggaccttggctccctccgtggacctgggcttcgtggtgagcactgcagcctccctgggcattccctccagcgccagcaccactgcaacatatagacctgagtgctattgtattttggcttggtgtgtatgctcttcattgtgtaaaattgctgttcttttgacaatttaagtgattgttttgtttactgtaagtttgaaaataaaaatgaagaaaaaaattccaatgactgtgctgtggttggagactttatttaccaagatgtttactcttcctttccccttccattttgaggagctgtgtcactcctcctcccccccagtgctttgtagtctctcctatgtcataataaagctacattttctctg

SEQ ID NO: 294567 - DNA, 1000 bp, Homo Sapiens
ataggctgtcagaaagagccagaaaatgggggtagggtggtcttctattctaacattgtctataaatgagttactgagaattttgtctggttagttgggcaaagggctcaactgactcccgagtttgtccatcccaaagggtggggggcgctgttggcaggaaggctgccccaaacatggacctgttgtgaccccagagagcccctaactgggtattaatgagcgcctgcacctgacggtgggggagtgggagaagggcaatcaggtttgctccccctctaccctttcccccactccgccacccgctttctgcccttctggcaggtcagcccaaggctaaagaggagggactgaaagccgcagcaggtgagcacctaaggccaagagcatcacctccaatcatcctggtggccttgatggggacaatggtttattccagatggggaaactgaggctcaggtgactgctgccagatctcccagctgtacagggctgggcatgtagcaggtagaatcagtagagccagtagagccaagagctcatgggcccgggtgcgaatccaggttctttcatggacttgctgtgtacccctgagtgagcaagctgcttcctctgtgagcctccatgtgggaacctctaacctgggaaaatacctacctttgaggagcgtcctgggattggacgggaagccctttataaaatgtaaagcgtttggcaaacgttgagggggaaatacctcaccagaacacaacccacacatgttggatgttaaaaaggaaatgtttattttcatgttataaggtgattacaaactcctctaaaaaaagcaaagatgaatttaaaatattgatatacatatttatctaaaaagcaaaagagaaaaaaacccctgcaaaatacagggaatcatatcataaaacatttatacacaaaagcttgtatactgcaagactgaactacacaccaaggatcttgttcaaatacaaatgttcctcctcag

SEQ ID NO: 294568 - DNA, 1000 bp, Homo Sapiens
ctttgctgacaatgtggacctaaaggaacttggccggaaggagaaggagatgcagatggagcttagggagaagatgtctgagtacaaaatggaaaagctggcctcagacaacaaacgcagctccctcttcaagaagaagaaggtcaaggaagatgaggatgatggtgtgggtgatggggatgaggacactgacagtgccatagggagcttccgatattcttcccgcagtaattcccagaaacctgaaacagacacatgctcctccctggctgtctgtgatcactatgcaagtggcagcagagttggcaaagagatggatagcagtattaataagtggctcagtggcctcaggacggaggaaaaacctcctttccaaagtgactggtctggaagttccagagggaagtacaccagatcgtccctgctcagggagacagagtctaaatcctccagttacaagttttccaaatcccagtcagaggaacaggacacctcctcctaccacgaggcaaatggcaactctgtaagaagcacttcacggttctcatcttcctccaccagggagggcagagagatgcacaagttctccaggtccacgtacaacgagacctcaagttcccgagaggagagcccagagccctacttcttccgccggaccccagagtcctcagaaagggaagagtccccagaaccacagcgcccaaattgggccaggtccagggactgggaagatgtggaagagtcatccaagtcagacttctctgaatttggagccaagaggaagttcacccagagctttatgaggtctgaagaagagggagagaaagagaggacagaaaacagagaagaagggaggtttgcatctggacggcggtcccagtatcggagaagcactgacagggaggaagaggaagaaatggacgatgaagccatcattgctgcttggagacgccggcaagaagaaaccaggaccaagctgcagaaaaggagggaggactga

SEQ ID NO: 294569 - DNA, 1000 bp, Homo Sapiens
ttgcatttatatttaatgtttatttctgagaatcaagcagtatatttttcctaaatgaaacataaattatattcctattcattagataggttcctaggaacaatgccaattaatccattgtttaagtagtaacttgaatgtttttctatatccctccagctttgttgatagtggcgggttttgtacaattggagggagccctcagagccttctgggggaggagaggaactgtccttaatccatcaccactaccatagggcaaagccagcaggtgtggccctgtgaggggctgtacagacgggatgtggccaggagaacagagccccacctggaccacctgacccctcgggattccacccctgtcatcgtggggatgttcctatatgggagaaagttgggttaaatcaaaaaagaggccacgcccaggtgtaatcagagccaacctggtgggcttggtctatcacaagacataactgatgctgaacatgaacaaagataaaaactgtttggagggtttttgagttgtttttcttatgttgttgggtggggtataccagcataaactctaaagataaaatctatgttagattgtcaatcaactgtgtttttgaacagcataattgtgtagcagcacattgcaaaaatgcattcatccaaagcgacacatgtggcaacgtagaccacgccagtgaaataagccccttcgtgatcacctgactccagttctccgtgtgctccattggctgcggctgcaggaggaagatgcctgacagccctcatgctctccgcaggggggcgctcacaaagatgccaggggtgtttattgtgtttatttttttaattactaaaatcagtagctaagaaagggtccttgaagcctcctaacctgggttggacctttgaaaaatatatttgtagcacatattatagatggaaagaagaagatatttatttatacctgtgatgccaattgtcattaaaaggcttttcatggcttgac

SEQ ID NO: 294570 - DNA, 1000 bp, Homo Sapiens; identical to SEQ ID NO: 224828

SEQ ID NO: 294571 - DNA, 1000 bp, Homo Sapiens; identical to SEQ ID NO: 119169

SEQ ID NO: 294572 - DNA, 1000 bp, Homo Sapiens; identical to SEQ ID NO: 224830

SEQ ID NO: 294573 - DNA, 1000 bp, Homo Sapiens
tggaagcggacaaacatttgacagagaagagctctttggggaagcttcggcaggaaaagcatcccgcagccttgcgcaacacattcctggaccaggtagtatagaagggatgaaaggcgctgctggaggggtgatgggagagctgacccgtgcacggattgcacttgatgaaagaggacagaggctaggagagctggaagagaaaactgcaggcatgatgaccagtgcagaagcattttccaaacatgcacatgagttaatgctgaaatacaaggataagaaatggtaccaattctgacttctaaagaagctgtgactgctttgagaaaccatattcagggaaaccaaatttattcccagcatcactactcaactgctagaagccagtttcttctacaaaatgttccatttacagtcaatctgaaattttcataaaagagatgtatcagagacactgtgcaacccaaaggctggagccctggttaaaatcccaaaatacggctgaatttgccttttcccatgtggaatggagctatcatcttggcatgtcattcgataaggatttatatttagtaactacggggagtcctcttgatttgaaaattcctgtacaaacaaaagcattaatgcacttaatgaaaaaaaatctttgcatgataaattaacatcttaaggggaaaagaaaaaaaagcatgttgtgatagaagaaaaaaagattcatggtaaactatttctatcaattgggccacactcaacaatttaaaaaatctgcatttgaagatgtcagtgcatttcaaatatatttgccatacccaactgaaacggaaaacaaaacaaaacaagaacccagagttttctcctcatctgtaactttcattgtactagaaccttattgaattcttatggcaagagtctgattaatgttctctctccatgttttacatcattcacagttgtgtcaaaatcaaatattgccagtatagtaaattattcccaacac

SEQ ID NO: 294574 - DNA, 1000 bp, Homo Sapiens
aaccgccccctaagaagaggaagaaatggctgaaggaggcaggcggcaacgctacagcaggcgggggcccaccaggcagctcctcggactcggagtcctcccctggagcccccagcgaggacgagcgggcagtacctgggcgtctgctcaaaaccagggcgatgcgggagatgtaccggagctacgtggagatgttggtgagcacagcacttgacccagacatgatccaggccctggaggacacgcatgacgagctgtacctgccccccatgcggaagatagacggcctgctgaatgagcacaagaagaaagtcctgaagcggctgtcgctaagcccagccctgcaggatgctctgcacacgttcccacagctgcaagtggagcagagtggggagggctctccggaagagggggctgtgcggctgcggcctgctggggaaccctacaaccgcaagacgctcagcaagctcaagaggagcgtggtcagagcccaggagttcaaggttgagctggaaaagtcgggatactatacactctaccattcgctccaccactataaataccacaccttcctgcgctgccgggaccagaccctggccatcgagggcggcgccgaggacctgggccaggaggaggtggtccagcagtgcatgcggaaccagccgtggctggaacagctctttgactccttcagtgacctgctggcccaagcacaggcccacagccgctgcgggtgaccccgccccagcttgtgaggggggcgcctcctccatgaaccgagaattgggacagaaccgtgtcctcaggagctaacacctgggctccatcgccggggaaagggggtcatgggtcagggtgtgtctgtgctgccccctccagggcagggttcaaagtccgactccccccctctcccaagccccctccactccctccccattcctcccactgttcggtgtacagagaaattatttatatatatgtataaatgtctatttagtaa

SEQ ID NO: 294575 - DNA, 1000 bp, Homo Sapiens
agcagttgcagcccgccccgcctggcctgacgtcacagtccagggccccatcgttacaatccctgcacccggtgtcaccctctcaccagcgtcggaaagctgcctcttttcagaacctccattctctgctgagcagcaaggggaaccggtccagcctctacctggtagcagggccaggggaccacagtgcagctggcaggccggccaagacttcaccacggcgtgccctcagtgtggaggacgtgggtgctcccagcctggctcgcaccgtgggccgcctggtggaggtgttcccagacggcaccagccagctgcagctgcagcgctccccagggggcactttcggcttctgcgtggcctctgggaatgggcgcccagactcaggtatgccctctcctcttcctcagccccatggctggggcggccttagcaaacaaggcagggccttctggctgtggtcagaggcttttctggtctttggctgagccgtgcagctctgggaattcagaaagcctctgactacaggactaggcttctcccctcaggggctctttctgaattgtccagggctctctaggagtctgcacctgcagagcctttgccctaggcaactgcagctgagagtgcgttggtggggagtgtgcgggagggggtagagttggcaggtttgactccactgtccccctgctgtctgatgacatcttgaaattagaagcttaggccgggcgcagtggctcatgcctgtaatcccagaactttgggaggccgaggcgcctggatcacctgaggtcaggagttcgagaccagtctggcccacatggtgaaacccatgtctactaaaaatacaaaattagctgggcgtggtggcgcatgcctataatcccagctacttgggaggctgaggcaggagaattgcttgaacccgggaggtagaggttgcagtgagccgagattgcgccattgcactccagcctgggcaacaagagcaaaacttcatctc

SEQ ID NO: 294576 - DNA, 1000 bp, Homo Sapiens
tatcattatgccaacccaaggagaaggacggccatgccccacagagcttacccaggagaaaacctgcccagtgaccccctgctacagctgggtccttggcaactggtctgcatgtaaattggagggtggagactgtggggaaggagttcagatccgcagcctttcctgcatggtccacagtggttcaatatctcatgcagctggacgtgtcgaggatgcactgtgtggagaaatgccctttcaggacagcatcctgaagcagctgtgttctgtgccttgcccaggagactgccatttaacagaatggtcagagtggagcacatgtgaattaacctgcattgatggaagaagctttgagactgtgggccgccagtctagatcaaggacttttataattcagtcttttgagaaccaagacagctgcccccaacaggttctagaaacacgcccttgtacaggaggcaaatgttatcactacacatggaaagcaagtctttggaacaataacgaacgaactgtatggtgccagcgttcagatggcgttaatgtcacaggaggctgctcccctcaggcccgtcctgctgccattcggcagtgcattccagcctgcagaaaacctttctcctactgtacacagggtggagtctgtggttgtgagaagggctatacagagataatgaaatcaaatggtttcctggattactgcatgaaagtaccaggctcagaggataaaaaagctgatgtgaaaaacctttctgggaaaaacagacctgtgaattcaaaaatacatgatatttttaaaggatggtctcttcaaccacttgatccagatggccgagtaaaaatttgggtttatggcgtttcaggtggcgcttttctcatcatgattttcctaatatttacttcctaccttgtttgcaagaagccaaaaccacatcaaagcacacctccccaacagaagcctctgaccttagcctacgatggagacttagacatgtaa

SEQ ID NO: 294577 - DNA, 1000 bp, Homo Sapiens
atgcacatctttgtgcaaatgcactcatgtttgtgcatgtttagtatgtgtatctgcgtacacgagtgcatgtgtataaacatgtttgtatccatgtgtatgcttgttatccatgcatctgtgtctttatatgtgtaactgagcgtatttctacatgtagggatgtctgtgtattcatgtttgaggatctgcatcaatgtgtcctttttgccagatttctctttcccattcctcttaaatctctctcgccagctaaacgtttgttccccatctctgtgcctcctctattcattctctcaccaaacaagcttctaagcaccaatctccctctgccatcagattggctgctttagctccatagttctcttctcgcctcatacttgctttcttcccctgcctttctacctcaagcttcctcgccggcttttgtcacagtctcattgctcgctgacttggaggctagggctggtctgcacttagcctctcccttcctaatttctagccctagtgggcagtcctgtcttagccctggctgacctccatagtgtatcatgttcctgctaccttcctgacccctgtgctcagcctggaattgttataggaggtagcaagggcactcagaaaagtcagttggaaccagtgtcttggtgtttactgtttcatgtcttagttcctgagttgggggtggggtttgatagggaaggggtggtatagctagaatgtgaactaagaacttctccatctgctttactttttctttcttcgacaaactgtcaccttttttactccaaactgaccaagaagttgtatttgccatttgtggctactcaagtcttactgtccagccaagggcccctacgtctcagcccaatgggttggttaaaaaaaagagagaagccactctcatttctgtatcacagttgcccttttttagcaagtgtgtgaattcacagtgcttttctatgaataaatcatggatcacataaaagatcatttttct

SEQ ID NO: 294578 - DNA, 1000 bp, Homo Sapiens; identical to SEQ ID NO: 119170

SEQ ID NO: 294579 - DNA, 1000 bp, Homo Sapiens
cacccaaagtgtctgacaccgtgatcgagtcctacaatgctaccctctccgtccatcagttggtagagaacactgatgagacctattgcattgacaacgaggccctctatgatatctgcttccgcactctgagggtgaccacaccaacctatggggatctgaaccacctcctctaagacaccatgagtggtgtcaccacctgcctccgcttccctggccagctcaatgctgacctctgcaagttggcagttaacatggtccccttcccacgtctccatttctttatgcctggctttgcccctctcaccagccatggaagccagcagtatcgagctctcacagtgccggaactcacccagcaggtcttcgatgccaagagcatgatggctgcctgtgacccccgccacggccgatacctcaccgtggctgctgacttccgtggtcggatgtccatgaaggaggtcgatgagcagatgtttaacgtgcagaacaagaacagcagctactttgtggaatggatccccaacaatatcaagacagctgtctgtgacatcccacctcgtggcctcaagatggcagtcaccttcatcggcagtagcacggccatccaggagctcttcaagcacatctcggagcagttcactgccatgttccgccggaaggccttcctccactggtacacaggcgagggcatggacgagatggagttcaccgaggctgacagcaacatgaacgacctcgtctctgagtatcagcagtaccaggatgccaccgcagaagaggaggaggatttcggtgaggaggccaaagaggaggcctaaggcagagcccccatcacctcaggcttctcagttcccttagccgtcttactcaactgcccgtttcctctccctcagaatttgtgtttgctgcctctatcttgttttttgttttttcttctggggagggtctagaacagtgcctggcacatagtaggcactcaataaatacttgtttgttg

SEQ ID NO: 294580 - DNA, 1000 bp, Homo Sapiens
aacatattttgataaagacaccagtaaccttcatttcactaaatccaaaagagaattttcaatcctcaaattagcatcacttgaccctattgaccactttctctttgaataatttctcctgttgactaccatgatgtcacatttttctggtttttttttctcctatacctttggatctcttgtatagattcagtcttcttccagttgctaaaagctgtagttgcatccttagtggctagggaaatgcaaattaaaatcacaatgaaatatcactatacacccattagaatagctaaaattaaatggctaaaatgagaagactgaccttaccaactactagcgaggatgcagagtgactggaacttcccgtacattgctgctgggagtataaaatgggacttctcctttggagaatggtttggtagttcctttaaaagttaaacatgtacctaccatatgatattccacttctagatgtttacccagcagaaattcaagcatatgtcctatgaagacttcacaatatttataggtgctttatttgtagtagccccaaagtggaaacatcttgaatgggcatgatttggtgcatggataaacagattgtatatccacacaatgaataacagccacaaaaaagggatgaactattcatacacgaacaacatggatggactgccaaagaattaggctgaatgaaagaagaaaaaaaagactacattttgattatttcatttacatactattccagaaaatacaagtgaatctatagtgacagaaagtgatcagggggtttgctggagatggaaatggggagaggagggacagaaggattgcaagggaacacttggtaactttggggaagagggacgtgttcattttcttgaatgtaataatggatttatgggggtatatatgtcaaaacttaccaaattgtacacttttgttatgtgcagtttattgtgtgtcaattatacctcaataaagttgttaaaaatat

SEQ ID NO: 294581 - DNA, 1000 bp, Homo Sapiens; identical to SEQ ID NO: 224832

SEQ ID NO: 294582 - DNA, 1000 bp, Homo Sapiens
cctgtagtcccagctactcgggaggctgaggccgtaggatcccttgagcccaggagttcgaggctgcagcgagccgagattgcgctactgaactccagcctgggttacagagcgagaccctgtctcaaagaaacaaacaaacaaacaaacaaacaaacaaaactttctttggatgcggctgcggcatggatttgaaatcacgtgggcaggccctgttctggggccccaccacatgtgcaggacaagcccaggggagctcccagccggcatccccacgcccccagcccagcctgctccaaacagaccccccacccacctccacagccaggatgtcagcagggcctgagccaggctcgtcccctgtggggagagccacagggccaggtggacacgccgacgggcgatgaggatcctggctgggcctcccccgggaacagctgtgctggacagtcagacccggagcccagaggcacccccacccaccccccgccccgagccctgtaccactgagtgcctttcacagagaaaacccactctgccatgtgtcactgaggcctggatttgagcttccgtccttccttcctccctctctccctgatgtaggccttggctggccctgaggcagggggtccccaatccccccttgtggtagcagggcccgggacccgtgcctgggggacccggggaggggccgccgtcttgtggatgctggccatggtgggcaggcgcctcctggcactgatggatgtgggggcacccccttctgagtccccaccccaacctgttcaaaccttccgcttggtcagtttttttttctttggccagctgcccagtggcattgaatgagaaaagtccacctttgggcagatgtgatctccagccagtggctcagttttgtttctctgtgtttgaaggacagcctgcatgtggctctgtctgaatgtctttgtagagctacctggaaattgggaggcagggggaataaaggaaatcatttgtc

SEQ ID NO: 294583 - DNA, 1000 bp, Homo Sapiens
acgaataagcaaagaagaaaacaaacaaaaacaaaacaaaacaaacacacggaccaataaacaaagaagcgaagataagaaagaaggcctcatatccaattacctcactcattcacatgtgagcgacacgcagacatccgcgagggccagcgtcaccagaccagctgcgggacaaaccactcagactgcttgtaggacaaatacttctgacattttcgtttaagcaaatacaggtgcatttaaaacacgactttgggggtgatttgtgtgtagcgcctggggaggggggataaaagaggaggagtgagcactggaaatactttttaaagaaaaaaaaacatgagggaataaaagaaattcctatcaaaaatcaaagtgaaataataccatccagcacttaactctcaggtcccaactaagtctggcctgagctaatttatttgagcgcagagtgtaaaatttaattcaaaatggtggctataatcactacagataaatttcatactcttttgtctttggagattccattgtggacagtaatacgcagttacagggtgtagtctgtttagattccgtagttcgtgggtatcagtttcggtagaggtgcagcatcgtgacacttttgctaacaggtaccacttctgatcaccctgtacatacatgagccgaaaggcacaatcactgtttcagatttaaaattattagtgtgtttgtttggtccagaaactgagacaatcacatgacagtcaccacgaggagagaaaatttaaaaaataaaaataaaaacaaaaaaaattttaaaaattaaaaaaacaaaaataaagtctaataagaactttggtacaggaacttttttgtaatatacatgtatgaattgttcatcgagtttttatattaattttaatttgctgctaagcaaagactagggacaggcaaagataatttatggcaaagtgtttaaattgtttatacataaataaagtctctaaaactcctgtgg

SEQ ID NO: 294584 - DNA, 1000 bp, Homo Sapiens; identical to SEQ ID NO: 224835

SEQ ID NO: 294585 - DNA, 1000 bp, Homo Sapiens; identical to SEQ ID NO: 224836

SEQ ID NO: 294586 - DNA, 1000 bp, Homo Sapiens
tgagccacagaagccagtgtcagcatatgccctgtttttcagagacacacaggctgcaattaaaggtcaaaaccccaatgcaacctttggagaggtctcaaaaattgtagcatctatgtgggacagccttggagaagaacaaaagcaggtatataaaaggaaaacagaagctgccaaaaaagaatacctgaaggccctggcggcatacagggccagcctcgtttctaagtctggaattttctcccccaaaatgcaggctgctgctgagtcagcagaagcccagaccatccgttctgttcagcagaccctggcgtcgaccaatctaacatcctctctccttctcaacactccactgtctcaacatggaacagtgtcagcatcacctcagactctccagcaatccctccctaggtcaatcgctcccaaacccttaaccatgagactccccatgaaccagattgtcacatcagtcaccattgcagccaacatgccctcgaacattggggctccactgataagctccatgggaacgaccatggttggctcagcaccctccacccaagtgagtccttcggtgcaaacccagcagcatcagatgcaattgcagcagcagcagcagcagcaacaacaacagatgcaacagatgcagcagcagcaactccagcagcaccaaatgcatcagcaaatccagcagcagatgcagcagcagcatttccagcaccacatgcagcagcacctgcagcagcagcagcagcatctccagcagcaaattaatcaacagcagctgcagcagcagctgcagcagcgcctccagctgcagcagctgcaacacatgcagcaccagtctcagccttctcctcggcagcactcccctgtcgcctctcagataacatcccccatccctgccatcgggagcccccagccagcctctcagcagcaccagtcgcaaatacagtctcagacacagactcaagtattatcgcaggtcagtattttctga

SEQ ID NO: 294587 - DNA, 1000 bp, Homo Sapiens; identical to SEQ ID NO: 224837

SEQ ID NO: 294588 - DNA, 1000 bp, Homo Sapiens; identical to SEQ ID NO: 224839

SEQ ID NO: 294589 - DNA, 1000 bp, Homo Sapiens; identical to SEQ ID NO: 224840

SEQ ID NO: 294590 - DNA, 1000 bp, Homo Sapiens; identical to SEQ ID NO: 119173

SEQ ID NO: 294591 - DNA, 1000 bp, Homo Sapiens; identical to SEQ ID NO: 119174

SEQ ID NO: 294592 - DNA, 1000 bp, Homo Sapiens
tttcactcggacccggacttccttcctcaaggccctgggtgccgtgctgctggcaggggccctggggctgggtgcctgcctcgtgctcctgcagagcggctataagattcccctgcccgcaggggcctccctatagcccgggacgggctctggacacttgcacctttggtcccatgggtgggggacaggagctgcttcccagctcgacttcagctagctgtgtccccaggcctgggcccagggcgccctgcgggccagcgtggaggctgacacccacacagatggtgtggaccatgctgccttgtggagctgggagttggagacagccgccaccccacaggccgggctactggcagccacactcggctttttgcccagtggcagaagagaccagccctcctcccatgcccggtcaccatgggggtcaggttatttttgtagggggtctccctctcacactgcctcagtgctcacaaccttccagtgtggatgttacagggtggcccccattctaccgatgtgaaaactgaggcgccaggacacagtggctgccctgtcgctggatcagtagcagagccagagctgcctccgagcgccatgccgccctcgggaatcatacaggaagagcacagtggatccagggtgggggcctctcaccccctaaccccgcccccccgcaaccctccccttcagctttacggcggccagtgctgaatggccctgtggccctccctgggccttttggtcttggccagagaagacagaaggacccggcttgggcttctgcatgtcctacccctgaccccagcctcaaggggcccctcaaaggccctctctgggggctctggggctcagcacagctttcctcatggatctaagcccctgtctttcccacctgactctgagtggatgttttgggggatggcccctgtggggaggagctgccatgccggccgcctgctcacggcagaaggttgctattaaaatgacataggattgc

SEQ ID NO: 294593 - DNA, 1000 bp, Homo Sapiens; identical to SEQ ID NO: 224842

SEQ ID NO: 294594 - DNA, 1000 bp, Homo Sapiens; identical to SEQ ID NO: 224843

SEQ ID NO: 294595 - DNA, 1000 bp, Homo Sapiens
aatttttctaagtgtttcgagctgtgagatgtcaatttctacaatttagtttctagacatgctgtatatttaataaactttatgtaaactttaaaatattgcactgcatttatgaaaaaagctttctttgcctactgcagctatctaacattttatgaaactgacgcatgtccttcattattgaggctaaaagctcttgttcagattgcttgaggtttgaaaaagaggtgtgctagctttgcttagtttatttcttatttttggtatacatatacatatatataacattagaatgtgtgtactggaaatgctatgataggtattttgtgttaatccaaatgcaatgatagtttcttgtatgaatgtgcaagaggcctgtgaccgaatgctacgtttttatggtagtttaagattataaaagtagaaatgcaacaattcccagtttttggataggttctaaatttctgagatttgattcatggcagatattctctgttgttgttgttttagatgggctcattacataacgagttaattgtcactagtaggagactgtgaaggaattttgttatactttcaaaaatgttactgtgatgaaaaatcatctattttcagaaaatatttatgaattaatttactatagaattatctctctaattatcataattgggttacaatttaagctccccttttaaatgttatattttaaaatgttattactctataaaagaaaattgcttgctatatttacaccttctttcctaggaaagctttcatccttaaattgttgtattcctaccctctgaagacatttaaaataagcttttgtgcctgcagcagagcctgcagaagctaatacaagggacactggtcttttgacaaaataaacttgtgtaaattttgatactgtattaaaactatttttttaaagttctgcataaaattgagtattaagtatatgtgttcatcttagcaatggtaataaattatttaatctcac

SEQ ID NO: 294596 - DNA, 1000 bp, Homo Sapiens
cagtgctgggcacacgaggcaccaaggtccgggccacctgcccgcagcaaggcccagctgaggtggtggagggagcccctgaggtcaggggccgtttcggttcagggtggcaggtgtccagcactggggtatggcgtcgaggcttccatggggtgggggaggccagcttccttctgacaggatgggcgcatacagtgcctggtgtgatttgtgcacaacccgtgttccaggtgcacatcctcccaaggagacacccagacccttccagcacgggccggccaagttgctgcggcggaggcagcatttcagctgtgaggaaggtcattggattcatgtgttttatctgtaaaaatggttgtcttaacttcttaacctcatattggtaagtgattgataaaaattggttggtgtttcatgacatgtggacttcttttgaaatagcaagtcaaatgtagtgaccaaattgtggaagagatttctgtcaaataggaaatgtgtaagttcgtctaaaagctgatggttatgtaagttgctcaggcactcagatgacagcagattctgggttctgggagtgttctgtgcctcttacatgccctggaggcctcatggtctcagtgctgaggcggcacacctgtagcacacctgcgtaatgtgcggtctgggccagtcacaaggaattgtgttgtctaagccaaagggggaagctgactgtgatttaccaaaaaaaattctgtaattcaaaccaaaatgtctgcggaatcaccagtttgatactctctgtaatcagaacagtgggcagtgcctgggtgaacgtgtctagcagccactgtgcgggatcgctgtaacaggagtggaatgtacatatttatttacttttctaactgctccaacagccaaatgccttttttatgaccattgtattcagttcattaccaaagaaatgtttgcactttgtaatgatgcctttcagttcaaataaatgggtcacattttcaaatgg

SEQ ID NO: 294597 - DNA, 1000 bp, Homo Sapiens
gctggtggcatgcattgaaattatacagaccctagtattgatgttcagagaaacagaaaccgagtcatcacgcctgaacacattggcagctaagaagggagcactatttaatctcttggtaattttaattagtgagcctcagattccaaaatcttgtcctgtgtttgatatccagttggtggctgattcagctttagtcagaatgtcttttgacgctgagttacagaagcttattctggagtatacaaatactgctacagcacttttatatgagatacttctggtctttcagcagggaaatctcggattgggatccacaaagtttgctattagctggataatgtcctttctacaaagctgtcctcccatcattacttttgtggccagtattgtgaaacaagtggtgaggggtctttcagcttcatttcagctgctaagtccctgccaagcagttctgttgtaccagcaattttacatcctcaagagctgtctgcggcacagcaggactctagctgagtatattaggaataactacagagaagaattcaggcttttactgaggccgtgggggatgagttctactcttccctcttgacttggccctagtagtcaccacagcttgaccctttcatttcaacacctcactgcgcattgcctgataaaccaagaagcaggagcctctgctcatactgtggtactttattcacatgccagccttgcagaaaaggctcccattgtgttaccccatcactcaacctaccattcaactttttcatgaagttctgaaattggttgaatagaaacaaacaatgtacgcaatgttaataagagtataaaatgttaatcaagagtcaacttgatattcacgagaaacatttttttatttgtttaatatctggctatctctgagtcctataaacaaagattttaattgaatgttccatcaatacctctctatgagaagtttaaaattttaaaaaataaatttgatttattataa

SEQ ID NO: 294598 - DNA, 1000 bp, Homo Sapiens; identical to SEQ ID NO: 224845

SEQ ID NO: 294599 - DNA, 1000 bp, Homo Sapiens
ctgggatgatataaaacattttgtgtttcatctacccattcagcaagaatgagtccagtcccatgtttagattattttaacataatttgtgaatgatagtttcacatttggctgatggtttgcagttttcactcaagttttgcatgaatcacaaagcagaatggtaccttttgaagagcagttctgcaataagtcatgagtagtataacttttggacattgagatggagaaagtgagaaattatcaaagctataattgccagagttgcccttgggtttaggtagaacactgtataccatatatactatataccatatatactatatataccatatatattatatgccataaacaggattaaccctcccttttctaattgcctgtatgtctagattacagaactattcaaagaagctcacagatggttacatgggacaaacctttctgacaaactaactggtaaagtaaggcatataacatttacatgagatattaaaactttttcattattatcctttgttctatatgattgctattaaccttatgtaatctagcaatgactgttatagtgccttaatccagcaaggatataaaaatgtattcaagaagtaatgccagagcaacctataacctgacataccatgcagaacattgtaaaatattctttaacagaactaggtaaataactgtgtatctaatatccgatctcatggccctcttaacatttttttgtttaaatgtgcactcatcccttataagcacattacttttacacttaatggtaggccacaatcttcatcaatctgttcatcataagacagagtaagaatttttaacagaaaattctaaaagagatagaagctaggaaagcttctttatatcttgcattaaatgggtagggaaaaaatatgactctcacccatgtcatgtactggaccatctttctctactttttaaagaaaaactaatacaactagaaaaacatcacaacaagccaaat

SEQ ID NO: 294600 - DNA, 1000 bp, Homo Sapiens; identical to SEQ ID NO: 119175

SEQ ID NO: 294601 - DNA, 1000 bp, Homo Sapiens; identical to SEQ ID NO: 119176

SEQ ID NO: 294602 - DNA, 1000 bp, Homo Sapiens
tcgcgcccgggcacgcgtgccccgcgggctgcgcctgcaccgacccgcacaccgtggactgccgcgaccgcgggctgcccagcggccagaccctttccccctggacgtgcgcaagctgctggtggccggcaaccgcatccagcggatccccgaggacttcttcatcttctacggcgacctggtctacctggacttcaggaacaactcgctgcgctcgctggaggagggcacgttcagcggctcggccaagctcgtgttcctcgacctcagctacaacaacttgacccagctgggcgccggcgccttccgctcggccgggaggctggtgaagcttagcctggctaacaacaacctggtgggcgtgcacgaggacgccttcgagaccctggagtcgctgcaggtgctggagctcaacgacaacaacctgcgcagcctcagcgtggccgccctggccgcgctgcccgcgctgcgctccctgcgtctggacgggaacccctggctgtgcgactgtgacttcgcccacctcttctcctggatccaggagaacgcatccaaactgcccaaagagttgagtcactggggtgtcacctttctcaccattaccagtgtccaggaaccaggtgccagctcttgtgggcactgtggtctggccttctggtgccaagccaactgcaagcttgacctaagctgtccgatggcagataagtcccctgatgttcctggtcctcagtgtcccctggtcaaatgccttgatgaaatccagtgctccctgcccatggagagcaggaggatatccctgcgtgagctgtcggaggccagcttcagcgagtgtaggttcagcctgtcactcacagacctctgcatcatcattttctccggtgtggccgtgtccattgcggccatcatctccagcttcttcctggccactgtggtgcagtgcctccagaggtgcgcacccaacaaagatgcggaggatgaagacgaggacaaggatgactga

SEQ ID NO: 294603 - DNA, 1000 bp, Homo Sapiens; identical to SEQ ID NO: 119178

SEQ ID NO: 294604 - DNA, 1000 bp, Homo Sapiens
atgagaaaaaaactagaaaagaaaagagaagagatgcatgaaagcaggagacggtttcttgaacatatgcaggataaacatattatcaaagctgtagaacagcagcagcaagaggaagaagatgaaaagatgagaaaattcatcaaagcaaaaaagcgtcttatacaaatggggaaagaaaaagaggctgaaacacacaggcttatggagaaacgaagagaaagaatacataacttcctgagtgaactgttgaaagagaaacttgacaatgaagatatgattattgctagagatattgcagaagctgaggctgaatgggaaaaaagagaaagagaaaaagatgaaaaaaacaaagcagaattaaaaacaattgcagaatatcgagccattgtgatgaaaaataaagaggaagaagaaagacaaagaaaaatagaggctaaagaacaattgctggctgtcatgaaagcagatcagattttctgggaacatgaaaaggagaaaaaatgcaaagctgataaagaacatcaagaggttcaagatgcccatattcagcaaatggccaaaaataagtttaatgcaaagcaagcaaaacaagcagaattagattattgcagacttactgaagctcttgtggctgaaaaggagaaagaatttcaggactatgccagagaggtaattgaacttgaatcggaaacaacaaataaatatatttaccctcttgtaaaagctgtacaggaaggacctggaggtggccgtggaccagtgtttgtggacagaggtggattaagacccagctatcaggcaaatgatgttactggagtccagctccctttttataactctcagggaccaaaatataattttcaaaagtcaaagagaaggctaggttttacatggtagaaaaaaattatttttaacattgagaagactaagttgtagcatatatgagcttcaaatataaatggatttcagttaataaagctgttcttcatctaagtac

SEQ ID NO: 294605 - DNA, 1000 bp, Homo Sapiens
aaggaactgtgatggaccacttccaaaacagagacgggggcaggggctgaagggcagagaccaggtgatgtcagaaggaaagccgggttgcagacacagccgcccctgctctggtcctccagcgtgtttatgacgctcgtgcaggtcgacgagccatcctatggactagttaacactaaggtggagttcagacttttttagacaacggcgcgactggcagcctttctctatcaagggtcagacggtaaacgttttcagctttgcagaccagaggtccctgtggctacagtagcgcagacacagccacaggcatgtcattgaatggctgcggctatgttccaataaaaacttatttacaataacaggtggtggccaaattggcccatgggccttatttggtgaaccctgttctatgagatcacctaggcttcagccttaaacagtggaagccatcccctgaatgacaagtcacaagggtatcaaagaaagacccctgaattttcatggaaaaagctattcagacccctgcttggaaagctaaggcacactgccacgaagcagcaaggacgccttacaagtctcagtgcaacagagatggacacctgggctgggctggacaatgtttaaggttccttttagtccatgactcaagtgatactgttttaggctatcaggtagtaaacacgatcttagacatccccatctttgtaagcagaacagtacggcacttcaccacatctgcttcccaccatgcttctaagcagctgtcttccccctgctaatgttacaaccaaagcagccaccccacctcctctcgtgttgagcctcacgaccgctgacccagctggaaagccagcgccctgccgcgtcaccctgactctgctcagagccagcattccagccacaaagagggcctccttcctttcctctttcataaaaatgttttttgaagagttagagtatattttaggctttttatctttattaaaatttcatgtgc

SEQ ID NO: 294606 - DNA, 1000 bp, Homo Sapiens; identical to SEQ ID NO: 224851

SEQ ID NO: 294607 - DNA, 1000 bp, Homo Sapiens
atattctatggcaatcgaggtattctctattatgctcctttcttcaaggccgccctagcattaacattccatatttctactaacagtctgtttaaggcagtttagcttcttttctggcatgctcctcagaattcttccagcctccacctactgcccaattccagagccacttttctacttttaggtatttgttacagcagcacctcaagtacctagaaaactcttttatgcctgcttctctgccagatgacttgaatatggtactagatttggaattcacctttctccagggtcactgtttatttcaaagaggtgaatttacctgtgctagggttttcacactgggagtgctaccagaactaccacaggatgaaagtggtgagcccaccactgcagagaagttttctcagtgccgtaatatagaggaattctcaaaataagccctactccttttcacttactgaaaacaacttggataatgtgtaacagccagccccatttcaaaaagattaccaggggtaaaacaactttttcatgggtcaaaatcatcttccgaagaaaatgatttcttaaaagaattgaacattgtaaatcaaagggcattgtcctgttttggattaacaaaacaggaaaaataaccaatccttgtaaaattatttgaaattttcttgtttttatcagttgagtgcctatagatgcacatacaaaaacaactgccatttttgtatataatagtcttccaagatagagatttacattaggagagaattaaacatccaggagggatgaacagtatttcatgtgtgctatgtagtgttttgcttcattgagagtcattttcatgaattatttttactactgcagtcatcttaaatttataatcatctcaaaaaagatgtcacaatgaacagacaaccatctgtgaggtcagtcattttgcatgatgtatgtaatcaaaaagtttgaaatgtctgcttactaataaagaatgttttcactg

SEQ ID NO: 294608 - DNA, 1000 bp, Homo Sapiens
gtactctcgtcaagagaattctgcaactgcatgaacttgtaactactcactgctgcaatcattctttgtgcaatttctgagtcagtggcccatatctaaaatgcttggcagatcaatcagtctcgaagcctgacctggctatcacaaaatgatggctattgtcaattagcccacttcagaaacctcagacccttgtaggtagaaggaattttgatctgaaattgactttggttttcaatattcccaatatctcccccaccacctccaactcatctgagaaatagccctttcaacaccatttctctcctctcctccttctgcttaatttaccttcctaccacaaggctacaaagaaggaaaaatgttagtgattctccaagtcaaactaggcatgtcacctctaactactttcatttccctcaataattccatactccaaaatatggttacaaatgtttcacaagacagcaagtgacctgagaatattcatttggtttccaaagcaaactgccttgctcctttggggtgatttatggtatagaagaaactgacttaacatatactatagggaaaaaataagccatgaatcagcaagccaggcctgcgggaaaagtatgaacccaaacaggaaagggctgaggcaggtggtagggctggcacttatttcttccatctgcctcagagtttatccaaattttgaattttccgtaccttaaccatgcctaaatgctttggcttgttcaattttggcagattaagcagttcaaggtaagcagagaagtaagttcccaaccacaaggaatttaaaaggagtaggaacgtactttgaactacatttcccattttgcgatcattacgtcttctattacaatgccctactttggcagcatgaagagtactgcattaatttaatttaatttaaaatttaatttaaaactgtctttctctgtattttcaggagtttgaaaattcaaaaaataaataataaatgtcaataaaa

SEQ ID NO: 294609 - DNA, 1000 bp, Homo Sapiens; identical to SEQ ID NO: 224852

SEQ ID NO: 294610 - DNA, 1000 bp, Homo Sapiens
cactattcaatatcaaaagatgcctatatttctcgatgaggaggagcaacggcatctgcaggcactggaaagagaagcagaagagcttttccaacaactacaagacagtcaagtgagaatgacccaacatttagaaaggatgaaagacatgtacagagagctgtgggagacatgccacgtgcctgacgtggagctgctccaggatgtgagaaatgtatcagcaaggactgatttggcacagatgcaaaagccccagccagtgaacccagagctcacttcatggtgcataactggagtcctagacatgctcaacaacttcagagtggatagtgctctgagcacggaaatgattccttgctatataagcctttctgaggatgtgagatatgtgatatttggagatgaccatctcagtgctcccacggatccccagggagtggacagctttgctgtgtggggagcgcaagcattcacctccggcaagcattactgggaggtggatgtgaccctctcctccaactggattctgggagtctgtcaagattccaggactgcagatgccaatttcgttattgattctgatgaaagattttttttaatttcctcaaagaggagcaatcactatagtctctccaccaactctccacctttaattcagtatgtgcaaaggcctctgggtcaagttggggtgtttctggattatgataatggatctgtgagtttttttgatgtttctaaaggttctcttatctatggttttcctccttcctccttctcttcccctctgaggcctttcttttgctttggttgtacatgaaaagttggtttcacgatgatttattgtgacctcccacatatgaggcaaatactgtcctaagacactatgtgcgagagcctgtgagctcattgtaacttcatggaatgtaattactatgtggttatgaatgggataaccaccttgaatgtgtacttttgttaattaaattattttaattaataa

SEQ ID NO: 294611 - DNA, 1000 bp, Homo Sapiens
agtccagctgacttggacgagtgttcatgtcttgaagtaagtgagagtgaggaatgtgtgtttctggaagccaactcttatttaagtcaggaatcagaaaacattctatttgaattacagacaggcattcctttggaaaatgtctacaaaatcacgactgatttgaaatcattttacagtgaagattcaggttcccattgtactagagagtgcagaaaggaaaccttaattattacaccaccttcctgtaagtcccacaaaagcaggaaatatagatcatcttccaaaatgaaatctcctgactggttgtgtcatagttcatcaaatactgcggaaattcagtctaggtcatctagtgtatcattcagtgaagagaagatttcatggactaccaagagcagaacaagttactcttcagctcccttaactgaatcaaatattaaatcacatcttgcaaaaaaccaaggcaagtctcacaggcacccagaaagccaagaaagaaagaaggccagatctgatttatttaggaagaacagcagtcattgggaccacgattacagttgtacacacagcaaagggaaacgtgacagaaagaagagagtgtatgattatgagtcagaaagattggattgtttccaaagcaaacataaatcagcatcaaaacctcatcatgacgatatcaacttctattctgaaagaaaacaaaaccggccctttttttttgcctgtgtaccggcagactcactggaggttatacccaaaaccattcgctggactattccccctgaaaccttaaggaaaagaaacttcagaattcccctagtggcaaagatttcaagttcttggaatatatggagttcctccaaaaagttgttggggtcgctctcggggtcccttactaccgtttttcatagctgacattaccatagctaaactcctctgaagtggacagctggtcgctattgtgatattctgtgaaaaatacaatcatataacatcc

SEQ ID NO: 294612 - DNA, 1000 bp, Homo Sapiens
tctcatgtactcatatgagcacgcatacatagcataacattagcagcatatttgtccaataaagtttaattttactttctgttattacttgccaagcgtcccttttttttttttttctaactttcataggcccttgttctatgctatttcctggaaacaaatgcaaagcagtataatatggttgacaaaaacgtgattgaaattggagctggaacagggctagtctccattgtggcaagtttacttggtgctcacgtgacggccacagatttacccgaattacttggaaacctgcaatataatatttcccgaaacaccaaaatgaaaagcaagcatttgcctcaggttaaagaactctcctggggagtagctttagatacaaacttccccaggtcttctaataattttgactatattttggcagcggatgtggtctacgctcatcctttcttggaagagctcctcattacctttgaccatctgtgcaaagaaaccaccatcatcctgtgggccatgaaattcaggttggagaaggaaaataaatttgtagatagatttaaggagttgtttgacctggaggaaatttccagtttccctagcctgaatattaagttgtataaagctgtgaagaaaaaccggaggagcgtatgacatcctcgatgaggatgtggaaatgctaaggcaatttttagcaaataatcactttaaagaaaaccctgaataactttatgtgccactgagtttcccaaggggaaatacacacacagatgcgcgcgcacacacacacacacacacacacacacacacacacacacacaaaaccccctactacaagaatagaagatagtttcccaaatttgcctcaccccaggcagtaatttttccagatactgcatgtgagtctaggattggggtaacttgttcctagtttgtctctatcagcacccaggccctgggcctgccttctactcatgcggtaatagaagctcttggcaaagtc

SEQ ID NO: 294613 - DNA, 1000 bp, Homo Sapiens
cagccgcttgggcgagaaggagcccttcttccccttcctcaccgtgtacccgcctgcccctcgtgccaggcctgtggactccaccggcctggtggctacctgtgtgctctgctaccatgacctgctggcccagtggctgcagcatgaggcccgcagctcccaccacgctgtcagcgcctggtcccggcagtaccaggtggagacgttcgtgtgcttcttttgtcagcaggagaagaaacggtgtctggggctgaagtccgtgcgggtggcccggctgcccctgttcctatacaccctgcgagcaagccacagcctgttggtggatgacggacagcagctgatcatcggtgcttgcgtggagtgtgggaccctggtgtgtgcgggccaagggctcacccgccaaggacccatgagctggagctccccggtggcagcagcgacgaagatgaatcggcgctgtttccactatgatgcagctcctccatctctggcagcatctttgtcttggcacctcttttatctgaattattcacatctggacactgaggtctctgaggttcggagagggaaagtgacttgcccaaggccacacaggtgtcagctccaggggcagagtgctcccttctcagcccagctgcacacaggttttctctactccaacagtcgctttggggccatgggtctgagagatgctccttcccagtgactttctggtttcatgattgccaggtggccagagctgtgtccccgcctgcccttggcagaggacctcccagcagccccagaagtcacctccatgcagagcgcagcatctggcctgcagcctgcagagagctgggctgagcacgcttggaatacccactggaaacttctcactaagctctagctctggagctcctggcgccatctccctgtttggtgagatggttctgagcatattggccagatcttcccaggactcacatgtcataagaatttctctggatagcaggagaaacgt

SEQ ID NO: 294614 - DNA, 1000 bp, Homo Sapiens
gatgtcttggatgtccagtttctgtggttaatcccttacttgcttatccagtgacagcaagaaactttctgatttaaagtctttcaattgaccaaaactttcttattggattctgtttcagttctcctattaagcactgcagaaacgaaaggaaagcctaggaatatgaaactaattaaaaaggcacttggtgatatgacatagtactatgctagccgttgtggatgtaacagttcatttcttatactgcattgtgccttcccaatgatgtcaaaccctagaaatattacagagatctacttttctggaaaagggtgagctctgtattgatctgcagtgactctgtttagatattaaagtaggttctgaaaagcgacctgtgtggtccctctgattagactagttaatgtctatgtgatgggcatttatttatctttattagcaaggtttaaaagagcaaattatcaagacacctatatcttttggccagactatataatattttgtcagagtatgtgaagaggagacccaatttccaaatgaaggaactttgctttttctctgtcatgttgaagagctaatatactgtgtagattttcccctaaatatggctttcttagctttatagatgttgagataatatcttttgaggaacacatgtcaagcaggaaccttggcatagatttggtttcagttgttttaaggcttaattaatgaaatgccttaatcagctttccaaacatttttatatatgaatacagcagaccaaggagctggatctcctgctatccttacacgccttgtatctatcaactaaagctgtcattaatgacttgggcaaaatggcaagaggtataataaagtcttcctgtgaattagccagtagggtctgacacaactagtcaactaacaaggttcctgactagtacctcagtatttcagcaccttaagcactgataaatttcaatcagtcaacaataaagtgagtgttccaactaga

SEQ ID NO: 294615 - DNA, 474 bp, Homo Sapiens
atggcaccaaaagcgaagaaggaagctcctgcccctcctaaagctgaagccaaagcgaatgctttaaaggccaagaaggcagtgtcgaaaggtgtccacagccacacaaaaaacaagatccacatgtcacccaccttccggaggcccaagacactgcgactccggaggcagcccaaatatcctcggaagagcgcccccaggagaaacaagcttgaccactatgctatcatcaagtttccgctgaccactgagttcaccatgaagaagacagaagaaaacaacactcttgtgttcattgtggatgttaaagccaccaccaagaaccagatcaaacaggctgggaagaagctctatgacattgatgtggccaaagtcaacaccccgattcggcctgatggagagaagaaggcatatgttcgactggctcctaattacaatgctttagatgttgccaacaaaattgggatcatctaa

SEQ ID NO: 294616 - DNA, 1000 bp, Homo Sapiens
tggtgcagaggtgagtgatcagcagaatgggacatacgtggtgagttaccgaccccagctggagggtgagcacctggtatctgtgacactgtgcaaccagcacattgagaacagccctttcaaggtggtggtcaagtcaggccgcagctacgtgggcattgggctcccgggcctgagcttcggcagtgagggtgacagcgatggcaagctctgccgcccttggggtgtgagtgtagacaaggagggctacatcattgtcgccgaccgcagcaacaaccgcatccaggtgttcaagccctgcggcgccttccaccacaaattcggcaccctgggctcccggcctgggcagttcgaccgaccagccggcgtggcctgtgacgcctcacgcaggatcgtggtggctgacaaggacaatcatcgcatccagatcttcacgttcgagggccagttcctcctcaagtttggtgagaaaggaaccaagaatgggcagttcaactacccttgggatgtggcggtgaattctgagggcaagatcctggtctcagacacgaggaaccaccggatccagctgtttgggcctgatggtgtcttcctaaacaagtatggcttcgagggggctctctggaagcactttgactccccacggggtgtggccttcaaccatgagggccacttggtggtcactgacttcaacaaccaccggctcctggttattcaccccgactgccagtcggcacgctttctgggctcggagggcacaggcaatgggcagttcctgcgcccacaaggggtagctgtggaccaggaagggcgcatcattgtggcggattccaggaaccatcgggtacagatgtttgaatccaacggcagcttcctgtgcaagtttggtgctcaaggcagcggctttgggcagatggaccgcccttccggcatcgccatcacccccgacggaatgatcgttgtggtggactttggcaacaatcgaatcctcgtcttctaa

SEQ ID NO: 294617 - DNA, 1000 bp, Homo Sapiens; identical to SEQ ID NO: 224853

SEQ ID NO: 294618 - DNA, 1000 bp, Homo Sapiens
ttaaaaaagctttaaaagccagaacaaccattaatttctctcgaatgccaatagtgactagaagctccacaaaaagaaagcaaagtgcttaaactacttttgtcatctaagatttttttgtccttctgcaactttgctaatacagattctggaagaaaaaagaacactttcaactcacacacaatatgatgttctggcttgaggtttgatttgttactttttattatttggtttttatgaggcagggtctgactttgctgcccagggtggtatggaaatctggcctcaagcgaacctcccacctcagcctcccaaagtgctgagattataggcattagccactgcacatggccatggccaggtttgttgcttttttttttttggaggaggaggaggaggagtctctgtcacccaggttggagtgcagtggcaccatctcagctcactgcaacctccacctcctggtttcaagcagttctcctgcctcagcctcccaagtagctgggactacaggcacatgccaccacgcccagctaatttttgtatttttactagagacgggctgttcgccaggctggtctaggactcttgacctcaggtgatccacccaccttggcctcccaaagtgctgggcttacaggcataagccactgcacctggccattttgttgcttttttgaaaagtgaacatattctctcttttgtagcctgttgatgaactgggaattcagtgtcatcattaatattttacagtgttagttaagtgtgaagatctttcttttaaaaagctgtggtttgatataatgacaacaaaatggcaattgataaaaattagatattgaatcaatctttgatttctataataataccatagtaaaattaaaagtgaacataaaaattaaacatcataagcaaactgcattctttgtgtgtttatgttttttgttaaaatttgttgtactccctgttcaccaggtctgaagaaaaataaattttaaat

SEQ ID NO: 294619 - DNA, 1000 bp, Homo Sapiens
aggactgggtgtggggcccacgaaactggacggggtgccagggcctggtgcctggtgccggggctgggtggagggagacagcaccgggactgctgctgggccccgggagtgggtgtgtgggaagcctaaggtggtggggaagatctatggtggccgggacgcagcagctggccagtggccatggcaggccagcctgctctactggggctcgcacctctgtggagctgtcctcatcgactcctgctggctggtatcaactacccactgctttctcaaaacctcctcatccttcatcctcagctctggcagggagttccctggcccctgtgtctgtctgctcaacccagacatgcgtgagagcattggcagtgtctgtgctggccacctgcagggcttctcttcagtgtgcaccatgctcctcaaatcccaggccccgaagaactatcaggttctgttgggaaacatccaactgtatcatcaaacccagcacacccagaagatgtctgtgcaccggatcatcacccatccagactttgagaagctccacccctttgggagtgacattgccatgttgcagctgcacctgcctatgaacttcacttcctacattgtccctgtctgcctcccatcccgggacatgcagctgcccatgcaactgtcaccacccttctatctccaggagggcaagggcgattctggggggcctctagtctgctacctccccagtgcctgggtcctggtggggctggccagctggggcctggactgccggcatcctgcctaccccagcatcttcaccagggtcacctacttcatcaactggattgacaaaatcatgaggctcactcctctttctgaccccgcgctggctcctcacacctgctctccacccaagcctctgagggctgctggcctgcctgggccctgcgcagcccttgtgctgccacagacctggctcctgctgccacttaccctcagggccccatggcagaccctgtga

SEQ ID NO: 294620 - DNA, 1000 bp, Homo Sapiens
gacgggcacaccaggcggcctccgggggaacccggtccggaggcagcagtgtccacctttcagacccagttgcaccatcttctgcaggactgtattttgagcctgaaccaatttcttccacgcccaattatttgcaacggggagaattttccagttgtgtttcatgtgaagaaaactcaagctgcctcgaccagatctttgattcctaccttcagacagagatgcacccggagcctttgctcaattccacacaaagtgctccacaccatttcccagacagcttccaggccacccctttctgctttaaccagagcctgatcccaggatcaccttcaaattcctccattctctctggctccttagactacagttactcgccagtgcagctgccttcatatgctccagagaattacaattcccctgcttctctggacaccagaacctgtggctaccccccagaagaccattcctaccaacacttgtcctcacacgcccagtacagctgcttctcctcggccaccacctccatctgctactgcgcatcgtgtgaggcagaggacttggatgctctccaggcagcagagtacttctacccgagcacagactgtgtggactttgccccctcagcagccgccaccagtgatttctataagagggaaacaaactgtgacatctgctatagttaatagaaattacagtaattcagaacatggcatgggtatatctatttttctaccacgtctagatgacactgcaaaatatgcaacttggtaacacaatatcccaagcacagtttacatgtcactatttccaattttctgatgctaagcattcatatgaagtcctcagacccggtcacagcgccactcctactttgtatgctcatagtttaaatttttgtaggaaactttcaattgttttactttttgtataacgaacaaatgctgtctccttttttactaataaataattttgtattactaaaaaaaaaaaaaaaaaa

SEQ ID NO: 294621 - DNA, 1000 bp, Homo Sapiens
ccaagcaagggcttggttgagaaggaacccattgctcatattgttgggggagctatgaacctgacatgtcagtggccaggactgagacagctctccctggtcctgtcattgcatggctaatttcaggggagtctgaggtcatggctttatttttgctaacagatgaagttcaaggatgttcttgtttgtagggcctttgctaatgagcagttttttaattagaaaacatttcttctctctttgtgagttgatggtattgctcatttccttctctacccaacctgagagatcatcttcactttaaagcaaaccatgccccttggcttgccattctttcagcagcacatgccacgttctaagcagatgggcttccgtgatcccgttttctagtttggggtaactgagtcttgaatgctttactagtccggcaatctttggacttaggcttctgccctttgagactcacatgactttctggtttggggtctggtcatttccctttcaatttttgaatctccttctctgttcagttggcttggcaaagtaccctctgttctcatgtcactaattcctgctctaggtcatctttcctttgtgcagcccacattcccaccatcctgtgaactttgttgtacttggtgttgggcaactggtgagtgttgtgacaggctcagacctgatccttcctcaggagcaattggagaccacaaatttaaagcagaaatacctgttaaaagcttggctttccttatatgagtgaggctcccagcttgggtgtggcctcctgggctcacggatcagcttgctgggccagagggggtcttagtaatgtgctagagagacacatgctcccttctcatcgtagagagcctgcatgctgagaggctccctttacacacctgcctctcgctggcttttcctttagacctagccaccagtgttttgaatcatggttttgttttgtttttgcatgcaaaaaccagaacatgacttagaaatt

SEQ ID NO: 294622 - DNA, 1000 bp, Homo Sapiens; identical to SEQ ID NO: 119180

SEQ ID NO: 294623 - DNA, 1000 bp, Homo Sapiens; identical to SEQ ID NO: 119181

SEQ ID NO: 294624 - DNA, 727 bp, Homo Sapiens
gttgcaacctccagaaagaattcgtggtttcacccgggaaaacagctccccggattaaacggataggtttacacatactgatccacccagctattcatcttctgtttgctgctttaattgggtgcggttaaaaggccacgtccctaggcgttcaccggctttcttgccatctgctgcatgaaaactgactttgccgaaaaaattaacaaagaagagcgaaaatgacagaccgcaaccgggataagaaaagtacttcaccttcaaattcagacacagaaatgaaatctgaacaactgcctccttgtgtgaaccctggcaatcctgtgttttcatgtatgttggatccaaagacactccagacagccacctcactatcaaaacctcaaatgattatgtataaaaccaattcaagtcattatggtgaatttctacctattccacagtttttcccctgcaattatactccaaaggagcaagtattttcaagccatatcagagcaactggattttatcaaaataacactctaaatactgcacctgacagaaccagaactcttgattttcctaatattcaacacactctatgaaaatatattcctttgtatattgaagagaaaatatactcgggaaaaatgagtgttaaatctaagggtagaatacctaataaagaagataaaaagttttgaatcaatttttaaaataagttaaataaagtatttcaactgat

SEQ ID NO: 294625 - DNA, 1000 bp, Homo Sapiens
acaccccgaccacccggtccccaaagacccgaaaggcgtccagcccccagccttcacccccggaagagatcttagagccccccaagaagcgaacatccctcagtccagcggagatactggaggagaaggaggtggaagtggccaagctgcaagatgagatctcgctgcagcaggcagagctgcagtccctgcgggaagagctgcagaggcagaaggagctgcgggcgcaggaagaccctggggaggccctgcacagtgccctctcagaccgggacgaggccgtgaacaaggccctggagctgtccctgcagctcaaccgcgtctcgctggagcgagactccctgtctcgggagctgctgcgcgccatccgccagaaggtggcgctcacgcaggagctggaggcctggcaggacgacatgcaggtggtgatcgggcagcagctgcgctcacagcgccagaaggagctgagcgcctccgcgtcgtcgtcgaccccgcgccgtgccgcgccccgcttctcgctgcgcctgggccccgggcccgccggtggctttctcagtaacctcttccgaaggacctgacggctgggcccagagggctgcccttgcccacttaggggctcactttcctcttcaggccaatggagcgacagggcccagattgtcttccaaaagaagctgatgccctccccgccccaggatgctgggcaagggctcatcgggagcaggggctcatccggagcaggggccagctttgtggggcaggagctccaggtgggtggcaggggcaggtgaacagagctattttccgaattaatatacgtctatcttttctagggcagggatggggctgggtatttatgtatcaagatcggacagagtaatatataaatcactccaccgatttggcccccattcatagaaagaaagagcatggtaaaaaagcctgaaactttattgtaaaaaaaaaaaaaaaaagaaaatgaaaaacactctaaaaccct

SEQ ID NO: 294626 - DNA, 1000 bp, Homo Sapiens; identical to SEQ ID NO: 224855

SEQ ID NO: 294627 - DNA, 1000 bp, Homo Sapiens
aaaggggaggagcgcagcagttgcatttccggaaacaacttctcctggagcctccaatggaacgggaaggagttcacggcctggtacagtgacatggagaccccactcaaagctggccctttctggaggctcggggtctatattgacttcccaggagggatcctttccttctatggcgtagagtatgattccatgactctggttcacaagtttgcctgcaagttttcagaaccagtctatgctgccttctggctttccaagaaggaaaacgccatccggattgtagatctgggagaggaacccgagaagccagcaccgtccttggtggggactgctccctagactccaggagccatatcccagacctttgccagctacagtgatgggatttgcattttagggtgatttgggggcaaaaataactgctgatggtagctggcttttgaaatcctatggggtctctgaatgaaaacattctccagctgctctcttttgctccatatggtgctgttctctatgtgtttgcagtaattctttttttttttttttttgagacggagtctcgcactgttgcccaggctggagtgcagtggcgtgatcttggctcactgcaagctccgcctcccgagttcaagcaattctcctgcctcagcctcccgagtagctgggattacaggtgcctgccaccacacccagctaacgttttgtatttttagtagagatggggtttcaccatgttggccaggcagatctcaaacttctgacctcgtgatgcactcacctcggcctcccaaagtgctgggattacaggcgtgagccactgcgccctgcctgtttgtagtaatttttaggcaccaaatctccctcatcttctagtgccattctcctctctgttcaggtaaatgtcacactgtgcccagaatggatgaccaggaaccttcaagagtggctgaaaagattgcagagttatcataataaattgctaacttgcgtatttcct

SEQ ID NO: 294628 - DNA, 1000 bp, Homo Sapiens; identical to SEQ ID NO: 224856

SEQ ID NO: 294629 - DNA, 605 bp, Homo Sapiens
actcagaagactggacacaattccgaaggtcgcccagaaggagaggacaatgtcatttctaactgtgccatacaaactgcctgtgtctttgtctgttggttcctgcgtgataatcaaagggacactgatcgactcttctatcaacgaaccacagctgcaggtggatttctacactgagatgaatgaggactcagaaattgccttccatttgcgagtgcacttaggccgtcgtgtggtcatgaacagtcgtgagtttgggatatggatgttggaggagaatttacactatgtgccctttgaggatggcaaaccatttgacttgcgcatctacgtgtgtctcaatgagtatgaggtaaaggtaaatggtgaatacatttatgcctttgtccatcgaatcccgccatcatatgtgaagatgattcaagtgtggagagatgtctccctggactcagtgcttgtcaacaatggacggagatgatcacactcctcattgttgaggaaaccctctttctacctgaccatgggattcctagagcctgctaacagaataatccctcctcaaccccttcccctacacttggtcattaaaacagcaccaaaccgta

SEQ ID NO: 294630 - DNA, 1000 bp, Homo Sapiens; identical to SEQ ID NO: 224857

SEQ ID NO: 294631 - DNA, 1000 bp, Homo Sapiens
gcacatgcgtgccccaaggatgaggggcatcctcaaggcccccagctccctgcttacctttatggagctggtacaggaacaggcaagggccacccagggcatgggacccatcctggtgcactgcaggagggcagcctcttcacccattcagttcctcaggggctgtccccgcagtgtgggcatgggccagacgggcaccttcgtggccctgttgaggctgctgcagcagctggaggaggagcagatggtagatgtgttccatgctgtgtttgcattctggatgcacgggcccctcatgatccagaccctgagccagtacgtcttcctgcacagctgcctactgaacaagattctggaagggcccttcaacatctctgagtcttggcccatctctgtgatgaacttcgcacaggcgtgtgccaagagggcagccaatgccaacgctggcttcttgaaggagtacgagctcttgctgcaggccatcaaggacgaggctggctcttacgcacccctgcctggctatgagcaggacagccccatctcctggccagaggagctctgggagctggtgtggcagcacggggctcatgtgcttgtctctctgtgcccactcgatgccatggagaaggtcagttgcagcaagggtgcgacccagctgggcaccttcctggccatggagcagctgctgcagcaggcagggtctgagtgcaccgtggatgtctttaacgtggccctgcagcagtctcaggcctgtgaccttatgaccccaacgctgaagcagtatatctacctctacaattgtctgaacagcgcactggcagacgggctgcccctgagtcggcactggtcactgtgcaggagaggtttgtgccctgtgggatggggacagcattcctgacacatccacgtgggcctgggctccccagaagggcggcctccactgggccctgtgctgcaaaggtaaagggtcttggaataaagacctgtggccaagcgtgaa

SEQ ID NO: 294632 - DNA, 1000 bp, Homo Sapiens
tttcaaaagaaatctgaaaaagagaagacaaacaaagaaactgagacagaaagtggaaatgaaaactccggctacaattcagatgaacaaaagaccacagacaccgcttctctccctcccaaatcctgtgaatccagtgatcctgaacaaagaaacagtagctgtggccctcctcaccagcgggctgatcaacgtccacccaggccagcaagtcatccacaggcttcttttaatctggccagtcctgagaaggtcagtaatacaactgtagtatagcaaagccttccccaagctccactgagcacttggctgacaattcaaaacacggcgatggcatccttcctttccatcctaagactggcctgcagctttgccaacattacctgaagaggagatgtcggagtcatcagaactgatacttgacagtgagagaaggaatcgattttcccagagttcaaagtagaatgtgacttttaagaggtttcatggtttttgtgaattccatgaagttactaagtaaaagctgcaaattcatcataatttttctcaacattcaacactcctacttgttaatccaacaaatggtagataaaagtctgtattctaccatgcctttcaaaagtttttattatctgaaagcatatgaagatgatatttatgtatatttaatatgtaggggtattattacatattatcagtgaaatacgagtataaaaattagggtcaaccagaaatctgcaattgactgtcaaaactgagctcagttaaagtaagattcaattctaacatggatgtgcacgttcctaaatatcttatgattgaatatttacatgaaggcattcatttttatctgcccctttatcagacctatttgcatctcctcaaatgaattagatgtggcctatgctttgcagaggatggacctcacctactccgcacaccgtgaaaaaactggaaatgggcattgtagtctttaattaataaaaacaccaaaaatgtg

SEQ ID NO: 294633 - DNA, 1000 bp, Homo Sapiens
tcaaataaagataggaaaagaagaaaacccaaatattataggcagaaatgctaaaggttttaaaatatgtcaggattggaagaaggcatggataaagaacaaagttcagttaggaaagagaaggaagagacacaataaaagtcattatgtattctgtgagaagtcagacagtaagatttgtgggaaatgggttggtttgttgtatggtatgtattttagcaataatctttatggcagagaaagctaaaatcctttagcttgcgtgaatgatcacttgctgaattcctcaaggtaggcatgatgaaggagggtttagaggagacacagacacaatgaactgatctagatagaaagccttagtatactcagctaggaatagtgattctgagggcacactgtgacatgattatgtcattacatgtatggtagtgatggggatgatagaaggaagaacttatggcatattttcacccccacaaaaatcagttaaatattgggacactaaccatccaggtcaagaaaagtcacatgccatagccatggtattgcacatcattcatcttgcattctttgagaataagaagatcagtaaatagttcagaagagggaagctttgtccaggcctgtgtgtgaacccaatgttttgtttagaaatagaacaagtaagttcattgctatagcataacacaaaatttgcataagtggtggtcagcaaatccttgaatgctgcttaatgtgagaggttggtaaaatcctttgtgcaacactctaactccctgaatgttttgctgtgctgggacctgtgcatgccagacaaggccaagctggctgaaagagcaaccagccacctctgcaacctgccacctcctgctggcaggatttgtttttgcatcctgtgaagagccaaggaggcaccagggcataagtctactcacttatatctgtttgtctggaacataacccatgtttgtttttacaacaaataaaattgatcttgaat

SEQ ID NO: 294634 - DNA, 1000 bp, Homo Sapiens; identical to SEQ ID NO: 119184

SEQ ID NO: 294635 - DNA, 1000 bp, Homo Sapiens
ttaatgaggagccaaagacaacattctacctgctgctcccttcaagctgaggaatgagtttaattgacttcaaagtcccattattctcaaaagtagcaaaggtacaacatggctttgcatgaatcaaaggaagggaacaacaagaacttaaaaaaatagtttgcagatggttgaacatctctttaataattagagaagaatatcttttctttctttattgtttacagataccaacatttttcaaagccttgcagtagatgagtgagtctcctgttacatttctcctgcagcatatattctgtggatgtgttttcctaagcagactaattatatgttgctctcttcttttaccctaatgaaacatagatttttctgttttgaatttgtcacttgtttgttacatttgtcaagtgttttaaatattacattggtcctttatttgcttttgagaacacccaatagtttaaaaattaaaatgacatgaaggtcaattctaagacaggaatgatactactaaatcctggacttgcctatgataacaagctcgagctacacacttttattgtcagaataaatggaatatataggaaggagttaattggaactggttagtacctaaataagatttttcaaagtaagttttttgtcgtattggcagaacagtgttaaaaaatagacattgtcatcataaacacccacaactatatctgtagaagataatttaatgcaatattctggggaaaatacagttgccaaaattaatctccttgttttctttcattgtgcaatgtggagttaaattttttttctattgagcagtgtgtgtgtgtgtttgtgtctataatttatatatgtgcttgtatacatttctatatacacatgtatgtgtatgcaaaatatgtatatatacacatatatataaaatgtacactaaatatgtatatatgtatattcataaaatgttttgctgtatggaaataaaaaagaaggtttctaaagg

SEQ ID NO: 294636 - DNA, 393 bp, Homo Sapiens
ggacaaatggacctgcggtaggagagagggacaacagtaggagcaggcagatcttgctgtttcaaccaaaacctcatgctgaccagagttgaggaacagaagaagatggtgaaggcctgcaggtataggtgttcagcatgtcatctgaaatattccccacagaggcaaaaagaaaggaaattatctctgaaaaggaatgggaggacaagtcagcagaatatgtcaatgttttggttgaagaagctgcttgaatctgggcttttctgtgccatgtgttctcccagggccagcacaaagaagggcttttggtgcaggcccaagaccaccataatcatcattgattattcctctccacgccagtgtctctaaataaactttctcttctttctctga

SEQ ID NO: 294637 - DNA, 1000 bp, Homo Sapiens; identical to SEQ ID NO: 224859

SEQ ID NO: 294638 - DNA, 1000 bp, Homo Sapiens; identical to SEQ ID NO: 119185

SEQ ID NO: 294639 - DNA, 1000 bp, Homo Sapiens
tggttttttattgagttttcaatgcttggattcataggaaagctgtttagatctgaggacttaactcactttgtacggttttttttaatgttctacaaagagaaacccatagactggctcttgaatgacatttttcaggtaaaggtgtgtgacgcaggagaagatcttagaaactgtatgaaacgaaagaagcaaatacgtattcagtataaaccttctcttttccagcatgtgggtatacattcatcattccctagaaaagaacaatatgaaaaaaaaatatgaagataaataagaagaaactctgtaatacctggaacctcagataaccttgatatctaatggcatgtttcagaaattgtagtaatgaaaatacataattatctagcagataagtaaacaatgcataaactagtagacttgaaagtactaaatgacttcttatgtcaagacaaggtagaacatttatattgcttttaccctattacaatttaatttaaaaatactaaaggcaaggaagttttttttaaattaagaactgcactttattgacttcgatagtgagaccatcacataatctcaataaacagttaaaagttcgaaagcttgctattgtcagggagaagtttggggtgaattggtatatgccgttatccattttgttaagacacctaaagaaatagaaagcacaaatttaaacaagcctggatctgacagtgccacaatgtcttcttgtctattaatagatgcatttaaaactataaacttatccctatgtgccatttgaaccgattatcaaacatcttgatatatatgtattcttatagtcatttagttctaaagatttcatagtttctctcatcattgccttcttaacacacagattatttgggagtttttttcccaaatatattggttttctccatcttttattgttaatttctaaattacttgcatagtggttatagaactttacctgtgtgataaaattttgagaatt

SEQ ID NO: 294640 - DNA, 1000 bp, Homo Sapiens; identical to SEQ ID NO: 224862

SEQ ID NO: 294641 - DNA, 1000 bp, Homo Sapiens
ctttactttctgtggcctgatgaggaccatgggtgattttgtgtacccaaagcgctggggactgcccaccgtgtggcccagtcactgggaaggagccccagagagccggctgtctgacatgatggctcagggtggtcatccaggttgaaaactgaccgtgtgatgtttgatttgggcttcatttcgtgtgtaggagcacggttagactcactgttaaggaagctggatgcacttctctaaaaggctgcactttccgtgagcacttttcgtggtacaatccacatgacccactttctcccctgggggacgttggttcagaggttggtagcacttggggagagtatcttaacacagtttcttgacagcagctctggaacttagtatttctgccccgagttttgccacactgagactttgagtagctcctggtggactcaaccctgttcaactcagagacgggcctcctctcactgatgcaaagctttaaggcttctctgactgttctgaaactcttcgtattcttgtcaagtctaaagagactgaagaaaagatttaaatactaataaaaatcagtagataatttctgtaggttctgctggaggaatacaaactgtttggtgttttaaatttaagtgtagaaattgtagaatgtggaattagcacagatccttcctggctttctgtttcacttgatcatttagcccagaccacccaggatgttttccaaaatgttccacaggcgtgtcccgctggatccatttgtccttgtcacttggagaaaggccagtccctgtgacggggcagccctctctgtccctcggtcagctcgtgtgaatcctgggacctcttccggtcggctctgcccgctgttctggggtcgactgccacgacttttgattcaagaagcttcctccaggcgggagcggctatttttcctaaatgagaattgttacattgcaaattgttgaataaaatattttgcgctccttcaagcaccttc

SEQ ID NO: 294642 - DNA, 1000 bp, Homo Sapiens
gatggatgctgagacagatgagtgcatggactacactggctgcagcccaggcgccatgtcctctgagtcatccaccatggaccggagctgctccagcacccccgtgggtaacgagagcaccgcggcagggaacaccatctctatgccgacagcctcgggggccaaaaagcgcttctggatcatcgaggacatgtcgcccttcggcaagcggcggaagacggcgtcctcccggaagatgctggacgagggcatgatgctggagggcttccggcgcttcgacctttacgaggactgcaaggacgcagcttgtcagttctcgctcaaggtcacccactaccactgcacgcgcgagaactgcggctacaagttctgcgggcgcacgcacatgtacaagcacgcgcagcaccacgaccgcgtggacaacctggtgctggacgacttcaagcgcttcaaggcctcactcagctgccacttcgccgactgccccttctcgggcaccagcacgcacttccactgcctgcgctgccgcttccgctgcaccgacagcaccaaggtcacggcgcatcgcaagcaccacggcaaacaggacgtgatcagcgccgcgggcttctgccagttcagctccagcgccgactgcgccgtgcccgactgcaagtacaagctcaagtgctcgcacttccactgcaccttcccgggctgccgccacacggtggtgggcatgtcgcagatggactcgcacaagcgcaagcacgagaagcaggagcgcggcgagcccgcggcagagggccccgcgcccgggcctcccatcagtctggacggctccctgtcgctgggcgccgagccgggctcgctgctcttcctgcagtcggcggccgccggcctgggcctggagtcgctgcccgaggcggcggcggaggcgctgcccacagccagaaagccaggaccacccgaactggacagggagcagggagggaggagtggtcgcacggagcgtacctga

SEQ ID NO: 294643 - DNA, 1000 bp, Homo Sapiens; identical to SEQ ID NO: 224864

SEQ ID NO: 294644 - DNA, 852 bp, Homo Sapiens
atggcccaccggggagcccattttgcctttagatcccgctggcagaagaccgacgatgaactctgtagacatagcatgtcttttatccttcacaaagccattcgcaatgacttctttcagagctatctctacctgctggaaaaaattcccctggtgaaattgtacgctttaacaagccaagtcatcaatggtgagatgcagttctatgccagagctaaacttttctaccaagaagtaccagccacagaagagggtatgatgggaaatttcattgaactgtccagcccagacatccaggcctctcagaaatttcttaggaaatttgttggggggcctgggagagctggaacagactgcgccttggactgcggctccgggataggaagggtcagcaaacacgtcttattgcctgttttcaacagtgtggagctggtggatatgatggaatcctttctccttgaagcccagaactacctgcaggtcaaaggtgacaaagtagaaagctaccactgctacagcctgcaggaattcacaccccccttcaggagatatgatgtcatctggattcagtgggtctctgggcacctgactgataaggaccttcttgcatttctttcccggtgccgagatggcctgaaagaaaatggcatcatcatattgaaggacaatgtggcccgggagggctgtatccttgatctctctgacagcagtgtgactcgggacatggacatcctccggagcctaataaggaagagtgggctggtggtgctgggccaggagaagcaggatggcttcccagagcagtgcatccccgtgtggatgttcgcactgcacagcgacagacactcctga

SEQ ID NO: 294645 - DNA, 1000 bp, Homo Sapiens; identical to SEQ ID NO: 224865

SEQ ID NO: 294646 - DNA, 1000 bp, Homo Sapiens
aggcagcttcgcggggctccagcccatggggctgctgtgggcgttggagcccgagaaagccttggtgcggctggtgaagcgcgacgtgcggacgcccttcgccgtggagctggaagtgctggacggccacgacaccgagcccgggcggctgctgtgcctggcgcagaacaagcgcgactttctccggccgggggtgcggcgcgagccggtgcgcgcgggcccggtgcgcgccgcgctcttcctgccgccggatgaggccagcctcctggccggacatggttttgctgtgcttgccctggcttatttcagatttgaagacctccccgaagatctgaatgatgtacatctggagtactttgaagaagccgtggactttatgctgcagcatccaaaggtgaaaggtcctagtattgcgcttcttggattttccaaaggaggtgacctgtgtctctcaatggcttctttcttgaagggcatcacagccactgtacttatcaatgcctgtgtagccaacacagtagctcctctacattacaaggatatgattattcctaaacttgtcgatgatctaggaaaagtaaaaatcactaagtcaggatttctcacttttatggacacttggagcaatccactggaggaacacaatcaccaaagtcttgttccattggaaaaggcgcaggtgcccttcttgtttattgttggcatggatgatcaaagctggaagagtgaattctatgctcagatagcctctgaaaggctacaagctcatgggaaagaaagaccccagataatctgttacccagaaactggtcactgtattgacccaccttattttcctccttctagagcttctgtgcacgctgttttgggtgaggcaatattctatggaggtgagccaaaggctcactcaaaggcacaggtagatgcctggcagcaaattcaaactttcttccataaacatctcaatggtaaaaaatctgtcaagcacagcaaaatataa

SEQ ID NO: 294647 - DNA, 1000 bp, Homo Sapiens
agactgttggagaacttttcttaatcagtcatcccttaagttacatataagatctcacaatggagacaaacactatgtatgtaaggaatgtgggaaagccttcagtaattcctcacaccttataggacatggaagaattcacagtggagagaagccctatgtctgtaaagaatgtggtaaagctttcactcaatccacaggacttaaattacacatcagaactcacagtggagaaaaaccatataaatgtaaagagtgtgggaaagccttcacccattcttcataccttactgatcatacaagaatccacagtggaaagaagccctatgtatgtatggaatgtggaaaagccttcactagatccacaggacttattttacacatgcgaattcacactggagaaaagccatatgaatgtaaggagtgtggaaaagcttttattcattcctcataccttacaaaacatgtaaggattcacagtggagagaagctgtatttatgtaaggcatgtgggaaagcttttactcgttcctcaggacttgttttacacatgagaacacatactggagaaaagccctatgaatgtaaagaatgtgggaaagcctttaataattcctcaatgcttagtcaacatgtaaggattcacactggagagaagccatatgaatgcaaagaatgtgggaaagctttcactcaatcctcgggccttagtacccatttaagaactcacactggagaaaaggcctgtgaatgtaaggaatgcggtaaagcatttgctcgttccacaaatcttaatatgcacatgcgaacgcacacaggagaaaagccttatgcatgtaaagaatgtgggaaagccttcaggtattccacataccttaacgttcacacacgaactcacactggagcaaaaccatatgaatgtaagaaatgtgggaaaaacttcactcaatcttcagcacttgctaaacatctaagaactaaggcatgtgaaaaaacctga

SEQ ID NO: 294648 - DNA, 1000 bp, Homo Sapiens; identical to SEQ ID NO: 224866

SEQ ID NO: 294649 - DNA, 1000 bp, Homo Sapiens
aagccaggaactaatcgtcatttgctccacacgtcaaggttctgccacaggcacgatttcttccacagtgttattctctgattacatctcacgtccagaagaccacaccagcatcctccactttgacaagaatgagacacagaagacctgccaggtcctgatcattgatgactccctttatgaagaggaggaatccttcagcgtttcacttaggctgccagtgggaggacagctgggagccagattccccaccactaaggtgactattctggctgatcgttatgatgaacctgtcctgcactttggggatgctgaatatcacgtcaatgaaagtgctcgctacgtggaggtttgtgtttggagaagaggcactgatctttcccaaccatcatccatcgccgtgcgctccagaaagtcagagcaggagtcagcagaagctggaacagattatgttggtatcagccgaaacctggactttgctccaggcgtgcgcatgcagacattccaagtgaccatccttgatgacctgggacagcctaccttggaaggcccagagaagtttgaattacttcttcagatgcctatgggtgcagtgcttggagaaccaaataaaactaccattttcatcgaggacaccatcacggacttacccagggcccaatttaagggctccactgacaggggctcagcccaggagacagtgaactatggggagcaacccaacactgatgactccacagctggctttctgccagctaagcattcaaaaatttgtctctgtcagcctcatctgtctgacacagtgggagctgagcctttctcagccaagattcaatatatggggcctgatgacgctgtttacctcaatttaatcaaaatcattgtgatgataccgcacatgaatgataggtgttaccacaagacaaaaggcacaggcatgcattctctgcaaggagaagggggacctcagggccatgcctcaggccactggaagaactga

SEQ ID NO: 294650 - DNA, 1000 bp, Homo Sapiens
acatcagagaacccacacaggagagaaaccatatgaatgtaatgaatgtgggaaagctttcagccataccccagccttcattcaacatcaaagaattcatactggagaaaaaccctatgagtgtaatgcatgtggaaaggccttcaatcggagtgcacatcttactgaacaccagagaactcatactggagagaagccctatgtttgtaaagaatgtggaaaaaccttcagtcgaagtacacaccttactgaacatctaaaaattcattcttgtgtgaaaccctatcaatgtaatgaatgtcagaaactgttttgctatagaacatcactaattcgacatcagaggacgcatacaggagagaaaccctaccagtgtaatgaatgtgggaaatccttcagcttaagctcagctctaactaaacataagcgaatacatacaagggagagaccctatcaatttcgaacaccggatgtgagctcacaactcaaggagaggtttgtgaaatattgtgaagaacatgggattgataaggaaaacatatttgacttgaccaaagttgaacttagagatgagggaggtggccactgggtgcggggatcgtggattggtcccttcagatccgccccggtgtccagaggagccctagagaatgccttggccggctcgcagggcctctccaacgccctgctctggctcgtctcacctgcaggagagaggtaccctgcgagtgggcagatacctggcgcccccggtggccgtttgcgcgcatctcaggctctgccagccgctgccgcccgggcgcagttcagaaagagccaggtgtcctccggagcccaggccgaggcctcttccaaaaggtctggggatcacgctggcttcctcccattctctgcagatctgagaagccaggtcgccgaggagcatggggggggaaggcagctcaaaagggctgtagggagattggggaagggtgaggctacagcagcctcactaaggtag

SEQ ID NO: 294651 - DNA, 1000 bp, Homo Sapiens
cggctcttcaaccaggccggctcttcagcctacatccccatctcatcaagtaaaagggatttttcaactggaccaaccagatggtttaacagtgcactcccacaccattcaactacgcaagggagatacacttaacatatgcagtcgtataacacctactaacattttcaaacattaaacctttaaaaaagagttctaaagaaatagaagcttgaagtatcatctctcaagtatatagacactacttcatggtgtggtaatatatgcatatagaagctagtaaacacctccaggagatgcaaaaggaattagaactgccacaaggtgcaagcaaaaccttgagtctccattgatggtgaagtattttcactatttggcatgtcttctctagtacctagagcagtgcgttgcatgcagtagcaggtttataaacatttgcgagtaaaacatccaacctgatactcaagttctgtttttcctcttctaatccttcacccatctgagctaaagtctagacctaaggaggctactaattcagggatcgagtaatctgccaagcaagagtttattcaagcacagtttgaaataaaggtttcaaatgcatagcctgtcgatactttggaaggattctcatcataacgagtatgcaatttgctataaagaagaatgcccattacggactaaatgtttatgtcctcctaaaattcatatgttgaaggcctaactctcaatgtgatgattatgtggagatggtgcctttgggaggtaactgggcttagatgtgggcgtgagggtggggcctcatggtgaaatttgtgcccttgtaagaaaaacacaccacaggttttcattcttcctctgccacatgaggccacagtaagaatgtgaccatctgctagccaggaggaaagtcctcactggaacccgcccataataacactccagtctggggcttttcagcctccagaaccatgagaaataaatttctagtgtttaagtc

SEQ ID NO: 294652 - DNA, 498 bp, Homo Sapiens
atgatcacgtcccagttatcatctgtgctaattgggactgggaagggtttgccaaggattggagctgcagactccagtgctcagagcagcaggatggcacttggtgtctggatgcctttggagttgcacatacagcttctttatgaaaggaagaaactggaagacaacaaagggtcagagaggagggagaaggctgtgctaaacaaggtgctggcagtgtcaggagctggcctcctgccttctgggttgagagatatcgaatgctgctttgccaagagctgctttcttgagcccctccaaggttctcctatttggactctgctgcagatcccttgccctggttctcctcctgttgccaaggcccaggctactgtctgggcaagagcacacatagggtttgaaaccttccagaacaaaatgccagtctacctcctcctatctggaatctaaggcctaacccatcactgcacctgatgacaaggacctgcagtgctgcag

SEQ ID NO: 294653 - DNA, 555 bp, Homo Sapiens; identical to SEQ ID NO: 224868

SEQ ID NO: 294654 - DNA, 989 bp, Homo Sapiens
attgtacggtgagagaatgagagcaaaacctcagagcccccttcccaggaaccctgtcccagcctggtccccacccaccaccaccactgacccgatgctagagaaggatgcggctggaggtgacttcccagccaacttggtcctccaactaatgccactgaagacattcccagctgctatccggggagtcatccagagtgagctcaactattctgtgatcctgcagtgggtggtgacaatggaccctgagcctgtgctgagctggaccttcagtggggtgccctgtgggatgggagagaagctgttcatccgacggttgtcctgtgagcagctgggcacctacatgtgcatagccacaaacagcaagaaacagctggtctctgagcctgtaaccatctcgctgccaaaacccatcatgcagcccacagaagcagagcccatggagccagaccccactctgtccctgtcaggaggctctgccatcgggctccttgcggctgggatcctgggagccggggcactgattgcaggcatgtgtttcatcatcatccagagcctaaggactgacaggcagagaataggaatatgcagctgaaatgtgggcaactctcctgtcagctgaagagatgggtgctttgtacctctctatccacgtggaaaaaaaaacccatcccatagcttccaagtctacaacatctctgttcaagggaacaacccaacgtaaccagactccctttgccctgtttctgaaacacctgaagaaaacatctgatgggttgactcggtgccatccttggtcccatcgccgtgacacgttgtgcaagcaaagcatcagaggctcatccctgtctgtgggagctcagtgctcagaaaacaggggggaggttttaccttggaaattggccagaccccaaaatatgtcttttacacatgctgctttttttttctctttttcaaaaagaaccaaaaaataaattaaaacaccacca

SEQ ID NO: 294655 - DNA, 1000 bp, Homo Sapiens
aagcttattaaaaaggacctgagagttgccaggaagcacagaaagacaaaattggaaatgtctagttccatgttgatgccttcagaagatgcaggtgaacaaagagaggccgggaaatcagagctagttgaaacccaacatgttaccttagagccagagctaccactgagttctctaagcacagtcaaatcccaggattatgctgaaacagagcaggaggtcattttacaagctatagaggccatggaggccacagaagccctggaggccacagacgccatggaagccatagatcaaggtagcatgaaagattatggagatgtgatctctaagctggaaagaaaagaacacattaaaaggctttggaaaaagtcaatgagaaaaggcagaattgcagatgtgctgtggaaagagaaaaaagatttgaaggatatttcagaggtgactacagaagaacctaaggaagacatcgtaaaaattgatgagcaagaagaaggtaaaagcaagaaaagtgaaaagaagagccggggtttggctgggactcctggacgtgcaggtagaccagacaccagatcttggagggatggcatttgttcttttgtcacttcaaggatagcaagttcccatccaggaatgttaaggtgaaggtgaagctcactgggtagcttatgcagagtatttatcttccttataaatcacacaccttttctctgctgtgaatggagatttccaactaacatcccaagtgtatgtctcttccctgaccacacaggttgttatttacacagatggcttcccacagtcagacttatttttacctgtacaccatcttcctttttcttcccttacaatcatccagggctcttttccttgctccaatgatgtaattacatctggcttagaaaagtcatgtcctgcttacaaagaaaaaaaggccacttgatatagaaacatactttgctgtcaaaattacaattgtaataaatcaaggatcaaaatg

SEQ ID NO: 294656 - DNA, 1000 bp, Homo Sapiens
acaagaagatggctggtaatttaagcaccgatttcccaagtgcccactctcctttgtgctctgttggcttttggcctaaagctgccccagagtgagggtgtagatgtctgtgtctgtgagatgcctttcccttccccctctgctccaccgtggttgaggggggtggggcctggccccgcacacaggtgagtcgtgtacaagcctaacccatggcacctcagaggctccacctgtgggtcctggttcatgggtgacaactttggaagagcacagctctgcaattgacccgacccacttatctagttaggaagccagacactgcccagatgactctagcaccctggcttctgctctgactttactgcagctagtcatccatccgtcaggtggcgttcagtctcagaatactgattccgtggaagagcaggttgatttaggtcagcttctccttgattctagaagcaagcggtagtcaaccacctccaattccgccaatctcttgcccccatcatttgtctctgacaatacttggtgtttttccctggttttctgtcactggcacaggagggtacagttgggagagtgcgttcctggagctcagtcctgcatttgttcacgtgcctcacagcaggcctttgtgcccttgaatctcaaacatggggatctgcttggtacccagagctctggtcattgtgtccaaccacacaccccaccccatccgtgtcctccatctcacccagaaccacagggtgcccactagtgtcagggcccaaagtgccagccttctcttctgccttacctagtctacctatttatttcctccactttttatcttaaaagtagctaagccatgctggtgcccatactccaagcaggctgcctcagctcagagaagtggtcagagagtagagcacagaacctgtgatgtggggacatttggttttcttgcagatcatttaatgaatcctcaaggactaatgaaataaatgctagactgctg

SEQ ID NO: 294657 - DNA, 859 bp, Homo Sapiens
agaaagcaaaagggatgccggtggtggcagatgcttcctcctggccaaatcccaaatcccaccctcagcacccacaccctgagcagtgggcaggagaggcctgaaaacgtctgtacaaatggcttccgagaagccctggagataaaggagccagaggcagccacacatggttcccagaagctgaatgctgcgcagacgacaggaatgacttcacccatcctgcttccacccgccatagcagtgaccaaagcagcactgggaccacagctgagcacctcagaagataagtcctggggtgattcttgtcatctccgtgaaaaggagaagacaaaaaggcagaggctgctgcttgaggatcccttcacctgggctgcatagctcacccatgctgaccaacttccccatttcaagcttcagactcacagccgcgctagttagggtaccacttgttcagacagctgttttcattcacatctccaaaggtcctctaccttagaagaagaaagaaagagggaaagagaaataaaagagattaattaagaacactggggccaggcgcagtggctcacacctgtaatcccagcactttgggaggctgaggcaggcggatcacctgaggtcaggagttggagaccagcctggccaacgtggcaaaaccccatctctactaaaaatacaaaacttagccaggcatggtggtgggtacctgtaatcccagttactttggaggctgaggcaggaggatggcttgaacctgggaggcagaggttgcagtgagccgagatcatgccattgcactccagcctgagtgacaagagactctgtctcaaaaataaaaacaaaaaacaaaaaaacaaaa

SEQ ID NO: 294658 - DNA, 1000 bp, Homo Sapiens; identical to SEQ ID NO: 119191

SEQ ID NO: 294659 - DNA, 1000 bp, Homo Sapiens
ccaacatggtgaaaccccgtctctactaaaaatacaaaaattagccgggtgtggtggcacacacctgtaatcccagctactcaggaggccgaggcaggaaaatcgcttgaacctggcaggcagaggttgcagtgagccaagattgtgccactgcactccagcctgggcgacagagtgagactccatctaaaaaaaaaaaaaaaaaattctgccttattcagtaattgtattaaactttctctgatttctccaagaagataaaatgattggagagctatttaggaaacctggtctaggattatccagtatacaatagtacaaattacttacagccttacagtgcaacataagatttggtgtctatatcatggttttccaccatcttttggtttagtttatattgggttcagaaattgagtcttactcattttaaatagaataagccatttccactatttttcaaatggatttttctgtttacctctgttcttaccaattttgttcattttcatttgtggcaaacatttgtatcaatgagttttaacctaggttcatatctacattgtatttagatcaactatgggtttatataaatgccaaatttagtacaacaaatttaggtcatcaggtgaatacaagtattttttttaacaggaaacattttattatagaaaaaagattaatgataaagtcatattggttgaaaaatattttttaactgtgttcatgattgttgattctccttctacttcagtgttatactgtgtgaatcaagcactgtgtcaaaacagagcatttccctcttaaaaattacaaaccgaagtgatagaagcatgtcagaattgagaagacattttgaagcaagaacaatgtgatgtacctattttattatgtttgtatataaatactattgtaaattgttcagagtgaaaacatttgacaaactctaacactacaatcattttttctaaattacataaataaagctaattttcattat

SEQ ID NO: 294660 - DNA, 1000 bp, Homo Sapiens; identical to SEQ ID NO: 224873

SEQ ID NO: 294661 - DNA, 1000 bp, Homo Sapiens
ccaattgcgaaatgaactaaaaatacataatattgacattcctacaacacaacaggtgccacacattgaagcacttctgaaaagaaagctatcagaacaagaagaactgaagaaaaaacctagaagatcgtgtactcttccaaactatactaaaggcagtggagatgttttgggaaagattgcacatctagcacaaattgaagatgatagagctgcgatggttatttcttggcatctggcaagtgacatggactgtgtagtcaccctaaccactgacgctgcacgtcgtatctatgatgaaacccaaggtcgtcagcaggtgttgccccttgattctatttacaagaagactcttccagattggaaaagatctctacctcatttccgaaatggaaaattgtattttaaacccattggagatccagtctttgctcgagacttgttaacatttccagataatgtagaacattgtgaaacagtatttggtatgctgttaggagacaccattattttggataatctggatgcggccaatcattatagaaaagaggttgttaaaattacacactgtcctacactgctgaccagagatggagatcgaattcgaagtaatggaaagtttgggggccttcagaataaagctcctccaatggataaacttcggggaatggtatttggagctccagttccaaaacagtgtctgatcttaggggaacaaatagatcttcttcagcagtatcgttctgctgtgtgcaaactagacagtgtgaataaggatcttaacagtcaattagagtaccttcgcactccggatatgaggaagaaaaagcaagaacttgatgaacatgagaaaaatctcaaactaatagaggaaaaactaggtatgactcccatacgtaagtgtaatgactcattgcgtcattcaccaaaggttgagacgacagattgtccagttcctcctaaaagaatgagacgagaagctacaagacaaaataggtga

SEQ ID NO: 294662 - DNA, 1000 bp, Homo Sapiens; identical to SEQ ID NO: 224874

SEQ ID NO: 294663 - DNA, 1000 bp, Homo Sapiens; identical to SEQ ID NO: 224875

SEQ ID NO: 294664 - DNA, 1000 bp, Homo Sapiens; identical to SEQ ID NO: 224876

SEQ ID NO: 294665 - DNA, 1000 bp, Homo Sapiens
gtgatgtttttcataagcaccataaaatgggttctggaaaaactgattaccttagcatcctgtaatataacttatggtagcagattggggaaaatgaagcagcccactgaataattgacaaagtctgcttggagaacattctaaggtacaatatcatggagctcctttttcctttctccactaattgcgtgatgagctattgttctggctgttaattctccaactcggctgtcatttgaagtggcagacttaatatggaaagtttttataattatgagtttgaaaaagcattttaagatgatacagaaagtatccaaaacaacagaaaaaaaaagccacgtcattttagatgaattgcgtgccttaaaatggtgaacgttagaaaattaaacaagtctggattccacaagtagttccaagtcaccaagtgacaaaaacaaggttaacattaaaaaagaaaaacaacaacaacgacaaaaagctccaagctgcagtggatttaattatgaggctaaaactacctcatactttccttggaagaactaattagctatggtttattgtagggttttgtttgtttgttttttaaagcaaatgatttccatattccagattgatcttttttgtcatctttgcttcaaaattacataaaaggtgctcctttcccccttcttttatacaagtttcttgttcatattgtgaatagaaaagtttctgaacaacttttttggaacattttctatctatattccaaagcatgtaatatatacataaaaacgatttgttaaactggtccttagtcatttgtataattagaaatgaagtttgggaaaaaattttggaaaaaagacaagcaaaaaaaaataacttattccttttttgcatatttgtatagccttctagaatcagaaataacctttttgcatattcttttattgttctgacttttcaagacctattatttttttacataggtcaataaacaaaaggtgtgctactg

SEQ ID NO: 294666 - DNA, 1000 bp, Homo Sapiens
ccttaaatgaagttgtggagtttaggtgtcagcctggctttggcatgaaagggccctcccatgtgaagtgccaggccctgaacaaatgggagccagagttaccaagctgctccagggtatgtcagccacctccagatgtcctgcatgctgagcgtacccaaagggacaaggacaacttttcacccgggcaggaagtgttctacagctgtgagcccggctacgacctcagaggatctacgtatttgcactgcacaccccagggagactggagccctgcagcccccagatgtgaagtgaaatcctgtgatgacttcctgggccaacttcctaatggccatgtgctatttccacttaatctccagcttggagcaaaagtggattttgtttgtgatgaaggatttcaattaaaaggcagctctgctagttactgtgttttggctggaatggaaagcctttggaatagcagtgttccagtgtgtgaacgtaaatcatgtgaaactcctccagttccagtgaatggcatggtgcatgtgatcacagacatccatgttggatccagaatcaactattcttgtactacagggttctgattaaaaggcaggtctgctagtcattgtgtcttggctggaatgaaagccctttggaatagcagtgttccagtgtgtgaacaaatcttttgtccaaatcctccagctatccttaatgggagacacacaggaactccccttggagatattccctatggaaaagaagtatcttacacatgtgacccccacccagacagagggatgaccttcaacctcattggggagagcaccatccgccgcacaagtgaacctcatgggaatggggtttggagcagccctgcccctcgctgtgaacttcctgttggtgctggttcacatgatgctcttatagttggcactttacttggtacgatcatctttattttaatcatcattttcctctattggataattttcaagcacagaaaaaggta

SEQ ID NO: 294667 - DNA, 1000 bp, Homo Sapiens
aacatgagtgttgtgtgacggccccaagatctttattatttttttgtatcagaaagcgccaatgcccaggcttatgtatgtcccagcagaagccaccgcttgaactagaggtgaactttgtcatcaagctgtcctgtgagcaggtctggatcacactctggctcagttttctcatctgtaaaatgagacatcccctcattgtgtggcctggccttgtctcagggagcgcccgccgagtgctgctgggttgggcagtttttctgcccagtggctctgatgggggctcagagccctggcctcccctgggaggacacgctgtgcagccaggacagctgccgggagtgtgcccaggtcactgctatggccttcgcagggtgactggcaggtatcaaatcagcccatgaaggaagatggtgattttccttttttgtagctaaattgggcaggctcttgggaagtagaaagttctggtgtttttgctggtgaaggttttgactgtggagctcttctaacacccatatcagtgtctgtttctctgcatgtggctgctgccctgttggtggagctctgggggcagagaccaggccgccgtccagtggcgccccgtgcgcaccagctgcctgctgtttacacccaggtgcgccgagtctctttcatacagcacagcaaatgataatagctagtgacaatgtgtttcctgtgcactcgtgaaaatgcagggaggacaactgcatgcttagatctgtttcttttttcagacattcaaatgttctaatatctgaagctaacattttgtaggatataggatgctgattatgtgaacaattagtcattggttttctgtactgctatgaatatgtctgatttcaagttttggtcaaatatctaaaatgcaaggtgaaagtgcctttgtctctatgcttctaaaatcgctcatgcttagttgtggtatggatgtcttccgcagtgtatcatcaataaaatttcactgttttcacag

SEQ ID NO: 294668 - DNA, 497 bp, Homo Sapiens
catggcacgctgtactgtaagctccgggtcggtgtgcacttctgttttgttcctgcatttcaagccatgcgaattgacatgttttcttccccaaggcatttgtttgttgatggtaccagctgtcaaaaaccaagcaagtggcagtgctagaggtgccacaaaagtgcgaaggaagtgtcaggctggatgtcaaaatgaacaccttggagaactggatgatggaacagacggtaaaaatcagctaaacatcagagaaaatggaggaagaggtcaaaactgtgaacaggaactagaagaaagtgtagcagaaaaagacttgtcacaaacttcgagagatttggagaaaatgatgtcaaaacacatcttcctcaagcccatgctgagtatctctgatttggttaatttcttgattgtcccaaatttggccaatgaaaaagtccttcaaggccaggtgtggtagctcatgcctataatcccagcattttgggaggctgagg

SEQ ID NO: 294669 - DNA, 1000 bp, Homo Sapiens
ttggtttataattgtctcttttgtcttgttagtaaacattcatttgcaacagttttgaaggtgctgagtggaaaaccgaaacacatggttattgcgtattggacctagaatgaaataattgcctcaatatttaacaacaagccattcttatctcaaagatttaaattcccgaatgtcccattcgcaaatcatatgcaattgaagtgagcagcatgagcatctgggtcatgagggccttcatttacgtaaatttgtcactaaaacccagtagtagctctacaaaatcttaaactgctgcagtgctcaaggagatggaatatctttgtcattggtgctgaggagagcatttcggtagaagacagttgcgcctgaagattgagtgtaaatcattcaaaccagtggttctcagtgttggctgtatacactttgtagtcactttggaatgttggaagacacatcgatgcttgggttccgtatgccaagattctgatgttggtctggaatatgagctggtcataaggatttttaaaaactttctggtcatttcaatatgctgccaaggttgagaaccactgttgtaaaattcaccttgagttttctcatctgcaaaatagaaaaaaaaaaatccttgctccctcccttcactacctcacaaggatattgagggtaaaggagaaaataatgggaaagtgcttgtgccgtggatgaaaagtgctattaaaagtcaaaggagtgttctgtttcaattcatagtatgatcagggaaagtgtaactgagtatactttgttgacttgggaaacctggagcactttctttggttggttaacgaagcatgcagatgtggaagcagacgttactattatccctactatggtcttctgtcatactgagacaggctgttttaattacctggttttacataggaaagaagaaatattaaggcttaaagtttgtaatgatcaatggctcataattcattaaatcttttcatacaaggaa

SEQ ID NO: 294670 - DNA, 1000 bp, Homo Sapiens
tattgggtgactttcaaagagaataaaacactatttcccttgccttttcatactagggcagtatctcctctagctagtgcccatacagaaaattctatcaccatacaaaatttaatgcagtatttatgttttaaagcacaggtgtaccgaaaactgtgaaaagtctgaatttatgggttctatgcatgcatttttgcctaacctagagaaagagtttgataaatttttaccagctttgaagatggattaacttttgactttgagctttaaacttttaagtcagacatttcaggactaatttgattttgtagatatcattgtaagaactttatttgaaagactgaataaagggatttgatttgttttcatcatttaagcacagtcttgtgatgatgagaacataagtgtgattcttttctgtattttgaggtccctaatccaaagcccattttgctaggattttttctgctatcagatgtgttttcactctaaacctagtcttttatgacatgaattgattacttcctgttaattttctatcctcccttactatcctccttttttgttttcagtattcagtatttcagtattctagagtagattttgatataaaagaaaataattcttacatcatcttttgcaacaaattttgttttctgaattgataataaatttaaaaagttgattcctattttcacatatgttcatatgcccctatgtttgggggtatcactcagttttcccttttttgtgtaaagatgttttgtaaaacaaaattgtctcaaagtgattatattatatatataaaaagtaacagattttaacaaaggttaaaagattcttggggtaacagattcttctggggcttggaaatcttccatttctcttgagggttttttttaatgagtgttaaatatgttaaaatttttatttctacctcatgtgtttttttaaattattacttgaagttttttatttaataaattttttctactaatgg

SEQ ID NO: 294671 - DNA, 1000 bp, Homo Sapiens
tgttctcatctgtaccgtatgattttatttcataataactttatgtatttggactgtaacaaacaaaacagaacctaagtcgccccgaaaaatctttccaagccttttcaaaacacttatctgcagtccagaattcagctcttatgaaaagtgagagtgcactccagttttcacagcagcaataagtgcgggaaacaaaaagatcctcttcccaggaaaagttgagtggggaagagttcagacactgttgtagctggtgaatcattgaagtcacctggtagtaccaaataagggctgaggcgcctggaggtctttgtggggtcttccctctttaaatgcaaacgtaagaaggtatatgtgtatatacatttatatacgtgcacatgtatactcgtacatgtatgcacacatacccatacatgtatatgaactccgttctgatttcctctgaaattttgttgataccatctaaatacctctttgaatcaaaataacttaattttagctcattcctcaagagaaagagaaggatccccaaggaagaaaaactgttgtaccttctgtgattctcaaaccaaaatgtgatgcgcttctgttttgttatcttaaattgttgtatcatatctttctgaaaccattctgaattaagttgaaattttcaacatttatactttaactgttctaaatttaagcctacatgtaaatcttttttggggggaaggtaacttgaaaagtttaacttgaaaatttgacctttaaactttcatattctaaggtaaataatagcctataaccaacaacagctttcccagaggtcttgaatttaacactaattgtttagttattgtttctatttctcatacatacataacttcgttttttgtggctggaagaaaaagtttctatattttgtatttgtctttgttcttctcatgcacacaatttactgttggtgtttaataatttggagctcataaaattaaaagttgtaattttgacc

SEQ ID NO: 294672 - DNA, 1000 bp, Homo Sapiens
tgctggctttccttagtgccatcttccttggaggcctcttcttggttttaatccattatgttctggagccgatctatgccaaaccactgcactcctactgaccactcttcaggaaaacgaaaacctgttctctccttcattgtgatgacattgatgagcaggaaggcactattcagagccttgttttgacagccctcatgccttaaggttagaggagtatctgtccatcactaagacaaatctctggagtcctggcttccagaaacaggattgccaaattgtccctgtggggctagattcttaccagcttaagaaggatattgctatcttcttagtacccgtaccttaggatttccaactgttttgaaagggaaatagtaacagtgatctgcttagagtggattttcactcaagtccttagtaagtggattttggggaaaaaagcacctgggcttctggttctttttgataatatataaaattattcattatgaggttgcagttgtttgcaaaggagaggcactcaaatttgaaaggttattttaatgtgataatttggaagacttactcagatgttggtcattgaccactctgtgcatatatttctgcagagctctgtgaaggcaatgagtgtcacttccctctgctctaataaagcaataaataatagctaaagggctgactttcacttcgaactcttggccacggctttttaatcaagttctttaggtttccttgggattagaggaaaggtatggaaatattgttttttgttttttgtcttgccatgtatctgtaggtttttttcttccatgatgtggtgggctgtgtgtgccttatttaattaccatgagtccattttggggtgtcttcacttttcatctttgtagccctttctccaaagctagtgaggaaggtatattctcaacatcagatataactctatacctgtctgatctcccagaccaaatgaaatttgcattaaatggaggggccctgg

SEQ ID NO: 294673 - DNA, 1000 bp, Homo Sapiens
aaagaggaggcggaggatgcagaggaggcagagccaggcagtcccagcgaagagcaggagcaggacgtggaaaaagagccagagggaggggcaggggtgattcccagctccccagaggagtggcctgagagccccactggggaggggcacaacctcagcacagatgggctgggtccagactgtgtagcttccggacagaccagtccttcagccagtgagtcttcacccagcgacgtgccccagagtccccctgagtccccttcctcaggggagaagaaggagaaggcaccagagcgcagggtatcagcccctgctcggccccgggggccccgggcacagaaccgcaaagccatcgtggacaagtttggcggtggggcccttcatggcctcctgcctctctggcttggccttgcacccctctcccctcacagggcagcttccggccccacggccttgttccgcaacactaaggcagccggggcagccattggtggtgtcaagaacatgctcttggagtggtgccgagccatgacaaaaaaatacgagcatgtggacatccagaacttctcctccagctggagcagtggtatggccttctgtgccctcatccacaagttcttccctgacgcctttgactacgcagagctggatcccgcaaagcgccggcacaacttcaccctggccttctccacagcagagaaactggctgactgtgctcagctgctggacgtggatgacatggtgcggttggctgtgcccgactccaagtgcgtctacacatacatccaggaactgtaccgcagccttgtgcagaaaggactggtgaagaccaagaagaagtgaggaggtgactggctctgtgggcagagatgggcagggtgcccagctcagcagccacggcccgggggttcccttctgctccatggaggcaccagagccaggggcttaggcaagggtgtgtggcgttggttttaactgcattaaaagtacttttgtaaaa

SEQ ID NO: 294674 - DNA, 1000 bp, Homo Sapiens
cctgttggcagtcgctttccttcccccacatctaaattctttggtttttagttgtttgttttttggatttttttttttttttttttggccttgtatcccaaggactaaaagattagcacagacacgttttgatgttgaatgaactagtaagtcacagtaggtggtagtcttcattgatttctctgtaagtttttaaagaatgtatgaagatagtcacgaatgtactgagtgttcgcatcccccttcagttcaccttggctgtgtctacaggacaacaaatgtttgacagggaataaagtcgtgtctggtgtcatttgcgctagcgtgcccctcccctttcggtgttggctccaaaccttcctttccttttatgtttgtggggagtggggaaccacatcagcagcaatcatcaaccaaccaaccaatgggatctacttagtggtgaatagattggctatttaattggtaaaagttgctggtctgaccacaccacagcatgaccactgggttcatttagagatggcctccgtttccaacgttccccacaaatgtttgcttctttcccagtcaagaggggatctcgagactcccgagtggaggtcgtgagcttgcaccccgcctggctgtgtagatcgactgtatagatacatgaagtgggggtgagggccaaggggctattactgctgttgggaaatacttgcctctcgtagatccagccttaatgtttttctgacatcctagtaatagcagaccctgcacaaagtggatatcagacttaatactgtgaggagacaaaataatgagaatagttttaccaaagataatgaaatctcgcatcatgtctgcattttaccatagattggagtgcatccttaggaaactgaatgtaacaaaaacccaggacatttttggaaattgtatgctctctagcaactttgtgtgaatttttatacaaacactgttttatgagttatataaaatgttataaaaatagaaaaac

SEQ ID NO: 294675 - DNA, 1000 bp, Homo Sapiens; identical to SEQ ID NO: 119193

SEQ ID NO: 294676 - DNA, 1000 bp, Homo Sapiens
tcggccttcatctgaaacgagagcttttctctatcctccaactttgtcggagggtccactcagactctcacctttccctccagggggaggaggaagaggcccaagaggcccagggaatcctctggaccaccagattaccagtgaaagaggagaatcaagctgtaataggtttactgatcctcacaaggctccttctgacactgggcccctgtcacctccgtgggaacaggaccgtaggatgatgtttcctccaccaggacaatcatatcctgattcagctcttcctccacaaaggcaagacagattttattctaattgtgctagacgctctggaccagcagaactcagaagttttaatatgccttctttggataaaatggatgggtcagtgcattcagaaatggaattcagtggaaatgataccaaagataatcttggtaatttaaatgtgcctgattcatctctccccgctgaaagtgaagcaactggccctggctttgttcctccacctcttgctccaatcagaggtccgttgtttccagtggatacgaggggcccgttcatgagaagaggacctcctttccctccacctcctccaggaaccatgtttggagcttctccagattattttccaccaagggatgtcccaggtccaccacgtgctccatttgcaatgagaaatgtctgtccactgaggggttttcctccttaccttcccccaagacctggattttccccccctacccgcacattctgaaggtagagtgagttccctttagggttgagtctgccttcaaatgagcctgctgctgaagatccagaaccatggcaagaaacttgacaatatttttgctctcttcaaaagtcattttgactattctcattttcagttgaagtaactgttgttacttcagtgattacacttttgctcatattcaaacttaatggaattataattctcaggatagtattttgtaaataaagatgatttaaatatgaa

SEQ ID NO: 294677 - DNA, 1000 bp, Homo Sapiens
gagtatgatcactctttcatgttgattgtttttataacctccacattttctcagcatttactattgattaccaccaagatcataaataaaaaaatttatttcccttaacattgacttagtaactctttacaaagctttacacaaggtccaggagacaaagaaatggaaaacctatggtgaaaacaatctggtttggaatacacccaaatacccaatacatagcaagtaactttagaataacagaatcactctaagggaccttagagatcacttctgcttgctcttatttgacagataagagaaaaggaagttctgggaagtaactaagatcatacagccagttaaaagcagagctggaactagaaccctgtctcctacttcctagtgtaacattctattaagccactggaggcattatatcaccaaataaaaattacaagtatatggaatttataggatttataagtcactgaagttgctcaacaaacccacccatttatatgtttcaataaagcacaactcctctatttaatttacagtggagtccaggaaagactcttctcatttattcctcattgaaagcattttatttttgtaattattatttttagcttttaaaatttaatttactcagtaggacttttttaaaaagataattcattcttcacctggttcaaaaatcaaaataatacaaaaaggtctactttccctttataagtagccattgtactagtttcttatgtatctttcagtgtttctttatgtaaatataggcaaatatgaatgtataatcttatttcttccattactcaggaagatggcatattatttatactcttctaataccttgctgttttcatgaaagaatataatctttagagatgtccacatcataacagaacttcttcattctttttataagtgaatagaattttatttgttcatactccatagtttaacaaactcctatagatgaaaaatctcactattttaaaatgtt

SEQ ID NO: 294678 - DNA, 1000 bp, Homo Sapiens; identical to SEQ ID NO: 119194

SEQ ID NO: 294679 - DNA, 1000 bp, Homo Sapiens
aacccacctggagacgcagttcacgtccaggctcttccactgtggaatcttgggcaagtcagtaacgagcctcagtttcctcacctgcaaaacgggtacagcattcctgtatgatagctcacgccgtcgttgtgaaaaccacatagacttggtcaattctcggtcctactctgccctcccgtctcagccctcgtgttgccattgcctctctcggatcctccaatcctcacgtccttcacctggtctctggccctggttcttattttctctcaattccctactgcctgtttcttactttgaacctggaggcagcctgcagccccatcccatctcctgccctctcctgatctaactccctgctgcatctcttgctctcattccttagacgtcctccccttttgaccccgttccttcatccatcctgcaccccagtcccccagccctaaatcctccctcctctcctcacatcctggtccctagcaaggtatagatagcctctgtgtcttaggataccccgggtgctgttccctcggtcaccctgttgcccagttccccgtttctcttgctctcattccttgtatcctttccccttttgagcccgtccattcatcggttctgcccccgactcccccagccctaaataccccagctgctgttcctccccatcacccagccaccggattctccattcacccctttctctcacccctggagccccgtgggtgggggcagggcatgagttccccagtccccaaggaaaggcagccccctcagtctccctcctcctcattcccttccatctccctcccctctgccttttaaacccatcccctccgattcccctcctcccccctctctccctggtgtcaactcgattcctgcggtaactctgagccctgaaatcctcagtctccttggcggggaagattggctttgggaacaggaagtcggcacatctccaggtctccatgtgcacaatatagagtttattgtaaaaagc

SEQ ID NO: 294680 - DNA, 1000 bp, Homo Sapiens; identical to SEQ ID NO: 119195

SEQ ID NO: 294681 - DNA, 1000 bp, Homo Sapiens; identical to SEQ ID NO: 119196

SEQ ID NO: 294682 - DNA, 1000 bp, Homo Sapiens
atattcctggtacctgtgcccatattcacaggcatgggtgtctctcgggggtgttgcaacttcttgaaaattcagcgtttgtccaccaggacgtagtaggcaggacttcagctcgctgctggcagaaaagggttgaagcccagactcctggtctcacatggacccaatcaccacatctcagatgaagaaatgaccttcccctcctggtgttgccccaaagcctaggagcttggcagggtcccacacaggatggtccttgtaggagacaggtttgacaagttgctgaggtgcctgatgggccaggcacttgtcatgaaatgagtttgcatcctgggggagcctcttcttcactggaaacctggcaaggatccaatttcccctttgcctgatccccacaggagcatagcagatagggaggggggtcacccaggtggctcttcctgcttggcccccactttccagaccattccaggcagggagagctgctgagctgactgcatgagctgcccacatggaggacccagccaccccttatgttcggcaggcagcccttgggctgttgcaggaccgtggccagttcttggtattgctcaagtcccctgggccttcagactggcgggtgacttcaagggagcaaccatcctgggcctctcctgggacaaacacttgccttcacccactatcgatgtcttgctcagccctcagaggagcgtggttggcgtggattacttcatgccttgattctgccttcccggaaaccacggtggcagcaggcttggatgtcaccaagtcaccgtgtttcatgctatttctggaggttctcgcctttgtggcctcggaaaggaaggcgatctggtgctttggggaaagccctcgggatgctcctccagatggtcttcttcaggccttttgctcagcattggtctgatcagttctgccagctctgggccatgatctcttggcactggcgcggctttccttcaataattccataaactcc

SEQ ID NO: 294683 - DNA, 984 bp, Homo Sapiens
atgggtgcccctccagctctctatggcgtctgctcgccgagccccgcaaaagaggcggggattccatcatgtgaccggggtgctgggcgccggcgcaggcgcggttgctgcgtagtcgtcgccgggctccgttgcccgcgctgttttaccttcccaacgcttgaggcggacgctggggggtcctgcgcctttccctcctgccgctggggactgcaggctaaggccatgtcccgaaagcaggcggcgaagagccggccgggcagcggcagccggaaagccgaggccgagcgcaagcgggacgagcgggcggcgcgccgggccctggccaaggagcggcggaatcggccggagtctggcggcggcggcggctgcgaggaggagttcgtcagcttcgccaaccagctgcaggccctggggctgaagctgcgggaggtgccgggggacggcaattgcttgttcagagctcttggtgatcaattggagggacactcacgaaatcatctcaagcacagacaggagacagtggactacatgataaagcagcgggaagattttgaaccctttgtagaagatgacattccttttgagaagcatgtggccagtttggcaaagcctggtacttttgctggcaatgatgcaattgtagcctttgcaagaaatcatcagttgaatgtagtgattcatcaacttaatgcccctttgtggcagattcgtggtacagagaaaagcagcgtgagggagttacacatcgcatatcggtatggagagcactacgacagtgttcggaggatcaatgacaactcagaggcacctgcacatctccagacggatgtgagtgaggcctcggatttctcccgtattccccgccctacaggaaacagattgagagctgtatatctggcgctaaaaaccagtaatgtttttgtagaaagttggcattgagaatctgtgggcctgattttaaaaatattttttatttcttag

SEQ ID NO: 294684 - DNA, 1000 bp, Homo Sapiens
gtgtgcagctgaggtggcatttgaagctgcctaaatgccacctgcaatagtctcctgtatgttggcacagaaatgaaacatgttatatttttctaatatgaatcaccttcttagaaatagttatcagtggtaaaaagtgatgaatgcaacacatttattttgagacaccatagcagtctaagtgtttttgtgtggtagagggaaatcctgatcttttttatgattgaaaaattgttggtggtgttttacctaaggaaaaaaaacattcgcaacatgttttctaccctgccacctcttttcagcaagctttggaaaagtaataggcgaagtagctgtaaagagaggcagcataatcaaagatcttattccccatagttgggtaaaataaagcctgaaggtaccaactagaatacctgtgcatcagacgaagtcaagaacaataggaataaaatgctttctgcatgtagccaaagcaaaacataatagaataaaagccagagactgtatatatttataaattagatcctaatctactgcaagataacttttctatttttaactatataaaataacctctgtctcagcattgggactgtgttagcaactattattgtggaataacccagaacattggatttataccaacaaataggcaatattaatacagtgtattaataaatttattacaaattattaatacagtgtattaataaatttattacaaattattaatacaggtaaatgttttatttgtagacatggactgtgaaataaacccaacacatcagtttttaagttcttattggtgtggtatcctctaaattaatgttatagaatctaaaaattcatgttgaaagggaatgattaaaacaatgtaaatctaaattgtatgtcatgcatgttttgagaatggtgaatgtttaatgctcatgaaaattgggggagggggttctattaacacaaagcttctgagatatttaaaataaataattattgcccc

SEQ ID NO: 294685 - DNA, 1000 bp, Homo Sapiens
taccctatgacccagtgattccacctacagtaatttatcttggaaacagcaaaaagtatgcacaatttattatagtcttatttttatagcaaagagtgagaggatgttaaataaattatgacaaattgatacaatagatactttctttgcagccatataaaagaatgaagaagctctttgtgtaatgatatgaagtgatcaccaaatgtattgttgttttcaaatgtttatttccaatatacattgctaagtggaaaaaaggtgacaaatatatatatataaatatatatataacacatattagtttacatatccataaacttcttctgcagagatacacaagacagtgataacattagttgtcaggaaagaaagctaagaggctaggggtcaaagacaagaggaagtcttttcactgttaatccattttttacattttcaattttgaaccatgtgaatgtattacctatttaaaaaataaacaaggccggacatggtggctcatgcctataatccaagcaccttaggaggccaaggtaggaggatcacttgagctcaggggtttcagaccagcctgggcaacacagtgatagcaataggaggcaggtaaattcctaggcagacagggaggggtccctggtgaaactcaaccttcaagccaaggacagtctaaagcctgaaaaccaagctatgagttctggataaatccatgagccagactgagagctcccattctcgtctggcaccctctctcctgattggtccttacccttcacctattttatacatacctacccttccgcgattggtcctctacactatcgtgcctatttctgaatggtgctttgtcaagcatagccacagaccaatcagcatgcacttgcccatttctagcccacaaaaacccatagactcaggctcgtggccagcaacccaccttcgggtcccctctcactgccaagagccgttctgtcactcaataaattctactttgccttac

SEQ ID NO: 294686 - DNA, 882 bp, Homo Sapiens
gcacattcctcgcattctaggattgagatacacagtttggttcttgtgagggcagccagggctggggaggagggcagagaacatcccagagatcaagactgctcttcttgctccctccccgactgacttggcccacactgactggcctgccacccctttacagtgatctccacccagtctctctctgcaaaggcctcccttggctctctgataaagttggagctgtgggtgcagcatttcacttggacctagcagcatcaatgagccagctcctcactggggaacatgcaaacccccagctgctggtgtgcaggaaaagaatccaggagatcacctgatgaagcccagcattttacagataggcagtggagcaggggaatccagttgacactgtggctaaatttcagaaaacctcccatgagatcttgcaaaggagatggagaaaatatggctgaatgccagcaagagcaaagtggtgaaaggaccctggtgagaggcccaaagaacaggaggtgtgagccaagagaaggtcctgccaggcctatgttgcaggctatttggaggctgaacttgaggaagacagatgtcagctttctgaagaaagtgtcaagcatttgtcccttacaaggactgggaagaaagagcatacattttccccgttgcctgcccttgacatatttataacatcccaggactggcactgaccatcctctcccaagtaacggaatgtcaagatgactgcagagattatgctgtgagtagaaaagctttatagtaagccgaggtgatcaccagcctccctgagctaaaataatcacagactttttttcttagtgacccctgtcctactctcaggcaccttatatcctcaaatcttaaata

SEQ ID NO: 294687 - DNA, 1000 bp, Homo Sapiens
gaacgccgtgggccgggcccgccgccgcgtgcacctcaccatcctggtactgcctgtgttcaccaccctgcctggggaccgcagcctgcgccttggggacaggctgtggcttcgctgtgcagcccggggcagccccacccctcgcattggctggactgtcaacgaccggccagtcacagaaggggtgtctgagcaggatggaggcagcacgctgcagcgggccgctgtctccagagaagacagcgggacctatgtctgctgggcggagaacagagtgggccgcacgcaggcggtcagcttcgtccacgtgaaggaggctcctgtcctacaaggggaggctttctcctacctggtggaacctgtaggaggcagcattcagctagactgtgtggtgcgtggagacccagtgccggacatccactggatcaaagatggccttccactgcggggcagccacctccggcaccagctgcagaatggctcgctgaccatccgcaggactgagagggacgatgcgggacggtaccagtgcctggcagagaatgagatgggcgtggcgaagaaagtggtgatcctcgtcctgcagagtgctccggtgttccaggtggagccccaggacatgacagtgagatctggggatgacgtggccctgcggtgccaggccactggagagcccacacccaccattgaatggctacaggcgggtcaacccttgcgggccagccggcggctccggaccctgcccgatgggagcctgtggctggagaacgtggagactggggatgcaggcacctacgactgcgtcgctcacaacctcctgggctctgccacagcccgggcgttcctggtcgtgagaggtatggggcatccctgtctggaccttcgtggacagaggcaggatctcttgccgatggggattgtgtggtgcttatgggagacctgtcccctgccttgccagctccccacctcttccctttgcttcatcacaagcccagaatga

SEQ ID NO: 294688 - DNA, 1000 bp, Homo Sapiens; identical to SEQ ID NO: 224883

SEQ ID NO: 294689 - DNA, 1000 bp, Homo Sapiens
atttgttggtggcattaaagaagacactgaagaacatcacctaagagattattttgaacagtatggaaaaattgaagtgattgaaatcatgactgaccgaggcagtggcaagaaaaggggctttgcctttgtaacctttgacgaccatgactccgtggataagactgtcattcagaaataccatactgtgaatggccacaactgtgaagttagaaaagccctgtcaaagcaagagatggctagtgcttcatccagccaaagaggtcgaagtggttctggaaactttggtggtggtcgtggaggtggtttcggtgggaatgacaacttcggtcgtggaggaaacttcagtggtcgtggtggctttggtggcagccatggtggtggtggatatggtggcagtggggatggctataatggatttggtaatgatggaagcaattttggaggtggtggaagctacaatgattttggcaattacaacaatcagtcttcaaattttggacccatgaagggaggaaattttggaggcagaagctctggcccctatggcggtggaggccaatactttgcaaaaccacgaaaccaagtggctatggcggttccagcagcagcagtagctatggcagtggcagaagattttaattaggaaacaaagcttagcaggagaggagagccagagaagtgacagggaagctacaggttacaatagatttgtgaactcagccaagcacagtggtggcagggcctagctgctacaaagaagacatgttttagacaaatactcatgtgtatgggcaaaaaactcgaggactgtatttgtgactaattgtataacaggttattttagtttctgttctgtggaaagtgtaaagcattccaacaaagggttttaacgtagatttctttttgcaccccatgctgttgattgctaaatgtaatagtctgatcgtgatgctgaataaatgtcttttttttttaaaaaaaaaaaaagaaagaaaaa

SEQ ID NO: 294690 - DNA, 930 bp, Homo Sapiens
atgcaagccagcagtcgcatgaggaagcacagctgtggacatctgtccccaactgctgacaactgtgctgcagaaacagtgctgctcaagactgggaacatccccactcccgagaccacccggacacaacggagccatccagcgccctcagaggccctgggcacacgggcagatggtcaccgcctcctaagggagcagcgcgcgcccgttgctcgctgcccgttggttgttgctggtagctccggagggcggggttggcgaggaaacgcggccatcctttactacctgtgccgcaagtacagcgcaccatcgcactggtgcccgccagacccgcacgcacgtgcccgtgtggatgagttcgtggcttggcaacacacggcctttcagctgcccatgaagaagatagtctggctcaagttgctgatcccaaagataacaggggaggaagtttcagctgagaagatggagcatgcagtggaagaggtgaagaacagcctgcagctcttcgaggagaagtttctgcaggataagatgttcatcaccgggaaccaaatctcactggctgacttggtggccgtggtggagatgatgcagcccatggcagccaactataatgtcttcctcaacagctccaagctagctgagtggcgtatgcgggtggagctcaatatcagctctggcctctttagggaggcccatgatcgactaatgcagttggccgactgggacttttcaacactggattcaatggtcaaggagaatatttctgagttgctgaagaagagcaggtgaccctaggcgcagcctgtcccgcagggcctggctggcttagcaatctgagccaccttccttaaaggaaatactaaaacaaaaacaaaaacaaaaacaaaaaactgttctttgcctaataaagaactggaacaaccatca

SEQ ID NO: 294691 - DNA, 1000 bp, Homo Sapiens
atccctataaacccatcataaagtcaaaaaatcctaaaacataagttggtgaccatctgtaatcatgatgtggtggtaaatcttggacgctaccttacaataactagacaaaggaaaatcatcctttgtcctgttctgtgtaaatatttaatgaatgatcaaaacttcagtttaaatattatgaaaaactttaaacataaagtagtagaaataagacagtaaatactgtatcctaatatccagtcaggatacagaaaccataccattaacttgaacagggataattttaatataaaaaactgttaactgataatggtattaacttttaagagggatgaaagagagctatgatgtcctaggactgagagtaccccaggaaagaatacccttgaaagggtctccccttccccatggtgaagtcaggcctaatggagagagtggctacagcctactcagtgattgggaaattccctgtcttgccctgggccagagctggtgtaccgctggtggatcaggtcttacaagcaaagaacctcacactctcaactggtaagccagaagcctcttgctagggtgtgagcaaaacttggacaggaactctcagtagatgtttgtgtttgtcaagattctccagacaaacttccttaaaaggattggcttgtgttgttattattaagtctaacaagtccaaaagctggagtgtgaggcaggaggctggaaacccaggaaagctgatggtgcaaggtccagtccaaaggtatctgttggaggattctcttgttctgggaagaggacggtctttttttctcttcagaccttcacctgactggatcaagcccactaacatcgaggaggacagtctgcattactcagagttcactgattgatttaaatgtcaatctcatataaaacaccctcacagaaacacctagaataatgtttgaccttataattggaaaatcagagcaaaagttaaatctctaaaaaaaaaaaaaaaaaa

SEQ ID NO: 294692 - DNA, 1000 bp, Homo Sapiens
tcaaagaccaggtgcccacttaactgtgaaaaagatatttgttggtggcattaaagaagacaccaaagaacatcacctaagagattattttgaacagtatggaaaaattgaagtgattgaaatcatgactgaccgaggcagtggcaagaaaaggggctttgcctttgtaacctttgacgaccatgactctgtggataagattgtcattcagaaataccatactgtgaatggccacatctgtgaagttaggaaagccctgtcaaagcaagagatggcgagtacttcatccagccaaagaggtcaaagtggttctggaaactttagtggtggtcgtggaggtggtttcagtgggaatgacaactttggtcatggaggaaacttcagtggtcgtggtggctttggtggcagccgtggtgctggtggatatggtggcagtggggatggctataatggatttggtaatgatggaagcaattttggaggtggtggaagctacaatgattttggcaattacaacaatcagtcttcaaattttagacccatgaagggaggaaattttggaggcagaagctctggcccctatggcggtggaggcaatactttgcaaaaccaaggtggctatggcagttccagcagcagcagtagctatggcagtggcagaagattttaattaggaaacaaagcttagcaggagaggagagccagagaagtgacagggaagctacaggttacaagagatttgtgaactcagccaagcacagtggtggcagggcctagctgctacaaagaagacgtgttttagacacatactcatgtgtatgggcaaaaaactcgaggactgtatttgtgactagctgtataacaggttattttaatttctattctgcggaaagtgtaaagcattccaacaaagggttttaatgtagttttttttttgcacccatgctgttgattattaaatgtaatagtctgattgtgacactgaataaatgtctttttt

SEQ ID NO: 294693 - DNA, 1000 bp, Homo Sapiens
ggggtcagggggcagggaagcagtgctgggtggaggcactgtggtgccctctgctccctggagctcttcctgcttctctccccatcaccatgccccagccccagcctggcccgctgcaatgcctaggtctgttccagagcagcagggcaatttagacaccaaggcatcctggactcaagggcctcttgccctcccgaaggccccagtccagcctacagcttccccagcattctagccttggagaaatgacaatggccacacacacacacacacacacacacacacacctctgacgccagctccccaggtgggagtgggcccaaacccagcccctcctgtccacctctccaggtctcactctcttcctgccatctacaagaggagaggacctggctgggccccaagccttggacaaatcctgggaaaacctgagactagaacccttgtcttcctcttacccaaattctaggatagctctgaagcctgctggaaacttggtggcatccaacctgcctcattcggcctgaccggtagaggcaggtggcctgtggacagaagtaatcctctttctgctcaccccaggcagacacaactgcctatgttcccccgatgagaggaaacaggctgagagaagaaaaatgactgctccaggattataccacagtggagagcgggtcacaggacatgatgcagggtccaggtttctgttttgatcaagtcttacatgcccattcagcttctaggcccccctcacctccctgccctcattcacaagtggccctgagacacgtgaacacctccctcctatgcatcacaaaccttctccaccgagctttggtgctttggcctctggcacacctaactagcattggcagaggagagtctacactctcttcctcattcagggaagatgctttaagaaatcctgcctctgtgcagcagaggagctggaggcagctccccaggcatccctccccaaataaaggcttatgtactggtg

SEQ ID NO: 294694 - DNA, 1000 bp, Homo Sapiens
catttcagccctgtgagagtgccaaacattcagctaggctctccagcctcttaactaccacttcatactcagtttcttagcctcttagccctctactgttgaccaatcaccaaatgtgggaaagcactacagactgtcaggatcacctcctaggcctggtcactcaagtcctgactgaggtctccaattaccttccaacaattgtttttgattgggggcggggcacatttttatccagtttttctaactgctcttgtggggaggcgaatctgtaacaagctcctctgcctttattgaaagttgaaaaccttcatctgtcctttttttgttgttgttgagatggagtcttgcgctgttgcccaggctctagtgcaatggcacgatctctgctcactgtaacctctgcctcctgggttcaagcaattctcctgcctcagcttcccgagtagcgtgtgccaccatgcctggctaatttttttttatacctttaatagaggcaggatttcaccatgttttccaggctggtctcgagctcctgactcaggtgatctacctgcctcagcctcccaaagtgctgggattacaagtatgagccactgcatccggcccatctgtcttttaaaacatgtttttaattggaggtataatttctattagtgaaatgcacaggtctggtttacattttgatgagttttaactcatttaacattactatggaacccacctcctttgaagatacagagtatttctatcatccagaaagttctcctgtgctttcatgctgtcccgcactcccccagcagctgatgaacatgctgaggacattggtactggattctggccgccccaaaagagccgctttgaccaggcttacccagcactaaatccctgcctgctctctcaaaatttccatctttaaactggttgtacctataaccctccctcatcaagtcaatagataaacaaaccctgaaaaataaacaactcttcctggcccagc

SEQ ID NO: 294695 - DNA, 1000 bp, Homo Sapiens
agctgcgctgaggctgccccacagggcgcaggccccgaccctcagcgtccaccgtctgctgcctacatccgcccgcccggcgtccgaccccttcagcggcgacgggcggagctggagccccgggcctgggcgccaggtgggctcctgggagggtgatgaagcaggtagggcctcggggatgctggggctggaggcggggcgggacgaggggagcctgcgggagcgctggagaagccgggaggaggaggagggatgcgccggggcctggggctgggctgcacccggtggtcgggagggtggagagggctttgcactgcagccgcagcggaggggccccgccagctcggagggtccacttgggaacccggccctggtggacgataccgaggatgtgtccctggactttggaaacgaggaggagctggcctttaggaaagccaagatcagacaccccttggccacctttttccacctgtttttccgagtgagtgccatcgtcacctacgtgagctgcgactggttcagcaagagctttgtgggctgttttgtcatggtgctgctcctcctgtccctggacttctggtctgtgaagaatgtaaccggaagactcctggtgggccttcgatggtggaaccagatagatgaagatgggaagagccactggatctttgaagccaggaaggtctctccgaatagcattgctgccacagaagctgaagcacgaatcttctggctgggcctcataatctgccccatgatatggattgtgtttttttttagcaccttattttccttgaagctaaagtggctggctctggtggttgctgggatctctctccaagctgcaaacctgtatggctacatcctttgtaagatgggaggcaacagtgacattggcaaggtcacagccagtttcctgtcccagacagtgttccagacggcctgcccaggtgactttcagaagcctggcctcgaggggctggagattcaccagcattag

SEQ ID NO: 294696 - DNA, 1000 bp, Homo Sapiens
ttatccctcagaaaacgtttgggaattggacctgaaacgttttggagccctccagagcagccgcacctttctgcgccaccgggtcatggaagtcatgcctttgatgtatgatctgaaggttccccactgggacttccagaccggtaggcagttacgcacctctcctctctacgaccggctggatgcacagggagccaggtggatggagaaacatggatttgagaggccaaagtactttgttccccctgacaaggacctcctggcattggagcagagcaagactttctataagccagattggtttgacatcgtggagtctgaagtcaagtgctgtaaggaagctgtgtgtgtcattgacatgtcctctttcacagagtttgagataacaaccactggggatcaggcattagaagttctacagtacctcttctccaatgacctggatgtgcctgtgggccacattgtgcatactggcatgctcaacgagggtggagggtatgaaaatgactgcagcatagcacgactgaacaagcgcagtttcttcatgatctctccaaccgaccagcaggtccactgttgggcctggcttaagaaacacatgccgaaagacagcaacctgctcctggaggacgtcacctggaagtacacagccctcaatctgattggccctcgagctgtggatgtgctgtctgagttgtcctatgcccctatgactccagaccacttcccaagcctcttttgcaaggagatgagcgtgggctatgcaaatgggatccgggtgatgagcatgacgcacacaggagagccaggattcatgctctacatccccatagagggttgtctttttaaaacgggaggtcactttactcactgccttgaaaccctcaagggactcccctttgtcgtgagaccaagctctcagtccatagcctggccagccagggtctccagggtgtggcaggccacgctgccccagggctgcggcctgcactgcgtgtga

SEQ ID NO: 294697 - DNA, 1000 bp, Homo Sapiens; identical to SEQ ID NO: 220457

SEQ ID NO: 294698 - DNA, 1000 bp, Homo Sapiens
caattctgcttaatcatcagatgatgcatactggagagaaaccttataaatgtaatgaatgtggtaaagcttttatcgaaaggtcaaacttggtttaccatcagagaaaccatactggagagaagccatacaaatgtatggaatgtggcaaggcgtttgggcggcggtcttgcctcactaaacaccaacgaattcattctagtgaaaaaccttataaatgtaatgagtgtggcaaatcttacattagtcgctcaggcctcactaaacatcagataaaacatgctggagagaaccttacaactaaactcaatgtggaaaggccgttagatgttgtcctaacctctgggatccccaaataatttatacttactcatatagcttgtatatttgtcctttccctttgaagtctcatgtggaattgtagtaatctccagtattggaggtggagcctagtgggaggtgattggatgatgggggtggctttctcaagaaagttttagtaccatccccttgttgctgtccttgtgatagttctcatgaggtctggctcatgcctgtaatcccagcactttgggaggctgaggtgggcggatcacttgaggtcaggagttcaagagcagcctggccaacatggtgaaaccctgtttctgccaaaaatacaaaaattagctgggcttcgtggcgggtactggtagtaccagctactcgagaggctgagtcaggagaattgcttgaaccctggaggcggaggttgcagtgagccgagatcgcgccactgcactctagcctgggtgacagagtgagactccatcacgcacacgcacgcacgaaagtgaatggcacctccctcttgtttgttcttctggccatgtgacatgcccttcacctcccaccatcattttaaccttcctcaggtttcccgagagggtgaacagacgtcagcgccatgtttcctataaagcctgcaaaattgtgagtcaattaaacctctttatacatt

SEQ ID NO: 294699 - DNA, 1000 bp, Homo Sapiens
agcggctgtgttgctgctggtgctcattgtgggattcactttcaccgtctggagacagccccagagcaacactcctctttacttcaaggtccccctgttgcctgttctcctctggtcagcatctctgcacatgtttacctgatgatgcagatgaccactgagacctgggcccaatgtggagtctggatgttgattggatttgctatgtattttggatatgggatcccacacagcttggagaacaatcaacagccaccagcgtcaagctcccaaactcctcatgaaaacatccctagtcccttgctgaattagtttaaccacggaaaagggatggtccagtccactggaggtgtcctctggatgaagggaaagtgtgaagctctgtggagcatgaaggtgggatacacttaaagccccttgtgcattgccagtgagcaaacactttttaaaaaactttattttgttgtttgtttgtttgtttgtttgtttgtttgttatagaggtgaggacttgctctgttgcccaggcggaacttgaactcctgggctcaagtgatcctcctgcctcagtcttccaagcagctgggactacaggtaccccatcatacccagcttaacaaaatatctttatttgatttgattttttttctttttgagacagagtctcgctctattgcccagtctggagtgcagtggcatgatcttggctcactgcaacctccgcctcccgggttcaagtgattcccctgtgtgagcctccagagtagctggaattacaggcacatgacactgtgcccagctaatttttctttattagtagagaccaggtttcaccatgttggccaggctggtcttgaactcctgacctcaagtgatccacctgcctcggcctcccaaagtgctgagattacaggcctgagccaccgtgcccagccaaaataactttaaaaacttacatttttaaaaattgacaaataaaagttgtctatgtttatggtgta

SEQ ID NO: 294700 - DNA, 762 bp, Homo Sapiens; identical to SEQ ID NO: 119200

SEQ ID NO: 294701 - DNA, 1000 bp, Homo Sapiens; identical to SEQ ID NO: 224886

SEQ ID NO: 294702 - DNA, 1000 bp, Homo Sapiens
ggaggggatgtcaggaggaatggaagcgagcagttgcagggttaagaattctgtccttggctgggcgtggtggctcacacctgtaatcccagcactttaagaggccgaggccagtggatcacctgaggtcaggagtttgagaccagcctggtcaacatggcgaaaccccatctctattaaaaatacaaaagttagccaggcgtggtggtgctcgcctgtaatcccagctacttgagaggctgaggcagaagaatggcttgaacctaggaggcagaggttgcagtgagccaagatcatgccactgcaccctggacaacagagcgagaatccatctcaaaaaaaaaaaaaaggaattctgtccttgaaagccacacacccacatggtccacatggaccctcagcctctttcagtgtacccctgcaacttcaggggaattcaattcaccgtgacctttcagaatgtgggggcactgctcacatgcctgccccacaacccccaggccctccctctccagcccatcctctggcctttggacttcagggcacagttcatatctcctggcagctctcccggggcaccctcctgggcctagatgagtcccaggtctgctgctatttggagtttggggaaatgatcttcccctgggctcagctttcttatctttataagtgagtgcaggcagaagtactggtgtggttgtaggggtggcctctggagtctgggatccctgagcctggggaccagctccacctctgatcagctgcttgggctcccagccaccccgggagcatgatgaggccagccagtgaagcaggtggagcactagctcggttagccagacgtggtggcacgcacctgtaatcccagctgctcgggaggctgaggcgggagaatcacttgaacccaggaggcagaggttgcagtgagctaagattgtcccactgcactccagcctgggtcacagagccagaccctgtctcaaaaaaaaaaaaaaaaaaa

SEQ ID NO: 294703 - DNA, 596 bp, Homo Sapiens
agtctacaggctaggtgcacactggacagtcagggtggttgtgagctgatggagactgtaaatgaaccagaaacaggtgaagtgagcaaagatgcagtcattgtaaagcaggagaaaaataatgaatattgccttcaggatattgatgataaattgtcagaatcagcagaggatgatggtgaagatgataccaatgatgaagatgatgatgaagatagtaaccctaaaaagaatactcaggccccactagagttaatggcagaatttctgagagcagaaatggcccgagagtaccagctggcaaaaaaattatgtcagatgatcctaatctatgaaccagaaaatcctgaggccaaggagtttttcacacttattgaagaaatgttgctgatggagaaaactcagaatcatgagcaagacggtgaaaacagtgatgaagacagcagtggtgagagtaaaggagaaagcgatgaggagctgagtgacgagagctctgacgaaggtgaagatggatcatgagtgttgctgcaatacttgaagcttcatgtattttcattaatgtataccatgcaaatataaagacaagtgacatttta

SEQ ID NO: 294704 - DNA, 691 bp, Homo Sapiens
atgggttgctctgagggaccttggagacaggcctttccaatggatgttcatgtttctgaccttgcgctaccccaatgtaggctccaaacaggcatgcgaggtgcctttggaatgccccagggcactgtggccagggttcacattggccaagttatcatgtccatccgcaccaagctgcagaacaaggagcatgtgattgaggccctgcgcagggccaagttcaagcttcctggccaccagaagatccacatctcaaagaagtggggcttcaccaagttcaatgctgatgaatttgaagacatggtggctgagaagtggctcatcccagatggctgtggggtcaagtacatccccaatcgtggccctctggacaagtggcgggccctgcactcatgagggcttccaatgtgctgcccccctcttaatactcaccaataaattctacttcctgtcaaaaaaatgtcactaatgtaccctaaattttcttttttatttttattttttatttatttatttatttttttgagatggtgtcttgctcttttgcccagactggagtgaagtagcatgatcttggcttactgcaacctccaccccccagaatcacttgagcctgggaggcggagattgcagtgagctgagattacgccattgcactccagcctgggcaacagagtgagaccctgtctca

SEQ ID NO: 294705 - DNA, 1000 bp, Homo Sapiens
agaggcccctgctcatggtggagatagcccctccccaggggtgtgccctgcggctggagcaacaggtggacctggcttccacgcatgaaaccagacggagcagaaccattcgcggggagatgaggggcgcacagccgccaggtcgactgatagggaaacagcccaataaagaggaaatggcattccaggaagcaggcagagcttctgggagcctgcaccccagccgtcactctgggcccaccgaggaggagcctgctatgtacaacaccccctccccatcacctgagaggcagctctcttgtcctctatattggatagacctgggaggccacaggttctgcctcctgggatctctgcagatggagcaagagacactgaagagggaggaggatgtggcgaggctgggggctgagaaggagcagctggaccagtctctgaacagcctgcaccaggaggtggacggagccctgaggcaaaatcagcagctgcaggcccagatgacagagatggagcaggcccacacccagcggctccaggacctgacagctcagcaccagcgggacctggccacagaggcagagcgtctccatggggcccggccgcaggccacgcaggccctggagtcccaagaatggacccaccagcagcaggtaaaggtgctggaagagcaggtggccagcctgaaggagcaactggaccaggaagtgcagtggcggcaacaggcccacctcggccaggccttccagacaggacacgcccaaagggactgaagctcccagcacaggggaggcgcccagcgtggctgcagaggaagggaacgcaccgcaggtgggaggggcccagctgatttctcagcgtcacagtgaaaggcacccgtgatgagacagctcgctctcggcagtttcaggaccctccttgccctggctgctcatggggaacatttgaaatgcatgtgggggcctccgaattttgaattttaataaatagttgaatcagcgta

SEQ ID NO: 294706 - DNA, 1000 bp, Homo Sapiens
ttgcagaccgctaaggctatagacaaattttatatttcatgttagacatttgataccttttggatgtctgatgacagtcgtgcatttctatataatcagaaaaatattaggttgcaatcgtgaattttcatattttagattgtagaaaagtaaatataaaattatatgctctttttttttttgagacagtcttgctatgtcactcaggctggagtgcagtggcacaatcttagctcactgcaacctctgcttcctgggttcaaacaattctcatgcctcagcctcccaagtagctgggactacaggcatgtaccgccatgcctggctaatgtttttttcttgtattgttagtagagttttgtcacgttggccaggttggcctcggactcaagtgatccaccagcctccacctcccgacgtggtggggttacaggcatgagccgctttaccaagaaattgcttctcttttaattcggaaaaggttgtaggctcttccagcctgaacccatggagtactaacatccacaaaccattaatagcactccctgtgggaaaatgtttatacatttttacagtttgcatagtaaaattactatgcaagctgtttacttttaatatttctacataaaatttaagtcaagatatattaaatggtaaatgattgtacttatttattcatctgcctcatgttttatttcattttaaacatcctgaatttatattttattgtatttcatacatttcaattgattgtactgtattgcaggatatggagatttcatcacatactacaatacagtgtattttgttatatttgacgtatattctacttgtattttgtactgagatcatacaatctttcattatctaagtgtattaatgacttgtttggttgctttataattttcattttatgtaataatgaaataaacattaatgttgtttggaattttaaatttctttcatatggaatttgtatttaataaagatgtgaaaaaga

SEQ ID NO: 294707 - DNA, 1000 bp, Homo Sapiens; identical to SEQ ID NO: 224887

SEQ ID NO: 294708 - DNA, 1000 bp, Homo Sapiens
aaaaggagcgacaacctatcaagccagaaccaaaatcacaacccaggataaaaggtactccaaataaaactgataaacttgacagtaaagttaaaagaattggaccacacatagaaatcttccaagtgttccgagaaagaaaaaaattcatgattaccccaaaattgattagaatggtcaccgtcatgcaggcacatgtcaggggatggcttgaacggaaaagattgcaaagagtaatgaccaaggctttggatcatggaccagatatgaaagcagttattaacatgtatggcagactaatccaccgtgttagatatcgacgtggtctttggaggacaagacaaattctcaacttagcagagctagaggagtggatggaccgaaaaaaattctatgaaataatgtttgctaagagggaagattggccaaaaattgaaagaaatgagctccccaatttcttcagtgactgtggtcatttcccaactcagaaacaagttgatgatacttgggacctggtccatcaagacacacccaggatcaatattttgcatccttcaatccaatcgagttgacactcagtattaaccatcacaagctccaagaaggttaagagacattaacagactgaaaaacaacctgcagcgtatagctgcccagctatgcccagcctagaccagatgaaccccacctgactcacatgagctaactaaatgtttatcattgatatgataaacacatatgagatggcaaagaaaaatattctgaactaatcaaaaagtccaaagcaattgaaatgttatttacactctatcctcctgaaggtgcacatgtgcctgacagtacactactcaagtcgacttggttgagacccatagtaaatggggaagaaggttatagatatatagttttccacctgaaattatcagaaggtgacctatatctatttgtgtttgttgtttagagtctatttgcactttgttaaaataaacaaattaaaagg

SEQ ID NO: 294709 - DNA, 1000 bp, Homo Sapiens
gcagagtgtgagagagctaatggaagtaagctgctgaagaaaccgtattcacctgcctatggcccgtgagtgttcttgaagctatctggcgttcatccacccactcccctcggacctcagcatgggctggaacctcaccctagacctaacagatgctctcatgagcactcttcaaactcagaaatttcccttacgtcatcacgagccgaagatttctaattaaattcctcccgagttcattctgcttcctgccacactgtgaaaaaggtgcctttcttctggtttgccttctaccatgactgcaagtttcctgaggcctccccagccatgcagaactaacatttggataccacttacctctgagacagttcttttggaaattataaatatatttctttccggggatcaaaagaatccacatcaacatgaaagatgaagtgttgaatctgaattcacagctgctttatgcaatctggaaaaaggtcaagctggagtgcagtggcccaatcctggctcactgcaacctctgcctcctgggctcaaggcatccttccacctcagcctcccaagtagctgggactacaggagagaagacaatgaggtcagctagaatgatggattgtcatcactggggcacgggaaaggggttgagcaagtcaatgtatgttttccagagcctacagaatgtgtctgattctctgaagtatattttttctaaatgccagattcaagcattaagcactgtgcagttttgagagaagaagttataaagcaaaactgacttgagtaaccaccagcccaacattcgggactttgtggggattgctatggctctgccggacttacaagcaatagtgatgcagaacctgtcattagcatgtgtaatgcttgtcaaaaaataatctcccaagaaatgttttaattttcactggtcagtgcactaccaatactagttttggcatggcggataataaataacaaacctttgtttcgaatacat

SEQ ID NO: 294710 - DNA, 1000 bp, Homo Sapiens; identical to SEQ ID NO: 224888

SEQ ID NO: 294711 - DNA, 693 bp, Homo Sapiens
atgagactgaagcaaggatcgtttctgtggtacctctatctggacaaaatatactgcttattatccgtgagaaacgtgaaggctttggcagaatattttcatattctggacgtgcacggcaagaacaccttgaatgatgtgctgttctatcacttccttcatcatgtgactgacttgaaaaaggcacagatcaacattgtgtttgacatgctggactggaacgctgtgggcgagatcgactttgagaagttctacatgctggtgtgcatgctgctggcccaccagaaccatttggaaggacagtttatgtatcgtcattcccggcctgtctttgacctgcttgacctgaaaggggatctgagaattggtgcaaaaaacttcgaaatgtacagatttctcttcaatattcaaaaacaggaactcaaagatctcttccgtgactttgacattacaggtgacaatcgtcttaattatcaggaatttaagctgtatacaatcatctacactgacaaattacagaagaggcagaaaacagaggagaaagaaaaaggagagagaaagagaagtctctactcaaaatgtcacatcaagtagatacaagctgaaagagtcttggaaaaaaatgggatctgaaagtacagaacatgaacattgatgaagactgttaacatgtctaaaaataaattcagagca

SEQ ID NO: 294712 - DNA, 720 bp, Homo Sapiens
ctcttcccatgacgttacgttctgttggcctagaggtcttagttccagagggaggaacgctgccaccaggagacacaacagcaattccgttaaactggaagttaagattgccacctggacactttggactcctgctatctttaaatcaacaggctaagaagggagttacagtgttgactgaggtgattgacctggactatcaagatgaaatcagtctactactccacagcagaggagctcccaggcctctacagtttgctgggtcccattactttctgagacaggtgagatggaaacaagtctcttgggaaggctcccaaaaagcccattgtcatagaaagcacctggcttctaatatctccagggaagagacatcaacaccagcccatcgctgataccctttgtcctggcctccggagcgctccctgcacagtcccaagtctgcaagaagggggatcttttcttgaaaacctacagtgctaataattgtcaaaaatatataaattctaaatttaaaatttaaggtattggtgcctatgaaatgtccccaacacaaagaaatgataaatgtttgagatgatggaaatgctgattaccctgatctgatcactcactttatatgtattgaaacatcattatgaactccatgaatatgtataattgttattagtcagttaaaacaaataaaactaaaaatgtttaacgataagaagaaaaaaa

SEQ ID NO: 294713 - DNA, 1000 bp, Homo Sapiens
ttgcaagatcctgtctgggaagagcattagttctgagctgagttcagacagcacttgcatatttctttcttttttttttttttcccccagacagaatcttgctctgcactccagcctgggtgacacagcaagactctgtctcaaaacaaaaacaaaaacaaaaaacaaaatactttctccttctatcaggtctaccctcattcaattcaacagtgcaaaaaagagcactcacggaagaaggagatggaagaatagccatcttggcagaaataatgatatgtataatttttttatttaattaaaattgtattatgtaatatttgatactacaaaagataatgcaacatgtttgtcaattttttttattatactttaagttttagggtacatgtgcacaaagtacaggtttgttacatatgtattcatgtgccatgttggtgtgctgcacccattaactcgtcatttaacattaggtatatttcctaatgctatccctccccactcccccgccaccccacaacaggccctggtgtgtgatgttccccttcctgtgtccatgtgttctcattgttcaactcccacctatgagtgagaacatgcggtgtttggttttttgtccttgtgacagtttgctgagaatgatggtttccagcttcatccatgtccctacaaaggacatgaactcatcattttttatggctgcatagtattctgtggtgtatatgtaacatgcttgtcaatttaaaaacatgataagatgaacaccagtgaacacatcacctagagaatgaagcaaacatcaaaaattctattgcagcttcccgtgtggccctccgccatcccagctctctattccatgccagggatatcccattttgaacttcgtatttaccatgtcaatgtgctgttgacatttataggtaattttacatgtaaaactctatatatctctatgtgttgccaaacaataaatatttagccttgcttattttacagtttt

SEQ ID NO: 294714 - DNA, 461 bp, Homo Sapiens
gttttgcaattttcagcctttttgtgctggattttcctcatctttgtggatttatctccctttggtctttgatgttggtgaccttcagatggggtttctgtgtggatgtcctttttgttgatgttgatactactcctttctgtttgttagttttccttctaacagtcaggcccctctgctgcaggtctgctggagtttgttggagttccactccagaccctgtttgcctgggtatcaccagcagaggctgcagaacagcaaagattgctgccttttccttcctctgggaagcttcgtcccagaggggcacctgccagatgccagccggagctcttgtatatgaggtgaaaagcaatcacggagttaaaagaagacaagctgaaatgatgcaggctgctcctatgttggaaatttgttcattaaaattctcccaataaagctttacagccttctgcaaagta

SEQ ID NO: 294715 - DNA, 1000 bp, Homo Sapiens
aaaagattagcatatttatattcatgttaatattaatataggctacctttcattgtgctctcttctgggtcccaagtcttggcattttaagcatttttttctataagtgtattgctgaatttcagagcaggtgctcactttcccattgctttccttttccattgatttccagtcgcccgagtatgtggacaagagaacatactctgggactgcaacccacaggaatttattatgttgtgccttgaagctcaacatgtggccatttttgttaaatgtttcccgtaaattttgaaacatctcataaacaacccttctccttcatatgtagaaaccagtaaaggatggcactctcagtcaaaccatgaaacaaaagctggataaatgacaaaaatcaaaattttcttgagcccatcagaagtgggaaagaaccaccccagagggcccaacacatagccacatagattattccaccatttaaagaggaccccttggtcaagagggaaacagggtcagggcaagatggtagccagagcttccctgagtagtgcagatgggaagaggggaaggtcacctccagagctccacttgggatccatagagaaatgatatagaaccaagaagtccactcattgggatctgttactttctgtttttccagattattagaaaaatattacagaaatagctgaagagaaatgttatgaaaatagttgaagttgtgcttattgcacgaggagaccaagaaaaaccccacaaaatcagctgcaagtaaatccttctggatggtgccaccaaatgttcctacaagtccggaacaacccttgccaaaccaaagacccttgccagaaccctgcttcttcccagagacagagctgtgtacctgacaaaacaccacatctcactcagtgacttatttctcattatgctaattgttttgctgtaaaatgccaatgtttctgtgaattaagacatacgaataaatttctgaagttacccttgc

SEQ ID NO: 294716 - DNA, 1000 bp, Homo Sapiens
ccacccagaacgcctctgctccccgcaaccctgagactccaggctcccctgttcctccctccgggagaccctgcccgtcctccccgcggggctccttcgcagttcgggggaagggacgggttgcgtcctcgggacctttctctgcagccacagcagcgcatcccagcacctcctccaggagccccgccacctcctgccacccggactttccccacagcgcagcgtcccctcgtcctctcagggctggaacagcggtacccgcagacagtgcaaaagggaagtccctgttgccttcccatgcaaactgtagggcgcttacagctgctgggagaggaaaggaaagaagaaatacaagcctgtgacccggatccaacccgcggcgcacagaccccggctctgggcacccctggtgagcgccttctgcgccagagctccgtacagcaccagcccgcgctctcccccagcttctgttcatttgctgcagtcctgacgggtcagttgcctgagcatccatgctgccatccatacaaacccaggcacgcagagatgtacatcctttacccagggtgacaccatgtggagctgaatccaagtccgggagtctgatgaccgtgtctgggctctgaccgcgcagccgtctcacagtgaaacaaattgcggactggccttgtcctgagtggccttaggaagctgcagtggcctgcagtctcctggccagtctgtagaatttggcaaagatgaggcaccttatagccttacatgttcttatttttctttccttttctcttctttattttcttttttaaggatttgaattagtatatgtaaagtgcttaacgcaggagctggcagagaaagtggatactcagtaaataacagcaattgttaattgtaaaaagcatgccacttatctggtaaaatcccccattctaagcaccctgttaagtagttggtaattcctcacttgaaagaaattaaaaagaatttttgtcagtttttt

SEQ ID NO: 294717 - DNA, 787 bp, Homo Sapiens
gcattctgaagtcagctacctgcttagcaagatgtgtgggcagaaattcatcccgaaagtgacgtggacagacagtcctccgatctatgctggaaatgtcaagggctctggagcttgaccacctgggttcaaatgccaccttcactcatgttaacagtgtggcttgggcaaccgactttacctctctgcacctgtttcttcaatgtgcaaatggaaagaacatcacctgcctcttaggttgttctaaggataaattatatgcaatgcacttagaatacggccagactaaaaggtcatttccagcatttacttttgaactatcaaggcctgattttgaaagactccggactccatgcaaagtgtcttagctacgagctgaattgtgtccctacccctacctttaaattcctatgttgaagtcaaccctcagtacctcagaatgtgactatatgtggagctagggtctttaaagaggtataattaagttaaaataggtcactggggtgggccctaatccagtgtgactggtatccttataagaagagaaaattagggcatagacatatacagaattgaagatgatgtggggatgcaagaagacagtggtcatctataagcaaaggagagaagcctggaagaaccagtcctgccaacatcttgatcttgaacttctagccgccagaactgcaaaaaaaagataagttcctgtcatttaagcttttttctggcaggcctagcaaactaaaaccatctgcattagtcaaggttctccagaaaaactgaaata

SEQ ID NO: 294718 - DNA, 643 bp, Homo Sapiens
atacttatgtacacttacatacgaaaatggatgtttaaatgcaggtagatgagtatttgtcctaaaatgtgatcttccttgttgatgctggagcttgaggagctatccctatgctctgctgccaccttggaaactcagaaggatttacaacggagttctgcacaggggaagctggaagcagcattcccacagcctcttctggggctggcaaggctcagagaggcatttgaaatggctattattgacacccatagacttggtccggaatggagacagaagaaagattcggttgaagatgtccctgtgtggatctcagtttgcgctctgagcgacgtcctggctcatttgggtgtgacggtgagagcagaggcgctctgctgacagttttttcttgtctaagcttccattccgcatccacaatatgactcgccttccactccagttaacttcttggaagtccagagcacttagtcaaagctgtttacaaaatgcaaagcatctgggcggccaaggcagaggctcctgtgttctctatgtaaccgcctccaaaaaagctgggaaatttcgcggatcaaaatgtaggcgcttaaagctgaccctctgctgtcaatgttgggacttagatacattttttgcatcgtca

SEQ ID NO: 294719 - DNA, 1000 bp, Homo Sapiens
catctgcccaccaacttttcaagttacttttacccaccttcaaaattacatctgcttttagcaagaattactgatgtgataaagatgggagtgttcaccatgcaagggcaggggatcccctgctgctccaccatcagatttgggacaccaccccccccccggccccaccagagggcatcagctatgcctagaaggggaccacaacagactcgacaggatccaccggttgggcccaaggcaggaggaagggcggcgcccccaaactcccaggacgcctgcagcaccccccacgcgccgctctccgcctctggggagcatcctgccaccccccgacacacacaccccggctacatcccgccttctcacgcttggtcaggcgctctggagatgtcggagatccaggcttttcctaaagagtcaggattggaaggcggactcccaccgtttgctgagctccacatgacaacagcagacgacaggccgcactgatcccacctggcttacaggtgctgtcacacaggtacgccttcttgtgaatcatcagtcaccatttgcccctcgcagcaaccctgtcttggaggaaggtccttgccgacacccgcctctccccacccttaggctcccttgctccttcattcaaccattgtttacatgtcgttcaggactgctgactaaacactttcaagcacagtggacccttgaacaacgcaggttcaaactgtgcaggtccacccacagggatgtttttcaatcagagttataccaagtgtccctgcctctcctgcctcccttcccacttcctccatgtcttcctctctgccaccctgaggcagcaagaccagcccctcctcctcagccactcaacatgaagacaacgaggatgaagacttctatgataatccacttccacttagtaaatgctttctcttatgatattcttaatgacattttattttcccaagcttagtttattgtaagaatacagtataaatacacatac

SEQ ID NO: 294720 - DNA, 857 bp, Homo Sapiens
gtaaggatacaacaaggagaggccgcctacaagccaggaagacaatcgttcagtagccttcagatccgccaacaccttgatcctgggcttgcggctgccagacctgtgagaaagcgatgcccattgtttaagcccctggtctttgatctgttaccgcagcgcgagctgaccacgcactcagtgtgaggcgatgacctttttctcaaccatgcgcaagtggtatttctgcgtgcttcaaatatcacaggccggattgtcaggaaaccaaggaggggccttttggaagagaatgatgctgagcatccgggtccctggacagccagcagccctgaggcagacagaagtttggacaactcaggacagggagcttggagggcagcccctacatgtcggagtggtccctacctgtgttgcctcaactcttccttcaaggcaagagccgctaaggacagtcaggacatcctaccgcccaaggctgttgagctcggccggccaaggactacaggaaggatggctggggaggcctcaggaaacttacagtcacagcggaaggcaaagaggaagcaggcagcggcttcgtggcaggagcaggaggaaggcggtggggaggtgctacatacttttaaacaactggatcttgtgagaactcactatcacgagaacagcaagggggaattctgcgccctgatccagtcacctcccaccaggctcctcctccaacagtggggattacaattcgacatgagatttgagtggggacacagatccaaaccatatcagtgtcattaaaaaaatagttgccctgctaacttttttaatcccctgtaactctaaataaaataatgatgtgaacataa

SEQ ID NO: 294721 - DNA, 1000 bp, Homo Sapiens; identical to SEQ ID NO: 119201

SEQ ID NO: 294722 - DNA, 829 bp, Homo Sapiens; identical to SEQ ID NO: 224889

SEQ ID NO: 294723 - DNA, 703 bp, Homo Sapiens
acagaagaaagagcagttactcttccggaaggttggagaagattttgtgaaggtggggatgtttgatttgaaccttgaagaacaagcagagacccaagaagtacagaagaggggaggtggaaatagcatgaacgaggtggggcatgcaaattcactttcaattgatacaatctttcacgtcagagctgcttcttgtaacacagaagttttcagattctatgaaaaggtattgaatgaattgaaggctctgttaagggggcaactatctcccctccccattctcctatcagcccataaaacaggaactgacaacctcttggaagaattgggaaggaacttttcgattttctctgtacaatcttcactggttcctctctgtgagaggaggagggacctcttggattggtgtcgttgggaaaagggtatcaagtgtgcatggctcagcctgttcctggctctctctctgggactgacctgactgcaagcagcatgttctctgtctgctcctgcctcctccaggcaatgagcaccagggcgggtccagcccttgcttgggaggacttcaatagtccagctgctctgccgcgagtgggtgagtgagttcaagtcagaggagaagacacagaaagctcatttgggccttgggtcttagccacatcctccagtccatctggactagcaataaagctgacattttaatccc

SEQ ID NO: 294724 - DNA, 1000 bp, Homo Sapiens
tgtgaggctatcattacccttttaccaaagttggaaaaggacagcatccaaaataagtcagctataaaaaaaagtaaagtctgctgggattacaagcgtgagccaccgggcctggcctgcattttcttaactgccagtgagattgagcatctaccatgtctaagggtcattcgagttctgtttctgtggattgcttatttttatctcttccttttgtttacattggagtagtttttaaagcaatctgtggaaactttgctaaggagattgtattgtcatatgctctgcagtttagcctgcatcttttgccatcgtttatggcaaacagagttaacatatttttctgtgaagagccagatagtaaacatgcaaggctttgtaagccatacagtctctactctgtctttgtagtgtggaagcgcttaatacataagccaggtgttctcaaacaggggccatttcgtttctcatacctacaccccagtaggcatttggcaatgtccagagtcatttttggttttcagtatgaagggtgggtgctgctggcgtctggtgagcagaggccagggatcctgctaagcgtcctacaatgcatagtacaactgcccccaccccccaaaaaaagtctcatccagaatgtcagtagttctgaggttgagaaattctacctataagcaaatggacattgttgtgttccaataaaactttatttacaaaaaataatcagaaggccacatttggcctgtgagctatagtttgcttatctctattttaaatagctttttgctatatgataatatagttttctgtatttgttcctgaattgtctcattcaccccaaatatttttccaaattttcttctattttatgcctttaaacctttactaaatacaaataatacacagaaacaatagcccctgtgtaactaccacctaataattaagcatgttgttttattgttttgattaaaaatttataaaagaaataaatcatttcaga

SEQ ID NO: 294725 - DNA, 885 bp, Homo Sapiens
aacctcataggtggtttgggatgtcttttggctgtgcttaaaaatttccaacagatttgctacacatcttaggataaatatgtttcctgtgaattgtgatgatttcttacagtacatttgcaagcatgtgtatgcatctgcaggaaacatagcctggctctgtgaaggaatactgctgtgaccgcaaaactgtttctgtagaattttctccggtgtggtcatcctgccttcagaggtttctccaggacgtcacctgtatgaggtacacagtgtgatgacacactctgtgcttttcctacttgtgtccacggctcaagcctggaagaagccttaggacgtgggggaaatgtctaacgtggagtccacctgctgagcaggaccgggtgtgaaggaagaagctttgttctgattcctcatggcccagccacccctcgcctgagctgagcctggccacagggcccgcctgcaggaagggctggcccatggcttcacactgggctcaggctgcgctaagagccccgggtgaggacctccaagcccaggaagcctcagttggccaaagtgctagatgcgtgtggtctgctttcatccccgcttccctcagagcttgcattttccaaattcaagagaggctccaccttcaagaagaccggcctgtccctgttatttatgtgtccccctaccatatctccctttgttctgcagagcggccatacctgccagcagcctgctctcccggccatgctgcggttcacaaaagtccagcatttggctagcttcctgggggaatgaatctttcagagccaaactaatgctatgcatgcagcttatgatttttttttttttgtcttcaacaaagtgaatacttactttttttttgctctt

SEQ ID NO: 294726 - DNA, 1000 bp, Homo Sapiens
aagacatctaggcttgctgtcaaggcttctgatcaacatgagatgaccgccgtgtggtaaactgatgaaccctgaccctgatcaacatgagatgaccgccgtgtggtaaactgatgaaccccgaccctgatgaacgtgagatgaccgccgtgtggtaaactgatgaaccccgaccctgatgaacgtgagatgaccgccgtgtggtaaactgatgaaccccgaccctgatgaacgtgagatgaccgccgtgtggtaaactgatgaaccccgaccctgatgaacgtgagatgaccgccgtgtggtaaactgatgaaccccgaccctgatcaacgtgagatgaccgccgtgtggtaaactgatgaaccccgaccctgatgaacatgagatgaccgccgtgtggtaaactgatgaaccccgaccctgatcaacatgagatgaccgccgtgtggtaaactgatgaaccccgaccctgatcaacatgagatgactgccgtgtggtaaactgatgaaccctgacccattaggctttggctacagaatgtggaaataagttgtgttactacatgtgtgtaatcctagggtgcaggacaccggccgggaggttccatagagtgatgggttctgcaggtaactcatcctctagtcctctgtaagctcctagaaggaagaaattatgtcctttagactaataaaattcctccaaaccaaatacagcacctactgtgaagacacaaagatacttttagaatagtaaaaactttatccattgagaaattccttaatgaaacagtatccaagaagtcatttgccagcagatttcttagaggtgcgataaagaagaggacattgccagtcgtcacagcagctgcaatagctcctctctattgttaaacagtgggatatcttgtgcaggttttcagttgacaatcaattttaaagattagtttcggtccccatcaatcaattatttattaacccatcaataaaaatttaaatgctc

SEQ ID NO: 294727 - DNA, 1000 bp, Homo Sapiens
aggacgccgccgggagctggtgcgtgacacactgcagcctcgcgggctgcccgggacttcatcaagcccgggtcggctcggggcgggcaggggtaggatccataccgccgaactgcggccccgctgctcgcagccgctcttccgggagcgcccgcttaggactcactcccgcccattccttacctcgatggaatccttagcccttagagagagggctaaaaaacaaataaacaaacaacagacaaacaaaaaaaaaaccaaattccaaatggcccccggaccctcccgcagatgcagggcgcacactggccagttctaaccatagacttgactgcatgttgacaagggtttccaacctagcttccccgaggtactgcatgaatcagtccttgctcagatggtggttgctgtaaatagctgcaatttccctccttccgtctcaaagcacggatgggaatggatttgcagcagggactctgcattatatttaaggtcttggtgagatggacacgggctccatcagctccagacttcctgggacatctcggcatttccaggtccgtttgccccaatggtggaagtcaccgcccatatatgaggaaataaatgtccacacctagcatttgggataacgtggctaaattgttttcagtttttgaaagacgctgcagaaaaagaggcaaaacctgatacagcacagcagcatgcccctcccgcccccaaatacgagatcgaatcacatttttaagggaaaaaataggcattctcatcttagatatgtatgtagcatattttataatatatatttttatctaaaaattatgcttttctgtattttacaactttctttattaagcatttttattttgtgctattttttacagtaaaaactctgaagacccaaagaaatttaatattagcttaaatgtacattagatatatttatagaatcaatttattagctgctatattgtttgacataaaaggcttttgaactaaa

SEQ ID NO: 294728 - DNA, 586 bp, Homo Sapiens
gaaaacacagatcctggtgccgaacatgaggacagggcaggccgaaggagaaagtggaaggaggggagcttctctctcagcctcatccttctgggcctggatgctggagagtcatgaggtgcttcagagtactctgggtgaggagggaaagatggtgcccaccacatggaggccagcctaggtcttgtatgaaacctgtgagctctcatgaaccagtacaggcctgcttcagcatagcactgggtccaaaggaaaagaagaaaatgctgagtgtgtgggtggaacatctaacctcttcggacgtacaaggctcctgcctatgtcatcctttcccctggcatggcagcagatgcaactctggagtgggggaagagggcgggaagagagcctgtgctgctgagcacctaccaggacttgtcagggcccaggcaccctatgaaacaccttatgttggttatcccacaccaagctcgcaaacctctgaggtaggcaactttgtcacagagagaggctgagtaacaagcccaaagtcaaacagccaagaagagacagaactgtattaaacttatctactggaccccaaaga

SEQ ID NO: 294729 - DNA, 673 bp, Homo Sapiens; identical to SEQ ID NO: 119202

SEQ ID NO: 294730 - DNA, 487 bp, Homo Sapiens; identical to SEQ ID NO: 224890

SEQ ID NO: 294731 - DNA, 1000 bp, Homo Sapiens; identical to SEQ ID NO: 119203

SEQ ID NO: 294732 - DNA, 1000 bp, Homo Sapiens
tcctcctttctctctccctttttttctcctcttcccaactcccttctcaacatggggagttgtattgcgtggacctgtcctttctgtggactgtggggaggccgagccaattcttagctcctgtctgagcctagtgatgccctgtcctcacctctgcttccactccctttcccattcaggctgactgtcaccgcagggaggcaggtgggtctggagcatggagtggcccctgtcctgggtcagctgtaggaaggggcccctttgtaaacaagcttctgccaggttctgaggcagagcactggtctgagtccggccccacagaagggttccatcttgtggtcagcggggtgggctcagacctgcagactcccgcagtgggcccaccctttcccttgctatggcccgtctatgagtggctttcccctgcctccatcggtgtataatcaggcaggtggtgtttgctcttaggtgattagaagaggaggaaaatgcccatcaagccactgcttcagcctgttggccagggaacacctgaacagggtcaaaatggtcagctcctgggcgctgagctaaggaaatatgcagggggttttgactttccctgtcctgaggcttgcctccactttgacctggctgcatctttcctcagctcttctgggtaagctgagagctaagcaaataagacctcctgggctacctggtcatgatttgggttttgtatggattttttgaaaagagagaaaaagagtgtgggctgggtgccgtggcccagagggcagatctcttgagtccaggagttcaaggccagcctgggcaacatagtgaagccccatctctgcaaaaaaatacaaaaaaatagctgggcatggtggcacatgcctatagtcccagctccttggggggctgaggtgggaagatcatctgagctggggaggtcgaggcagcagtgagccgagattgcgccacttcactccagcctgggtgacagagaccctgtctc

SEQ ID NO: 294733 - DNA, 1000 bp, Homo Sapiens; identical to SEQ ID NO: 224891

SEQ ID NO: 294734 - DNA, 1000 bp, Homo Sapiens
atgtgtgatgaaaacaattagccatccatgtacaacattatgcttactgcatcccatggaaacttaattccctcctagcacatatttgcatactgaaaggtccgaaaagggcatccacggcagcttgagccccttagcaccatgtaaggagcacagcatccaaacggcttcttgagaaccattggggaatgtctttctttttcacatccaattgtttagtgtctatttattcttgggtggccagttttgaaacctaaaaagggacaataaagcaaaaagtatcagtaaggataggtggctgagacccactgccctgagctactagtgtggctgtgcctgtgggtctctagaaccatctgcattggacgtgaagccacagcaggtggctggactgctggcctgttcctaatgagctacgctgggctttgaggtagaggttggggtttatgaaccccaactctggcttaaagatcttgctgtggctctgttatgttctgaggccttgggattagcctcttcctcattatggagctgattttctagtctgtggatcagctatgcctttggacacttctcttttccattgtgccttttgaatgttgtcttctcactcagcatcagcacttcgatctaaatgcagactaggtagttgggaggaggaaccaaagtgaaccatccttcatttattcagtcattcgttcatctgtcaaacacgtatttggacatcaaggttgcagagatgaacaatgcatggatttcatctttgaggagttcaaaacctagtggagagaacacatggtacaatcgtaacacatgaaggacaagtaagtgctgcagtaaaggtactaataacatgttccttggaacagaggaagaaaaaccacgaaaccatggaaattagggaagcctttacagagggtgtgacaaaactcaatttgacattttcaagctatgtacaatgatgtgcaccttgcagatgctcaataaagtaattactgac

SEQ ID NO: 294735 - DNA, 1000 bp, Homo Sapiens; identical to SEQ ID NO: 119206

SEQ ID NO: 294736 - DNA, 749 bp, Homo Sapiens
cacgaacccagcaggaggaatgaacaactccagatgcgccgccttaagagctgtaacgctcaccgcgaaggtctgcagcctcactcctgagccagcgagaccacgaacccaccagaaggaagaaactccgaacacatccgaacctcggaaggaagaaactccaaacacatccaaacatcagaaggaacaaactctgcacacaccgcctttaagaactgtaacactcaccaccagggttcgcggcttcattcttgaagtcagtgagaccaagaagccaccaattccggacacaatatgaagggggaatctggaatatttcaagataaggtccaattcttccattgtctcgtaatccaatgcagagatgtgaaatgtaagatcatctgaaggagagctttggttcaagtcaaatgcatgcctcaacctagcagagccaaagagatacttgtatgatgtaagtcagattatgtcattcttctgctcaaaactctccaataaatagctcaccattcccttcagagaaaagccaaaggacttaaaatggccaacaaagcctatgatctgcacccccctcctccctctacctcacttcatctttctccctgactcacttggtttcagtcctacttgcctgatatgttccctcaattacactcccatttcaggacatttgcactgactgtttcctctgcctggaccccacttgctccagctttgcacatggctacctcccttactttcttcaggtg

SEQ ID NO: 294737 - DNA, 1000 bp, Homo Sapiens
tttttgatgcccgagaaagtttctcccctgaagagaaggaagagggtgaactgatcgggcctgtgggcactgggctggactccagagtgatggtgacatccgcggcaagaacagagttaatcctgcccgagcaggacagaaaagctgacgatgaaagcaaagggtcaggcctgggaccaaatgaaggctgagaggtatggctcatcagtacaagagagatgcaaaaaactaagttggaaagtaaaggctacacacacatatggagcaccccatcccacagcacattacatccacctcacttcacagaacggagaacagagcagaaatgaccagaacacctttgtcaccatcacacagccctcctaaaatggaaccaaagcttcccagctccctcaaagctttggatgcaaagaaggcaccctgacttccacaagacaccagaattcacacggtactcagaggcactgctggggaagtttgttggtctttattagataaatttccagagacctgtccataatacccaacagaacatgactgtttctttgaggaaagggttataatgtctgtggtgtacaagtcgtttttggtataacttctttcctgctgctgctgcttcccggcaaacatagttttcctatttcaggcagagtgcggtatattccaggaaacactgtttcctactcacttagcttacttctttgttgaatgcctcactaatggcaagtttcaagatgttttgggtgacaatgcacacatgctgggcaaaagggtgatggccagtggctggcagctgggccagcagaagctaggacatctgtgagttgtcattctcatctatccatgtccactggcctgccagcatccgccagtgccttgccagtgtgcacggtcccacactgtggcccctgagtcccctaatgtacacgctgcagccagaatgcagatggagctggcttggctgttccctggatgggcaataaagaaagtgctgcatccc

SEQ ID NO: 294738 - DNA, 948 bp, Homo Sapiens
tctttttgcttccttttaaagtcattaaggttgttggatgaagaagaagcaaccgataatgatttatgagcaaaatttaaggaacgctggcaaaggacatcatccaatgaactgtataagcctttaagagcagagggaaccagcttcagaacagttttagataaagctgtgcaagcagatggacacgtgaaagaatgttacccgtctcatcgtgaccccatcgtgcttttgtgtaagccagagcctgagctgaatgctgccatcccttctgctaatccagcaaagaccatgcagggcagtgaggttgtaaatgtcttaaaatccttattgtcaaatcttgatgaagtaaagaaggaaagagagggtctggagaatgacttgaaatctgtgaattttgacatgacaagcaagtttttgacagccctggctcaagatggtgtgataaatgaagaagctctttctgttactgaactagatcgagtctatggaggtcttacaactaaagtccaagaatctctaaagacacaggagggacttcttaaaaatattcaggtctcacatcaggaattttcgaaaatgaagcaatctaataatgaagctaacttaagaaaagaagttttgaagaatttagctactgcatatgacaactttgttgaacttgtagctaattcgaaggaagacacaaagttttacaatgagttgactgaaatcctggtcaggttccagaacaaatgcagcgatatagttttggcatggaagacagaaagagatgaactcttaaagcctgagaactgggaggaagctggagaaaagatgccctctgaatctttgtgtttggctgcccaggctcgccttgacaccgaatggttgaaaacagatatacaggtggggtttgacatgtgtttttcttggtgtatttctgcttccatgtttaaatttctcgtgtaa

SEQ ID NO: 294739 - DNA, 1000 bp, Homo Sapiens
cactccccttccaccctcagctccaccctcagcagatgataatatcaagacacctgccgagcgtctgcggggagcgtctgcgggggccgcttccaccctcagcggatgataatctcaagacaccttccgagcgtcagctcactccccttccaccctcagctccaccctcagcagatgataatatcaagacacctgccgagcgtctgcgggggccgcttccaccctcagcggatgataatctcaagacaccttccgagcgtcagctcactccccttccaccctcagctccaccctcagcagatgataatatcaagacacctgctgagcgtctgcgggggccgcttccaccctcagcggatgataatctcaagacaccttccgagcgtcagctcactccccttccaccctcagctccaccctcagcagatgataatatcaagacacctgccgagcgtctgcgggggccgcttccaccctcagccgatgataatctcaagacacctcccttagctactcaggaggctgaggcagaaaaaccacgcaaacccaagaggcagagggcggctgagatggaaccacctcccgaacccaagaggcggagggtcggtgacgtggaaccgtcacgcaaacccaagaggcggagggccgctgacgtggaaccatcatcacccgaacccaagaggcggagggtcggtgatgtggaaccgtcacgcaaacccaagaggcggagggccgctgacgtggaaccatcatcacccgaacccaagaggcggagggtcggtgacgtggaaccgtcacgcaaacccaagaggcggagggccgctgacgtggaaccatcattacccgaacccaagaggcggaggttgagctgagaagaggccagtgcactcaagcctgagcaataagaataaaaccgagtagaacaaaataaaaaattcaaaaaacaaaacaaaacccacactccaaaaactaacaaagaataaataaataatataaaaat

SEQ ID NO: 294740 - DNA, 1000 bp, Homo Sapiens
ttgagaatgttttaagggatgtctatcattattaaaatcattataaatcactttggcaacaaccccaaaactaaattattcatggaaagagccatttcaatcttgacttcctagtcgagtgacaagtttaaatgtgggaaaaaaccctgtgaaagtaatgagtgtaggccaggtgcggtggctcgtacctgtaatccagcactttgggaagccaaggtgggcagatcacgaggtcacgagttgatcatgaggagttactatgcccagccaacatactaaaaccccgtctctactaaaaataacaaaaattagccaggcatggtggggcacgcctgtagtcccaggtacttgcgaggctagggcaggagaatcacttgaacctgggaggtggaggttgcggtgagccaagatcatgccactgcactccagcctgggcaacaagtgcgaaactccatctcaaaaaaaaaaaaaagtctaactcttctgcttgtctttacaatgctgtacagtgagagctaatgtttataaggataaacaggatacttacagggatttgaaggtaatttaattcagtggtttccaactttttaatcaccaaggccttctttttactcccctatgtcctgtgtcttaaaagattatgtttaccaaactgcatttattaaagaattatattttgctacataaaggcatgtacaacacaaatcatgcttctgactggcaccatgtaggcagacctaggtactaaaattccagcccaaagcaaataatttaccattttcattagtctttttattccttttgtgggcaaacatatcgtctatgttaggctttttgaaatattaactatgacttgtaaactccagattaaaaactaaccaattcatctttgatggagcttgaatcaaactaagggtattggacttttgaaagattgaaatttttgttacagtatggaatgtttttaactgaatgttgaaataaaagttatttaagaatt

SEQ ID NO: 294741 - DNA, 1000 bp, Homo Sapiens; identical to SEQ ID NO: 119208

SEQ ID NO: 294742 - DNA, 1000 bp, Homo Sapiens
cgcccgggagatgctggcgatctccttcatctcggccgtcaaccgcaagcgcaagaagcggcgggaggcgcgggggctgggcagcagcaccgacgacgactcggagcaggaggcgcacaagcctggggcgggggccacagcgccggggactcaggagcggccgcaggggccgctgcctggcgccgtcgcccccgaggcccccggacgcctcagtcccccggcggcgccggaggagcggccggccgcggacacgcgctccattgtgtcgggctactccaccctgtccaccatggaccgcagcgtgtgctcgggcgctagcggtcggcgggcaggggcgggggatgaggcggacgacgagcgtagcgagctgagccacgtggagacggacactgagggcgcggcgggcgcggggcctggggggcgcctgacacgccggccgtccttcagctcgcaccacctcatgccctgcgacactctggcgcgccgccgcctggcccggggccgcccagacggcgagggcgcgggccggggcggtccccgcgccccggagccgcccggctcggcgtcgtccagcagccaggagtcgctgcggcccccggcggcggcgctggcctcccggccctcgcgcatggaggcgctgcgtctaaggctccgcggcacggcggacgacatgctcgccgtgcgcctgcggcggccgctgtcgcccgagacccggcggcgccggagcagctggcgccgccacaccgtggtggtgcagagcccgctgactgacctcaacttcaacgagtggaaggagctgggcggagggggccccccggagcctgcgggcgcgcgggcgcacagtgacaacaaggactccggactcagcagcctggagtccaccaaggcgcgggccccgtcgtccgctgcctcgcagccgcccgcgcccggggacacggggtccctgcagagccagcccccgcgccgctcggccgcctcccgcctgcatcagtgtctgtga

SEQ ID NO: 294743 - DNA, 1000 bp, Homo Sapiens; identical to SEQ ID NO: 119209

SEQ ID NO: 294744 - DNA, 1000 bp, Homo Sapiens
gcgggactgggagaaagcgcagcgccaagacattggaccagagtggagacgcgcccttgtccccgggagggggcggggcagcctcgggctgcggctcgaggccacgcccccgtgcccagggcggggttcggggaccggctgccggcctcccttcccctatggactcctcgacccccctcctacccctcccctcgcgcgctcgcggacctcgctggagccggtgccttacacagcgaagcgcggggaggggcagggccccctgacactgcagcactgagacacgagccccctcccccagcccgtcacccggggccggggcgaggggcccatttcttgtatctggctggactagatcctattctgtcccgcggcggcctccaaagcctcccaccccaccccacgcacattcctggtccggtcgggtctggcttggggtccccctttctctgtttccctcgtttgtctctatcccgccctcttgtcgtctctctgtagtgcctgtctttccctatttgcctctcctttctctctgtcctgtcgtctcttgtccctcggccctccctggttttgtctagtctccctgtctctcctgatttcttctctttactcattctcccgggcaggtcccactggaaggaccagactctcccaaataaatccccacacgaacaaaatccaaaaccaaatccccctccctaccggagccgggaccctccgccgcagcagaattaaacttttttctgtgtctgaggccctgctgacctgtgtgtgtgtctgtatgtgtgtccgcgtgtagtgtgtgtgtgtgtgtgtgtgtgtgtgtgtgtgtgtgtgtgttgggggagggtgacctagattgcagcataaggactctaagtgagactgaaggaagatgggaagatgactaactggggccggaggagactggcagacaggcttttatcctctgagagacttagaggtggggaataatcacaaaaataaaatgatcataatagct

SEQ ID NO: 294745 - DNA, 1000 bp, Homo Sapiens
gcagagctaccggctctcccgggtcattgagccaccagctgcctcctgccccagctccccacgcatccgacggcggatcagcctcaccaagcgtctcagtgcgaagcttgcccgagagaaaagctcatcacctagtgggagtcccggggacccctcatcccccacctccagtgtgtccccagggtcacccccctcaagtcctagaagcagagatgctcctgctggcagtcccccggcctctccagggccccagggccccagcaccaagctgcccctgagcctggacctgcccagcccccggcccttcgctttgcctctgggcagccctcgaatccccctcccggcgcagcagagctcggaggcccgtgtcatccgcgtcagcatcgacaatgaccacgggaacctgtatcgaagcatcttgctgaccagtcaggacaaagcccccagcgtggtccggcgagccttgcagaagcacaatgtgccccagccctgggcctgtgactatcagctctttcaagtccttcctggggaccgggtgctcctgattcctgacaatgccaacgtcttctatgccatgagtccagtcgcccccagagacttcatgctgcggcggaaagaggggacccggaacactctgtctgtctccccaagctgaggcagccctgtcctctccacaagacacaagtcccacaggcaagcttgcgactcttctcctggaaagctgccatcccccagtagaggccactgtgctgtgtatcccaggaccaccacccaactgtagcccattggaccccatctctttttctgactctgttggtactagatccatattccaaagacatcagcccatgggtggctggtggagagctcaatcccataaatgtagaaagaggtggggcatggatacgtcaaatccctccccagagaaatcttataaatgttagagacgcatcagaagtgacagatgcggatgaaaatagtgaccagagttatgaaacag

SEQ ID NO: 294746 - DNA, 1000 bp, Homo Sapiens
ttttctaaaggttgcagaaaagaatgaaatcaaagagtattttgagtcaaaactctctgaagatgacacaacacatttcaagctgcctaaatatagacgtttattagaaacatttttcaagtttgtaatgctggttgactacatatttcaggaactcattcgtcaacttatgaacactgcagtcacactacttttggaattatttaatggttctgctggaatgccattttcagtggaaaaaaagaatgaaaatcttatcaggtaaattacttttttgaagtcaaaaagtaacttacaattataatattttaacattgccacatatggaggaaatattcaataatttaagctagagtttgaaaattctccttgtggcagagtacatgtactcatttttgctattaacagaacttattatttggtaataccttacttaatatcggtgctataggatgcgcagtaaaatttgaatttcacataaatggtaaataattttagtatacttcaagtattacctatgttaaaattattgtttatctgaaattcagatttctctgataatttagcaaatatattttttatttgttatatctggcaattctgtgcctaagtatactctgtcttccaggttcagagttagtttttaaagatatgtgagaattctggaaggagctacaaagtccaattggaatttgagtcaattccaagaaatatctgttgaatattttcccaatgaaaaaactatctgaaaaacatttttaccttctaaacactactgttaaaaacaaagcatttttcttattttccacaactggatatatctactgtaactggtgaaacaggaatattaattgaaatgatggcatactttgtagctggtaaacaggactatgaattgaaatgttggcatactttaatttctatttatcaaaatttaataatattttaggctaattaaagttttataactaggtagctgaaaatatatcaattcaaaaaa

SEQ ID NO: 294747 - DNA, 1000 bp, Homo Sapiens
gcccaacccctgcccagcacaaagaccttcgcattccagacacagatccagaggggccgcttcagcgtggtgcggcaatgctgggagaaggccagcgggcgggcgctggccgccaagatcatcccctaccaccccaaggacaagacagcagtgctgcgcgaatacgaggccctcaagggcctgcgccacccgcacctggcccagctgcacgcagcctacctcagcccccggcacctggtgctcatcttggagctgtgctctgggcccgagctgctcccctgcctggccgagagggcctcctactcagaatccgaggtgaaggactacctgtggcagatgttgagtgccacccagtacctgcacaaccagcacatcctgcacctggacctgaggtccgagaacatgatcatcaccgaatacaacctgctcaaggtcgtggacctgggcaatgcacagagcctcagccaggagaaggtgctgccctcagacaagttcaaggactacctagagaccatggctccagagctcctggagggccagggggctgttccacagacagacatctgggccatcggtgtgacagccttcatcatgctgagcgccgagtacccggtgagcagcgagggtgcacgcgacctgcagagaggactgcgcaaggggctggtccggctgagccgctgctacgcggggctgtccgggggcgccgtggccttcctgcgcagcactctgtgcgcccagccctggggccggccctgcgcgtccagctgcctgcagtgcccgtggctaacagaggagggcccggcctgttcgcggcccgcgcccgtgaccttccctaccgcgcggctgcgcgtcttcgtgcgcaatcgcgagaagagacgcgcgctgctgtacaagaggcacaacctggcccaggtgcgctgagggtcgccccggccacacccttggtctccccgctgggggtcgctgcagacgcgccaataaaaacgcacagccgggcgag

SEQ ID NO: 294748 - DNA, 1000 bp, Homo Sapiens
gcgcttctacggccttgtgcactgggaggaccccacagacgagtccctgggccccacgccctgccactgctcaccccccgagggcaccatcaccaaagaaggcatgctgcactacaaggcgggcacctcctacctgggcaaggaacactggaagacgtgcttcgtggtgctcaggcccttcttcaccctgccttccgtagatgacagcccctggtgtcctttgcctcaggttcatggccgcagcatcaacgggatcctctaccagtacccggaccgcaccgacgtcatccctctgctctcggtgaacatggggggggagcagtgcggtggctgccggagagccaacaccacggatcggccccacgccttccaggtcattctctccgaccggccctgcctggagctaagtgccgagagcgaggccgagatggccgagtggatgcagcatctctgccaggctgtgtccaaaggggtcatcccccagggcgtagctcccagcccctgcataccctgctgcctggtcctcacggatgaccgcctctttacgtgccatgaggattgccagaccagcttcttccgctctttgggcacagccaagctgggcgacatcagcgccgtctccaccgagccgggcaaggagtactgcgtcttggagttctcccaggacagccagcagctcctcccgccctgggtcatctacctgagctgcacttctgaactggaccgattgctgtctgcactgaactctgggtggaaaaccatctatcaggctgagtgccagtgtgggagcgtgctcatgagagccctgcacaagcgggttttgagcacatgctacgctctagccccgtggaagcctggactagtggacctcccccacacggcgatccaggaagcctccaacaagaagaaattcgaggatgccttgagcctcatccacagcgcctggcagcggagcgacagtctctgccgcggccgagcctcccgagacccctggtgctga

SEQ ID NO: 294749 - DNA, 1000 bp, Homo Sapiens
aagaagacatgaagtgtctctcccagtacccaagcctcggttacctaaagcatctgaatctcagctacgtgctgctgttccgcatcagtcttgaacccctcggagctctgctagagaaaattgctgcctctctcgaaaccctcatcttggagggctgtcagatccactactcccaactcagtgccatcctgcctggcctgagccactgctcccagctcaccaccttctactttggcagaaattgtatgtctatgggtgccctgaaggacctgttgcgccacaccagtgggctgagcaagttaagcctggagacgtatcctgcccctgaggagagtttgaattccttggttcgtgtcgattgggagatcttcgccctacttcgggctgagctgatgtgtacactgagggaagtcaggcagcccaagaggatcttcattggtcccaccccctgcccttcctgtggctcatcaccgtctgaggaactggagctccatctttgctgctagggaaggcgtgcctagcggggtagagaaatccaaagttctcttccaggcactgggacactaaaatctactatgtaggtgcaaactatttttctcttttcttatttatttcattttttaataattccaaaatttttattaaagacaatttgagacagggtttctctgtgttgctctgggatcctcctgcctcagctgggcttatgggatcctcctgcctcagcttcctaaagtgctgggattactggcatgagtgactgtgtccaggccacatgcaacttaaaggaagcacagggaagtgctcagtgtgagggaaaaaaacataacagcagggggcaaggctggaggaaaatgttgaggtgacatcaatgagaacttcagggacccgtgtcctacagagtcggaaagagaagctaaagttctacagtgatgagaatgttatccctgcaaggatggttaccaaggaatatcagaaataaagagcacctgaatgaaaa

SEQ ID NO: 294750 - DNA, 1000 bp, Homo Sapiens; identical to SEQ ID NO: 119211

SEQ ID NO: 294751 - DNA, 1000 bp, Homo Sapiens; identical to SEQ ID NO: 224897

SEQ ID NO: 294752 - DNA, 1000 bp, Homo Sapiens; identical to SEQ ID NO: 224898

SEQ ID NO: 294753 - DNA, 1000 bp, Homo Sapiens; identical to SEQ ID NO: 119212

SEQ ID NO: 294754 - DNA, 1000 bp, Homo Sapiens
tggaaatggctgaagaggaacgactggagtaccagcggcggaaacaggaagcagaagagaaggctcggctggaggcagaggagaggaggcaaaaagaagaggaagcagcaagactggctctggaagaagccacgaaacaagcccaggaacaagccaggtactggatatttgggcaacagttgccatagggggatggttcaagggcttcactgtccagtgctagtgctagctttgcactgcctttagacaagaaaagtccccccacccccagcatggcttggaagactgaaaggcatagagggattcttttgctgcaaatgtcaaggattcctttgtagcttaatgaagttgtaatgaatctacaagggagtttggagatatctacgtcaaccccctagtttatagatgaaaaaagcaagtcccaaagagggaaaggatcttgatcacagacaaacagtgacttagggacaatgccaagaccagatctaagaccccctgatttcgaacccactgcctgtcttgatatctactgagtgcctgttatgtgccaaacactgttctagacactaggaattcaggagtaagcaagacagagaaggtctctcttcccatcatatttacattctaggggtgggaatggagacagactctaaacaaatattttttaaagctagcaataaatgctatgcagaaaaaatttaacgatgtgataggacaccgggcacagtggctcacacatgttaattccagcactttgggagaccaagaagagagaatcacttgagctcaggagttcaagaccagcctaggcaactaagtgaaacccctatccctacaaaaaaaatcaaaaaattagccaggtgtggtggtgaatgcctgtggtcccagctacatgggaggctgaggcaggaggatcacttgaacctgggaggtcaaagcggcagtgagctaaaatcaagtcaccacactccagcctgggtgacagagcaagactctcttt

SEQ ID NO: 294755 - DNA, 1000 bp, Homo Sapiens; identical to SEQ ID NO: 119213

SEQ ID NO: 294756 - DNA, 1000 bp, Homo Sapiens
gtgtttaatggatttcttttatataactcattcctatctgtactacataactcattcttatctgtactgtatggatttcagggatcttaactgtttagaattccaactttcttttctgcctataacactctgtccactgtctaccttagtttccttttctgtttcctgtcctgtgatgtattctatggattagctgaaattatagttttctcagtccactttttcatcactcattccgtggatgattctacctcctttttgcatttctctgtatgcctgctatctcgcctttgtgagattgataataagcaataactaatgaacggttattgatatagccttcaaaacagatgggtcagaggttgtttgtaggacttatggtcaataaagttattatcgttaatgttttttttctttaccttcagcacctgagacttttacctttacccagaaaggaataaaagaggtcagatgatgacagctgtgtccttaacaaccaggccccaggaatcagtggcttttgaggacgtggctgtgtacttcactacgaaggaatgggccatcatggtgcctgccgagagggccttgtacagggatgtgatgctggagaactatgaggctgtggcctttgtagtgccacccacttccaaaccagctttggtctctcatctggagcaagggaaagagtcctgtttcacccagccacagggagtcctaagcaggaatgactggagagcaggctggataggatacttggaactaagaagatatacttacttagctaaagcagtgttacgtagaatagtatcaaaaatttttcgaaatcgtcaatgctgggaagacaggagaaaagcttaattcttgacatttaaataccagttttccaagtaaggagttgatgtaagagccaccttaaacgatgtcaaatacacattttctttttctgtagactggtagatttaatgtttttcattcattaaaataactcattttgatgtac

SEQ ID NO: 294757 - DNA, 1000 bp, Homo Sapiens
aagagaagctgcttgggaccaagcactccatcggctgacagcagcctctgtggtccgggacaatgagcagctggccctccgaggaggggcagagaccacagctgaccggggccatgcccggaggtgctggcttcgagcccttcagacaaagcccgctgagcccccaggaacccctcctgcctctcacagccatctagatgcagctcctctgcccactgttgtctactctaaaggacttcagagaggctctccagcaggcgcctgggactcggaccaaaatggcaactccaagcgtgctttgggggaccctgccactcccacggaaggtcctcgccgcccacctccccgtcctccctgtcggctcagcatgggccgccgtcacaaactctgtagccctgacccgggccaggccaacaacagtgaaggcagcgaccatgactacctgcccttggtgcggctgcaggaggcaccaggctccttccgcctggacgcgcccttctgcgccgctgtgcgcatctcgcaggagcgcctctgccgtgcctcgccctttgccgtgcaccgcgccagcctcagccccacctcggcctcattgccctgggcacttctgggccctggtgttggccagggtgacagtgccacggcctcctgcagcccgtcccccagctcgggctctgaggggccaggccaggtggacagtgggcggggctcagacaccgaggcctccgagggggcggaagggctgggcggcaccgacctgcggggccggacctgggccactgccgtagcactcgcctggctggagcaccgatgcgccgctgccttcgacgagtgggaactgacagcggccaaggctgattgctggctgcgggcccagcacttgcctgacggccttgacctggccgccctcaaggccgcagcccgagggctcttcctgctactgcgccactgggaccaaaacctgcagctacacctgctgtgctacagcccagcgaacgtgtga

SEQ ID NO: 294758 - DNA, 1000 bp, Homo Sapiens
acctcaaaatggacatcttatttcactctcagtaaaaagttgaaaatttgactttttagtattgggggcagaagatagaagtgtgttaaagtgaaaaacagttttttcagtaaggtttgaggccctttctataagttttcagtacaccttaaacaggactaaaaatactttaaaagtgtgctttcaaagaattttaaaacatgtttgactcaaagatgaatttgaagtgagttaattataatactggaaaacttcaggttagcataaaatagtttatatatatcccctgccccctttgggatttacttccaccatcaaatcttcaactgttagaatttcacttaaaagtgaataactgccatacatgttttcttggcatcttcatttacagaaataacatacagcatctaaagcaagttctgtccctcttaatgtgtatgacatctttttaagtagctgatcagcaataatagccaccagttgactaggtcagcctgatatactagtggatcactgtccaagataaaaaggtaaccccaagtattgcaaaatttccctcaatttctttatgtaacattgaagaaatgttgttaccagctaagatgataaattggaaaacagtcttgttaaggtgaaaggggtccttggtgatggatcattatttcaaaaaagaaaaaaatcatgtgaaaaggaatagtggttcctcttgatgtatagtatgcctgtattatagtttttacaaaattgtgaacttgtgtaatagtataataggagatattgttgaatttctaactgtttatacatttaaattcatatatgtaatgtttgttttatcaattacaatctgaatttctaagaagcatgttgacttttgcaataaagatgcaatatggaatggttcacaattggaaaaaaaaaagaaaaaagatgaaagtattacaaatttaaaagaatttggaaaatttatgaaccattccaaaaattataacaatcaccaaaa

SEQ ID NO: 294759 - DNA, 1000 bp, Homo Sapiens; identical to SEQ ID NO: 119214

SEQ ID NO: 294760 - DNA, 658 bp, Homo Sapiens
aaaagagaattcaccctggagagaatccctacaaatctgaagaatgtaacaaaggctataggtggttctgagaccttgctaaacataagataattcatattggagagaaaccctacaaatgtaatgaatgtggaaaaggttttatgtggatctcggcccttagaaaacataagagaattcatactggagagacaccctacatccatgaagaatgtggcaaggcctttacctactcctcaatccttattaaccacaagagaattcatatggaagagggaccttacaaatgcgaagaatgtggcaaaacctttatgtggctctcagactttactaatcataagagaattcaccctggtgagaaaccctacaaatgtgaagaatgtggcaaagtattgagctcgttctcacacgtcattagacataagacaattcatagtagagagaagctccacaagtgttaaaaatgtggaaaagcctttaacaattcgtcatattgtgttcaacatcagagacttactactgaacaaatgtagtataaaggttattatgatgtttgtaatgaagatgagtataatggagctatatgtttctgaattctgaacaactatttacaaaattttatcctacttttttctgttgaaaatatgacttctctcgt

SEQ ID NO: 294761 - DNA, 1000 bp, Homo Sapiens; identical to SEQ ID NO: 119216

SEQ ID NO: 294762 - DNA, 1000 bp, Homo Sapiens
agacgaaggcaaaggcctcatagaaggaaataccatctacgctaacaagggctgtggtgtgtggatgatgtcgtccagcctcccccatgtcaccagcaaccacgtcagctacaatggcctgtatggagtggcagtatttagccagaaggatggctccagcgagttacctcgaggccacagggctcaagagaacttcagcgaggatggggacgccatcctctgggagacagagctggagaaggaggacgacccactgcgccggcccatcaccatagctcttgttgagtctaacagtattaatcacaatggagcctcaggactctatgtccagagcagcgaggcactgcatgtcatcaccaatgtgatccacgcgaatggggacagaggcattactgtggcccagagcagccaacccacccgagtggccaacaacagcatctcctgcaaccggcaaagtggggtcaaggttgaggcccagtgcaaagtggagctccggggcaatggtatctatgacaacagaggccacggcattatcaccaagggcgacagcaccatcgtcattgaaaacgatatcattggcaaccggggcagcgggctgcagctgctgcccaggtccgacactaaagtgagtatgtctgcatgtgtaataaagaaccggatccactcgttccgggcctacggcatcgccgtgcggggccgtgccaaggccctggtgcaggaaaacatcatcttccagggcaaaaccagtaagaccatctttcagcagatctcaaacaaccgagaatgcatcatgcaaaacaacaagttcctggtcttcaagaaaaagtctgatacgtggcgcctggtgaacccaccagcacggccccaccttgaaaattctctcagacgtccctcggcagcccacaatgggcagaaggtgacagccatggcaacgaggatcacagcccgggtggaaggtggttaccacagcaaccgcagtgtcttctgcaccatcctgtga

SEQ ID NO: 294763 - DNA, 1000 bp, Homo Sapiens; identical to SEQ ID NO: 224901

SEQ ID NO: 294764 - DNA, 1000 bp, Homo Sapiens
cagtgcatccactctgggagagcgtggacctggttcctgggggcgatcgccagtcacccatcaacattcggtggagggacagtgtttatgatcccggcttaaaaccactgaccatctcttatgacccagccacctgcctccacgtctggaataatgggtactctttcctcgtggaatttgaagattctacagataaatcaggctgtacaagaaacatggtgctcacatctgcatctggtgagggcctcaaactgtttcccctcatgttggaaggccaaggggagccaacgtgcagagatcacatgctgcacttagtgcattggaacgcagtcaaatttgaaaactttgaggatgcagcactggaagaaaatggtttggctgtgataggagtatttttaaagatttcggaaacttctggcagcccagtgtctactggaaggcccaagccgcttgccagaaagctgcgccccgcccaaaagcactgggttctgcagtccaggcccttcctcagctcccaggtccaggagaactgcaaggtcacctacttccacaggaagcactgggtccgcatccggcccctccgcaccactcctcccagctgggactacacccgcatctgcatccagagagagatggtccccgcccgcatccgcgtcctgagagagatggtccccgaggcctggaggtgctttcccaacaggctgccgctgctgagcaacatcaggcctgatttctccaaggctcccctggcctacgtgaagcggtggctttggaccgcccgccacccccacagcctgtccgcagcctggtgaccgtgaaaatcgccccgccagagagcagaggaagcccgacgcccaggccatctgccttcaggtctgtgatgagaaacggagtggcctgttccgttgtgcccaggtctaggccgctgagcagagccctcactcccaggcagagttgtctgaatccttcctggcggccgcctgctgccctgacgcctcag

SEQ ID NO: 294765 - DNA, 1000 bp, Homo Sapiens
tggcctagttggaggtgctagcaactggatttccaacctgcccaacaatagcctgggcttcattctggcagatgctggttttgacgtgtggatggggaacagcaggggaaacgcctggtctcgaaaacacaagacactctccatagaccaagatgagttctgggctttcagttatgatgagatggctaggtttgaccttcctgcagtgataaactttattttgcagaaaacgggccaggaaaagatctattatgtcggctattcacagggcaccaccatgggctttattgcattttccaccatgccagagctggctcagaaaatcaaaatgtattttgctttagcacccatagccactgttaagcatgcaaaaagccccgggaccaaatttttgttgctgccagatatgatgatcaagggattgtttggcaaaaaagaatttctgtatcagaccagatttctcagacaacttgttatttacctttgtggccaggtgattcttgatcagatttgtagtaatatcatgttacttctgggtggattcaacaccaacaatatgaacatgaatactcatggtttgttacagagccgagcaagtgtatatgctgcccacactcttgctggaacatctgtgcaaaatattctacactggagccaggcagtgaattctggtgaactccgggcatttgactgggggagtgagaccaaaaatctggaaaaatgcaatcagccaactcctgtaaggtacagagtcagagatatgacggtccctacagcaatgtggacaggaggtcaggactggctttcaaatccagaagacgtgaaaatgctgctctctgaggtgaccaacctcatctaccataagaatattcctgaatgggctcacgtggatttcatctggggtttggatgctcctcaccgtatgtacaatgaaatcatccatctgatgcagcaggaggagaccaacctttcccagggacggtgtgaggccgtattgtga

SEQ ID NO: 294766 - DNA, 1000 bp, Homo Sapiens
cttcctactgaagggaattgtgggggcagttctttggccttcttgctgaactttgctggaaatagcccacaatttttatcagaggttagaactgtacattatcagagagactggacactttatcccctagcaaagtgggagaagattttaccagctcattccactccaccctggccttcccccaccccccatccccagcagcatttccatggaaatccagatggtcgtgtagtgttatggctctcttgtgatagactggccttcatattggagagctagggagagcccctgggagggagagagataaggcgctatctgccttcaatcagaaccttcggtttaaaatcatctaagagtctatacttgtgtgtacatacgtatttatttttatttatttttatacaattccattggcatggtccttcaccgaccctatgatttgcactttttatttctatgtgtgccacacacaatgcagtattaatggcaaccaggtaaatattgatttattttttaaagcttttcttcagtgttttgtcaaccatttcaaagtgtctcccaaaaaaggatgctgaagagcaattgctcccttaagcaacagattcatatttaccctgggttaatacaacaaaaggcctgtataattgtcttttcattgttaacacccaaaatagcatctatctagacagtatccccaaagaatttggaaaatctgatggtgtgagcagcagccgttagtatcagggtttcccattcttggacagtccgaggctgtgacctgttagataattagattatacttgaactggaccagagtttgttttttgaatttatgagaaaaaccaaaacactaagttaagtttgaacttgtaaagtattgaaatttgttgagtgtcctataaattgtcactacttttcctgatctgtataactgactgcaaagtgtttgtttttacaaaagagaaaagaaaagatttttaataaagagaatttgaaagct

SEQ ID NO: 294767 - DNA, 1000 bp, Homo Sapiens; identical to SEQ ID NO: 224902

SEQ ID NO: 294768 - DNA, 1000 bp, Homo Sapiens
tgatgtgattatcaaaactcagtcatattctaaggagaccccatcatttactcaattacatgacttatctgaactgtccctttctgaggtgtctaaattttcaaatgcatttgagttacctgaaaatatgggctcaaaaactatgatgcatattcttagtcaacccaacacatttccaacagttgttaattcaatccaattgataacagcaactgttgggcacacatttcatttcccgatccctcctgacacattttatgaccaggaagatggcaactcaactcacttgacacttgaaataaaatcagtaaatgagtatccttcgggcccagaaagctggctgcaatttaacatgactcatcaaatattgtatgggtatcccctagaactggatttccaatattcccctcaggaatttattctctgtgccactgattccgggggtctggttgctcagatgcctttgaccattgaactgaagctacccagaagtagtccctgccacacttacactctgcgcacaaaaaacagtttctactcattcattaaaaggagagagagaattggtttattttttgctaaactcactgactatctaaactctagtaaccctgaacagatcgtattaattaccctgagaccagggtctactatcatatcctggtataatagggccttatgtttagtcaacagcagttctctgaaatggtgtcctaacaaagaaatccaggaaataatgtttaaactaaggaggcctgacggaaatgtccatccaaactttgtatatgctatgctgccggaatacaaaattggcacagttgagaacatcacatatagtggaatctgtcttactctggagctagacaatgggttaattggaaacagcattctaacctcatcgaacacagaaaatagtccctggattagaaatgttattccggccttgctggcaagtacgtgtctactagttgtggtagcagcagcagcaagtgtagcttag

SEQ ID NO: 294769 - DNA, 1000 bp, Homo Sapiens
ctgatgaaaacatcctccaagaggaagaggcaatggatataccaaatgaaactttgacctttgaggatggcatgaagtttaaggaatatgaatgtgtaaaggagcatggagattatacagacaaagcatttgaaaaacttcactgcccagaagcagggttttccacgcagactgtagctgctgtgggaaacaggaggcagtgggatggaggagcgcctcagactctgctgcagatgatggcagtggccgacatcacctccacctgccccacggggcctgacagtgagtctgtgcttagcgtcagtcgtcaggaagggaagaccaaggacccgtacagcccagtgctcatcctgatgtgatagtctacttctcactatacaccctatagatcttgtatcagacactttcaaatatgttgttttgatatctccctatgcctaaagagacttgcctgctaattatcctggacaaatgaccactctagacatgcacatataaaggaggaaaaatccaggatgccaccttcctcagagtgagggaaaatgcgtgaggaaggacagctgacttgatttaccttccaaggccagctcaacaactttttttgcgatttcatagggtcatttttttttttttaatttttattttttattgatcattcttgggtgtttctcgcagagggggatttggcagggtcataggacaatagtggagggaaggtcagcagataaacaagtgaacaaaggtctctggtttttctaggcagaggaccctgtggccttccgcagtgtttgtgtccctgggtacttgagattagggagtggtgatgattcttaacgagcatgctgccttcaagcatctgtttaacaaagcacatcttgcactgcccttaatccattcatctctgagtggacacagcacatgtttcagagagcacagggttgggggtaaggtcaccgattagcaggatcccaaggcagaagaatttttcttagtacggaac

SEQ ID NO: 294770 - DNA, 1000 bp, Homo Sapiens
ctccggacaacttgccaagcttcaacatactgtactgtgaaataagtgtcaccctcaaggatggagccaccttcacagatcgctctgataccttctatgggcactggagaaaaccactgagccaggaggacctagaggaaaagttcagagccaatgcctccaagatgctgtcctgggacacagtggaaagccttataaagatagtcaaaaatctagaagacctagaagactgttctgtgttaactacacttctcaaaggaccctctccaccagaggtagcttcaaactctccagcatgtaataattctatcacaaatctctcctgaggcttaccaacatctaaatgactttgcatttggggagattcaatgatttggtttgtaaagcaagggtctgctgcttggttttcccaggaaaaatgaacaaagatggagagagtccagaaacagaactacatatatctggaaggagccttctcctgaaaattttgcaggacagttccacttacctaaatcaagatgaaacacacacacaaaaatgagtttgtaagcattcacaagggtgaaattcaactcacctgtgatttacttataaaattaatctcttcataggaattatgtgtggacttcatgagcctcaaggttttagagggatgtgaacctgcatgtatattttctgacagtggagagggctctggtgcattgtgtcaccaacagatctcctagaccatggcttattaccaagccctccacagtgcaaggggtgctactggggaatgggtgggtttaaatcctgcctctgccattcactagatgtagccttgagcatgttaccattagccctctgcctcagtttccctatttgtcaagccgaagtaaaaagcagtctggaaaaatcgcattttggctctagaacccatggtcttaagcactgcaatatatcacctttcagtataaaaatatttgaatcagagttgcaataaagaatgaaaaggaaaaaa

SEQ ID NO: 294771 - DNA, 1000 bp, Homo Sapiens
ggaggaacccagccccctcaacctatcccatcatacccccgaccatcagggtgaggggcgagggtcagccaggaaccctgcagagctggcagagaaaagtcaggcccgtgggttctaccctcagtcccatcaggaaccagtaaaacatagacctttacccaaagcaatggttgtagccaatggcaacctggtgcccactggaactgactcaggcctgctgcctgtgggctcggagatcctggtagcatcaagtctggacgtgcaggccagagccaccttcccagacaaggagccaacgccgccccccattacctcctctcacttgccttcccatttcatgaaaggcgccatcatccagctggctacgggagagctgaagcgggtggaggacctccagacccaggattttgtgcgcagtgccgaagtgagcggggggctgaagattgactctagcacggtcgtggacattcaggagagccaatggcctggatttgtcatgctgcattttgtggttggtgagcagcagagcaaagtgagcatcgaagtgccccccgagcaccccttctttgtatatggccagggttggtcctcttgcagccctgggcggacgacacaactcttctctctgccctgccatcggctacaggtgggagatgtctgcatctctatcagtttacagagcttgaacagtaactcagtttctcaggccagctgtgctcccccaagccagctgggtcccccccgagaaaggcctgagaggacggtcttgggatccagagagctatgtgacagtgaggggaagagccagccggcaggagagggctcccgtgtggtagagccttcccagcctgagtccggtgctcaggcctgctggccagccccgagcttccaaagatacagcatgcaaggggaggaggcacgggctgcgctgctccgtccctctttcattccacaggaggtaaagctgtccattgaagggcgttccaatgcgggaaaatga

SEQ ID NO: 294772 - DNA, 1000 bp, Homo Sapiens
ggcccccgcgccctccgagccgtccagctccgtccaccgcccgggagcacccggcctgcctttggccagcggtcccggccgccggcgcttcccgcaagcgctcatcgttggcgtgaagaagggcggcacgcgcgccctgctggagtttctgcggctgcaccccgacgtccgcgcgctgggctctgagccccacttcttcgacaggtgctacgagcgcggcctcgcctggtaccggatggacgtgggggtgcggcagcctcagctgaagcagcccgcgctggtggctgctcatccccaagcttggacccagcgcctgcagagaggaccctgcccaaggccagttggggagtcagtgggggtggcaggacccagacgcttctccaggagtctgatgccccgaaccctggatgggcagatcaccatggagaagacccccagctacttcgtgacgcgagaggccccccgccgcatccacgccatgtccccggacacgaagctgatcgtggtggtgcggaaccccgtgacccgggccatctccgactacgcccagacgctctccaagaccccgggcctgcccagcttccgcgccctggccttccgccacggcctgggccccgtggacacagcctggagcgccgtccgcatcggcctgtacgcccagcacctggaccactggctgcgctacttccccctgtcccacttcctgttcgtcagcggggagcgtctggtcagcgacccggccggagaggtcggccgcgtgcaggacttcctgggcctgaaacgggtcgtcacggacaagcacttctacttcaacgccaccaagggcttcccctgcctcaagaaggcccagggcggcagccgtccccgctgcctgggcaagtccaagggccggccacacccacgcgtgccccaggccctggtccggcgcctgcaggagttctaccggcccttcaaccgcaggttctaccagatgacgggccaggacttcggctggggctga

SEQ ID NO: 294773 - DNA, 1000 bp, Homo Sapiens
aatgttaaaaatgggtcgggcgcggtggctcacgcctgtgatccaagcactttgggaggctgaaacgggtggatcacctgaggtcaggagtttgagaccatcctggccaacatggtgaaaccccatctctactaaaaaagataaagaaattagctgggcatggtggtggtgcacgcctgtagtcccagctcctcgggacgctgaggcaggagaattgcttgaacctggcggggtggaagttgcggtgagccaagatggtgccactgcactccagcctgggtggctgagcaagactccgtcttaaaaaaaaaaaagtgcaagttttcttgctacagcaaaaattaaatgcaaacagacaaaaaagaaatgaaattatagttgatatagtggtgtttggaattgaaaaatataaatgcttactataatttcctatgtttccccattttaccaattttgtaaatttgagtatctgataaaatagaaattagaaaagaaaaatactgtgttttaatcctagagcataggcagtaaacttttctgtaaagggccaagtagtattatttgagactttgtgagccataagatccctgttgcaacaactcaacactacagttacagcacaaaagtagccgtaaacaatatgcagactgaaggggtgtggctgcattccagtaaaatttagttaaaaaacaggtaataggggccaggcacggtggctcacgcctgtaatcccaacactttgggaggccgagatgggcggatcatgaggtcaggagatcaaggccatcctggctaacacggtgaaaccccgtctctactaaaaaacacaaaaaattagccaggcgtggtggcaggcgcctgtagtcccagctactcgggaggctgaggcaggagaatggtatgaacccgggaggcggagcttgcggtgagccgagacggtgccaccgcactccagcctgggcgacagagcaagactctgtctcaaaaaaaaaaaaaaaaa

SEQ ID NO: 294774 - DNA, 1000 bp, Homo Sapiens; identical to SEQ ID NO: 224903

SEQ ID NO: 294775 - DNA, 742 bp, Homo Sapiens
atggctgaggagggctcagggcagctgacactgggttctctgtcctcaggagccctccttatggacctggagaccccagaggagatgcaggctcggagcctgggcaggcccatcaaatcctcaaagcagtacctgcggcaggtcattgcagagtacgaggcactggaccgagaactcccgtgcatccggaagttccccacaccaccagcttcccagcccctctgcctctgcatggagaccttgcccgaggaggattttacccacctggaggtgctgcaagccctggaggcccagttaccaggggccatggagagcgggcgcgtgagcagcatccgctttgagaacatgaacgtcatctgtgggactgctgggcgccggaaccggtggctcatcgcggtcacggacttccagacgcgctcgcgcttgctgcgctccgggctcagtccccgcgggcttgcgcaccagatcgtgcgccacgacgacctcctgctgggcgactaccgcctgcacctgcgccgctccctggtccggcggcgcatgctcgaggccctgggggcggagccgaacgaggaggcctgacgcccgggcgggccccggcagcgcttgcgcaccgccccgcgggctggggccacccacccggagccccggaggacagggggcgttgccttcccaggaaggaggcggggccggctcgagggggtggatactgtgagtttaattataaagaatgacctggtacaaa

SEQ ID NO: 294776 - DNA, 1000 bp, Homo Sapiens
ctgcgccctccgctgcaaccctttatcctccgcctggattgcgggtctggaccgtacgcgtccagggcaatgacatctcacaccggcttcggctgtctgccgtgcggctgcaggacgagggcgtgtacgagtgccgcgtgtcggactacagcgacgacgacacgcaggagcacaaggcccaggcgatgctgcgcgtgctctcgcgcttcgcgccgcccaacatgcaggccgccgaggccgtgtcccacatccagagcagcggcccgcgtcgccacggcccagccagcgccgccaacgccaacaacgcgggcgccgcgagccgtaccacctccgagcccggccgcggcgacaagagcccgccgcccgggagccctcccgccgccatcgatcccgcagtccccgaggccgcggcagcctcggcggcccacacgcccaccaccacagtcgcggcagctgctgctgcctcgtcagcgtcgccgccatcgggacaggcggtcctgctgcgccagaggcacggctcgggcaccggccgtagctacaccacagacccactcttgtccctgctcctgttagctctgcataagttcctgcgcctgctcttgggacattgacagacaagaccaacccgagcatctcagaggccgcacatgacctgcccggggccctcggtgaggaccatgtcgctggatggacacagagagactgagagacgcatgaaaaagtccacatggaaaataaataaatcatatttttgggaaagttacacaaatgtagaacacctaaaataatgcatctagtttccaaataatttggagtttggcccatgcagtctgcatgggaatcaatgatttctctacttcaatgtagttttcttttctacactttccctccaagtcttcattttgcacgaactgttgagcagttatctttaggataatatgtacaaatgttggggtcaaagccttttgacaaagcaaaatatttttagtagattattgtg

SEQ ID NO: 294777 - DNA, 1000 bp, Homo Sapiens
gcaagctgagaggttcgacactgccctgtgcgtcctgggcacccctcgcttcacttccggccgccattactgggaggtggacgtgggcaccagccaagtgtgggatgtgggcgtgtgcaaggaatctgtcaaccgacaggggaagattgagctttcttcagaacacggcttcttgactgtgggttgcagagaaggaaaggtctttgctgccagcactgtgcctatgactcctctctgggtgagtccccagttgcacagagtggggattttcctggatgtaggtatgaggtccattgccttttacaatgttagtgatgggtgccatatcaacacattcatcgagattcctgtttgcgagccctggcgtccattttttgctcataaacgtggaagtcaagatgatcagagcatcctgagtatctgttctgtgatcaatccatccactgccagtgccccagtttcttctgagggaaataccagtgctttacaaagagtaggcgatgatgtcttcatgcagaaaaatgacatcaggcccgctgcccagctgggggcgctggtgtccaagatcaaggaactagagcccaaggtgagagctgttctgcagatgaatccaaggatgagaaagttccaagtggatatgaccttggatgtggacacagccaacaacgatctcatcgtttctgaagacctgaggcgtgtccgatgtgggaatttcagacagaataggaaggagcaagctgagaggttcgacactgccctgtgcgtcctgggcacccctcgcttcacttccggccgccattactgggaggtgggcgtgggcaccagccaagtgtgggatgtgggcgtgtgcaaggaatctgtgaaccgacaggggaacgttgtactctcttcagaactcggcttctggactgtgggtttgagacaaggacagatctactttgccagcactaagcctgtgacgggtctctggatacaagtcgtgatgatcacggatacttga

SEQ ID NO: 294778 - DNA, 1000 bp, Homo Sapiens
aatggtgcactaccaggatctgctgtggacggtcgcctctttcctggtcgcccaggtgcgaaaactgaacgacagtagcagcaggcgcccccagctctgcgacgcaggcctcaagacttggctgcggaggatgcacgcagacagggacaaggcgggggacggcctcgaggcgactcccaaggtggcaaagatccaggtggtctggcctatcaaggaccccttgaaggtgcctctcacccccagcaccaaagtggcccacgtcctgaggcagttcacagagcacctcagccctggttccaagggtcaagaagacagtgaggacatggacagcctccttctacaccataggtccatggagtcagccaacatcctcctctatgaagttggagggaatatcagtaagttccactgtgggaaacaggaacagagcccgggtccctgggagttcttcgacctcaaaggctcactgggcccttctgtgggaggccagaatgagcatcgcctggacccagatgcctacctcttagatctgtaccgtgccaacccgcatgcacctgcggtggtccctttgcacacctcattcactcattcccagggtctggatgacaggatgcagtgtggttggagggaaaatcctttacccttggcaggagtgctggaggacagggctgagccctctggccattcattgatgctcccatgtcacactggtcatgcctcttggtggcccgaagtggcctgcccccaacaactgcaggtagccccaggacacagggagcaccagtctggcctagtgtcgcaaaggcctagtgccacaaagaccacagctgccctcagcttttcagacactggacatgagtgttcttggtcttccaatgatgccaaagtcctgccgccctgcaaacagctcctctgcccaccaggacatcttgccttctccggacctgcttctccccggacctcgggggttgtgtggtcagtgctggctggtccctggtga

SEQ ID NO: 294779 - DNA, 1000 bp, Homo Sapiens
ttcctggacctaagccagaaccatctgcaccactgcccgctgcagatctgtgcactgaagaaccttgaagtcctgggactggatgacaataaaataggacagttaccttcagaattgggctcactttcaaaactgaagatacttggactaacaggaaatgagttcctttcctttccggaggaagtcctttctttagcgtctttagagaaattatacattgggcaagaccagggattcaaacttacctatgtgccagaacacattaggaaactgcagagtctcaaagagctatatatagagaacaatcatctggagtacctgcccgtatccttggggtcaatgcctaacctagaagttcttgattgccggcacaatttgcttaagcaacttccagatgccatttgccaagcacaagaattggatccctcacctatgtggacaggattaggtgacaagttaatattgtttcttctaagattgaaccaccattacgaaaaaatcttttcagctttgaaagaattacggctggaggacaacttgctcacccatcttccagagaatttggattccctagtgaatcttaaggttctgacactgatggacaatcccatggaagaacccccaaaagaagtgtgtgctgaaggcaatgaggccatatggaaatacctcaaggaaaacagaaacaggaatataatggcaacaaagattcaggcatggtggcgtggaacaatggtacagagaggatttgggaaattcggtgaactactaaaaccacaaaagaaaggaaagacctctccaaaagataagaaaggaaagaaggatgtaaaaggaaaaccaggaaagggaaaaaagaaataatcctgtaaattgataaattggggtaatggaccttgatagattaagaagacaaaatatctaggaattagatgcctactacattaaaattattcataaaattacacttatgtgtaaaaataaatgattcttacttttactgaaa

SEQ ID NO: 294780 - DNA, 1000 bp, Homo Sapiens
atgtggtgaagactattggtcaaatgcacaaaagagcgagtgtgtgctgaaagaggtggaataccttgcttatgatgaggccctgggattcacacttgtcattctttctgtctttggggcatttgtggtcttggcagtcacagctgtgtatgtgatacacaggcacactcccctggtgaacgccagtgactggcagctgggctttctcattcaggtttctctgatcatcatgctgctgtcgtccatgcttttcattgacaagccacacaactggtcctgcatggctggccaggtcactctggcactgggcttttctctttgcctgtcttgccttcttggaaagactagttcactgtttttagcctacagaatttccaaatccaaaactcaacttacatccatgcaccccctttatcggaaaatcattgtgctaatctctgttctagcggagattggcatatgtacagcctacttgatattggaacctcccatggtatacaagaacatggaatctcaaaatacaaagatcattctgggatgcaatgaaatttccatagagtttttgtactcgatgtttggaattgatgccttcttagccttgctatgctttcttacaacttttgtggctcgccagttaccagataattactatgaaggaaaatgcatcacctttgggatgcttgtctttttcatcatttggatgtcttttgtccctgtttatttgagcaccaaaggcaagttcaaaatggctgtggaaatatttgcaatcttggcatccagccatggcttgttgggttgtatatttgctcctaagtgcctcattattttgctgaggccagagaggaacaccagtgaaattgtttgtggaagagtctccaccacagataattgcatccaactgacctcagcttttgtgagcagtgagcttaacaataccacagtgtcaactgttctggatgacagagttttgatttacatgtgtcctttgaagctgcaatga

SEQ ID NO: 294781 - DNA, 1000 bp, Homo Sapiens
acctcctcgttcatctacaatgtcagtggttattcacgtgagggactttaatgacaatcctcctagctttcctcctggagatattttcaagtctattgttgagaacattcccatcggtacatctgtcatttcagtgactgcacatgaccctgatgcagacattaatggtcaactatcctacacaatcattcaacagatgccaagaggcaaccactttaccatagatgaagtcaaagggactatatatactaatgctgaaatagatcgggaatttgctaatctctttgagttgactgtaaaagccaatgatcaagctgtgccaatagaaactagacggtatgctttgaagaacgtgaccattttggttacagacctcaatgacaatgtcccaatgtttatatcacaaaacgcccttgctgcagacccatcagctgtgattggttccgttctgacaacaattatggctgctgacccagatgaaggtgctaatggagaaatagagtatgagatcatcaatggggacacagacaccttcattgttgatcgttatagtggagacctgagagtggcttcagcgttggtgccttcacagttgatctacaatctcatagtttcagcaacagaccttgggcctgaaaggaggaaatcgaccactgaattgaccatcattcttcagggccttgatggacctgtttttactcaacccaaatatataactattttgaaggaaggagaacccattggcacaaacgtgatatcaatagaagcagctagccccagaggatctgaggccccagtggagtattatattgtttcagttcgttgtgaagaaaaaactgttggacgcctctttactattggacgacatactggtataattcagaccgcagccattctggaccgggagcaaggagcatgtctttacctggtggatgtttatgccatagaaaaatcaactgcttttcccagaacacagagagcagaggtaatgattttgtag

SEQ ID NO: 294782 - DNA, 1000 bp, Homo Sapiens
aggagctgctccagctcccaggacccccatcactcttccacagcagcacacacatgtctttgctgttgcccttcctggagctgcagaggaggacaacctagatcctgttcctgccagtatttgggtgacaaagtttcctggggatgcagagactctgtcccaaccatcttcacacacagccactgaaggcagcatcaaccagcaacccagcggggacagcaatcccaccctagagccgtccctggaggtccacaggctggagaggctcgtggccctcaagagagtctcctcagagagctttgcttccagccttagcacccatcacagaactcaggatgatcccagctttgattcactggaaacttgcctgtcctcagatgggggtgaacaggacaagacgaaggcctctaacaggaccgtgacacagcctcctctgtccaccgtccagcttacctatccccagtgcctctggtcctctgaaactttcacagggaatggggtcagggcaagcaacccaatccctgtcctccagacctctggcacttctgggctacctgctgctggtgaccagtcagaggcatccagggcctctgccagcttcttacctcagtcaaagcacaaggagctcagagcagggaagggaaatggagagggtggagtgggataccctcggcagaccaacccacggcctgacattgggctagagggagcccaggcccctctgggtatccagctcagaactcctcagctgggaattctgctttgcctgtcagccaccctgggcatggccctggccgctggccttcgctacctgcacacccagtattgccaccagcagacagaagtgtctttcagtgagcccgcttcggatgctgttgccaggagcaacagtggtgagactgtgcacgtcaggaagattggggagaacagttttgttttggttcaagcagagtacaactggatcactccttctgtgggtagcaagaaaacagtcctctga

SEQ ID NO: 294783 - DNA, 1000 bp, Homo Sapiens
caaaagaggaaacagaaaaacaagttcccagcaatcacctacaggggcatcagaatctctggcacatcaagggattgctgtcttaggcagtgatacagtgcatcagatgaaaccatatcttaaaaaatcagtttctgttgttccatgtgcagatgacagtcagatctcctcttcctctggatctgggcaacaagatacaataaaaaaggctttaaactacagtacagctcctaaaaagaaatgtattcagataaaagatttgatattactaggaagaattaacccaggaaataacattctggaattcaaaacacaggagactacccacaaagccagtattttattgaatggtaaacttaaggtagaaagtggtcagatttataaaaacccagtcacctggctcaaggatcttctgggaggcaacagttatgtgacctggaattatgcttggagtaaggtaacgtatcttgggaaggagcttttaaggtatgtttctgaggatgcacccatacttccagaaccaaactcagtacctcagcaatatcaaccttgtcttccagaagttgcttgtttagatgacccagtacaggaaccaaacaaatcaatgtttgagaaaacaaaatttggacaaggaacttccagagagtcaatgcaaagcagcccacgttatctacaaataaatgaaatactattaatcagtgatcaagaatttctcccatgccacataatggatcagcattggaagttttgtgtggaatgtgaggaactaacaccctaaaaccttggtttcttaatattttattggatatttgttcaaattaccaacaaacatttatatttcatcttgtataatctggtgggcctattttaacatacactttatgagttgctatttaggatgtatgtttactgttcttaagatgtatgtaactgttcaacaattatataagattaatgcttttttgccattgaaataaaggcacatttgaactagaccata

SEQ ID NO: 294784 - DNA, 1000 bp, Homo Sapiens
gccccgactgctgccagagcccgcgaatactgacaccaggcccgggaacctgcatggcgccttccgggggctgcgcacagactgcagccggagcgcgttgaacctgagccacagtgagctggaggagggcggctccttcagcacccgcatccgcagccacagcaccatccgcaccctcgccttcccccagggcaatgccttcaccatcagaacagccaacgggggttacaagttccgctgggtccccagttgagctgtgatgtggtcccccaaaacactgccctgtgtttccactgaagtgcctgggggcttcccagaactttgccttcaggttgaatgccaccctgaaacactttttcaggaacaaaagcatcttgataccgatgcattgtaaatttctgctacaaaacattgtatagcccctccccttgtcacagtgaaactctgtttatatatgtatatgtcacatatgtcacagccaattttaaaagtatttatttttagcagctttgaattatgtatttttagagcagggaaggatttagaaaccatagttacttttataattatgtaatgctctaatattataagaaggaaaagaaggctctaagagattaagtaatttcctgcaatgggaaacactggaacctttcaatcactttaactagtcacttaaggactctaggcccagaagcctggtttctgggtgaatgtttttatacatcactcaacttccctcgtcctaaaaggacacctaattttgttactattgaaaatttttattttggtggccagaatacgaaatcgggagaggtaacccaaacagttgtcttaggaaaaggcagattctcagaggcaatgggctatcaacaaaataggtgctaagcacatttgtttgtaatgatcattcatataatttagaagatttatggtaacagtttatattcattatccatacagttctatttgtgcaaatagaataaccacctataagcaaaca

SEQ ID NO: 294785 - DNA, 1000 bp, Homo Sapiens
tccgctccatcctcctggtgggcccctctggcatggggaagaagatgctggtcaaggcagtgtgcacagaaactggcgccaacctgttcgacctgtcgccggaaaacctgctgggcaaatatcctggcaggaatggggcacagatgatggtgcatatagtctttaaggtccggagcccccagcttttggcatttgcggttctcagacctgtggcaacaaaggaggggggctttgaggtcacgtcacccatcagcctactgggtatgatttcaggtgctgaactggtagcccgactcctacagccctctgtgatttggattggaaatgctgagaagaatttctataagaagacccccaaagaagacaaggagatggacccaaagcggataaagaaggacctcaccaaggccttgcggctgctgactcccggagaccgtgtgatgctgattgggacaacctcccggccacagctggccgagatgcggggtctgtgccgggtctacgagcggatcctcttcatgccccggcctgactacgcatcccgctatgtgctctggaagcgtatgatagaggcccggggcatccagccgacccagcacctggacatcagtgccctagccaaggtctccgatggctacacgccgggtcacattctccaagccatccaatcggtgctgagtgagcggcggttcctgcaactgtccaagcggcccctggtggcctctgagttcctgggacaactggtgaagctggatccagtgtacagggaggaggaggagtccctgaaggactggtacttcaagaccccactgggcaagaagagcatgaaacacaggatggaccagttggaggccgaggaggccaagctggacaaggagaagaagaaaaggaagtgatggctaaggcttgcgggcacctgagattagtggcgtgggacagggcagtggcccaagggtaaagggatggggcagaggcataaatgcccagatgacttgggaac

SEQ ID NO: 294786 - DNA, 1000 bp, Homo Sapiens
tcaccgcagccccctcctggcgacccgcaagaggactcagccgccggctgcgaccaccgtggactccctctatggaagggaatcctgggagtcccggccgtcagaggggttcccaaatccaaagggtccatctccaaggcgtcactccaggggtccgcggttcactttgctgccccttgcaggtgatgctgtgattgttgcctgcggactgggaagcacgatggctccaaaaggccagcggggccgagaagcagggacagagaccagcatttaagggatctctggtgggggcctccctggagttctccacatgtaaatatagcgaaaaaagaaaacactacgttactagaataaacacgtcctaaaatttctgtgcaaaaacacctttttgaacagcaaagatttcacccaccaaaacaaggaagcaagaagcttccacagtgtgcaggatccgaaacaggaccggcccggcgttgggtgagagtgggggaggggttgtcggcttctccatccagcttgccatgttctgtcgtcggtttcacattttcagagagactttaccagatgcaggaaatgaggatgaaggcaactctggaaggatgcaaagaagggagagcaagcactgtacctactgtctgctgtctaagagggctggtctcataactaaaaggtccagtccctgagatcttgtgtgcaaccgtcagaaatagttcaggacatcaaattgcacagagaagattcagatgaagggaaacaagaactctgtggaaaactgttggggacagtggcacgagttgtcttgcaaggtgatgtctgtcccgtggagggacacaagagcgaggacagcatggttctaatggccagggcatgtcttcttattccatgtgacagtggctggctgagttgctagtacgtttttgaaatataccctttgaaatatgttgattattctggacatctgtaaggtgggagatttgaataaaaagacttctgctgtcat

SEQ ID NO: 294787 - DNA, 1000 bp, Homo Sapiens
catcacccagcagcgaagcaagcgggcggcccctgccctggagaaaccgattcgtttaacacacctttctgagacagagcccccaccagccccagaagctgaggtcgacgtgtgtgtgacctctcttcgtctggccgtgaccccaagcatggtcccccttggtcgcctgctggtcttctatgtcagggagaatggagaaggggtcgccgacagccttcagtttgcagtcgagaccttcttcgaaaaccaggtttcagtgacgtattcagcaaatgagacccaacctggggaggttgtcgacctgcggatcagggctgcaaggggcagctgtgtgtgcgtcgccgcagttgataagagtgtctacctgctcaggtctgggttccggctgactcctgcccaggttttccaggaactggaagattatgatgtttctgattcctttggagtgtccagggaggatggtcctttttggtgggctgggctgacggcacaacgacgccggcgctcctccgtcttcctgtggccttggggcatcaccaaagactctgggtttgccttcaccgtaaggagaggtggtctcagatcccgctgcccccttctaaggtcctcttgcctagaaataagagtcttggagattcagaaatggcaagaagaaagccatgtgaaagcctatgccaaatctcactctcctgaacatgctgctgcaaagaaacagcaaatcagagctctcccagaaacagaaacgcagctgctactgctgcctctgaatgaatacatcctgcttccaagagtcaagctgatccctgtgatccctgaatccaacaggagttcaaaagaattctgcacgtctcaaagagcaaaaattgctattcctttaggatttaaacaggaaccagagcttcatcacgtgagagctgatgctatcatacctccagacttcagggctgctgctgaaccagctcaaactgcagatgaaccggaaggcccaatctgcctctga

SEQ ID NO: 294788 - DNA, 1000 bp, Homo Sapiens
ctgaggttcccaaaataaaggggaaccggaaataccaaaggattatctccaatattccagggccttctttctcatctctgtctttaccatacttactggccttggctggctcttcagctcttggatccttaatcgaggaagcatgaccaccaacttggatctgaaggtatccatgctcagcttcatctcagctacctgcttgctcctctgcctcaacctgtttgtggcacaggttcactggcatactagggatgccatggagtcagatctcctatggacctattatcttaactggtgcagtgacatcttttacatgtttgctgggatcatctctcttctcaactacttaacttccagatcgcctgcctgtgatgaaaacgtcactgtgattccaacagagagatcaaggctgggggttggtccggtgactacagtatcacctgctaaagatgaagggccaaggtctgagatggaatctctaagtgtgagagagaaaaatttaccaaagtcaggactgtggtggtgataggaaaacctaactatagcttgtcttaaaagcaggggagaagctgagttgggaatggtcacataaattctgggaaactctcctaatatcatgtccatattacttgaggagacagcattaaagctgatgaaatgtcttttgcgtgcattggatccaaaatatatatgatagtcataaagtaaataactcacttaagaaaaacatttctaaaagaaaacaacaatgtttagagtcatgaatgaaagaaactagtgaaagatgcagtgtgtagaccagagacctctttgggtatcagggatctcatggaccagaatggcccgtggagaagaatgttaattacttctgtttggaattttctttattatgtgtggctttgggtatactcaggatggaaagcacttggacaaatactgttgaatctgaacttaatagcattaccagaaatggaataaatatcaatggatataagaccta

SEQ ID NO: 294789 - DNA, 538 bp, Homo Sapiens
ccttaggtgacttcacagggtagtgatgacctcacaagcttccaaagtttccatggcagcgtgactacacacctgcgtcctagagaagcctccctaccatttctctgtaagataccaatctgtttggttggctgagagagaatgactgaccggatcctctatattgtctctaacatgtcctctgtcccctgggagggcagcgcagcagctgcagtgcctgccacttctcctcccacacctgggcactaccatgttctctaccgagggtgtggagaaactcaggtaggctggcatggggagacgtactgcctggttggtggctaccgggtccatggggatgctcctttggccaccccaacaaaggctgaagcagagaagccagcccccaggcgtgctcccaagagacgtcaagctacgatagagtcagataaagacctgggttgctctagccccaaaattcggcgcttggagcatcgtggcaggagactgaccccacagaagcttgctggctgagccatttgggagaaaggacaaatgt

SEQ ID NO: 294790 - DNA, 1000 bp, Homo Sapiens
cacagcattccagcctgcgagattgagatgatgattattccccaccttctaagagacaaagaccaacgagccaccacagccaccagtcccagaacccgccaatgctggggaacggaaaatgagggagttcaactctggccctcacaatccagtggaggagacgaaactcatctgcctctgtccctctgggcacgcctcatgccaggtgcatctgtggacaggggccacgctcctgggcttccaaagttggagaaagctgccaggctcaggtctgaaggccagaattctacagtaagtcctactgagtcaaggtgggagcagggtcggtggcttccgaggctctgcgggagaatccgtttcctggcggtagaggtggcctgcactcctcagcttgtgctgcccgtctcgaatgactggagtttcctgcttctgtcactacacctcccaccctctcccatcacctgctctgctcttacaaggatccgaagaaatggaataatcgtatcgctgatctatgtaaacaaattgaagaattgtctgaaagaaaatatgacatgaacttatgaattcaacaggtgaagatttacaacttgataaatcagctttgtgagctcgagctgtaaaagccaaaggtccggtgatgatcccatacccttttttccagtctcatgttgaagatttttatgtagaaggccttcccaaaggaattttttttttttttttgagatggagttttcactcttatcgcccaggctggggggcaatggcgcaaccttgctggtcactgcaacctctgcctcctgggttcaagaaattctcctgccttagcctcccaagtcactgggattacaggtgcccaccaccacacgaggctaatttttgtatttttagtggagatggggtttcaccatgttggccgggccagtctcgaactcctgacgtcaagtgatcttcccgcctcgactcctgacatcaagtgatctttccgcctcggcctccc

SEQ ID NO: 294791 - DNA, 1000 bp, Homo Sapiens
atggagctgtcagtgacctccccacttccaagcagaaatcgtcacatgtaagaaggaagaaaagagatagggatgcgctgaggctggactacccgaaggcatcggggtgtccagagaagctgggcttgagggaggcagcagctccaacaccttagagccttgggaacagtccctgtgacagccacactgattgagaggaaaaagcacagcgggagaagttgatctctttccactgggagattgatctgcactagactatttcttgaatgcgtattatgtgccaagcaccattctaggtgctaaggatacagctattatcatagaagagtccccatcctgaggaagcttacatcccaccaaggaagataggaaacaaaaaatagaaggtgctgcattcaagagtgaagcaagcacaaaaggaaaggaaaaatctctccctggaggagaatgcagacagacagacagacgctatttgtatctttgcgtccgaagcacagcagctaacacacaagcatatcaacctgttcatttctaaatgccagaagagagatgagacagagagaaaaaaaactaagtcagactgaaattgggccttctaccactagactgaaaagacctagaattcatcgacagcacagatacaacaaaagccttcatggaatacaaaaactccaattttcataggatatccttgacctcagtgatgaatcatgagggcgtagagggttgagaaaaaagtaggcacatcactactgtttctaaccagatatctcgaagctatttcagttccaggaattctgtctgctcctgtttttacttcattagcaattcaacatgtctgatttgcccacacaatactttccagctactttacccatttgacctggaacaaagtgaaagcacattttgcccagttgaaaggtctcctggcaggttggttagcaacaggcttgccagtctgggttctgttagcaaagaataaacacatttcattagacaa

SEQ ID NO: 294792 - DNA, 1000 bp, Homo Sapiens; identical to SEQ ID NO: 119220

SEQ ID NO: 294793 - DNA, 690 bp, Homo Sapiens
tgaggttttcacagtgggtgctgggaaaaaggcaaatattttttcccattggtttacccagtgagatgtgatactggagctgtggcagccatcttgtggtcactagcttcagtccttctggattggcactgctgattgtggcacctcttgggcacagcatttcctgcccggctctatgcccctgagcagctcctattggctgtccctggtcagggttgcatgctggtccaatcatccctggcgcaaaggagaggccgtggacatgaaaggaaggagccactgggtacatgtggtgtcacagatggcctgctctgcacttctacttctaaagcacagatgggaagaaatggatcttgtctacgatctaccctgtacccaactgggcacttacacagaagcctcactcattcaggactgcattagaattctcatggctaggttggccgtcacttcattttaaaaaaaaattatattttacgactgcattggcataaagaataacatctaggctggattcattgttacatattgatttttttatatttatttttttttcctgtttgtaaaggaaaataacaacactatcatgtatccctaacagtatctgggcctctggcactgtgtctactaggcctaatggaaaagtagatcctgcattcacccattcaataaatatgtattgaacatcta

SEQ ID NO: 294794 - DNA, 1000 bp, Homo Sapiens; identical to SEQ ID NO: 224911

SEQ ID NO: 294795 - DNA, 961 bp, Homo Sapiens
agggaatgaaggctggcatctaaactcaatcagcaaaataaattcaataaggaagatttgaagatcaaagaccttcctctctctggcttcacatttctcatcactagttgaaagcctgaaagaacaaaaaagctgacccttccctgagtaagagagaattcttcctgcgtgatgatcttcaatctgggacattgactttttttctgcctttggcctgaaacattggctctccctgggtctcgagcctgcgggcctttggactggaactaaattatcagctctcctgggcctccaggttgtctattcaccctgcagatctttcaacttgccagaccccataattatgtgaaccaattcattataaaaataaatctcgattgctggcaagatggccgaacaggaacagctccggcctgtagctcccagcgagatcgacatagaaggcctaggtcatcaagatgcacagcacaggacagaagcccctctagtcctgcacctggtgacatggaactgctgtgctggtccacacagacacagcctccaaccaagcctggctcctacccatcacagttctgtaggctgcccatttgcagaaggccttccatctgacactcctcctcgcctgcttgttctccagccatgttgtggccaatttgccatgaggaggttgcagtggccaagactgttggaaactgtgcggtgtagctgggagagaaaggacacactctaaatgttcttactgcctgtgacgatgcagctacagcgatgtactagctgctcacaagcctgttccttcttccattgtagggcatgaagaattcccttatcactgggtaagaagggggaacagaagtttttctcatgcctaattttgcgttttcagtaaggtctttttcagcttgtccaggagaaactggaaaaaaaaagatacttgaaataaactgaaggacatttaaacaaa

SEQ ID NO: 294796 - DNA, 1000 bp, Homo Sapiens; identical to SEQ ID NO: 224912

SEQ ID NO: 294797 - DNA, 1000 bp, Homo Sapiens; identical to SEQ ID NO: 224913

SEQ ID NO: 294798 - DNA, 1000 bp, Homo Sapiens; identical to SEQ ID NO: 119221

SEQ ID NO: 294799 - DNA, 790 bp, Homo Sapiens
cctgacctcaagtgatctgcctgccttggcctcccctagggctgggattataagaatgagccaccagaacccagccaaacttccccccaccccgcctttttgttttgttttggttttttctaatctcctgaagtcattctttgagttgtcatgtagattaatgggtttctcaaactactagaaaactagttgaagaaataaacaggcagtttgtgaatattaaacagaacagtggtgctgagcatggctaaagcatctctgcattcacagggagaggagcggaagaccttctggtgtgggctgggcagcaattcacttgaaggagaaacagcccgggtgtggagaggcggctgtccttggagggatcctttctaaggagccgagaaatcaacgtagagcttcctctatctgattctctaacaactgcagaccttccatgagtcaagctttgtgtcaaaaggacaaattaaaaggacctataaaaggcatcaccaagcccagtggacagatgccccaggctgcacattctgtcagtgctgttctggaaaaggcccaaacacatgctgaaacatggaaggataagaagccagccctcgggaaccaccaggagccaggagcacccccggccccccaaggccccaagtccagcctgccccaccccctccggtgcagaggtcctacccccctggacttcgtgctccctcccctcgctgtcgccaagaggcctcctatgccccacccccccaacaggcacgaagcatcaatgttcacaagcagcaaatgaataaaa

SEQ ID NO: 294800 - DNA, 1000 bp, Homo Sapiens
aaatccctttcctctcctggaagatgaggatgacctctttacagatcagaaagtcaagaagaatgagacaaaatccagtagtcagcaggatgtcatattaacaacacaagatatttttgaggatgatatatttgctacggaagcaattaaaccctctcagaaaaccagagagaaggagaaaacattggaatctaatttatttgatgataacattgatatctttgctgacttaactgtaaaaccaaaagaaaagtccaaaaagaaagtggaagccaagtctatatttgatgatgatatggatgacatcttctccactggtatccaggctaagacaaccaaaccaaaaagccgatctgcacaggccgcacctgaaccaagatttgaacacaaggtgtccaacatctttgatgatcccctgaatgcctttggaggccagtagagcacacagggtatccacatgttaccctgcagctacattgttgagttagtgatgatattgtatatgctcatggtcttaactggattacaaaaagcaaatactagaacagctagctcatcttttacccaatgtacttagtatttttctgcactggtttaatcatgcttaatactacaaaacaaaaataaatatttcacagtggttggtttgttttgtttttaaaccacagtttgatttagttagccttgctggggccataatatgcttcagggtgtgtaaaagaagaaatctctttgtggctttcatgggcagggaatctcagagatagcaaatgccacctgaccagaagtctttgttatatggatgggaaccctaacttagggcttgggcaggggaaagagaaagaagatgagagattatacttcatgagtcttagcaatatgggagcaggttttcactgaattctgagggtgcctctgcatgtcctccaaggcaaagtttggcaaactgtggcccccccactgtcatattttgttaataaaattttattggaacacaatc

SEQ ID NO: 294801 - DNA, 1000 bp, Homo Sapiens
ctcaacctgcccccctcccctcatgccaataaaaagaaacacctaaagaagaaaagcaccaacaacttaaaagatgatggcctgtccagcactgctgaggaagaagaagaaaagtttatgattgtgtccgtcactggccaaacgtgccactttaaagccacgacgtatgaggagcgggatgcctgggtccaagccatccagagccagatcctggccagcctgcagtcatgcgagagcagtaaaagcaagtcccagctgaccagccagagtgaggccatggccctgcagtcgatccaaaacatgcgtgggaactcccactgcgtggactgtgagacccagaatcctaagtgggccagtttgaacttgggagtcctcatgtgtattgaatgttcaggaatccaccgcagtcttggcacccgcctttcccgtgtgcgatctctggagctggatgactggccagttgagctcaggaaggttatgtcatctattggcaatgacctagccaacagcatctgggaagggagcagccaggggcagacgaaaccctcaatagagtcaacgagggaagagaaggaacggtggatccgttccaaatatgagcataagctctttctggccccactaccctgcactgagctgtccctgggccagcacctgctgcgggccaccgctgatgaggacctgcggacagccatcctgctgctggcacatggctcccgtgaggaggtgaacgagacctgtggggagggagacggctgcacggcgctccatctggcctgccgcaaggggaatgtggtcctggcgcagctcctgatctggtacggggtggacgtcatggcccgagatgcccacgggaacacagcgctgacctacgcccggcaggcctccagccaggagtgcatcaacgtgcttctgcagtacggctgccccgacgagtgcgtgtagtatctgttttatttgactgcagtctccttggtgtaaaaacaaaaaaaaaaaaaaa

SEQ ID NO: 294802 - DNA, 627 bp, Homo Sapiens
cggccaggcctgagatgccgggagggtttgaccctggggctgcatggacagcttagcgctcggccgctggcgacagcggagggcggaggatctgcaggttccgggggacgtggtatgctggagtttgctggaggtccactccagaccctgtttgtctgggtatcaccagcagaggctgcagaacaccaaagattgctgcctgttccttcttctggaagcttcgtcccagaggggcacctgccagatgccagctggagctctcctctatgagaaacgggtatgcaggagattagaagccagtgggcatgagcgtggctgccaccaggtgaatgcctgtgccctggcgtcctggggcccagaggaccgggagcttccatcaagaggctgcctcccagcaccaaggccagagagtggccaggggaggctaagtacagggatttctcagaatggtggaaggagctcagcccagccttgcccaagatgtattgcaggggaatctgtaagtgcattaaccttcttgctgtgacataaaagatagacttcttcttaaatattagatccataaaacaaagttaataaaaactgcaattatgtttctgaagaatgaggaacataaataaaaaggtg

SEQ ID NO: 294803 - DNA, 1000 bp, Homo Sapiens
tggcatcacaggcctggtcacatgagatgctgccctctacctggcagaatgggccatcgagaacccggcagccttctctcataggactgtcctagagcttggcagtggcgccagcctcacaggcctggccatctgcaagatgtgccgcctccaggcatacatcttcagcgactgtcacagccaggtcctcgagaagctccgagggaatgtccttctcaatggcctctcattagaggcagacatctctgccaacttagacagccccagggtgacagtggcccagctggactgggacgtcgcgacggtccatcagctctctgccatccagccagatgttgtcattgcagcagacgtgctgtattgcccagaatccatcgtgtcgctggtcgcggtcctgcggaggctggctgcctaccgggagcaccagcgggctcctcaagtctacgtggcccttatcgtccgcaacccagagacgtgccagctgttcaccaccgagctatgccgggccgggatcagatgggaagtggaacctcgtcatgaccagaaactgtttccctacgaagagcacttggagatggcaatgctgaacctcacactgtaggactcacacacgactccaacgggattgtgagaatcaagtcactctcgtgggaagagtttttatatgggaaagcggataaaactttcattggactggaatgtttggagaatgttaatttccaaatcaggaaccacaaactgccctctgataagacatcggctatctaagcttgtgggtgctccctttctgccagcagttctggttcttaagaaaatcgccatcaatcagacatgaaaactctggctccaaaaatagcattttctttgtgcaaataaaaacgtgtgtatcaagtatgatgttccccccaacgtggacacactcggttcctcacaaagccaagcccgctgcagctgccacatccctgggcttatggtgcagcaggtgcttttttcaagacag

SEQ ID NO: 294804 - DNA, 1000 bp, Homo Sapiens
ggctgtattgcactggtgagtccgggcccatggatgagaaattgatgcgaggatcaatacaagcttaatttgaattaataaaaggaaatattttctccctttgaacttatctccgtaaagccattgtgcctcctcttgggggtcacgtgttcacaatcaatggcctttgaggagctcttgagtcaagttggaggccttgggagatttcagatgcttcatctggtttttattcttccctctctcatgttattaatccctcatatactgctagagaactttgctgcagccattcctggtcatcgttgctgggtccacatgctggacaataatactggatctggtaatgaaactggaatcctcagtgaagatgccctcttgagaatctctatcccactagactcaaatctgaggccagagaagtgtcgtcgctttgtccatccccagtggcagcttcttcacctgaatgggactatccacagcacaagtgaggcagacacagaaccctgtgtggatggctgggtatatgatcaaagctacttcccttcgaccattgtgactaagtgggacctggtatgtgattatcagtcactgaaatcagtggttcaattcctacttctgactggaatgctggtgggaggcatcataggtggccatgtctcagacaggtggctggtggaatctgctcggtggttgataatcaccaataaactagatgagggcttaaaggcacttagaaaagttgcacgcacaaatggaataaagaatgctgaagaaaccctgaacatagaggttgtaagatccaccatgcaggaggagctggatgcagcacagaccaaaactactgtgtgtgacttgttccgcaaccccagtatgcgtaaaaggatctgtatcctggtatttttgagaaaaaaaaatctcaaggaaaaggcataaaaatgattgctacacaaaagtgaccaaattttaagaagccttcatgagctgattggtggggaaattc

SEQ ID NO: 294805 - DNA, 1000 bp, Homo Sapiens; identical to SEQ ID NO: 220459

SEQ ID NO: 294806 - DNA, 1000 bp, Homo Sapiens; identical to SEQ ID NO: 224915

SEQ ID NO: 294807 - DNA, 1000 bp, Homo Sapiens; identical to SEQ ID NO: 119222

SEQ ID NO: 294808 - DNA, 1000 bp, Homo Sapiens; identical to SEQ ID NO: 119223

SEQ ID NO: 294809 - DNA, 1000 bp, Homo Sapiens
aattggagatccctctcacccctcagcaggcccaggccctggggatccctctcacccctcagcaggcgcaggaactggggatccctctcacccctcagcaggcgcaggaactggggatccctctcacccctcagcaggcgcaggctcaggggatccctctcacccctcagcaggcccaggctctggggatctctctcacccctcagcaggcgcaggctcaggggatcactctcacccctcagcaggcccaggcactgggagtccccatcaccccagtaaatgcctgggtgtcagctgtcactcttacctctgagcaaacccacgctttggagtcccctatgaacttagaacaggctcaagaacagttattgaagaacaacataatgaaacgactaaaagccatccaaaatactgggaaaggctatgaggccaggaacctccacatgatgctgagcagacttgatgactacgggaaaaaggtgatgcaggtctggactgagaagcagaagtctctagggcagaaacggaatcagtgcctgaagaaaatgatacacgtattcaaccagctcaaaaagatacatgaattgaatcttagtcaacctatccccttaatcatcgaagaaaagcagatacctgcctctaccacatttgttcaaaagccattcttaaaattactaatggaagaggacagaacctctgacatatgcaagaaatttaggcaacaagaggaccagacagaggccatctggaatgttgatctgtccacttcaagctacccaatagcagagaagacatctatgcattcactctgggcccagctgggtgggtacccagatattcccaggctgcttcagttagaagtgcagtctaccttccgaaaatctcttgcatccctccaatcacgggttaagaagattcccaaatgactgtaaaattaaatacaagcatgttgaaagtacatttcagtatctttcagtaaaatgcctattttgttctcttt

SEQ ID NO: 294810 - DNA, 677 bp, Homo Sapiens
gtaaatagtaatatatggtgtggtccaaatgatttgctaatgtgggaaagaggatatgcttgtgttcacaccccgtcaggtcctctttggattccagcacgaggcatcaaaccataccatggcatggctaggacccaacccggtaccaaaatgaagaaaatgaccctacaggacccacaatcccggatgatgtggcttccttggatgacacaggccctggacattacctgggggatgctgaagaagacaactcaggaggccaagcaaatcctgctccaggcacagacaccattcactccaggaagctgccattcattcgacataagtaggtgcttcatctgataagcgctgcttgtgtaatttatcaatgacagagaaggcagatagcagcatgcatacttggggctgcatttgaaggagagcaacatccctttgttttcacagaggagaacaagcatgagttgagattgtggtgcttcttgaagtctcatccagatcagaaacctgctgctctgtccacattccatccaccaaagcaacccatatggccatgtccagcatcagatggggaaaggcagttctcctctagcacgaggagctgcaaagccacatggcaaaggatgagtgtgtaaaaaataaatgcaggagggcaggaggcattgggaacaatgatccaa

SEQ ID NO: 294811 - DNA, 1000 bp, Homo Sapiens; identical to SEQ ID NO: 119224

SEQ ID NO: 294812 - DNA, 525 bp, Homo Sapiens
gactctgctagggttagcagagcagccggtaacgttgctggaccgggacgcacgctcagctgaggaggacccccaaagatttttattgttaggtatattgaccaaagtttaacgagaagaactgtgatcagctgggaggattgctgcaaggaatggaattagctcatagcttactgctgaatgaagaagcatacaatcaactaggtgaagttcagaaggcagagtttatttttgagtggttgagatacttggagaagctcttgttggcaaccagcaggaatgatgtaagggagaaacagaagactcttgttgaacagctcctgtctttgttgaacagctccccagggcctcctacccgcaaactgcttgctaagaatctagccatactttatagtattggagacacattctccgttcatgaagcaatcgataaatgtaatgatcttattcgtagcaaagatgattctccaagttatcttcccactaagctgtaagtgaaacattaaaacagaacagaaaacaaaa

SEQ ID NO: 294813 - DNA, 1000 bp, Homo Sapiens
aaaaccggtcgggccagcgcggcgcgggcacattccggcgccgggaagggcggctgcgccgcataaaaggcgccgccgcgctggccaccgccgctcggagctcagccgccctgccacgcggggcccgcgggacgaggggacgccggggccagcgaggacgcggcggggctgggcttggcggctgggatcccccagcgccaggcgagggcgtctaaggcgtccggtacggcgtcggggccgggtggctgcagcagggcagggggtgcgcgaccagcggggatctgggcgcaggggccggtccccgggatccgcaggcgacgcgggcggtcccaagggcgtcgggggctcctctctccgcagctcggcgaaccgacggtgttggggactcgcgcgctgggtccagtggttcttaacagttcaacagttctgtagcgcaattgtgaaatgtttaggaccactagacccggcgggcgcggcgacagcgacggagcgtcccacgcgcggcctggagtcagagtcacagtcaggggtgcgccggcgaccaatccaggggagcccacggaccggctccgcgctccaggtcggccgccccatgcgccgcgccccgcagtccccagggcctggctggctccacctgctgccagggaagaccctcggccggagagccaagtgctgctgggaggtggccgggcgtggccgggctgtgctgtgggaaccgctggcgaggaactggcggtgggcccgtagggttgaggagcgctccttgccctgggcttcctgggagctgcccatcaggctgccggcagccgcaccctgctgggcggccgatggttcccgctgccggctccccggagcgtctccactcactgaggccttagggagcgctgcgcggctcctacgagtgcgcgctaaactcgtgaaggacctcgaggcacaggaactgggggtggggaggaagtttgcagactacacccaggtagaggagaagcggcgcccatga

SEQ ID NO: 294814 - DNA, 1000 bp, Homo Sapiens
aaccagtatgaacaaagccactttctttcctggtgaagaggggctgtccctatatctttgtgccctgagagcatcacccaacaaccacatccctcctcagaagaagcccccagagcacagctcctcaccatggactggacctggaggatcctctttttggtggcagcagccacagtctggagctgaggtgaagaagcctggggcctcagtgaaggtctcctgcaaggcttctggatacaccttcaccgactactttatgaactggatgcgccaggcccctggacaaaggcttgagtggatgggatggatcaacgctggcaatggtaacacaaaatattcacagaagctccagggcagagtcaccattaccagggacacatcttcgagcacagcctacatgcagctgagcagcctgagatctgaggacacggccgtgtattactggggcgctcaggaccacaaaggggccctcaggacaccagagggtgctcagaaccaccaggaggcgctcaggacaccagggggcgctcagaacactaggaggtgctatgaatcactagggggcgctcaggacacaagggagcactcagaaccaccagggatagctcaggacaccagggggcactcggaaccgccagggggtgctcaggacaccaggaggcactcagaaccaccagggggtgctcaggacaccagggggcgctcagaaccaccagggggtgctcaggacaccaggaggcactcagaaccaccagggggccctaaggaacctaggagctgctcagaaccactaaggggtgttgacaccagggggcaggcagaatcaccagggggagcccaggacaccagcaggcgctcaggaaacaccaggaggtgctcaggacaccagggggcgctcagaactgccagggagcgctcagaagaagcagggggtgctcagaacaccagagggtgctcagaagcaccagggggcgctcaggacaccagggggcgctcatga

SEQ ID NO: 294815 - DNA, 1000 bp, Homo Sapiens
ttaacagtggtacgatttctagcccgtgggtttaaaatgcacttaaagtcctgttctcgccttttattttctgaacttgccgcttttgcattctttgagttcagtttaaagacggttactagcatctgtaaccaatctgacaataatgtgttcatgaggtgcctatggattaaatcacacactggcatatttaagctgaaggtcagtctggaaaataaatttactatattgactgaaataccactctttgtgtaggtatttgtcatatatttaagaaaaagctaaaaggaatggaaattgtatgacaataacttaagtctttctccaaagtgcatgcagtcttttgcgatacctcattcagccgagtatttgtgctcttcctcattcggtataaggcagctttcagtttgcttagaaggcaacattggaatgttagagttcatcagaaacatagaattttaaaatgtgagttccactgaatacattttaatttctgtaggaagaatcaaaacacctatttaaagatggcaatatataataatcattttaaaagtatttgattaaacctgataattttccagaaatgaaaaaaaaatcagctctaaaacgaaagctgattttagaaaatttgaaaatgtaaatcagccctatccataatatagtttctctaaaactttatcttagagtcattttaaaataatataactattaaaaatgtaactgctatcttaatgttctgaaataagttaaaacattttaaaatatgaatactatagtataaaagaaagaaacagtgggaaggaaaagcagagaaagaaatgccaattccagtccaaagctttatttgccaagttttgttagaatgaattttaccagtttgtgaattcttgtaaacagaatgtgtaatggaaatactgaaagatttttccctagagtggccttattgactgctggtgtgatgccactgtaatgtaataaatcattaaattgtttctaagtg

SEQ ID NO: 294816 - DNA, 1000 bp, Homo Sapiens
ggcaggtcttacaccgtgaaggggcaataaccatggctttgctagaaaacttggtagcaggaaatgtgtacattgtcaagatatctgcatccaatgaggtgggagaaggacccttttcaaattctgtggagctggcagtacttccaaaggaaacctctgaatcaaatcagaggcccaagcgtttagattctgctgatgccaaagtttattcaggatattaccatctggaccaaaaatcaatgactggcattgctgtaggtgttggcatagccttgacctgcatcctcatctgtgttctcatcttgatataccgaagtaaagccaggaaatcatctgcttccaagacggcacagaatggaactcaacagttacctcgtaccagtgcctccttagctagtggaaatgaggtaggaaagaacctggaaggagctgtaggaaatgaagaatctttaatgccaatgatcatgccaaacagcttcattgatgcaaagggaggaactgacctgataattaatagctatggtcctataattaaaaacaactctaagaaaaagtggttttttttccaagactcaaagaagatacaagttgagcagcctcaaagaagatttactccagcggtctgcttttaccagccaggcaccactgtattaatcagtgatgaagactcccctagctccccaggtcagacaaccagcttctcaagaccctttggtgttgcagctgatacagaacattcagcaaatagtgaaggcagccatgagactggggattctgggcggttttctcatgagtccaacgatgagatacatctgtcctcagttataagtaccacaccccccaacctctgattctttcactggcagtgattcaggtggagattccgcattgaggaagtgtgaagaccctgctgtgtcatctgttagtgagcagacttcctccttagttctgcagccgccatctgccatgctatgctttgataaaaatgattttccaatct

SEQ ID NO: 294817 - DNA, 1000 bp, Homo Sapiens; identical to SEQ ID NO: 224923

SEQ ID NO: 294818 - DNA, 1000 bp, Homo Sapiens; identical to SEQ ID NO: 119228

SEQ ID NO: 294819 - DNA, 1000 bp, Homo Sapiens; identical to SEQ ID NO: 224925

SEQ ID NO: 294820 - DNA, 1000 bp, Homo Sapiens
aggccccaccactcaaaatggctatagaccaggctatgtgggggccgtcaaaccccagaagccaggattccagtacagaattgggctgggagcccagccaggctttagaggggacatgaaggcacaggagccaggattagggaatgggaatgggctgagtgctcagccagtcttgacagcccagaaccgatttggatttggagcaggccttggagggaatgtgaagcctctgaagccaggatatgggaaaaggctgagagcaggggccttccctggggctggaacccagccagaatatggccatggaaatggaccgggagtccagccaggcctaggagcggggatgaagcctcagatgccaggctatttgggggttatgaaggcccagaagccagaaactgcctacccctccacccttttcccctcccaagctgtaccctgtctccccatggtgcaagaacgggctggagctggagccttcctgtgggaaggagcccagccaggcctgcgagggaccttgaagcctcagaagtcaggacacggccatgaaaatgggccctggccaggtccctgcaatgcgagggtcgctccgatgctcctccccaggcttcccactccaggggtcccttcggacaaagagggtggctggggcctgaaatcccagcccccttccgcagtgcagaatggcaagttaccagggcaccagcctccaaatggctatggaccgggagcagaaccaggttttaatggtggcctcgagccacagaaaattggtttaggttatgggaatggtgtcctgggagccagggtcttccccgaggcccacccacagccagggttccatggggccaatggttttaggaataggcaggccggggtgctgtggaactctcgctggcccaccctccaggcctggggggccggcttgaagcctggatatcaggctggagatgaatatgctgaggccaggagccagccaggtaacgggatgcctggatga

SEQ ID NO: 294821 - DNA, 1000 bp, Homo Sapiens
ccagaccggccactactttttaactgttttacatatttaaccttcaagaaagatttcctttgatccaagtgtattgcagcccacaaaaaagcttggaaacccagctagatggtctgtttttctagttcctacattggatttaagtcctacccatcgagactactgtcttcagagggcatcttcatgtgtgggcaccagggctgcggctggaaccacagtggacaccccacgctccaaggacaatcctctgcagaaaccagcagctggaaacaattcttaatgctgcaggaagtagttaggagaaaacgactgtgtaagtcagagctaaaactggagttcaaaaaccacagaaaatatttccaaggctgtctgtgaagtggggatgtcaaaataccaaaaattacagctttggaactgcagtggatgacctttaattgatgcagtttataggtgctaagtattgtgtgtgctttacgttgcctcatgtgagtgcttcatagcagggtgtgacgctggccaagtgatatacctaccctctttgtccctgtttctatcaactgtaaaatgggggttctagagttgttgtgaagattaaatgagctaatacacacaaagcaccaagaacaatgctggagtgcagtggcgtgatctcaggtcactgcaacctctgcctcccaggttcaagtgattctcctgcctcagcctcccgagtagctgggattacaggtgcgccccaccatgcccagctaatttttgtatttttagtagagatgaggtttcgccatgttggccaggctgttctgcccacctcaccctcccaaagtgctgggattacaggcatcagccaccgcaccaggctgcaagatgtttaagaatgggctttgacaagttgatttttaaaattcatagccaaaaaaattgtgaaaaaaatacagtggtgtgagatgtattgtaacagatataacaacaagctgtgaaaatacagtaaattagaacagta

SEQ ID NO: 294822 - DNA, 1000 bp, Homo Sapiens
cgtggtgaccttcgacggccgggtatgggacctcagcacccagtgcggcagcatcctcctggcccaggactttgctcacaacacattctcgctgacgctgagtcggacaggctcggggctcacagccctgttcgtggaacttaaccacaagaccctcatcctctaccccagtctgcaggcctacaggctgtacaactcctccctgccgggggacagttgtccggacctcaagctgcatcctgccacgacaaggaaggacgtctccaggattgagctggccagcgaggacggggtgtctgtctcctgtgacgtgcccaccggcctctgcagcctgactctgggcctctggcagcacggcatatccgctggccttctgggcaccaatgacaatgaagcaggcaatgagctgatgttgccggatggctctatggcccgcagcctggaggagctcagcctggcctggcaggtgggtggtgactgcagggccactgagaagcctcagcaggagcaggcctgcccgggacagctccccgcctgctgggccttcttcgagggcccccactccagcttgagggactgcttccgggtggtagaccctacaccattcctcagcctgtgtgtgcaggtcccctgtggcacccaggagctccagcctgcctgcaacctggcggccgcctacatccacctgtgtgcccgtggattcgtacccctggcccctcctccacagtgtgggaactccaatgaggaagagaaagtgcggaccatcgacttccgtgtctctgaaaacaactttgtaaaaaagcttggggcatgcatggaccccttggtcctggtactcagggctccagggtccccaccagaggaagccttcaccagttcacaaccagtgccacgggcagctctgacccctcctgtggcccagctatctctgggccaggaagctgtagatctgtggctgccaagcctggttgatgacgagacccaccggagagctttctaa

SEQ ID NO: 294823 - DNA, 1000 bp, Homo Sapiens
gagcgtcagctcactccccttccaccctcagctccaccctcagcagatgataatatcaagatacctgctgagcatctgcgggttccgcttccaccctccaccctcagcagatgataatatcaagacacctgccgagcgtctgcgggggccgcttccaccctcagccgatgataatctcaagacaccttccgagcgtcagctcactccccttccaccctcagctccaccctcagcagatgataatatcaagacacctgccgagcgtctgcgggggccgcttccaccctcagccgatgataatctcaagacaccttccgagcgtcagctcactccccttccaccctcagctccaccctcagcagatgataatatcaagacacctgccgagcgtctgcgggggccgcttccaccctcagccgatgataatctcaagacaccttccgagcgtcagctcactccccttccaccctcagctccaccctcagcagatgataatatcaagacacctgccgagcgtctgcgggggccgcttccaccctcagccgatgataatctcaagacaccttccgagcctccaccctcagcagatgataatatcaagacacctgccgagcgtctgcgggggccgcttccaccctcagccgatgataatctcaagacaccttccaaacctccaccctcagcagatgataatatcaagacacctgccgagcgtctgcgggggccgcttccaccctcagcggatgataatctcaagacaccttccgagcgtcagctcactccccttccaccctcagctccaacctcaaggcggagggtcggtgacgtggaaccgtcacgcaaacccaagaggcggagggccgctgacgtggaaccatcatcacccgaacccaagaggcggagggtcggtgatgtggaaccgtcacgcaaacccaagaggcggagggccgctgacgtggaaccatcatcacccgaacccaagaggcggaggttgagctga

SEQ ID NO: 294824 - DNA, 1000 bp, Homo Sapiens; identical to SEQ ID NO: 119230

SEQ ID NO: 294825 - DNA, 1000 bp, Homo Sapiens; identical to SEQ ID NO: 224929

SEQ ID NO: 294826 - DNA, 1000 bp, Homo Sapiens
tcttatatgggagctcgcctgtgtaattacctgtcccatcatctgacaattagcccacagagtggcaacttccgccaattgctacttcaaagatgtcggactgaatatgaagttaaagatcaagctgcaaaaggggatgaagttactcgaaaacgatttcatgcatttgtattctttctgggagaactttatcttaacctggagatcaagggaacaaatggacaggttacaagagcagatattcttcagttgacaggatcagttttggaagatgcttggaaggaaaaaggaaagatggatatggaagaaattattcagagaattgaaaacgttgtcctagatgcaaactgcagtagagatgtaaaacagatgctcttgaagcttgtagaactccggtcaagtaactggggtagagtccatgcaacttcaacatatagagaagcaacaccagaaaatgatcctaactactttatgaatgaaccaacattttatacatctgatggtgttcctttcactgcagctgatccagattaccaagagaaataccaagaattacttgaaagagaggacttttttccagattatgaagaaaatggaacagatttatccggggctggtgatccatacttggatgatattgatgatgagatggacccagagatagaagaagcttatgaaaagttttgtttggaatcagagcgtaagcgaaaacagtaaagttaaatttcagcatatcagttttataaagcagtttaggtatggtgatttagcagaacacaggagagcaagaaaatgtgtcacatctataccaaattaaggatgttgagttatgttactaatgtatgcaactttaattttgtttaacactatctgccaaaataaactttattccctataacttaaaatgtgtatatatataatagtttattatgtacagttaattctactgttttggctgcaataaaatcgattttgaaataaatgaaatgttgaaaatttt

SEQ ID NO: 294827 - DNA, 564 bp, Homo Sapiens
atggcgtacctgagcgagtgtcgcctgcgactggagaaaggctttatcttggacggggtggctgtgagcaccgctgcccgcgcttatgggcgctctaggcccaagctgtggtcggcgattccgccctacaacgcgcagcaggactaccacgcccgcagctacttccagagtcacgtggttccgccccttttgcggaaaactgatcaggatcatggcggtacaggaagggatggctggatagtagactacatccacatcttcgggcaaggacaaagatacctcaacaggagaaattgggcagggacagggcattctctccagcaggtgactgggcatgaccactacaatgctgatctgaaaccgatcgatgggttcaatggaaggtttggctaccgcaggaacactccagccctccgtcagagcacgtccgtcttcggagaggtcacccacttccctctgttctaacagcatcttttcccttcatagccatcgacctgaatttctaagacaaatgtttagatgaactcttagtgttattttacgttaaaaaaattaatttgtgtc

SEQ ID NO: 294828 - DNA, 1000 bp, Homo Sapiens; identical to SEQ ID NO: 119231

SEQ ID NO: 294829 - DNA, 1000 bp, Homo Sapiens; identical to SEQ ID NO: 224930

SEQ ID NO: 294830 - DNA, 1000 bp, Homo Sapiens
aaatcttcagacaaaaaagtgcaaacaaaagggaaaaggggagcaaagggaaaacagactgaagtggctaaccaagaaactaaagaagatttacctgcagaaaatggggaaacgaaaactgaggagagtccagcctctgatgaagcaggagagaaagaagccaagtctgattaataccatataccatgtcttatcagtggtccctgtctcccttcttgtacaatccagaggaatatttttatcagctattctgtaaatgcaaattttttagtagctctagaaacatttttaagaaggaaggaatcccacctcatcccttttttttaaatgtaaatgcttttttttaagaggtgaaatcatttgctggctgtttcttttttggtacaaccagaaaatagtgtgggatattgaattacgggaggctctgactatctcgggtgtcagcttaatattccatagatggggggttagtttttatatcctataatacaaagcatattaaatggcaatatggagtcagtcctgtgtttaatgtcttgaacattttaaattacttctattcccatgttgttttttagtagaattgtttcctaaagaaaaccactctgatcatggctctccctgtcagaattgtgtgcactctgtaacatctttggttttggtagtcctgttttcctaataacattgttactgtgctgtgaaagattacaaatatgaatatgcagtgtacgtgctattcagttgtggccgtatgtgctattcaggtgggctgtatgtaacagctgaccaacgtgtgaagataccagtacttgatagcctcttaaggaaaatttgcttccaaattttaagctggaaagtcactggaataactttaaaaaagaattaattacaatacatggctttttagaatttcattacatatgttaagaattgtgtacaaattgaaatgtctgtactgatcctcaaccaataaaatctcaattatgaaaataaaaaaaaa

SEQ ID NO: 294831 - DNA, 1000 bp, Homo Sapiens
aaaatctctactagaaatgaagatcagtgcctcatccttaaagtagaatgctggctcgttgattaccagtgttttctgataggaacattgaaggtgataaatttaccttttcagctctagccacatactttttagtatgaggtgctttaattttggttctgatgtaaatatgatttccattacaaaatcttttggatcatggaggacacgaaatattttttctgtataggcagcagtggtcttttttaaaaaagtggtttctaattaatgttcattgttctttaaatgggtagtcgttataatattgacaaaccaatataatattgacaaaccaaaaaccaaatattgatttttgttgatgttttgtttttagtctacatggcagataatggaacttgcccactcaatatttttcttcctattcttttttgctaagagacgttagagtttctgagatgataaatttttactattaaaagcttttattgtctagtgagtaatttcagcagaaattaatttaatatactatttttatattttattctttgtccttgctcgtggctgggaattggatccagtgttttgagtgtaaaaattgtgttacattaactacatttcccagaatcacttttttctccagttctaggttagacttgtctaaaataagagtttgtacgagatttggaaggcataagggaagaaaaagctgttatgctatgtttagtggggccatcagacagagagacagatgtataaaggcctggtgacctctagttttcagctcatttttctgactgttggactcattgatcaatatttgctcaaaactgaatgttatagctggacgtgatggtgcatacctgtggtcccagctactcagggagctgaggctggaggatcacttgagcccaggagtttgaggctgcagtgaactatgatcatgccactgcactccagcctgagtgatagagtgagaccctttctcaaaaacaaaacaaaa

SEQ ID NO: 294832 - DNA, 1000 bp, Homo Sapiens
tgccattcgttctcacgagttttctttttttttttttttgagacagagtcgggctctgtctcccaggctggagtgcagttgcacattctctaatcagttccttttaaagaccaaagaaaacctgtcctcttgtgtggcctgagttgatctatgaacattattcactatgacccagaaaatcccacgaagtcgtgcatgttagaaggatgaaaccctcatgttcactgtaaactgtgaaggtgctcaggccatcacaggtatgcctatatgaaaagccaccaagtatctgaaatattttcttttacagaaattatgtgtaccatttcagtcttagaaagtggagttggtcgctgtacgcaagacagacattggggctggactcaccatcagtggccccgaaaaggtactgaaatttgcttacaagtgcagagttatgctgaacttaagggtatagatgtagattccctggttattgagcacatccagggaaaaggcacccataatgtaccacctgacttacagaactcatgggcagatgaacccatccacaaactcccctgccacatccagatgatgcttagtgaaaagaaacaccttgttccaaaagcagaaaaggaggatgcacggaagaaaaagataccccagaagaaacataaacttaagagacaaacaaattcagccaaaagaaaatgcaaataaaagttcaaaacaaaacaaaacaaaaaaacctctaaaattcataaaacacaaaatgacaaactctattaaatatgcccctatgatatctcttagataaaagttggccgtaatagagaaaatgaagataggtgttggtgactggcagattctgggtctacgatgaatcagagaaggatggttttcactttgttttacatttttttaatgcttgatgttgacttggtagaaagatgataataaagagattcttctgtctatgtgtttcttttagattactcatgtggactgaagaaaaaaaatt

SEQ ID NO: 294833 - DNA, 1000 bp, Homo Sapiens; identical to SEQ ID NO: 224931

SEQ ID NO: 294834 - DNA, 1000 bp, Homo Sapiens
atgactatcaaaattcacctgtataataaacagtttttgagggattttaaagtttccaggaaaaaaaaagttcattagctttttatgaaggatttatccttttttttcagtgtgctgtttattgctgagaagtggctgccctgccagaaaactgctattctcagctgtaaccacattgactaatagtgagtggaagtgcagtggataaaaagcaaatgtgtcttctctgtatcttttttcatttattggctgaagaacaggaggatgcggaagatggaagaaaatataatctctgaaagataatgaagaagctctcctaaatagaagaaaacctcataggggatttttttttcatcattttactctctgcttctatgcgtttaaattttttttttttttttttgagacagtctcgctctgttgaccaggccagagtgcagcggcatgatcccgactaactgctccctccacctcctgggttcaagcgattctgcctcagccttctgagtagctgggattacaggtgtgtgccaccacgcctgactaatttttgcatttttagttgtggtgcggtttcctcatgttggtgaggctggtctcgagctcctggcctcgtgatttgttcaccttggccttccaaagtgctgggattacgtgcatgagcccctgcacctgatggagtctcattctgtcgctcaagctgaagggcagtgccgtgatcttgacccactgcaacctccgcctccaaggttcaagcaattctagtgcctcagcattccaagtagctgagattacaggtgtgcaccaccaaacccggctaatttttgtatttttagtagaggcaggctttcaccatgttgaccaggctgattagtttgtatatttctttcttcctttccttttttatttctagaagcatgttaattttaaaatataaattatgacatgtaaaagccttcatttctctgtctttgattactattatggctgatgaaaaaat

SEQ ID NO: 294835 - DNA, 1000 bp, Homo Sapiens
taaatgtaaagaatgtgggaaggccttcagtcgtggctatcagcttactcagcatcagaaaatccatactggtaagaaaccttatgaatgtaaaatatgtggaaaggctttttgttggggctatcaacttactcgacatcagatatttcatactggtgagaaaccctatgaatgcaaggaatgtgggaaggcttttaattgcggatcaagtcttattcaacatgaaagaattcatactggtgagaaaccttatgaatgtaaagaatgtggaaaggcctttagtcgtggctatcacctttctcaacatcagaaaatccatactggtgagaaaccttttgaatgtaaggaatgtgggaaggcctttagttggggttcaagccttgttaaacatgagagagttcatactggtgagaaatcccatgaatgtaaagaatgcggaaagaccttttgtagtgggtatcaacttactcgacatcaggtatttcacactggtgagaaaccctatgaatgtaaggaatgtgggaaggcttttaattgtggatcaagccttgttcaacatgaaagaatccatacaggggagaaaccctatgaatgtaaagaatgtgggaaggcttttagtcgtggctatcaccttactcaacatcagaaaattcataccggtgagaaacctttcaaatgtaaggaatgtgggaaggccttcagttggggttcaagcctagttaagcatgagagagtccatactaatgagaagtcttatgaatgtaaagactgtgggaaggcctttggtagtggctatcaacttagtgttcatcagagatttcatactggtgagaagctttatcaacgtaaggaattcgggaagacctttacttgtggctcaaaacttgttcatgagagaactcatagtaatgataaaccctacaaatataacgaatgtggggaagcctttctgtggacaacttactcaaatgagaaaattgatactgatgaaaccttatga

SEQ ID NO: 294836 - DNA, 1000 bp, Homo Sapiens
ggcaggggaattgcttgaaccccggaggtggaggttgcggtgagccaagatggcaccactgcactctggcctgggcagcaagagcgaaactctgtctcaaaaaatttaaaaaaaaaaagaagtgttatgatgtagaataccctttcttatgttgcattccttctttgcatattatgtgtaactctctaagggctgtggctcaagtagctcagtcagcttttgcattaaaaaattcacagttcagactaggcacggttgctcacacctataatcccagtgctttgggaggctgagatgggaggattgcttgaggccacaagttcgagaccagcatgggcaacatagagagactcccctctgaaacgctacaaaaaaaattagctgggtgccgtggcatgtgtctgtaatcccagctacctgggaggctgaggagtctgtacagagtccttggcagcattagctaatatcctcatgtcatcagttgatctctaacatccttcagctcctgggagcctctcactttcctaccacagaactctgtctgaccctcatccatgcttctttgtccccaccatctcccttaaatggaattttcatggctggcttgataatgcaagattggacactcttttcttcctagtagtgagacaagagctaagcaccttacaaaattgttaatgcacgatcttgaggtgaacttaaaagtatcctgcaggtggctgggcacggtggctcacgcctataatcccagcactttgggaggccaaggtgggtggatcacctgaggtcaggagttcgagaccagcctggccaacatggtgaaaccccatctctactaaaaatacaaaacattagtcgggtgtggtcgtgggtgcctgtaattccagctactgaggaggctgaggcaggagaattactcgaacctgggaggtggaggttgcagtgacttgagatcgtgccactgcactccagcctgggtaacagagtgaaactccgtctc

SEQ ID NO: 294837 - DNA, 680 bp, Homo Sapiens; identical to SEQ ID NO: 57108

SEQ ID NO: 294838 - DNA, 1000 bp, Homo Sapiens
ctacgtgaagttgatgatgccctcctggatgacgcccgctcagcggggcaaggggctctatgctgactacctattcaatgccatcgcgggcaactgggagcgcaagaggcccgtctgggtgatgctcatggtaaactcgctcacagagagggacgtgcgcttccgtggtgtgcccgtgctcgacctctacctggcccagcaggctgagaagatgaagaagaccacaggggctgtggagcaggtggaggagcagtgccatcccctcaacaacgggctcaacttctcccaggtgctgtttgccctgaaccaaaccctgctgcagcaggagagtgtgcgggccgggagcctgcaggcctcctacaccacggaggacctcatcaagcactacaactgcggagacctcagcgcagtcatcttcaaccacgacacatcccagctgcccaactttatcaacaccaccctcccgccacacgagcaggtgacggcccaggagattgacagctacttccgccaggagctcatctacaagaggaatgagcgcatggggaagagggtcatggcgcttctacgggagaacgaggacaagatctgcttctttgccttcggagcagctgtggggtgctgtgaaaccaagcccagagagggcagggtggtagaaacatgggctcgggagcgcaggaaccgcattacacagttctggggcacaggccacatgggaatggcgcctcctggagttgtgcaaggagtagccacctgggtggaggtgaccattctccctgccctggcagagggaaaggaagaaaacaataaaggtgtggaatggttgaggttgaggggatggataggaacgccggccagacacgtggaccattgccgcgcagtgctcaggatccagtgggcatccggtcactttctggggaacaacacagtcatcgacatcctgcggcaggcagggctggaggtggaccacacacccgccgggcaggccatacacaggtaa

SEQ ID NO: 294839 - DNA, 1000 bp, Homo Sapiens; identical to SEQ ID NO: 119235

SEQ ID NO: 294840 - DNA, 1000 bp, Homo Sapiens
aaaatgcaaaaattagctgggtgtggtggtatgcccctgtaatcccagctactcgggaggttgaggcaggagaatcacttgaacctgggaggcagaggttgcagtgagcccagatcatgccaatgcactccagctttggcaacagagtgagactttgtttcaaaataaaaaaataaaaataaaaaaataaaaatgtaactggatagacctaaggatcttgaataagcagaaaataatttaggtaaaaaccaaataataaactaacattctgaaaggtttaggatttggaggcccaaatgtcttagctaaaagtgttcattctaacctcacaggaaaattgaaatatgaaaatatacagaaaaatcttaggcagtatttatcaattttaagaaacaactatttacaggtttttcaataggcattacattaaaaacaaaatatatacttaataaatatgaaaactgtggatataatcaacacatttattttacttcttgaagtgttaacatgtgctgtctcaaatatcaacagtgtacacgtgagaaaaaacattttacatagattttctgcgacagaaaacagcatctcattagacatcccaagtttttttcatttggaacacacactcattccccagtatactaggggtaataataatttaaagagtttaattactttttactactagaaaactaattttatgtttggcacaaatttctgaaatgatattccactgcaaagaataatacctatatatggccagaattacttttcttctataacattaagataatacttgtcagcctgagcaacaaagtgagacctcatctttacaaaaaataaataaattagacgggtgttgtggtgatgagggtctgtagtcccagatactcaagaggctgaggtgggaggatctcttgagcctaggaggtcgcggttgcagtgaactatgattgcaccactgcactccagcctgggtaacagagcaagatcctctctc

SEQ ID NO: 294841 - DNA, 1000 bp, Homo Sapiens
aaaatgcaaaaattagctgggtgtggtggtatgcccctgtaatcccagctactcgagaggttgaggcaggagaatcacttgaacctgggaggcagaggttgcagtgagcccagatcatgccaatgcactccagctttggcaacagagtgagactttgtttcaaaataaaaaaataaaaataaaaaaataaaaacgtaactggatagacctaaggatcttgaataagcagaaaataatttaggtaaaaaccaaataataaactaacattctgaaaggtttaggatttggaggcccaaatgtcttagctaaaagtgttcattctaacctcacaggaaaattgaaatatgaaaatatacagaaaaatcttaggcagtatttatcaattttaagaaacaactatttacaggtttttcaataggcattacattaaaaacaaaatatatagttaataaatatgaaaactgtggatataatcaacacatttattttacttcttgaagtgttaacatgtgctgtctcaaatatcaacagtgtacacgtgagaaaaaacattttacatagattttctgcgacagaaaacagcatctcattagacatcccaagtttttttcatttggaacacacactcattccccagtatactaggggtaataataatttaaagagtttaattactttttactactagaaaactaattttatgtttggcacaaatttctgaaatgatattccactgcaaagaataatacctatatatggccagaattacttttcttctataacattaagataatacttgtcagcctgagcaacaaagtgagacctcatctttacaaaaaatagataaattagacgggtgttgtggtgatgagggtctgtagtcccagatactcaagaggctgaggtgggaggatctcttgagcctaggaggtcgcggttgcagtgaactatgattgcaccactgcactccagcctgggtaacagagcaagatcctctctc

SEQ ID NO: 294842 - DNA, 1000 bp, Homo Sapiens
cctggctgtggcttacagcagcgggcgcctggacggctccgagtatgtcatgccagatgtccctccgagctacagtcactactactccaaccccagctaccacaccctgtcgcagtgctccccaaaccccccaccccctaacaaggttccaggcccgctctttgccagcctgcagaaccctgagcggccaggtggggcccaagggcatgataaccacaccaccctgcctgctgactggaagcaccgccgggagccccctccagggcctctggacagggggagcagccgcctggaccgaagctacagctatagctacagcaatggcccaggcccattctacaataaagggctcatctctgaagaggagctcggggccagtgtggcttccctgagcagtgagaacccatatgccaccatccgggacctgcccagcttgccagggggcccccgggagagcagctacatggagatgaaaggccctccctcaggatctccccccaggcagcctcctcagttctgggacagccagaggcggcggcaaccccagccacagagagacagtggcacctacgagcagcccagccccctgatccatgagctcaggatagaagtggggtcgtacagcatcagagtggtggagttggtacccagaaaaaccgagactctgtgggctcccagccccctctgcctccgggcctaccccccggccactatgactcacccaagaacagccacatccctggacattatgacttgcctccagtacggcatcccccatcacctccacttcgacgccaggaccgttgaggagccaggatgggaagtgcccaccctccgtacatctttcacagccctgattgcagctgtgttcactcaccagtatcctccgaccgcccactaccccactcccccaggctccgccccgatcccccaggcccagttccaggatgactttggattgcccgccctcgccctatccctgtccccgctcccgtcctaa

SEQ ID NO: 294843 - DNA, 1000 bp, Homo Sapiens
aggccacaccaagcccatcctctgcctggatgccacagatgagttgctattcacagggtccaaagaccgaagctgcaagatgtggaacttggttacgggacaggagatcgcagctctaaagggccaccccaacaacgtggtctccatcaagtactgcagccactcggggcttgtgttctccgtgtccacctcctacatcaaggtgtgggacatccgggactcagccaagtgcattcggactctcacgtcctcgggccaggtgatctcaggggatgcctgtgccgccacatccacccgtgccatcaccagtgctcagggcgagcatcagatcaaccagatcgccctcagcccttcgggcaccatgctgtacgccgcctcgggcaatgccgtccgcatctgggagcttagcaggttccagcctgtcggcaagctgactggccacatcggccctgtgatgtgcctgacggtcacccagacggccagccagcatgacctcgtggtgactggctccaaggaccactacgttaagatgttcgagctgggcgagtgtgtgacgggcaccatcggccccactcacaacttcgagcccccgcactacgatggcatcgagtgtctcgccatccagggagacatcctgttcagtggctcccgagataacggcatcaagaagtgggacctagaccagcaggagctcatccagcaaatccccaatgcgcacaaggactgggtgtgcgccctggccttcatcccgggccgccccatgctgctcagcgcctgccgtgcgggtgtcatcaaggtctggaacgtggacaacttcacacccatcggtgagatcaagggccacgacagtcccatcaatgccatctgcaccaatgccaagcatatcttcacagcctccagtgactgccgggtaaagttgtggaattacgtccctggactcaccccctgccttcctcgccgagtcctggccataaagggccgcgccaccaccctgccctga

SEQ ID NO: 294844 - DNA, 1000 bp, Homo Sapiens; identical to SEQ ID NO: 224937

SEQ ID NO: 294845 - DNA, 1000 bp, Homo Sapiens
acctccgagagcagctggctgaggggcacaggctggcagagcaccttgttcacaagctgagcccagaaaatgatgaagatgaagatgaggatgaagacgacaaagacgaggaggttgagaaagtacaggaatcacctgcccccagagaggtgcagaagactgaagaaaaggaagtccctcaggactcactggaggaatgtgctgtcacttgttcaaatagtcacaacccttctaactccaaccagcctcacaggagcaccaaaatcacatttaaggaacacgaagtcgactctgctctggttgtagagagtgaacaccctcatgatgaagaggaggaagctctaaacattcccccagaaaatcaaaatgaccatgaggaggaggaggggaaagcgccagtgccccccagacaccatgacaagtccaactcttaccggcatcgtgaagtctctttcttggcattggatgaacagaaagtttgctccgctcaggatgttgccagggattactccaatcccaaatgggatgaaacctcacttggcttcctcgacacacccttggccagaagagaatctgttgccttgaagggtaggactcggtcctggcagcattcatcacatgctaactgaagaacccctaggccctgaataaccagtagtgatacccaagaactatgtcaagagccttaggatcccagctgaaatggcacattctatttgtcatcacatctccttaggctcctcttggctatgatagtttctctttccctgtttttgataaccttgatagcttcaaggagtgctgatcaggtaattggcagaatgcccctctagtggaatttattccatattgctttttaattatttacttgtatgtatttctcccatattttcctatgatgttttgaagggaaagaccaagtcatctgtgtatctccaacacttagcattcaataaatatctgttgagtgaataaataaatgggtgaaaagtgaataaaa

SEQ ID NO: 294846 - DNA, 1000 bp, Homo Sapiens
cctggaagacattgaggacagctggaacaagtgggagtccagggacaagcaggtgagcaaagtcttgggagcggcgtataagcccaaggaacgcttgcagaataccaggttcctgtccaccagggtgccatatggctggatgaagcatcagcccttcagtgagggtggacaggagcctttgtcctttaacaggattctgggccatggacaggtctgggatgagactaatgtggccagtttgtttgccaaggccctggctgagatctcgcctcaggtctaccaaagcctgcacttcagtgatctgatgccgactcagcagcctgacttcctgaccagcaggggcccagaccagcaagaccagcacatccgcctggtggcccaccatgtccagaaggacctggtgcccagcagggagcaggctgtgctggataccacggacagcacgcctgcggccgcctcctccccatcttccttgttatctgtcactgcctcagcctccaggctgctggactccagcttgcccaccttcctgacgccccagttctccttcttgctgcggccccagtcagcctccacagcccattccaccccctcggtcccatccccggtgtccaagtccaccctgcaggggtcagtgacccccaagcacattgtctcctccttcgagcggcccccaaggcctctgaaggccaccttcatgtcctctgtgaaggggagctcccattcttccctcatcatcaaacactccaccccaagcaccttgttctgtcccgtgtgcagagagggctggaagcatggtgggcagcacccctcctggctctgccgctgtcaggctatggagtcccatgtgtccttcccctctggcccagaggcacctttccagacctctgctgggccatcagccctcttggcagctggagatcccattctggggcatgtggggccctctggacatatcacctgcagcctgaagggagctggggcagcccactgctactga

SEQ ID NO: 294847 - DNA, 1000 bp, Homo Sapiens; identical to SEQ ID NO: 224938

SEQ ID NO: 294848 - DNA, 1000 bp, Homo Sapiens
gcccacctcgaggactttcaggggctcaccatcccccagggttcctccctggtgctccaggggaactccaagagactcccactgtggactccaaagatcatgatagcagctctggactatgatcctggggatgggcaaatggggggccaggggaagggcaggctggcgctgagggcaggagacgtggtcatggtttacgggcccatggatgaccaaggattctattatggagagttgggcggccacaggggcctggttcctgcccacctgctggatcacatgtccctccatggacactgagcaagcatccttgcccaggtagtggcctctggctgctcacaccctgccagaggagaagcaagcgttcagaccctcacaccagcacccctcctcaccaccataagtagcatgtgctccaagtgccactgtgttaaactgatggtagtccttaagcgtcccctaggctctgaaagtagcaggacttaagcctgagttatttgcaaaagcaaacacaacaagccaacccctgagagtctgagaagccatttcaaagttgctgataactatggcaggtatacggagaagcgcctttttctgtggccaatgtgtgttttctctgggaggttaaggttatctgtccattgccttgtacgaaagtctcaagaaaagtctacatcttaaaaaagaaaaagcaatctgagtgttatttttgggatgtgagggtgatctggctgcgacatgtgtcaccccattgatcatcagggttgattcggctgatctggctgactaggcgggtatccccttcctccctcaccactccatgtgcgtccctccagaagctgtgtgctcaatggaagaggatgaccatccccgatagaggacgatcggtcttcagtcaagagtataagagtagctgcgctcccctgctagaacctccaaacgagctctcagaatgttatttttctgtcttatgtccaacccctcattaaaatgttcatag

SEQ ID NO: 294849 - DNA, 1000 bp, Homo Sapiens
ttttttcttttcttgagacacggtcttgctctgttggccaggctggaatgcagtggcacaatcatagctcactccagcctccaactcctgggctcaagcaatcctctcatctccacctccagagtagcctagatgacaggcgcacatcaccacgcccagctgatcttttaaatctgttttgtagaaacaggatctcactatattgcccaagctggtcttaaacttggtctcaagtgattctactgcctcagcctcccaaagtgctgggattacaggcctgagccaccatgcccagctgaatttgagctttttaataatctcattccacatagccttatagatcctgtaaatagggggggtcacaaaagtaatatattgtgttatggaagataattttgtactgtgctgtttcctaaatcataccaatatcctaaagtcatgcacttcccagatgatcgtgatcctccaaatgctttgtaagatggggcagggcgtggaaatatatatatatacacacacacacagagacacacacacacacaagtatagtatatattttcctaacctttcttctgggtccttcctcagatctttgagtcacgatagaaaaggagctcgagttctttgtgtaggaaagttaagcttcctgcctgcggtgttcttgcaattgccttaggaattcacaagctctaggagttctgaacggaaggcagacgagaggcactttatccagtcccagaaagaatctctaaccgtgtgactgagaagtcatctagaaaaacttatatttttaatgtaaaaacaaatggggcttaccagacctcacagagtattggacgtctacaagtgcttttatattttgtaactgtaaagaagtttcatatgcacagaagagcagttggaaatctggtcgactgcaataaaacaagatgacctttgcatgtacaaagatgttgcattcagactatgaaaatagcaaataaagctttggtgcaagttg

SEQ ID NO: 294850 - DNA, 1000 bp, Homo Sapiens
ctgtttgaccggatagcccagcactatgccttacttttgtttcgtgtacccaagtcccactctgaagaggcgctcttaaaatcctggttcgacacgcacgaattcaagtctgacatctgtaacacaatgagcctgtggatttcaggcacctatcctagcccacagagctatgacagctgggactactcggaactagacccagagcgattccgcagagaagaattaatgttgtacagaagaagactgacaaaggggagagagttttctttgtttgctggtaagagagccttctcccagaagccagcccagagcaggaaattctaccaccctcagtcgtgtgctgcctgcaaaagccctgagctgacttcaaacctcttcaacatttatgggaagagccctctgattgtgtactttctccagaactatgccagtctgcagcagcacggcaagaatgtgttgatagtcagaagggaaaagaccacgagcacccctgactgcaccccaacgtatactgatgtcatcagcgagaccctgtgcagcatgaagaagcggaaagacaacctcaatcagttgtaccagcatcattggactgaatggaattattttgacaagcatctaaaggagctgcaagacaacttctccagggaaatgaagaatattgatccaaaagcagcagatacaaaaaaggcaaaccacatgttcatcccaccttcagccgtcaatgaggaatcacctgacaagaaaactaagggaagtctccaaagagaaattgagtttaagggttgttcgaacaaaaaccatgggaaaggtagaagtgtgaacatgaggggaaaggaggagagggaaagagaagagaaacagaagttgaacatttctttccactcacttccaagccctgaggagctccacaacctagaaccaggaagcgcctacagaatccgtgatatttctgctacgaggtggagtggaacaagaaaataagaaaattgtggccaaagac

SEQ ID NO: 294851 - DNA, 1000 bp, Homo Sapiens
ccctggctgtcagctcccgcatctgctcccacacgtctttttcatctcactcgccaaaatttgctgaattggcagagaagcccgtggacttcgcaatacctgaaatcaaggcagaattgtcggagaagatgttcaatggggcagatctgtgtggagtcctggacccaggcaggggtgggacccagggacccagacaggaagtgacagattcctgggagtggacaaaatggaccgcgctgggccacaaagtggatatgggtggcgagaatgaaattggagttgaggtttctgacaagaagaataaacacctgaggaacaagagtcctctgagcagccatgcctgggacagccacactgagagcagccacctgagatgccagagtcccccacgcagccatgcctgggacagccacacccagagcggccacctgagacgccggagtcccccacacagctgtcctcaggacagccacaccgagagcagccacctgagatgccggagtcccccacgcagccgtcctcaggacagtcatgccaagagcagccacctgagacgccagagttgcccatgtagccatgcctggcacaaccgtctcagaaacacatgattaaggggtaacaaaacaacaaacaccatgagaacaaaatgtgaaccatgttgtgaagaaacagtcaaaaactagaaaggatagcaagacaaatgaaaataaaagcggacattttttcacattatactaaagagatggcccgggagtggaaacctgtagattaacaaaaccacctttattattacctgaagtccacttttcttcaaccatggggcttccacgtcacatatggacattttaacagcaagaaaatcacatgtggggtgaaactaaagccccacacagtggtgtcttctcgaaagccaaagacgaggtttcataattgagctccatttcttcttattccctttctcagtgatatttctttttagtaaacattttaaagaatgaaa

SEQ ID NO: 294852 - DNA, 1000 bp, Homo Sapiens
tgataaagtacttgtttttttagtagattgtggtatctatgaaatagtacctgtatgtaataccaagctgcttagtaatgaaataagaaacattcctagacaagctgtaccttgtaaatggatttggtttgaaaattctaagaacatatcatttgagtgcttatttgctgatttggaaataaatattcttttcctgaaatatttagatgctgtttgggaagtagaaattttggtagatgacctgttacttttggaatacttaaatttgaatacagttcctgttgaagaaaacaaacttagacttgcagaaattgtttacaacattgaatctaagactcctgtatcatcatgcacaataaaatcatttacttgggttcaattccaaaatgataggcagtattctggtattgcaactgctgtttctgatccatcagacttcagtattcagttagaagatttctttgacataatgaaatacctttttatgttgctttctgatctaccagagaccttacaaacattgcctcaggagttcataattcccggttctagttgtttgttcaaatataaatcggaagatcagtggaatagagtagaaatttctgaagtctcacctcagtctttatgtcttgtgttggttgactatggattttctttttatatacgttattcagaaattataaatcttaaagttgttcctgaggaacttttgaatttgccaaggctgagttatccatgtattttatatggtatcttacctgctaaaggaaaacattggagtgaagaagccaaaatcttttttcgagatttcctaagtaaaccagacttagtttttcagtttagggaatatcattctgaaacaaaactgaaagtagatgtcattcatgagaaaaacaatttggcagatatattagttgcatctggtctcgcaacttattctaaagattcacctcatcttgatgcaattactgctactgaatctgctaaaaatccaatataa

SEQ ID NO: 294853 - DNA, 1000 bp, Homo Sapiens; identical to SEQ ID NO: 224939

SEQ ID NO: 294854 - DNA, 1000 bp, Homo Sapiens; identical to SEQ ID NO: 224940

SEQ ID NO: 294855 - DNA, 1000 bp, Homo Sapiens
gagatcatcaggacactctgctggaggtacagagaagccaggtgctagacagagcggcgctcagcatccagaaagtccttcggggctacagatacaggaaggagttcctgaggcagaggcgggcagctgtgaccctgcaggcctggtggagaggctactgcaacaggaggaatttcaagctggtgagagagctctctggggcggctgggccgcgggaccagcggatcctcgtgggctttgagcgcctgcaggctattgcccggagccagccgctggcgaggcagtaccaggccatgcggcagaggacagtccagctgcaggccctgtgcaggggatacctggtgcgccagcaagtccaggccaagaggagggcagtggtggtcattcaggcccatgccaggggcatggctgcccggcgcaacttccagcaaaggaaggccaatggaccaagtggtcctgagcagtggttgtgcagctgggttcctgggggtccctggagtttgaaggggtgccttaagagccatctgagggcgccgctggtcatcccggccgaggggcagaaaagccaaggcgctctccctgccaagaagcgcagatccatctacgacaccgtcactgacacggagatggtggagaaggtgttcggcttcctccctgccatgattgggggccaggagggccaggcctcgccgcactttgaggatctggaatcgaagacccagaagctgcttgaggttgacctggacacagtccccatggcggaggagcctgaggaggatgtggatggcctggccgagtacaccttccccaagtttgctgtgacttacttccagaaatcagccagccacacacacatccggcggcccctccgatacccgttgctttaccacgaagatgacactgactgcttggtaccagggttcactggcttctagtggatcaggccagccccgagcctggggtgtgagctatggctcggggaaagaaggaaggggccata

SEQ ID NO: 294856 - DNA, 918 bp, Homo Sapiens
atggggttcttcctggttccgctgcttctggatgagctcggcgtcggcggggagcgcgggctgcggagaggcgggccgggccaagcggagccgagcgagcgggagcgcggcgtccgggaggcggcggagacgcggggctcggaggtttttgaaatcatgaatcctgtttatagtcctggatcttctggggttccctatgcaaatgccaaaggaattggttatccagctggttttcccatgggctatgcagcagcagctcctgcctattctcctaacatgtatcctggagcgaatcctaccttccaaacaggttacactcctggcacaccttacaaagtgtcctgttcccccaccagcggggctgtgccaccgtactcctcctccccgaacccctaccagactgccgtgtaccctgtgcgaagtgcctacccccagcagagcccgtatgcacagcaaggcacgtactacacacagccgctgtatgcagcacctcctcacgtcatccaccacaccacggtggtgcagcccaacggcatgcctgcaacggtgtaccctgctcccatcccccctcctagaggcaacggggtcaccatgggcatggtggctgggaccaccatggccatgtcagcaggtaccctgctgactgctcactccccaactcctgtcgccccccacccggtcactgtgcccacgtaccgggccccaggaacgcccacttacagctatgtgccccctcagtggtgatcacctgcaaatgtttgaggacggagctgtgcagtcacattattggggattccacagctggtgctgcaggccttgcgcctccaaccaggactttcttcttaatgctctcgacacttagctaaacacgactatatcccggcccagcaggccccagcgccgttagtctccagctga

SEQ ID NO: 294857 - DNA, 1000 bp, Homo Sapiens
catgcattgtcctagggaatgatgtgttacagaaagacttacatgaaaatgaaggatttgaatatgctgatgtcctttatcttcttcactcaacagaaaaggatatttgcttaagagcaggctatgcattaacactttttgccttcaataatcgctttcaacaatacttaatattggaaagtggaataatgaccatatctatttttgaacgttttcttgaatcaacagttgaaactgagaaggcaatggcagcatttcagattgttgtactggctaaagtcattagagatatggaccatattactttgtctgcaagaggtgttactattttagttgatagtctgtattcagttcagacttctactattgtcttgacagggaatttaatagcaagcctggctcattctagagctggtatcccagaagcatttaccacattaggaacaatccaacggctctgctatcatttgtactcgggaatagaagaggttcgtgcagcttgttcctctgctcttggctacttaacatacaatgcaaatgctttccgcatcctattaaaagaatgcaggaataaacctaatcagttcattcgtataaaaaataatatcagcagagatgcaagtattaacccagcatttttaaaggaatttcaaatgcaacaaacactggtgggacttccttccttaagtctggagaagaatggaggaccatccataattcctatctttaaaagagggaaggagcaccgaagaaaattaaaacctaaaattcaaccaaaagattctttgactttattacctcctgtaactaacttcatgggactcttcaaagcaacaaaaaagaccaaggattcccataatattttttctttttcatctacaattacatcagatatcacaaatgtatcaagaccaagaatagtgtgtttgaaccaacttgggaaacatgtccagaaagccaacccagagcctgcagaaggctaataaaacattttagaatg

SEQ ID NO: 294858 - DNA, 1000 bp, Homo Sapiens
gccagtagttcaaaataatcctccaattttaatttaggaacaaagctttgtcctactgactaggaagtaaacaaacagctgatatataagatatttgtgggtattggtgtcttttttccctatggaatagacacatagttcccttaaatattattaatagacattctacagtctttcagtgtaagtttaaaagcaagagatcaaatgaaaatgtgtactatgtacctatgatgtgtcatatcgtgattacatcatgcagagagaacagttcctgtaattcaagtaattaaaatttcaagttgtaaaaatgttaccattttcacattggaagcccttctaagtaccattttcattgggggcagggagaaggtttatatttaaattttatattaccagacataaaagtacagtgcagtactgatgattttgtttaaagtttttgaaatgttttgtttactaagttcttgtaatcattattttagacaagcttgaaaacttgaaattgttgaaacttataatttaaattaaattggaaattactttcagaatttggtagtatacaagatgtgcccctttgtctaaataaatgttggcttaatttgcagaatagataaaacaattgatgtttttgtgtgttcaagaatgcattaaattcttttaatagtaaaaagtcaaattacgaccataatgagtattttaatcttgttcttgttcagtattttgcgtagatttttattgtaattgtcctgagttctacagtatgtgaacaatatcgtgtgaagtgtgtttttgcatttgtgcatttaaattatttatgtaactagggctgtgagtaacactttttttttttttttttggttaaagaaaagctatatttaaatattcaaataattatatatttccatgtaaaactaatgtgaagactaatgtattttttatattgcagtgtaaaagctaaacttgtttttgatgttatcaagataaaatttattaaaccttg

SEQ ID NO: 294859 - DNA, 1000 bp, Homo Sapiens
agtccacaactgggatacttcaaagtataaggtgtcgaagcaggccaaggagtttctggagtacgtgtacgaagagccgctcatcgacatccagcaggagaacgccatgctgtaccaccacgcagagccgctggccgccgtgctgcggctgcggcagcggctgaagtcgctccgagcctatttgttcagctgccgggcagcggtggcagaggatctccgccgcagaattttccccagagaatacctccttcaacagatccacctgtattcacttgccgacctgcagcaggtaatagagggaaagctggctccattcttgggcaaggtcattaaatttgccacctcacacgtgtacagctgcagtctttgtagccagaaggggttcatctgtgaaatctgtaacaatggagagatcctctacccttttgaggatatttcaacaagcagattcggagacccatatgcagatttattacaaggatatgtggcctgatgctgagatggagtttcactcttgttggccaggctggggtgcaatggcgcgacctcagctcactgcaacctctgcctcctgggttcaagcgattctcctgtctcagcctccggtgtatctgggattacaggcacccaccaccatgccccactagtttttttgtgtttttagtagagactgggtttcatcatgttggccaggctggtgtcaaactcctaacctcaggtgatcctcccccgcctcggcctcccagagtgctgggattacaggcgtgagccactgcacccagcctcaaacacaaattaaatacatacctctctttaacctaaatagaaaaaccgtaaagcccagattgcaagatttttaaatacaataagaatatcctgaattataaaactgctttgctaaagcctaatccaggatttatcctcctagaggactacaaggaaagcacagccttgggagagataaacattttgacaaaacaatgataaaattccacatcct

SEQ ID NO: 294860 - DNA, 1000 bp, Homo Sapiens; identical to SEQ ID NO: 119236

SEQ ID NO: 294861 - DNA, 1000 bp, Homo Sapiens; identical to SEQ ID NO: 224943

SEQ ID NO: 294862 - DNA, 1000 bp, Homo Sapiens
cgcgtcccacgcgcctcgagtcttccgcgcgcctgcccagccgggccgcggctgcccgcgcttaacacgcacgcgcgccccacgcggcccggagccctcgtgcccccgcctcgcctggcctgggcgcctcacgcacgctccttccccttcggcttagcgcgcggggccgcaggtccccgcgggccgccctgaattattcatcggcaggaagatattagatgtacccgctccgcgcgggccgtcgtgcaatgctatccgagctccgcgcgcgccctgcgcccctcctcctcctcacgtccgtcctctctgaaaccttggcagagaagggggatcacatttcctttgtcatcgggccatttcgccctcgccttggtcccccctccgatcccgagcctcggggatggaggctcctctcgggcgcgctggaatcagtggaaccggcaacagccccgcgcggcgagctcgggagccgcgtggccaacgccgccggctcgcgcccgcgtcatcttctttctgaaaggagtcgccgatccggacgcgggtggcctcggccgcgctgcgcctaccgagctttgctcccgccgtgccccggcctcctggggctttgcacaactcccccagttcgggttgcgtgcgcgcgcgcgcgccccctctttctctgctttgccgcctctgcctcctcctcctcctcctcttctcttcagtacgccggttattgggactgatcggaattcggaatccttttaatctccaaaggagcaaactcacttccgcccgagtgctgggagggggctgggggaggggaggcaggggagggggctccaggcaaacaggaaacattagccctctcagcacggcccgcttttgtgtgctccctccctccgccctccaacctcctcccttctcccggccgctggggagatgaacgcccccgggcttcagtgtgacgacctttgaaaccttctgagcgaggagcagagaacgactcttccgtttattt

SEQ ID NO: 294863 - DNA, 1000 bp, Homo Sapiens
tgaattaaaaatacactttacaagtttaaaaggacttatagggcctgagaagttagcatcaagatgtcaaattgtgaatgttgcagcagaaatttttctaaaaagtggaagcctagatggtgccatttgggtaatgagggagtcagagtggataatcaatacgcctctgtggccttgtgatagactggatgtgcttaatcgacataatttactctgtacaattgcacatgaaatcttagccaagagcctttatagacagacatttgaagttttgcagaatctaccaggttttcaaaattcccaagaaactgtggaagtctcacaatatagccttctttttaataagcttctaggttcctgtatagaaagcagtagtcttggtatgtcatcctctgtggcagaattcatgatttcaaagagcatccctattgatttttcctttctcagaagattaattacttctttaggaaggagtcgtttatggctcaaagccagagcccactacaaaagtgctctttccttgggttgctacccaccattggaaggaaatttataccgaaaacttcttctaattccatcttatttatctgagattgaaatgctcttagctattgaaatcttcatggtatctaatgctagtagtattcagagtcctggaacttctacacagatactgcagatagttttgaaaaggtgtgaagacaaccagtctcggagcaatgatgattatcaagctgcagtagaaaggttaattatggctgctcgtatatcagatccaaagcttttcgttaaacacatgactgtcaatgttaataaggaacaggtttatagtttggaacattgttctgccctgaaatggttaaaagagaatatgaagtgggctggaaaggtttggcttttcagtaaccattagctaataaagtctgctttttttttttttttagttcaagtaatcattgttgaaaataaaaggcaataaaaatagacagttttcactata

SEQ ID NO: 294864 - DNA, 1000 bp, Homo Sapiens
gttgggaatacaggcatgcgctaccacgtccggctgattttgtatttttggtagagacgaggtttctccattttggtcaggctggtctcaaactcccgacttcaggtgatccgcctgcctcggcctgccaaactgctgggattataggcgtgagccaccgtacccggcctacccttgggtagtctttcatgtgaaaaggctcacaaaattatagaacacaggcgtaatgggtgacagcttttatgaatcagctttgttaaagaggatcctgcgggagcatgagggctacccccaggagctgtgcacgcctctgttcacagcctgtgcagatggctgtgcacacctggcccgggacttgttttagaagtgcctactctttctgaatgtgagcgacttggcttttacatgccctagaaatacatttacaggcatgttgaaaggaatagactgatctttttgagcaccatctcatatatcatctttcttaatcctttaaacccaaggaaggtggtgtctatccccattttgaagatgaaattgagccttggagactctagcttatcacatgacaaagagtcagatctgggattcaaacccaggtcaatcctgcctccaaaacttgaggtgattttttttgtttatttgttttgttttttccttacctagtacatctctgactggtgaaatacatggataccttttatagaaaaagcattctgggctgggtgtggtggctcacgcctgtaatccctacactttgggaggccgaggcgggtggatcacgaggtcaggagatcgagaacagcctggctaacacggtgaaaccccgtctttactaacaatacaaaaaattagccaggcatgttgtcgggcacctgtagtcccagctacttgggaggctgaggcaggagaatggcgtgaacccaggaggcgtagctagcagtgagccaagaccgtgccactgtactccagcctgggcagcagagcaagactctgtctc

SEQ ID NO: 294865 - DNA, 1000 bp, Homo Sapiens
agaagaggtctgcctggttttcttcctggagctccagacccagaccaaagccttcctgcctcttccaatccagggaaccaagcatggcagctgagtctccctctgccaagcagtttcctgccaacagtcagtctccctcctggtctagaatatttaagccagttagacctgataattatacaccagcaggtggagctgcttggaatgatacttggtactgagacctccaacaaatatgagattaaaaacagcttgggacaaagaatttactttgcagtggaggaaagcatctgcttcaatcgtactttctgttccactctgcgatcttgcaccctgaggatcacagataactcaggtcgagaggtcattacagtgaacaggcccttgagatgtaacagctgctggtgcccttgctacctacaagagttagaaatccaagcccctcctggtactatagttggttacgttacgcagaagtgggacccctttctgcctaaattcacaatccaaaatgcaaacaaagaagatattttgaaaattgttggtccttgtgtgacatgtggctgttttggcgatgtggattttgaggtgaaaaccattaatgaaaagcttacaattgggaagatttcaaagtactggtcaggatttgtaaatgatgtcttcacaaatgctgacaatttcggaattcatgttcctgcagatctagatgtaacagtcaaagcagcaatgatcggtgcctgttttctctttgattttatgttctttgaacattcactggctggattataataaccaagataatgaaaacaataaaatatgcagaacatatttcaaattatttagagtatttcaaagcacttccacacatatgaatggcctgcactggacctcacaagaaaacagagggtttcaactgtgcataacatcagagatgaccaggtgcaacctccatatattgaagacttagaaaatgagaaatataaaaattaaattactttgt

SEQ ID NO: 294866 - DNA, 1000 bp, Homo Sapiens; identical to SEQ ID NO: 119237

SEQ ID NO: 294867 - DNA, 1000 bp, Homo Sapiens
ctggcccggaagcgaaagcctctccacctcttccgagcggggtcacggcccggccgtcggtaacctggtttccgagagtgccgggcggtcggcgggtcagggcagcccggggcctgacgccatgtcccggaacctgcgcaccgcgctcattttcggcggcttcatctccctgatcggcgccgccttctatcccatctacttccggcccctaatgagattggaggagtacaagaaggaacaagctataaatcgggctggaattgttcaagaggatgtgcagccaccagggttaaaagtgtggtctgatccatttggcaggaaatgagagggctgtcatcagctctgattaagaaaggagatttcttcatgctttcgattctgcatggggtacagccagtcacctcaccagagaatgacggctggagaagaaaactctgtaataccataaataagagtgcttgtaataaaagactgtgcacaaggattaatatttcccttcttaagtatcaaaagaactctggaacaaattataccattaggaaggttttcatgattcagttgattttccaaaaatgaagctatctcacccagctgggtttggaggagcaatctgcttattattctgtcgttaccacttactcaagcgagctgtgatatgaatacaagcaaccagtgggctcgggaaggtccgggtctcttctgccatcttccagataagagatttcagtaaaaaactgccatgctgagctgccttatagagctcttcgaaaatgttcgagttgataaagctctttgaggacaaggtacttcgtgcacctcatgctgaagattgcaccgtgttggaaaataaatatgaagcaagtcaaactagatgcatacacttgtgtagaaatcaataatcaattaatagaagtgaaaaaatagacattaaaatgatttatttctactttgcagtggtgtctttttgtaaatcatcttttgtaaagcaattaaaattata

SEQ ID NO: 294868 - DNA, 1000 bp, Homo Sapiens
tagaatgtagtgtggtgacagagttcactgaccacatttgtgtgactatggatgctgagctcatcatgtttcttcatgatttagtatcagcttatcttaaagaaaaagaaaaagccatctttccacctcggattttatctactcgaccaggacaaaaaagtccaattattatacatgacgacaattcctctgataaagatagagaagatagcatcacttatactactgtggactggagagattttatgtgcaatacatggcatctagaacctactcttagattaatttcttggactggaagaaagattgatccagtaggtgttgattatattcttcaaaaattgggctttcatcatgctaggactactattcctaaatggcttcaaagaggagtcatggatccactggacaaggttctgtcagttcttatcaaaaagctcggtactgcactacaggatgaaaaggaaaagaaaggcaaagacaaagaagaacactaaaaaagtaatttgatctgtgaacaaattatgattgtgtctgttttattacactggagtgtttttttagtataataatttgaaatataactttaaaataattctaaatttgtggctataattaaaagtttgtaagttaacctgttctagttccatcattctgtgtacagtgaagtattgcatgataatgtaaattttgtgaaaaactagattaaaatatataactgcttgttatggtttataattatataatgtgcaatacaattcctgcatctttaaaatgtctgcagaataactgtgaatttttttgttattggattggccgtaacttttagaaaaaaatcttgttgatgataatgtgattttggggaggtcattaattgctttttcttttttaaatgtagacttatataaatacctgtttgtatatagcttgagtaattgtgatatgattgtataccactaaaatattgttaactattataataaagtcacagtaatggttt

SEQ ID NO: 294869 - DNA, 1000 bp, Homo Sapiens; identical to SEQ ID NO: 224944

SEQ ID NO: 294870 - DNA, 1000 bp, Homo Sapiens; identical to SEQ ID NO: 119239

SEQ ID NO: 294871 - DNA, 1000 bp, Homo Sapiens
agtaccaggcaaagattttcttcaactatagtacagattagttctgagtgatggtatcaaaaggtgagaaagacgtcatccacctgttttttaatccatttcttttgccaccctatatgtctgttcagagatgggatctcaagctgactttgattcttttagttgaggagtctcttaaagccatctagcccacctccctcaattccctatgtgaggaaacaaaaccccagggaagccaaagggctcctctccaccctgactctacaggccgggggagagtagggactctacccctctctccccttccttgtaggtgacacatgctctgccctctgaggcagtcagcgaaggcaaatggtctgactgctttatgtggtcaacattttaatagaatttctttataatttgatacaggttatattatttttattttattttgagtgggaagaattttaaaacctttttatgtgaattacctcttgtttctttcacctttgaaacagtggtttgtaggagagatgacattgtagcaacccagaattctgcttttggaatgtggtcctcactgtgcaggagaacatggggatcttttgttaaaattcccagtgtgcatacactttctggttcctcggtccagttgctaaagttcttagtattttagcctaacatatttatcaccaacttttctttaaaagtgttccttttgtcacttagttactgattttcctgggtttgacatattaagtattctatgagatgatatatatgctttttttgaaagctgattctcatgaattcaagtagctgagttcctttatgtttagtttattcactaaagtagctggcacaaaacacaccaaaacctagagcaatagctttatgcaaatgctcatgagtttgtatcaataatatgattgttggatccacttataattcatgcaatactgtatgtatgtagagattgagttgtcaatttaaaaaaatgtgtcctctttgtgat

SEQ ID NO: 294872 - DNA, 1000 bp, Homo Sapiens
aaaatattgtttacctctaattgtgttgtcatttttccaaacaaaacaaaacactggcacttttgggagaaactttttgtctccattccttatgtatgtgtgattgtctgtgtccaaattgctttaagaataatatttaatatttcctggaagctcatttttttggcatgagtctaattaaattattgaaagccaccctgtttgtataatctttaacttatcaaatctaatttcagatttctggaggagaaactaacttgaataagcaggactattttaaaagttgttttgacgctagagtaaaattccatgtcacattttctacccaatcatctggatttcaagattccttttaagatctcaatgaagcaatttggatttaaagagtggtattcacaaggggtgaactttcacagtcagggcagttgcctcagtgcccacataggcagaggaggatgtgggaaagggtttttctcagctagtttttgtgtgctcatttcttctgggagcattaaaagtggtgatctgttacagtcactattcaactgggcacgtgttgtgattggtcagtcactgagccagggatacagtccggacttgcttagtacctaagcctaatgctggtggggtttcaagacatggttcagcatcatcttttaacaaggcccagaggcccagagcccccatcaagtcattttgatgtaaatagtgaactttgttagagccctcacttctatcaatcagctgtcctgtccctgccagcacctggagcaccaactaccactccctggaaagaacccttccctgcagttttttaaggacaaaactgcccactcctcattaagtttgctgcctggatacacttttccacaaaggaaaactggcatatcctgccttccgagtagtatgggtctctgtgtgagaaaccaggagatattttcatcttgttcggaaatacttgtatgtattttggtgtcaataaatatcttgtacctcatta

SEQ ID NO: 294873 - DNA, 1000 bp, Homo Sapiens; identical to SEQ ID NO: 224946

SEQ ID NO: 294874 - DNA, 757 bp, Homo Sapiens
tgcttacaggtccccagccctgcccggctgggtggcagtggaggcccgtcgagaatttgagcatggcacgggcaggccggctgtgctgggggacctggcgcccccctctgcagctgctggcccaggtgctaagcccctcactgcccccgggctgggggcgcaggccggctgctcggagtgcgggggcctgccgagcccacgcccacccggaactcacgctggcctgcaagtgtgcgcccaaccctggttcccaccggcgcctctccctccacacctccccacaagcagagggagccagctccagcctcggccagcccagagtggagctcccacagtgcagcggcaggctgaagggctcctcaagcgcggccagagtgggcgcggaggtcgaggaggcgccaagagcgagcgagggctgccagcacgctgtcacctctcactatgaacaattggcaggacagtcatggtctggacctaaggaaggtttgctcagggctgacctacccacgagcagctgctcctggcagtctgagcgcctttcatatttcctgtattaaccttgtggcgcacaaagacagcatcgagaacaagctaatgagaatcatccctctcatcatggaacccgcatcccctgcctcaaaccaagccatgtgcacacgcacacttgatgatagcagaatcgaggcatctgttgacatttgtcttctttttgtttctagagtgtggtgggatgcctccatcactgtagcactgtcag

SEQ ID NO: 294875 - DNA, 1000 bp, Homo Sapiens
cccaaagttctgggattaaaggtacgagccaccgcaactggctgagaatctttttatttgctgatttgtctcttgtgtattttctttgttcagatgtctcttcagatctttttctcacttttaaattgttttttaattgttaagaattttctgtctagtttagatataagccctttatcagacatgtgttttgcaaatattttctcctagtctgtggcttgtattctgtctcttaacactcattttatttttacttttggaactaaagaagaagaatggtcagctttccattattcttgtaacagtaatggcagaaccaagtctgctaatgctacactgagcaaagaaagtcacctggtgaagtccaacattaatgaaatggggtagtacatgcaggcagcgttgggggtggggagggaacaaatgcttcttgagagtaatataatctgccataccatccaggaacctacaatggctatctattaccttattctctggtttgtttaatgttcgaatctttccgaaagatccttcaacctttctggaagaatctaatctgataacaccatcaaaaacacattacttcttttggcataatttaaattgtaagacatcattcacatttatcaatgttacatatataagaactcacccaccatattcttccttgaggaattacagcatgtaattctataatcatttttataatcgtctaacaattttataatggattggttgcttactatcaattttttaaaagtcatggcttctccagtcatttcttgcttatcgaaattatttcatgagatgggtctctccttgtatatttgaaaatgaggtttgcttccttctacttaaaaaacaacttgaacatacctgtttggatcacatggtcttgtcctgataacttggaagaggttgcttcagcattgttcttattgttgtggtggttattattaatattgtttcatattctgtttaaaaaattaaaattttacac

SEQ ID NO: 294876 - DNA, 1000 bp, Homo Sapiens
gctgcccgccccggtggtcccctgtgtgcagggtggcggcgacggcggtggcgcttcggagaccccgagtcctgacgctcagctaggggataggcccctgtccccgaaggaagaggccgccccccaggagcaggaggagctgctggaatgccgccgccgctgccgcgcgcgctccttttccttgcccgccgaccccatcttgcaggcggccaagttcctgcagcagcagcagcaacaggcggtggcactgggcggcgagggggcggaggacgcacagctcggcccgggcggctgctgcgccaagtgcaagaagcgggtgcagttcgcggacacgctggggctaagcctggccagcgtgaagcacttcagcgaggcggaggagccgcaggtgccgcccgccgtgctctcgcgcctgcgaagcttccctatgcgtgccgaggacctggagcagctcggggggctgctggccgcggcggcagtggccgcgcccctttcagcgccgccttcccggctccggccgctcttccagctcccggggccgagcgccgcggccgagcgtctgcagcggcagcgcgtgtgcctggagcgcgtgcagtgctcgacggcctcgggcgctgaggtgaagggctccggccgggtgctcagctgccctgggcccagggccgtgaccgtgcgctacacctttaccgagtggcgctccttcctggacgtgccggctgagctgcagcccgagccgctggagccacagcagccagaggcaccgtctggggcctccgagccagggtccggggatgccaagaaagagccaggcgccgagtgcttccacttctcgctgtgcctgcccccgggcctgcagcctgaggacgaagaggacgccgacgagcgcggcgtcgcggtccacttcgctgtctgctaccgctgcgcgcagggcgagtactgggacaacaacgcgggcgccaactacacgctgcgctacgcgcgccctgcggacgcgctctga

SEQ ID NO: 294877 - DNA, 1000 bp, Homo Sapiens; identical to SEQ ID NO: 224948

SEQ ID NO: 294878 - DNA, 1000 bp, Homo Sapiens; identical to SEQ ID NO: 224949

SEQ ID NO: 294879 - DNA, 1000 bp, Homo Sapiens
agtaaatgtatatagtagcaagtctactataataacagtagtttctggatcacctcaggaaacagtataaataaataataatgtttacttatcatcaacataactaccatagtgtttgaatgaattaaagtttcattagctttatttagaaactggtttaccccagcttcccgtttttttccaaatataaaatgataaaatattgattatgtgccaatattgtcatttaatgttcttaaaacttgtgaagaccacctttttaggtagctgagaagagtgatagttggtatcaatttgttagccaggcatggtggctcatgctgttgggaggctgagtggggaagatgcttgagcccaggaggtcaaggtgcagtgaaccatgatcacaccactgcattcctgcagagtgacggagtgagaccctgtctcaaaaataaataaaaagaagacagttggtatcaattcaaagaatagttgatgcctgttctcttattttaaatgtaccaacagagctattttactgtatttaatagttcttagcttccatgtgtgatgattttaatcagtgattttatgcaatagctgaagaaaattttctgaagattaagctgtgaaatgtatcaaccctcatctaatttttgtagtacaaaatgacatcctgattccttttaaaaattcacgtttgtaatttatttttctgcatgtattgatcaaataagcctaaaccaaatatgtgcaataaaattgagcctttagatagtatctagtgcattgttaaaaaagattatttctagatatttatgatgtttttgtttacgtagaaatcatgaattcaaatgtttaaaagatgaccatattttcaattttgagtaatacatattattcctactgttttttttcttttgccatgtttctagaaaacagctgtgtaacttattgagcgttattttggtgttactgtataaaacatgcataataaatattcttatttatctcatgt

SEQ ID NO: 294880 - DNA, 1000 bp, Homo Sapiens
cccttccctgatggaccagtccaaaccctgcccagtgaagccttgttatcggtggcaatatggccagtggtctccatgccaagtgcaggaggcccagtgtggagaagggaccagaacaaggaacatttcttgtgtagtaagtgatgggtcagctgatgatttcagcaaagtggtggatgaggaattctgtgctgacattgaactcattatagatggtaataaaaatatggttctggaggaatcctgcagccagccttgcccaggtgactgttatttgaaggactggtcttcctggagcctgtgtcagctgacctgtgtgaatggtgaggatctaggctttggtggaatacaggtcagatccagaccggtgattatacaagaactagagaatcagcatctgtgcccagagcagatgttagaaacaaaatcatgttatgatggacagtgctatgaatataaatggatggccagtgcttggaagggctcttcccgaacagtgtggtgtcaaaggtcagatggtataaatgtaacagggggctgcttggtgatgagccagcctgatgccgacaggtcttgtaacccaccgtgtagtcaaccccactcgtactgtagcgagacaaaaacatgccattgtgaagaagggtacactgaagtcatgtcttctaacagcacccttgagcaatgcacacttatccccgtggtggtattacccaccatggaggacaaaagaggagatgtgaaaaccagtcgggctgtacatccaacccaaccctccagtaacccagcaggacggggaaggacctggtttctacagccatttgggccagatgggagactaaagacctgggtttacggtgtagcagctggggcatttgtgttactcatctttattgtctccatgatttatctagcttgcaaaaagccaaagaaaccccaaagaaggcaaaacaaccgactgaaacctttaaccttagcctatgatggagatgccgacatgtaa

SEQ ID NO: 294881 - DNA, 1000 bp, Homo Sapiens; identical to SEQ ID NO: 224951

SEQ ID NO: 294882 - DNA, 1000 bp, Homo Sapiens
ctctggcagcgttcttcagatttgtggccactgtttctcatttgctggttgactgtttttatttcttaggcttttgctagttttagaaaatagggaagcagcccttgatttgtggattaaaagcaacatttgagcgatgatgcacaacagtccaggaaaatgggcggtggacacttgaggctgaggatgggagttgacatgagcagggagagggaggtgcgcgctgcttatctgtgattgttgctcacctgagtgtggctgattgtgtacatccagcagttacaatttttaaaaattatacttttacatttattttatatttttctcacccccagtaatttccttccaaagaagttcacatgtaataagtagaaattctgtataggaaaaaagcattaaaaatactattataactgcttcatttgctgggaaccattaaaagtaatataaattagctttttccagaaggatccttttgtagcagtgtttatgaatgtaacccccagcaaaatatggctatatattaggggagccagtttggagcagaggcctgaaggtccctgctatgcagccgtggccacagctcgcagcccaagcactgtggagcatccacacctttgatggcaatgcagattggtagcaggttccataggcgtacaaaacagtattaaagctcagtgttttgcatattgttagcatttacaaatatttttgctttagtatgaggaaagtaaggatgggcaaagaagcgatcaaaatagctattgctacaacattttcgaaaacaaagttggggctgtatttctttaaaaagataagcctctaaaaatgcttggcaaaaaaaatatagtgttaaaataggccagtgatattaatgagaaaatgaaagtatgtatcaggaataaagtgatattgcataggagtattgtatttttatgaattttatgccagttgtttacatgtactatatatgttaaattaaaaaaaatcatgagtaatg

SEQ ID NO: 294883 - DNA, 647 bp, Homo Sapiens
gaaagctgggaagagctccgcggccaagttagcaggacactctaacaagtgactgcgcggcccgcgcccggggcggtgactgcggcaagccccctgggtccccgcgcggcgcatcccagcctgggcgggacgctcggccgcggcgaggcgggcaagcctggcagggcagagggagccccggctccgaggttgctcttcgcacccgaggatcagtcttggccccaaagcgcgacgcacaaatccacataacctgaggaccatggatgctgatgagggtcaagacatgtcccaagtttcagggaaggaaagcccccctgtaagcgatactccagatgagggcgatgagcccatgccgatccccgaggacctctccaccacctcgggaggacagcaaagctccaagagtgacagagtcgtgggtaagtgggtcaccagcggcctctgtgcctgtgaaacctttatctctttgtatttttccaagacagtgatgaagggatgcaagtcattttatccattgtgttccctcaactggcatattaaagaaatatggcacaaagatcagcaggatgggggtcctctggtgtgtgggaggatggacactcacaggccagcatggccgtgagagccacacaccccgcaaaatgtcc

SEQ ID NO: 294884 - DNA, 1000 bp, Homo Sapiens; identical to SEQ ID NO: 224952

SEQ ID NO: 294885 - DNA, 711 bp, Homo Sapiens
ggcgagggaggcggaagtgcggtgttctagcaggtggctgctttctctgggctggctgtgggaggctcccgaggtggggacccggccgggatggctgcagcggcggccggggctgggagcgggccctcggcggcccaggagaagcagttcctgccggcgctgctgagtttcttcatctacaacccgcgcttctggccgcgggaaggagaggaggaaaataagattttattttatcatccaaatgaggtagaaaagaatgagaagattagaaatgtcggattgtgtgaagctattgtacagtttacaaggacctttagcccatcaaaacctgcaaaatctttacatacgcagaagaacagacagttctttaatgaaccagaagaaaatttctggatggtcatggttgttcggaatcctataattgaaaaacagtaaagatggaaaaccagttattgaatatcaagaggaggagttgttggtaacgtgtcattgtttatttatttatttatttatttaaatgtattgctgagtatgttgaatgccttccttggtcagatttaaactaggtggcttttgtggaagtttctcggggtatatagcacaggtttatgtttatcatttacatgagcataatctttttaaaatgtatatgcaccctatctcactaataccttctattcctcatctgtattgaaagccctcctaaagtaa

SEQ ID NO: 294886 - DNA, 1000 bp, Homo Sapiens
tgaccctgacaccacagaagtcaatttgaacaacattgagaacatcacaacacagacccttacccgctttgctgaagccctcaaggacaacactgtggtgaagacgttcagtctggccaacacgcatgccgacgacagtgcagccatggccattgcagagatgctcaaagtcaatgagcacatcaccaacgtaaacgtcgagtccaacttcataacgggaaaggggatcctggccatcatgagagctctccagcacaacacggtgctcacggagctgcgtttccataaccagaggcacatcatgggcagccaggtggaaatggagattgtcaagctgctgaaggagaacacgacgctgctgaggctgggataccattttgaactcccaggaccaagaatgagcatgacgagcattttgacaagaaatatggataaacagaggcaaaaacgtttgcaggagcaaaaacagcaggagggatacgatggaggacccaatcttaggaccaaagtctggcaaagaggaacacctagctcttcaccttatgtatctcccaggcactcaccctggtcatccccaaaactccccaaaaaagtccagactgagagtgcccaacgggcattacaaaatggacaaaaaaagaaaaaagggaaaaaggtcaagaaacagccaaacagtattctaaaggaaataaaaaattctctgaggtcagtgcaagagaagaaaatggaagacagttcccgaccttctaccccacagagatcagctcatgagaatctcatggaagcaattcggggaagcagcataaaacagctaaagcggatgacagaagtgccctgtgatgaccaaatgctcgggcaatgtagggtgactgccgccaatgagccaaaatacaatcacatgcatcagagtcagaggctggctcctcaaaacaagccagcttttctggttagagatggacataggatgttggcggcatctatcaacacccagatgatatga

SEQ ID NO: 294887 - DNA, 1000 bp, Homo Sapiens
agcctcgaactcctaggctcaagcgatcctccagcctcagcctccagagcagctggggctacaggtacaggccaccacacctgggtaatttttttttttttttttttgagacagagtctcgctgtgtcacccaggctggaatgcagtggtgcaatctcggctcactgcaacctccacctcctgggttcaagaaattctctgcctcagcctcccaagtagctgggattataggcgactgccaccacacccggttaatttttatatttttagtagagacggggtttcatcatcttggccaggctggtcctgaactcctgacctcgtgatccacccatctctgcctcccaaagtgctgggattacgggcatgagccaccgtgcccggcccatacctgggtaattttttaattttttgtggagatggcatcttgctctgttgcccagggtggtctcaaactcctggcctcaagtgattctctcccacctcagtctcttgtgctaggattgcaggcatgagccattgtgcctggctcagaattctttctgttttgtgaaatctaatagaggacatttctcaactatttggactttgcatgcaatataaaactagtatgtttactgcattttattttatagccccaaagagtcatcttcaatacctaatggagttctaaagctttagggcaagaaacttttgcttccgcaaaaacatctaaacatcgctgggcatggtggctcactcccgtaatcccagcactttgggaggctgaggcgggcggatcatgaggtcaggagattgagaccatcctggctaacacagtgaaaccccatctctactaaaaatacaaaaaattagccaggcgtggtagcatgtgcctatagtcccagctacttgggaggctgaggcaggagaatcgcttgaacccaggaggcataggttgcagtgagccaaggtcgcgccactgcactccagcctggacgacggagtgagactatgtctc

SEQ ID NO: 294888 - DNA, 1000 bp, Homo Sapiens; identical to SEQ ID NO: 119241

SEQ ID NO: 294889 - DNA, 1000 bp, Homo Sapiens; identical to SEQ ID NO: 224953

SEQ ID NO: 294890 - DNA, 1000 bp, Homo Sapiens
ttgttgctgctaccctgttgaagcagctcaaagaggcccaagtacagtatcctctccagacatttgtaattggcatggaagacagccctgatttactggctgctagaaaggtggcaaatcatattggaagtgaacatcatgaagttctctttaactctgaggaaggctttcaggctctggatgaagtcatattttccttggaaacttacaacattacaacagctgatgcttcagtaagtatgtatttaatttccaagtatattcggaagaacacagatagcgtggtgatcttttctggagagggatcagatgaacttattcagggttacatatattttcacaaggctccttctgaaaaagccaaggaggagagtgagaggcttctgagggaactctatttgtttgatgttctccatgcagatcaaactactgctgcccacagccttgaactgagagtcccatttctagatcatcagttttcttcctattacttgtatctgtcaacagaaatgagaattccaaagaatgagatagaaaaacatctcctgagagagacatttgaggactccaatctgatactcaaagagattctctggtgaccaaaagaagtcttcagtgatggaataacttcagttaagaattcctggtttaagattttacagaaatatgttgaacatcaggttgatgatgcaatgatggcaaatgcagcccagaaatttcccttcaatactcctaaaaccaaaggatactactaccatcaaatccttgaacaccatttcccaggccaggctgactggctgagccattactgggtgcccaagtggatcgatgccactgacccttctgcccacacactgacccactacaagtcagctgccaaagcttaggtgctctttatgctgtaatatgaaagcaaatatttcttcttattgtatggggactatgggtagataggggaacaatgaaagtcaactcaggctaacttgaatgtgaaaaaaat

SEQ ID NO: 294891 - DNA, 780 bp, Homo Sapiens
gagcgtgatccttgtacttgtatgaaaaaagttaactgtgaaacagcctcaggcaggtcctccaggcagtatccagaggaaggcattgctatcacagagatgacagctccatgcctgttattgcccctgaagactttccagtgggacaggatgtggtggtggaagacagtgatattgatgatcctgaccctgtgttggcctatgataatggatctcaatatgttggccaagctggtctcgaaatcctagcctcaagcaatcctctagcctcggcctccaaaagcggtggaattacaggcatgggacaccatgccttgcctttaccttttctacatttagatatgtttggacacaaaaatgcccctgggttacaatggcctactgtattcagtacagtaacatgctgtgcaggtttgtggcataggagcaataggttatactacagctataggctataggcctaggtgtgtagtgtggctttgccatttgggtttgtgtaagtgcattctatgatgtttgcacaataaccacaaaatcactaaatgatgcatttcggagactgtatccccaccattgagtgatgcatgactttgtgtgtgtgtgtgcgtgtgtgtgtatatgtgtatatatctcacttattaggcataaaaatgttacaaatttagatgctatagataacagtatatctgatactgtatattactacagatgctgtggggattagaaagataagaatgtcatgaccaactttttataccactaaatatgaaaataggtgta

SEQ ID NO: 294892 - DNA, 1000 bp, Homo Sapiens; identical to SEQ ID NO: 224954

SEQ ID NO: 294893 - DNA, 645 bp, Homo Sapiens
tttggggtttcagcaggtggcccagtgctgagacacaagggagttgtttctggtctgcagacactgaggacacttgctatgtggcgtggtggatggtggcttccaattgtggacaagataaggaccattgcccaggctgtctatggagccaaagatatcgaactctgtcctgaggcacaagtcaaaatagatcgttacactcagcagggttttggaaatttgcccatctgcatggcaaagaccgatctttctctgtctcaccaacctgacaaaaaaggtgtgccaagtgacttcatcttacctatcagtgatgtccgggccagcataggtgctgggttcatttaccctttggtcggaacgagaatctcccctctggctctagttggagaatcccaacccaagcaagtccatctttgaacaataaacatctccagtactgctggctttggaagaccccatggtgagatgctggagcttttttccgctcctgatttcactttctaaatatttacttttactttccatgttcacttgtaggccagatttttttttttcctaccattgaattatttcatcatgttctatttaattattgttttaattggcattggtgaccacaaataataataaatactattaactgat

SEQ ID NO: 294894 - DNA, 1000 bp, Homo Sapiens
gtgaccaaaggaaacttgggaacaattcccacagaaagggcacagcgactcatacaagaagagatggaggtctgtggtgaagcagcagggagatacccaagcaactataatgcttggtcccatcgcatctgggttttacagcacttggccaagctagatgtcaagattcttcttgatgaactatcttctactaaacattgggcatctatgcacgtttcagaccacagtggatttcactaccgccagtttttgcttaagtctttgattagccaaactgtgatagacagttctgtgatggagcaaaatcctttgagaagtgagccagccctagttcctccaaaagatgaagaagcagcagtttcaacagaagaaccaaggattaatcttccccatcttctagaagaagaagttgaattcagcactgatcttattgattcctacccaggacatgaaaccctttggtgtcataggcggcatattttctaccttcagcatcacttaaatggctcccagctgtctcaagcaatggaagtagatggactgaatgactctagcaagcaaggctattcccaggaaaccaaacgcctgaagcggacgccagttccagactccctaggcctagaaatggagcacaggttcattgatcaagtattgtccacctgtcggaacgtggagcaagccaggtttgccagtgcatacaggaaatggctggttactttgagtcaatgaaagaggtgaattagtcctacaaggttccccttttagtgcaatattgctttcttttattatttacatagttgcatgaactgtttactattattggctaaccatatgttcttcgtctttaggttgaaagtccatagtaaatctttcattttatttattttgttaataactggcattcctgtggggataaaataatcgtatagttccttcctgctgaacagcgagtcttaaattttctgtttaacttctcaccctttgtatttctatatgtggg

SEQ ID NO: 294895 - DNA, 1000 bp, Homo Sapiens
actaactgaaacacaaaagcagctacaggagctggaaaacaaagatctttctgatgttgcaatgaaggtaaaattacagaaagagtttcgtaaaaaggtggatgctgcaaagctgagagttcaggtcttacagaagaagcaacaagatagtaagaaactggcatcactgtcaatccaaaatgagaaacgtgctaatgaactagagcagagtgtagatcacatgaaatatcaaaagatacagctacaaagaaaactacaagaagaaaatgaaaaaaggaagcaactggatgcagtaattaagcgggaccagcaaaaaatcaaatgctttgacatgcattgtccatgtggctacacggaaaaagtaccagaaatcaatatctttgactgccgttctcagccacgtaatgtgccagtcatcaccggtagcaaagatttacagaatgtcaacctcacactgcgcatcatcttccggcccgtagctagccagcttcctcacatcttcaccagcagcggagaggaccatgatgagcgtgtgccgccgtccatcacgaacaagatcctcaagtcagtggtggctcgctttgaagctggagaactaatcacccagagagagcagatctccaggcaggtgagcgatgaccttacggagccagcagccacctttgggctcattctggacgacgtgtccttgacatatctgaccttcgggaaggagttcatagaagcggtggaagccaaacagatagctcagcaggaagcagagagggccagatttgtggtggaaaaggctgagcagcagaaaaaggcggccatcatctctgctgagggcgactccaaggtggccgagctgatcaccaactcactggccacagcaggggacgccctgatcgagctgcgcaagctggaagctgtggaggacatcacctaccagcttttacgctctcggaacatcacctacctgcgggcagggcagtccatgcccctgcagctgcgctggtga

SEQ ID NO: 294896 - DNA, 884 bp, Homo Sapiens
atgcagcggcgtggccagagggacctgtggcgtcacaacaaaagctgcgcacgcaaccgctgtccccgcccacctcgggagaggggcggggccggctttccttgggtgcgcgcgcagctttctgtgcgccagttcacactccgggtcagagttcctggcccggtgcacctgagaggtcgctctccgactcccgcgctggaccctcttgcgccattgaaccccctgatccgggggcctcggaccccagggctcaggaggactgaaccaagacttacccgaagttgccgcggggccttccgatcccctttccttccagcaacctttgagaagacgctttactgtccccatgttgagaggccattgcccaagtctggccaggctgatgggaccagcgaggagtctctgcaccttgacattcagaaactgaaggagaagagggacatgctggacaaggagatctcccagttcgtatctgaaggctacagtgtggatgaactggaggaccacattacccagcttcacgagtacaatgacatcaaggatgtggggcagatgctgatgggcaaactagctgtgatccgaggtgtcaccaccaaagagttgtatccagagtttgggctggacatgaatgactgagcaggctcatcgccccttgtccacagctcccagggacagaagggtgtggacatgataaacactgagagcccaaccagcacacctacagagtttccagcgagacaatgccagaagcacttttctagagagcccaagcccaatcaggaggaggctagagaagaggcgggcagggaggaaggggcgttcccagctccaaggttcctgaaatgtcgcagtgatacttgtgtaggggtacatgtactttattt

SEQ ID NO: 294897 - DNA, 697 bp, Homo Sapiens
ggcccctgcgtcaggccagcaggataggtgtgtattgtgacctgagggactgaacgtggagctccaggggaacctcccagccagtgacacgctggccttgggccagacgctgccctgcgcccttgagtgacgctcgggcctccctgcacccacccgctttccctgtggctaatggcttagagtgaaggatggtgggcgtgggcgtgccacgtgggctcagcgtccaccctgccccatgcacgcaggcacccatcacaccagggcccacacacaggctcccatcacaccctgccccatcacagcagtgcccagagggacatggggctcccagctgagggccagcccaaggtcacaggatacaaagtattgatgctgggtgtgtctgagagggtgttgccaaaagagattaacactagagtcagtgggctgcggaaggcagacccacccttcatctggtgggcaccatctaatcagctgccagcgaatgtcaaccagaaaaacgtgaaaaggagacgacaggcctcgcctcccagcctacatctttctcctgtgctggacgcttcctgccctcgaacatcggactccaagttcagctttgagactcgggctggctctccatgctcctcagcttgcagacggcctattgtgggaccttgtgatcgtgtgagttaatacttaataaactccccttcatata

SEQ ID NO: 294898 - DNA, 793 bp, Homo Sapiens
gactagtgacacaatagtcctttcccaaaaggagcacctcccagtcactcagattgtgatgacagacgcaggccaaccacattccgaagcagattatacactggggccactgctctgccgcggagatacaagacttctgaaagtatggagaagagaaagtgtgatttttgaaatattcccttctctttttgggagactgagatgggaggatggcttgagccaaggagttcaacacaagcccggacaagatgagtcattttggaattcagcttccttcaacactgagacttcataccttcatttccctgctttccacggagaactcactgctgacgtgtgcttcttttttaagaccacagtttcctctggggtgtttatggagaacctggggatcacagacttcatcaggattgagctgcggggtaggctggccactctggacaagtcacagggtacccattatttagcaataaaagctttaactcaacaaaatgctctcacagaagtgacattttccttcgatgtggggaatggaccttgtgaggtcacggtgcagtcacccactccctttaatgacaatcagtggcaccacgtgagggcagagagaaatgttaaaggagcgtctcttcaagttgatcagcttcctcagaagatgcagcctgcccctgctgatgggcacgttcgtttacagctcaacagccagctcttcattggtgagtgctggtggtttataactgaatttagtgtgagtccagagagggaccaaaagaaaataagaactgtgatgtactga

SEQ ID NO: 294899 - DNA, 606 bp, Homo Sapiens
atggagggtgcctgggcccttccaacctggaaggaggaggggagagagcaggcagcagggcagggggaagaggaggagtgcccgatctgcacagagccctacgggcccagagagcgccgcctggccctgctgaactgtagccacggcctgtgtgtgggctgcctgcacaggctgctgggctcggcctccagtgccgacctgggccgggtgcgctgcccgctgtgccgccagaagacgcccgtgctggaatgggagatctgccggctacaggaggagctgctacaggccgacgggccctcacgccagccccgccgagaggcccctgcatcctatcaccgcaaccctgggccctggggctccctggagcaccgctaccagctgcgcttcctggcagggcccgtgggcggccggggctgcctgcccttcctgccctgtccaccctgcctgggtgcccggctctggaccctgcgggagcggggaccctgtgcccgccgcctggcgctgctgagcctgctggcccttgagcttctggggctgctgctggtcttcacgccgctcctgctgctgggactgctcttcgtgctcctggaccgctctggccgctga

SEQ ID NO: 294900 - DNA, 1000 bp, Homo Sapiens; identical to SEQ ID NO: 119242

SEQ ID NO: 294901 - DNA, 1000 bp, Homo Sapiens
aggattgctggctctcctgacaccttctcgtggcatccatgtggtttatccagttttctgaaaatgatacctgcaatatatcagacagaagctgatccattagctcaggttcgtcaggtccagagggaagatgacatggacgggaaccacagctgacccataatggacattaagggtactggaagagcaagtgtctctccattgggacttttataatgaaaagactcacaagatagttggtttcttaagtgtcggaaggactttcagatgctaaccaaaccgcatcccctacaaaagacaaatatcccccacaaacttagaagataagcaaacttgactgggcgcagtggctcactcttataatcccagcgctttgggaggccgaggtgggcagatcacctgatgtcaggagttcaagaccagcctggccaacatggtgaaactctgtctctactaaaaatacaaaaattaaccagacgtggtggtgcacgcctgtaatcccagctactcgggaggctgaagcgggagaatcgcttgaaccctggaggcggacgttgcagtgagccgagatcgtgccacagcactctggcctgggcaacagagtcagactccatctaaaaaaaaaaaaaaaagaaagaagaaagaaaaaagaaaagaaaaagaagataagcaaactttacagctctcttctgcatttccattatgggtgttgatatggtttggctgtgtccccacgtaaatctcatcttgaattgtagctcccataatccccacatgtcgtggggggtaattgaatcgtgggggtgggtttttcccatgacagtgagtaagtcgtaggaggtctgatggttgtataaagggcagttcccccgcacactctctcttgcctgcccccacataagacatgccttcgctcctcctttgctttctgcgatgattgtgaggcctccccagccaagtggaactgtgagttcattaaatctctttttctttataaatt

SEQ ID NO: 294902 - DNA, 844 bp, Homo Sapiens
cgccagacatggagggaaggagctacgagtagccgccgagaggccgcggagccagcgacgacggagccagcgaccaccgacccagctgagccgccgcccccgccgcgcccccatggcggccaccaaggacactcatgaggaccatgatacttccactgagaatacagacgagttgaaccatgaccctcagtttgagccaatagtttctcttcctgagcaagaaattaaaacgctggaagaagatgaagaggaactttttaaaatgcgggcaaaatggttgcgatttgcctccgagaacgatctcccagaatggaaggagcgaggcactggtgacgtcaagctcctgaagcacaaggagaaaggggccatccgcctcctcatgcagagggacaaaaccctgaagatctgtgccaaccactacaccacgccgatgatggagctgaagcccaacgcaggtagcgaccgtgcctgggtctggaacacccacgctgacttcgccgacgagtgccccaagccagagctgctggccatccgcttcctgaatgctgagaatgcacagaaattcaaaacaaagtttgaagaatgcaggaaagagatcgaagagagagaaaagaaagcaggatcaggcaaaaacgatcatgccgaaaaagtggcggaaaagctagaagctctctcggtgaaggaagacaccaaggaggatgctgaggagaagcaataaatcgtcttattttattttcttttcctctctttcctttcctttttttaaaaaaattttaccctgcccctctttttcggtttttattctttcatttttacaagggacgttatataaataactgaattc

SEQ ID NO: 294903 - DNA, 1000 bp, Homo Sapiens
gtgtttttaaattaaggatttagaagttcccccaattacaaactggttttaaatattggacatactggttgtaatacctgctttgcatattcacacatggtcaactgggacatgttaaactttgatttgtcaaattttatgctgtgtggaatactaactatatgtattttaacttagttttaatatttgcatttttggggaaaaatcttttttcacttctcgtgatagctgttatatatatatatgctaaatctttatatacagaaatatcagtacttgaacaaattcaaagcacattggtttattaacccttgctccttgcatggctcattaggttcaaattgtaactgacttacattttcaactatatttactttttaaatgcataattttcccattttaaaatctaaactagacatcttaattggtgaaagttgtttaaactacttattgttggtaggcacatcctgtcaagtgaagtagttttataggtatgggtttttttctccctctccaccagggtgggtggaataagttgagtttgccaatgtgtaatatttaaactgttctgtaaaataagtatctggccatttggtatgatttctgtgtgtgaaagttccccaaatcaaaatggtacatccataatcagcaaccatttaacccttccttgttctaaaacaaacaaaaaccaaagggcactggttggcagggtgaggcgggggagtattttaatttttggaatttaggaagcagacagctttactttataagcttggaacagcaacactatacatgaaatataaaccaaaaatctttactgtttctaaatttcctagattgctattatttggtcgtaagttgagtattccacagaaagtggtaattatcttttctgtcttcctccattagaaaattagattaataatggattcccataatgggaataatcaccacttattaaaacacacatagaatgatgaataaaaaaagttttctagga

SEQ ID NO: 294904 - DNA, 1000 bp, Homo Sapiens
acagggacactaggagggcctggcaaggaagtgtgcccttctcgtgggcccaccaaggctgaggcagagcttcctagcagacacaacttggaagggcttctcaggcacccatcctgacccccaggctggagaggagccaaaagcacttgttacatagtgattccttttgccctgtgggcctcagttcttgcagtagttgtgaatctgtgtctgaaatcactactttcttctcggatcctttttctcttttcgagttgttaggatgtgttttgtacagctgtcatttgataaagaaggttgacctctaccaggggcaagtctggcacctttacctagaagtactctgccatgtcttgcccgttcatttatcgtttgttgggtttcatgagggatcccattgaagtagatcccttttatgaagggatcccattgaatgcagcattaactcagaacgtagcataaagtcgtcactgctcccagctgggacgtggtgtcttggcatcccttcctgccgtccttgactctttcccatcttcagttctataattttctcccaaacaaatgctcttttagagttaacactaaagatctggtctttgccgtcaaggttgacagaacagctgttcatggtgtttgcggtgaaacccgtgttctctttcaatgcagtctgtggctttaacgtgtgtcctgtaatttcgccaagatcatttcttgcctctggtaacttgggggtggatttccttgggctctctaggtgtactgctatgtcagatgcaaaatgtcacccagcttcctgtcacatatccttgtctgtgcattcatgcatctacctcattccggttttctttctaatctcatgtattcctgttgtgaggaaatgtgttcttttcccgatccttttgtagttcatacacatgacaattgggtttccacgcacgtgcatgagatgttcctccttcaaaccttgttactatgtcagcacattaactgcctggcatgg

SEQ ID NO: 294905 - DNA, 1000 bp, Homo Sapiens
agccagccgccccgggggaattcccgcctggtgggactccacgtcaccagcccccagctgctcagggtacagcccctcgtgagaaccgagccacagtcatgtttcctacatcagcctcctgctcaggggtttgtacagagaccactgccagccctctaggtggtccctgcaaagagagtcccagctcccaaggctccaaatggacagggcaccatgttgaccccttcgttggcctccagttcgccgactgtaacatgtttcatccagttcaggacgtttatttatttccaacttgcatacaaaacatactgagaaactaaaaccatcgttaaaagtgaagacacgttgagacaggtatctcgacctgccaagtatacagctaaagctgagttcataaaaagggatgatttggccgacggtcatctgccagattctgatgatgattcagaactcagtgtggaagaacatcagagggagaggcaggcgctctttgacttatcaagctgctccctgaggcccaaaagcttcaagtgtcagacttgtaaaaagtcatatatagggaagtggggactggcccagcattttaaacttaatccaggccatggccagctggaccctgagatggtgctatctgagaaagccaatgggagcaccctccgtgggtgcacagaggaaaggacgctcagcctgaccttcccggggctgtccgtgccagcggctccgcgtgagggaggggcccgctcctgcttggtgagagagtcagcacgcggtggcctggtcttactctgtcgcccaggctggagtgcagtggcacaatcttggttcactgcaacctccgtctcccgggttcaagtgattctcctgcctcagcctcctgactactcgggaggctgagacaggagaatcacttgaatccgggaggcggaagttgcagtgagccgagatagcgccactgcactccagcctgggcgacagagtgagactctgtctcaaaaaaaaa

SEQ ID NO: 294906 - DNA, 495 bp, Homo Sapiens
aagaagatgagttttaacagactcctttctgtaaaactgaatgatggaaagttcatgcctattctggggtttggcacctctgttgctaggaaggttgctatgagtaatgtagaagaagccgtccaggtagcaattgatgtaggctaccgccatattgactcagcttatacacacctgaatgaagaaggcatcgggcaggccatccgaaagaagattgccaacggcactgtgaagagaaaagatatattctataccacaaaggtgtggggcaccttttcccgcccagaattggtccaaagaggccttgaaatgtcactgaagaaacttcagctgagctacatggatctttacctttttcatttcccagtacctttgcagcctgggaggagcttttgctgacggatgcacagggaaagatcatgtttgacacagtgggtctctgcagcacatgggaggccctggagaagtgtaaggatgcaggattggccaagtcca

SEQ ID NO: 294907 - DNA, 1000 bp, Homo Sapiens
ggagaccggcacccagacaggtggcgacggcagaggagtaagtgacgcgggcgctggggtccgggggtcccgggggcgcagggtaggggcggcgggaggctccgtggccggccccgggttgaagttgggagagcggccttcattctgaacccatttaggcagcacgggcagccctcctcgccgtgggcggcattagagcccaccctgcccagtcttggggttgctccttgatgctgtctgggaggcttgctcatggtgacatccttatctctccgtgcacgttaccgcattcagagcttgggtcacgtggacactgaactcaggcgaattttctctgagatcccgggagaaggaggacagttctttggaaggttttccagggctgatcacggaaaggatgagaagggagaggtcctggtcggggacacaattacgatggcagtgtaacgccgggaaactttattgcatgaagtccctctcactccctctacctccttcttttacgtggactctgccaaagaccaggataccagaatgcagtggagtgaccaagtgtagtgggaccttgggaacccgagtctggagccaggcagctggggtttgcatcctggttctgcccctccttagctggctgacatggcacaagccacttaccctctctgagccttactgtcttcggtggcaaatggatctgtcaacaggccccattgcctggggttgttactgctgagattaagggaagctcatccatagaagcacttagcgttgtgcctggcacatagtgtatggtggataaatgggaattaggactgaaactcatgccttggtgtgtttttgcagtgatgttttgttctggggtgcatcacaagagacaaagttcttggctgggcatggtggcttaagccaataatcccagcactttgagaggccgaaaggggaggatcgcttcagcccaggagtttaagaccagctgggcaacatagtgaagcctcatatctac

SEQ ID NO: 294908 - DNA, 1000 bp, Homo Sapiens
cggacagctccccgccccgccccgagcctcccgcaccctcccctctgcctctggcagcctcgtcattggctctcccggcccccctctccaagctgccaattctccaacacagagacccaacctacccaggagcttgtcttcttgcctctccagcgcccggggtagcccaggcccgggagagagcagcggagattcgagcctcggagggtggttgccggctttcgagcaggcttggagactctgcctgcgtcctccacttcgtcccggcccttgtcctgtggcaggtgctccgctcaagatgaatctcaacttcacctctcctctacacccggcgtcttctcagaggcccacatccttcttcatcgaggacatcctgctgcacaagcccaagccgctgagagaggtggccccagaccatttcgccagctctctggcctctcgggtgcctctgctagactatggctaccccctcatgcccacacccaccctcttggctcctcacgcccatcaccctctgcataagggagaccaccatcatccttatttcctcaccacctcggggatgccagtcccagcgctgttcccgcacccgcagcacgcggagctgccggggaagcactgccgccgccgcaaagcccgcacggttttctctgactcgcagctctcgggcttggagaagaggttcgagatccagcgctacctgtccacgccagaacgagtggagctggccacggccctcagcctgtccgagacgcaggtgaaaacgtggttccagaaccggcggatgaagcataaaaagcaactgcggaaaagccaagacgaacccaaagcaccagacgggccagaaagccccgagggcagcccccgcggttcagaggccgccaccgccgccgaggctcggctgagcctgcccgccggtcccttcgtgctgaccgagccagaggacgaggtggacattggagacgagggggagctgggctcagggccgcacgtgctctga

SEQ ID NO: 294909 - DNA, 696 bp, Homo Sapiens
atgacgatcaaagttgtagaagttgctctaaacattttcaagatcattttgaactcaatgcataagtaccagccaagggtgcacatcattaagaagaaagaccacacagcctcattgctcaacctgaagtctgaagaatttagaactttcatccttccagaaacaataacgaagctgaaaatagatagcaatccttttgccaaaggattctgggattcctccaggctcactgaccttgagagggaaagtgtggagagcctgattcaaaagcattccaatgcaccttcacccatccgtacctatggaggagaagaagatgtcttgggggatgagagtcagacaaccccaaatcgagggtcagcctttacaacatctgataatttgtctctcagctcctgggtatcatcttcttccagttttcctgggtttcagcacccacagtccctgactgctcttggcaccagcacagcatccatagcaacacccattcctcaccccatccagggttctctgccgccatatagccgactgggaatgcctttgaccccatcggccattgccagctccatgcaagggagtggccccacattcccttcattccacatgccgcgataccatcactattttcagcaggggccctatgctgccattcaaggactacgccattcctctgctgtgatgatgccatttgtatga

SEQ ID NO: 294910 - DNA, 1000 bp, Homo Sapiens
ttggcctcccaaaatgttgggattacaggcattagccaccacgcctggcctatttatttacttattaatggtgttttttgttttttgttttttttttgagatggagtcttgctctatcgtccaggctggagtgcagtgtcacgatcttggctcactgcaacccccgcctcctgggttcaagctattctcctgcctcagcctcccgagtagctgggactacaggcgtctgcaaccacacctggctgatttgtgtatttttagtagagatggggttttaccatattggtcaggctggtctcaaattcctgacgtcaggtgacccacctgccttggcctctcaaaatgttgggattacaggtgttagccactgttcccggcctgtattgtattttaataggtgattattggttttcatattaagatagtgaaatctagcgcaagggtctcaaaaatttgtttgatgattgaaggaatattctgaaaattacctagtatagatgttaggataaagagcagacccttctcaatataggtgagaggagaagttggagggtgtgatgatactcagaagtttttcacagaagagaaattggggcgtgcagtaaacatgtaaaaagattcttactaataagcaggtaggtgcgaatgaaaatcatcatggaaggttatttttaaaactggttctatcattgcctcactttacatattacagagttgtacctactactttgtaagataacttttcttttcaaaactgaagtcaatgtgatagaatggtgagcattattttggaaggccagactaggaggaggtgggaggaggaagtcagactcagcctgtgaacagacgctaaccttggcagaagccaaaacagtcagacagtgttgtgtaaaaatgatcattcaagaagagcgaaacagcaaggtgatttgtgaaagagatttattagaaaatgaaacacatttatacctctgttcaataaaaatctgcttttcgtcaa

SEQ ID NO: 294911 - DNA, 1000 bp, Homo Sapiens
cattctcagcagctcattaaatgcaaatacacacacgcaaagagagagagagaacacattttacatagttttccagctgttgttagtgtcacttaaaactgatctctgctggtagtattcagttgtgagtatagcaagacactgcataggagcattttttttctaaacctttagctaagatttggaaacccaatatttcctaagtagtgaatgtggtctatttatagtaattagcttaggtgacacaccaaacatgatgagttgctcattcaggatagccggtccattgcacaaatgtgtaatatcaggtactctcatgccactcattgcctgcatcagtcagtcatgacctttgcatcagcctttcaatagacagtcatcaggctagtatcttatctcatcactacttgacgatgagttcgccgaattagactgttctataccagtacaacaaccaaaatactttctcatagattatgcataaatacgcaattttgtccatgtcaatgaacctaacaagaatgctttttaaaagtatattttagattcaaacatgctttctagatcagaggttaacttgtctttttgaaatcctggagtcacttataagttagctgcaaactgtagtttcggtaattcaactgcttaagcatttctggactgtttatcaaaatatattacagaatgtgagactaaagtttaaagtctggacctttggtttaatttctagactttccaaagcttttttttttctttttaaaaagcccattgtcaactctcttagaacttcatcaagtaaatggtaccttgcaaatgtaggttgtgtctgaccttctttctttttgtgtgttggtgcctcagatgtatcatgtgctgcttgaactgattctctacagtgttccttcctagtctcaagctgatgatgtgctcaaagatgtatcaaaatccatgtaatgacaccttttagatgtttctaatatgtcaataaatgatatattgc

SEQ ID NO: 294912 - DNA, 1000 bp, Homo Sapiens
cctgaaccggcagcaggacgagaggctgcgggagtggaaagcagagctctgggaggagcagggggagacgggcaggtcctccgtgcagaaagaccgcaccaccatcagccacgcgctctcccagaatcaccagctcgaggagcagctggccaaggtgaagcagatggtggagctggagagccaacaggctcagagtctgcagcggcctcgaggccagtacctgggtcacctgcagcagtacgtggccacttagcagcagcaggtggcagcctatcagcagctgacctctgagaaggaggcgctgcacaggcagttactgctgcagacccagctcatggaccagctgcagcagcaggaagctcagggcaaagcagtggccgagatggcccaccaagagctcaaggaaactcaggagcgcctggaagctaccagccagcagaaccagcagctacagtcccagatgagcctcatggctctccctggggaaggcgatgaactgggcagtaaggaggaggaggaggcgcctcagcccatgccgagcatcttggaggacctgaagagccgggaggccatggtggcctttttaaactcagctttagtcagtgccgaggaggagcagcaggcacagctacatgggcagctgaaggagcaaagggtgtgttgccagcacctggctcacccagtggccttggcccagaaggagccagaggcggcagccccaaccccaaggaccgggggcgattccgcggtatggacagtggatttgcaggtggagaagacaaaatttataatgtttacgatcaagcctggagaggtggtaaataaagatatggcccagagtatttataggtctggtaaaaacctggacaaggatatgtatggtcatgacctagaagccagaagaaagaccaacaggacgccgtccccttcctggtacgcgaagcgctgggagcgaaagggacttccgggagatctaggaagtcgcttctttttctggtag

SEQ ID NO: 294913 - DNA, 1000 bp, Homo Sapiens
ctgtttagtgtccttcccagggattgtcttcatgccaggaacaatccagctgacagcaaaatatatcctctaccggctgcaagcatccaaggccaagtgcattgtggccagtgaggaggtggtcccagtagtggagtccattgcactggagtgtcctgactttaagaccaaactcctggtgtctccacaaagccggaacaggtggctcagtttccaggagttatttcaatccgcctctgaagagcacagctgtgtggaaacaggaagtcaagaaccagtggccatttatttcaccagtgggacgacaggctctcctaagatggcccagcactctcagagcagcttcagcattgggttcaccgtctgtggaagtatattttcttcctggctttatggagcctgtgtttttatgcatcagatggcacagtttgacattgacaccttcctagatacacttaccacttatcccatcacaaccctgtgcagccctcccaccatgtactggatgcttctacaaaaagaccttaagagatataaattcaagaggctgcggcactgcttgacaggaggggaggccctcaccccggaggtgctggagcagtggagggcacaaactgggctggagctacatgagagctatggacagacggaagtgattatagatgaaaatggcaatgttctaccacctggcaaagaaggggaaattgccctcagactaaagtctacacagcccttctgtttcttctctgaatatgacagtccagagaaaactgctgccacggtaaggggagatttttatgtcactggagacagaggaatgatggacagtgatgggtatttctggtttgtcggcagagctgatgatgtcattatttcctctgggtaccgtattgggccatttgaagtggagagtgtgcttgctgagcatccagcagttgtcaaatcagctgttgtcagtagtccatatccaatttgtggagaggtagatgaatatcattaa

SEQ ID NO: 294914 - DNA, 561 bp, Homo Sapiens
atgagcaggtcccaatccccaggcccaggcgaagctgctctgggtgagaccctcctgggcaacatcatcagctactaccaggagagagcaggggagggccggctcgatgtctgcaggcaagcagccctcacccacagggccaggtggctcctgggcaggagggcccctccatggctctgtctgccagaggaagtggcccttgctctgggtggctgctgttgtggggatcccagccctgtcccaaaagtcagccctgagctggtgcatgcactagagttcctggagctgatctctgtcaacctgcttctgtttccctggaggaaggaaatcaggtccctaaagatgtacactgggagctttacctactgggtgcgatctatgctttccagacacaaactggacgccatcctgggcaggctgggctacacggccaccttggagtctgagttctcactggtccaggccatcagcaaagagaatgtcaagcagatggtgttcaagatcttcctggccatcctagaggcatcccacgccctgaggtggaggaagatggacaactag

SEQ ID NO: 294915 - DNA, 684 bp, Homo Sapiens
atgaaggtgtgtgccatggagcaggccgaggggacgccacggcctccaggagtgcagcaacaggccgaggaagaggagggcaccgcggccgggcagctgctgagccctgagaccgtgggctgccccctctctgggacccccgaggagaaggtggaggctgaccacagatccgtctacgtgggcaacgtggactacgggggctccgccgaggagctggaggcccacttcagccgctgtggggaggtccaccgagtcacgatcctgtgtgacaagttctctggacaccccaagggttatgcctacatagagtttgccaccaagggctccgtgcaggccgccgtggagctggaccagagcctcttccggggccgggtcatcaaggtgcgccggtgctccccaggggtgctggccgtgacccccccctctgcaggggtgctggccgtgacggggtgtcatatgacagctatggtgctgccgaaaagaaccaacttccctgggatcagctccacagaccgcgggggccttcgaggacacccaggctccaggggggcacccttcccccacagcggcctccagggcaggccccggctcagaccacaagggcagaaccggacgccggcggcactgacgccactatgggctcggccgctgccctgggtggtagtcagccacgtcatcaagtga

SEQ ID NO: 294916 - DNA, 675 bp, Homo Sapiens
atgggacagctgatcgccaagttaatgagcatcttcgggaaccaggagcacacggtcatcatcgtgggactggacaatgaaggaaagaccaccattctctaccggttcttgaccaatgaggtggtccatatgtgtcccaccattggcagcaacgtggaggagatcattctgccgaagacccacttcttcatgtgggacatagtgagacctgaggctctgagctttatctggaacacatactactccaacactgagtttatcatccttgtgattgacagcacggaccgggatcggctgctgaccactcgggaggagctatataaaatgctggcccatgaggctctacaggatgcttcagtcctgatatttgccaataagcaggacgtgaaggactccatgaggatggtggagatctcccatttccttactctcagcaccatcaaagaccactcgtggcatatacaaggctgctgtgccctcaccagggaaggcgccccagctccttgccgtcacaagaacgaactttcccggcggaacggaggagggaaagggagccaggagctcagtgaggagcgcggggcggctgatgcttctaggggttctctcagcccgaggggctcccgccctgtcccctactctgcaccccttgccttgggagcggctgcagagctctag

SEQ ID NO: 294917 - DNA, 1000 bp, Homo Sapiens
gacaagtggagagaataaaacctgtgggaaaatgcagagggagtcacagcggacagtcctgcatcctaacagagcatttggtggcacggacgaagcaacacaggaggaagttcatggtgaccccacgcgtattatagaagcaatacgggaggaagttcatggtaactccacgcgtattatagaagcaacacgggaggaagttcatggcgaccccacgcatattatggaagcaacacgggaggaagttcatggcgaccccacgcatattatggaagcaatacgggaggaagttcatggcgaccccacgcttattatagaagcaacacgggaggaagttcatggcgactccacgcatattatagaaacaacacgggaggaagttcatggcgaccccacgcatattatggaagcaacacgggaggaagttcatggcgaccccacgcatattatggaaacaatacgggaggaagttcatggcgaccccacgcatattatagaagcaacacgggaggaagttcatggcgactccacgcatattatagaaacaatacgggaggaagttcatggtgaccccacgcatataatacaagtaacacgggaggaagttcatggggaccaggggaaaacgctgcccctccatggagcaggagcaggattcagccttgatcatgtaggagaattcctttccatgcacggcccctggaccaggcgctcggtgggcattctggaaagcgctgcccctccagcaggagcagagttcggccctgatcatgtaggagaattcctctccatgtgcatcccctggaccaggcgctcggcgggcattctggaaagcactcccttccagcaggagcaggattcagggaagacacagaatctctctgcctgcatcagcctaccctttctatgggacagagacaaaaaggaggaaccccctcaggccacacagcattccagccactactatagaagactccacacaaccctaaaatgggaataa

SEQ ID NO: 294918 - DNA, 471 bp, Homo Sapiens
atggggggcccgggctgtggcaaagggacacagtgcaagaatatggcgaccaagtacggcttctgccatgtggggctggaccagctactgagacaggaggctcaaaggagcacgcagcggggccggcagatccgtgacatcacgctgcaggggctcctggtgcccgcgggcatcatcccagatatggtcagtgacaacatgttgtcccgcccggagagccggggcttcctcatcgatggctttccccaggaggtgaagcaggccatggagtttgagcgcatcgtgggccaggcccccagcgtcgtcatcgtgtttgactgctccatggagacgatgctccgacgagtgctacactggggccaggtggagcaccgggcagacgactcggagctggccatccaccagcgcttggacacgcactataccttgtgtgagccggtcttgacctaccagcgcaataacctgctctga

SEQ ID NO: 294919 - DNA, 1000 bp, Homo Sapiens; identical to SEQ ID NO: 119244

SEQ ID NO: 294920 - DNA, 1000 bp, Homo Sapiens
tcattacccaaaaccagaacataatttcacaagggttcctacttctgtattgttttattatctcaaaaatttaaataacatgttctgctgtttattgttcttgttatccactgtattagcaccttccctgatgtgctttggaggttgatcaatgaatttctgagactttctgctggaattactttaagggtgtcttattagatgatgaaaagttggctgagacacccttcaagtgaccatgtcattgttttcttgctatgtctttagcttaatgattaagatacaattctttttaaaatcaaatggtattagttattatgtttcccaaattagaaatcgattttagttaacattttattttattttattctattttatttatttttgagacagagtctcgctctgttgcccaggctggagtacaatggcgcaatctcagctcactccaatctccgcctcccaggttcaagcgatttttctgcctcagcctcccgagtagctgggattacaggcacccactaccatgcccagctaatctttgtatttttagtagagacggggtttcaccatgttggccagtccggtctcgaacttctgacctgaggtgatctgcccaccttggcctcacaaagtgctgagattacaggcttgagccaccacgcctggcctagttagcattttaaagaaacacaaagccataacaaaaaccatcattgtttgtattccacactgttaatgaatgtaaagaggttagaaatgtagtgtttgattaatgatgtttatttttactgtatttaatatgagtaatttttcatcatctttcaagaggaataatgtttattgattaaaggtgagaaatgatagttaagacaccaattccatgtccagatctttgactgtatcatgcattgtacaattgatttcatattttatgaaatgccttaattttcctactataacataaagacaatgatgaataaagtttatgtgtatgattaaa

SEQ ID NO: 294921 - DNA, 1000 bp, Homo Sapiens
cgggtttgccttcccggattgggcctacaagccagagtcatcccctggctcgaggcagatccagctgtggcactttatcctggagctgctgcagaaggaggagtaccagggcgtcatagcctggcagggggactacggggaattcgtcatcaaagaccccgatgaggtggcccggctgtggggtattcgcaaatgcaagccccacatgaattacgacaagctgagccgggccctgcgttactactacaacaagcggattctccacaagaccaaagggaagaggttcacctacaagttcaacttcagcaaagtcgtgcttgtcaattacccgctgctggacatggcggcagctgccactggctccccactcttgctgacccccagtccctttgggggggccccagggccagatgctcctcccctcacccctgagaccctgcaaaccctgttctctgccccacgcctgggagagccaggggcccggacacccctgttcacctccgagacagataaattgcgtctggacagccctttcccattcctgggctctggtgccaccagctattccaagccccctggcctgctgggtccttatggccgcgccttccctgagtacccctggaactttaacccgtacctcacgggccccttccccaagctgcctccctctctctaccccccgcatttctaccccaaccctctggccagttccctgggccacctgccctcgtcaggggcagggggaggccccacagccacgcccctgctggcctcgacaggggagggcctgggccccgagcgcccctcgggcctggcagcggcccctcgcctggcgctgccaggggctgggggtccagaggctgcccttggtgggaaggaggacagcgactcggagctggagatcaccgacgtcagcggctgcagctctgacagcgagggcgatgagggtctcccggcaccccccaaggcaaaggcgggcaaaggggggaccggcagctga

SEQ ID NO: 294922 - DNA, 1000 bp, Homo Sapiens
aatcaatactgtgttctattactcaacaggaatctttaagggtgcaggtgttcaagagcccatctgtgtcaccattggtgtgggtgtggttaatactatcttcactatagtttccctatttctagtggaaagggcagatgagtgtaatgggataagctttgtctgtattggggctatcttggtctttgtggtcttctttgaaattgggccagaccacattccctggtttattgtggctgaactcttcagccagggccctggcccagctgtgatggcagtggccggctgctccacctggacctccaacttcctattcctgctgtgtaatagtgtaaacactggcaaatcacctaatctcacctcaaaaggtgattttgagaatgaaagcagatggctgggagtgtccttcacggttcggttcacatttcacaagccccatgaagtctatctggattttcgtcccggctgtcctcgccgcgacccctcctcagccctgggcgcgcgcacgctggggccccgcggggctggccgcctagcgagcctgccggtcgaccccagccagcgcagcgacggggcgctgcctggcccaggcgcacacggaagtggtgagtgtcaccgggggaggtggaggagccggggcggccgcggtcggcaggcgaggggcgcgcagcccggactggccggaggcgcggccaccgctcttggttctgttaggaaccaggcctcaggtagccagcgagaagtgggaaaggagaccctgggcgagaggaccagggaaggggaacagtgggagagaactacccggggaattgcgaatcccactggaaagggactgattaaccgaaactggggctggtctctggctccctcactccaactccatccgcgcatcgtcggcgaccgggagcatcggaggactaatagacactcctccaaagtcactccccagggtccctgggatgtgggctccttggatgtgtgtttaccacggaacttctag

SEQ ID NO: 294923 - DNA, 1000 bp, Homo Sapiens
ggtgccaccacggcggtccggtgcatggcctcgccagcgatggcgggaggctcttggaggccggcggaaggtccagcgcggagacccacagtgctggggcgtggagggggagagcagcccagcagcgggcgagtggctcagaggtgaccgatcggagccccgcggccctggagtggcggtgatgcctggagccaggcgggcgtggccgggcccggctcttgtgtcagccaggtatcactgccgctgtctaaggccttaccgccctgaagacgcctgctctcctctggaacgcccacgtaattcaattcactcatctggcgccgccgcaaacatccaagcctggggaagttgcgggcaggggcagagggtcccacagatgccagccaagagctcctccagaacgcacgggctgctttttccagggaaggacattgcctttgccagctaccaggaaaacgtccttgtgaacccggattcccattgctaccgacttcgtaaatcccaagttgaccgtcaagtccaacgctcgctgcagacatctagtggacccggcgctcgcggacggaagcggacagacctagctccatcccagcccctggaggagttcccagcgggttgcggggaggaggtggaatcggtgaggtggaacgacgagcaggggcgccaaccctacatcggcaaccccccgcgcggcaccttggaaagaccgcgagtggggacgggcgcctcccgaatgcacagcgggcgccgatgggctttcgcaagagacacccgctgcgtgctccggggctccggggcggggagtgaccacctttctggcagcagcccgtttcccaggacgaggggctgtctgcaccggacgccggttcccggtgcacagcgggacatgccccgcgcggggcggagtggcccgccagctgggaccgcagaggaccgcctttccgaggccaaaaaacgctccgcggcgctgccaaatcgttcctcctcggcgggattctga

SEQ ID NO: 294924 - DNA, 599 bp, Homo Sapiens; identical to SEQ ID NO: 224958

SEQ ID NO: 294925 - DNA, 798 bp, Homo Sapiens
atgtgctattttgttacagagcgtggaactgtgtttactgctacacgtcttgacgtggagagagctgggtttgcaagtgtccagtccttctccattaaggctcgtgactgtgactggcagtgtgcagcaattctagtaactgcctatacccatggcattaatgacaattcacctttctgtgatcagtacctcattaggcacacactcaaggaggaaattgcgaaagatacagtagttgcaaaactcttgtgtcgggaccttgatgagcctcctgatacaatccattatgctcctagctcaggcccagttggttctggacaactctttgagcaagtgccaaatgctgaaaatgtcatccagatcactgttgacattgaaaatgagaatgatgaagcacctgtctgcacaccctctctatataagacagtcatttttgacaatgttgttcttgggacaaatgtcaatggcttcaccctgaactgccacgacggagagtcacaagattttgaaatgcgttttgagatggtttctggaaaagagaaccatcattttggatttgacccaactcgaggttcaaatactccaaaattaattgtgaagaatcctttcaactttgaatgtagagctgaagtacagcagcagtaccatcttgttgtgcatataattgatgataacttgaaatatggcaaatccaccaagcccaggacaggcaccgctgttatagatatttatgtgagaagagccaatatgccacctcctccaaccactagttgtgaagtaaagagttatagaatttaa

SEQ ID NO: 294926 - DNA, 1000 bp, Homo Sapiens
gtcctaagtagacctcacaggtgcataaaatcattaataaagcatgtagcacttgctaattggtgccttaagcttgaatctaatcagaattgcagactcgggtcctctgggaaaaaaacatgtccgtctgtggcacgtgtgagtactaggcccaggggaagagtctgaaaattgaattcttttgtgtgtcctgtgtctcagaagagaactgaatgttcagagcagcgtttgtaagctattaacattcagtatttcgtgttgcaactagaacacattattagatttattcctgtttaattcataatggtgcagaataaaacacacacatctgatttgatttctttttctttttttaagtttcataattgctttttatggctagtgttaatggcaaaaagtcctttccagggctccctgaataatctaccatacctgtatccatagcaggtgatgcttttttttatccccactttgaagacgtgtgtttctgtatttacacataaatcatactattgtatattaaagacagcagtggttgaaaagaatgtgaacactgtagaagttatgttggaaaaaaggagagtaaattgtgtgattaatggggaaggatattggataatgttataccccggactatgaaaaaagctggtggtaaatgggaagaatgtgaaattttaaactgctctcaacgtaggaatcttggtggaaaagttcctacctgaggtctgatatgattcaattatagaatgcaatgagcttggccaaggggactttgaatccagccaaggaaactttgaatctcgacagctctgagaatcacattttcagtgcattgaatatggagtaaactatttagacaaggattctgtgagactaggctacttacctttaattgccagcatttgtaaatgattgtgcaatcttgtgtaatggtcttttattttgactgttttggaaaaaaaatgttttattgtttttttttcccagtaaaaattacttc

SEQ ID NO: 294927 - DNA, 1000 bp, Homo Sapiens
agcggggaagaagagcagacgctcaggagcaagtgagtactgtgaacacctgcagtgtggagaccacgtccatctaattggcgtctatggggcccagtgccaggctgggcccaagtgtcgattcaggaagggtgtctcaggatgcagaagccgcctgatgcgtgcagaggtggataggccttcagcctgctctcctcctctgtcctgcagaccggctttgcattattttgctttcagagaacagagaaatgtgaataagaacagaaacatggcaccggtgtcctcagcttcttccccaccttcacagaactgctgctgcaaactagtagttttgagaaatgatgaaaaacctgtggttttccccaaattccaagaatcagaggcagattctaggagggtgaagatgccccgcgctcctcgctgtcgcttgtcatctcgcacagggtggttccgtttctggtatttggtgccggaattaagcaaccaccatgttgagcaaaaaggcaagaccaccaagaagcgccctcagtgtgcaacgtccaaggtgtttgccacgtttgaccagtcacagattcaggagttcaaagaggccttcaacatgattgatcagaacagagatggtttcatcagcaaggaagatttgcatggtatgcttgcttctctagggaagaatcccactgatgcatgccttgatgccgtgatgaatgaggcaccagggcccattaacttcaccatgttgctcgccatgtttggtaagaagttaaatggcacagatcctgaagacgtcatcagaaatgcttttgcttgctttgatgaagaagcaacaggcaccattcaggaagattacctgagagagctgctgacaaccgtgggggatcagtttacggatgaggaagtggatgagctgtacacagaagcacctattgacaaaaaggggaatttcaattacatcgaattcacaagcatcctgaaacatggagtaaaagacaaagatgactga

SEQ ID NO: 294928 - DNA, 525 bp, Homo Sapiens
atgccaacagcgcaggtttggcaggagacttggcggtacagcacaagggaacagccccacagccaaaccagaaagaccgggactcagagttgtgccaatgagtggtctacacaagaagacagtatgtttgcaaaagcaaaacttcatatttctcttattcctccatttgtggccgagagccaagccagacagttggaggagaaacttcaaaccatggaccagaccgtcaagtccctgatggcctcagaggaggagtattccaccaaagaagagaaatatgaaaaggagatgaaactgctggaggagaaactgaaggaggctgagaccagagcagagtttgtcgaaaggtctgtggcaaagttggagaaaaccaccgatgacctagaagagacgttggccagtgccaaggaggaaacgtggagattcatcagacctgggaccagaccctactggaactcagcaacctgtgaggctggccctgcccgcagccaagctatagttgcggccccaaccgaatcaaactga

SEQ ID NO: 294929 - DNA, 1000 bp, Homo Sapiens
ccagagcctgttcttctgcctgagctgggagtcagaggcccggagctgcccgatggtctctgcagaaagttggaggccgtgtccccccatcgctattccagagcgcctggcccggccgcggcggaacagagcgcgcaccactgtcggcagcccaggccttggcgatcgaactggctcagccgcctgcttcgaccgcaggtccgcaagagcctcagccctagctgcgcgccactcttcgcaaagctgccgaagcggacaggctaaggttaccctgcccaggggcccggtgggacctctgggtgtcaccgctgcgctcgtggtggtcgcggctaggtctccccacttcggcacggatggcaaaggcgccagcgcgcaagcctgggaggctagaagtgccgggcgcccttggaactcagagcccaagtcagagcggcagactcttctgtcccactgcgaccccgggcctagtctcgcgtggctgggggcagtgggaggtgtgtctcctactgaggacgaggagtcgtcggacttcagtcccgcgcagccacgttggaaacggcgacctagcggcttggcaacccaggaggagggggcgtttggagaccgaggatttgcagcggctctgcgcgcaaagcctgcccacagcgcgcgcagactggccagagccaggtcctctctgaggctccgcgggaaaaagagggcggaaagcgagttgcggggtgaacccgccccggcgctggcccgcggccttcgggcctggagcacctttcccatgtccagtccccatcccgtgcgcacccaggctgcgggtggccggcaccaactgacctgcaccgcgcatcctcctcgggggcccgggccggggttgcagccgaggcgaatgcagacgaacgttgcggaagtggacgcgccctgcgcgccgccgctcggcttctaccgccgcaggggtggggcgcagggccgggggtcgccgagcattattggaacgaaaacgaaataa

SEQ ID NO: 294930 - DNA, 1000 bp, Homo Sapiens
aggctgctggagatctcaaatcaagtgtctccactgccacgggatttcagacacttttgacccttacctggacatcgccctggatatccaggcagctcagagtgtcaagcaagctttggaacagttggtgaagcccgaagaactcaatggagagaatgcctatccttgcggtctttgtctccagagggcgccggcctccaacacgttaactttacacacttctgccaaggtcctcatccttgtcttgaagagattctgcgatgtcacaggcaacaaacttgccaagaatgtgcaatatcctgagtgccttgacatgcagccatacatgtctcagcagaacacaggacctcttgtctatgtcctctatgctgtgctggtccacgctgggtggagttgtcacaacggatattacttctcttatgtcaaagctcaagaaggccagtggtataaaatggatgatgccgaggtcactgcctgtagcatcacttctgtcctgagtcaacaggcctatgtcctcttttacatccagaagagtgaatgggaaagacacagtgagagtgtgtcaagaggcagggaaccaagagcccttggcgctgaagacacagacaggccagcaacgcaaggagagctcaagagagaccacccttgcctccaggtacccgagttggacgagcacttggtggaaagagccactgaggaaagcaccttagaccactggaaattcccccaagagcaaaacaaaatgaagcctgagttcaacgtcagaaaagttgaaggtaccctgcctcccaacgtacttgtgattcatcaatcaaaatacaagtgtgggatgaaaaaccaccatcctgaacagcaaagctccctgctaaacctctcttcgatgaactcgacagatcaggagtccatgaacactggcacactcgcttctctgcaagggaggaccaggagatccaaagggaagaacaaacacagcaagagatctctgcttgtgtgccagtga

SEQ ID NO: 294931 - DNA, 303 bp, Homo Sapiens
atggcctgcatgatgcttctccttgggctccttgcttatgggtcaggggtggattctcagtctgtggtgacccaggagccatcactctcagggtctcctggagggacggtcacactcacctgtgccctgagctctggctcagtctctaccagtcactaccccaggtggtaccagcagaccccaggccaggctccacacatgctcatctgcagcccaaacacctgcccttctggggtccctggtcgcttctctggctccatccttgggaacaaagctgccctcaccatcacggggactcagtag

SEQ ID NO: 294932 - DNA, 681 bp, Homo Sapiens
atgtcctgccctcctgcccacattcttatcaaggcccctgagcagagtcgagcttggggctcagaagagttgaagcagagcccacaagaaacactgccaggcctgaggcccagggacctcttgagcagtaatgtggctgagttggaggtgttcctgctgctcgagaaccagaagaaggaacccacacaaaaggcagaaatgctgaagcatatcatccaacagcaaatggatcacttccctgaggtcctcagcaaagcctctgagagcctagaaggacatctggaatatgctgagagagttgaagatgctgaggggaagcacatcatttctgaaagtcccagaaagcttttcgttgaagatgttttgcagcaacaatatctgaatttgaggcagatgcccaacagggatcctatatgctacaaatttctgtggggccctcatgaccacactgaacccaaaaccgtgtacattttggggtttgtggacaaaattattcacgttgacttctggtcctacagttcagtgtgcaaagaggtcctgagagaaaatcaggacaaagtccaagccaggatttcagggaataggggtactaatgccatggagtgtgcaggggtcagggccattgccagttgtacaactggtgccagtgctatggccagcaggaaacataagtcaggctga

SEQ ID NO: 294933 - DNA, 801 bp, Homo Sapiens
atgaggatctggtggctctggcgggtacagcacgtgacggcggctccatcttctgtgcgtgcatgggtaggcgtcctgcgtccccaacaagtccctgagaaccaactcccaaactctcctgtccatctaaagcgggatggtgttgacagagaccaccttgggggctgtgacacccagttgacaactgtgcagggagttgtcacaagtttctgtggtgattatggcgtgattgatgagtcgatctacttcagtagtgatgttgtgactggcaacgtgcctctaaaagttggacaaaaagttaatgtggttgtggaagaagataaaatactttatggattgagagcaatcaaggtggatgttgtgcctcaccctcttaacgatgatggaccctcagactcaaaaatcagagttttaaatggatgtgttacttctataagtgaagatactgtttatattagtaacatcatttatttccctatggacattgtttctgaagattttgtgccttataagggcaactggttaaaagttgaatattccactgaaccaggcttcttaaacttcaaggcaagctctgtgaagcccactcgttgtattcatgcggaagcggtccgcattactcacatacgtggaagaagtggggtgataaagaatactatctttttcaccttggattctgtgaaacttcctgatggatacgtacctcaagtagatgatatcgtcaatgtggtcatggtggagagcattcagttctgctttaagtggagagcggtttctatcaccccagtacaaaaatcatga

SEQ ID NO: 294934 - DNA, 1000 bp, Homo Sapiens
cagggcctaccgggaattgagacccttttccaggagggagcagccaggctgcgaggaagagtcctttgagagctgggtggagcatgccaaggatatgctgcagctgtggtgccatgcgtcggaaagggagaagaagaggtggctgctggagagcttgggcggcccggccctggaagtcgtgagcggcctcctggaggaagataccaacttgtccgcgctggactgcctggcggcgctggggcaggtatttaggaaccaggacactcgaatgacttcgaggctgaagttcctgacctgcacgcaggggccccaggaggggctgtttgccttcgtggtgcgcctggaaggcctgctgcagagggctgtggagaagggggccgtctgcccagccttggccaattacctgcgactacagcaggtgctgtcttgggcccgccccagcgaggcactccaggataccctgagagggatgcagctggagaagaggccacctggcttcctggggctgctccggctcatccgggagatggaggcatgggcagccttcccagcgaggagccagcagggtgtggcctgggcagcggccccagtggagagtgaagacccagctgctgcccaggcctccccagcccaggggaatgccagcgaggctggtcccggagcagaagatgctgccgaggccgcttctgccaccaaagaggctgcaaggggagcccctgccgctggggaaggtgaaagtgcccctgcaggccccgaaggcctaggtcaggcaaggcccatagaggtcccctggggctcctccccagcccggatgagcagtgctgtctgggtgttcccaagaggtcttagctggggtccagagggcctcatccaggtgagaggccaggaagccaggaaacccccactggaggggctccagaccatcttggaggagccggaaaacgaggatgaggatggggccggggacgagggccagcccaagtcctcccagggcaaatag

SEQ ID NO: 294935 - DNA, 1000 bp, Homo Sapiens
ggaggaggctcggggacggaaggcgtgggggttcctatggcgtgggtggagcagcacaggccttggtgtgtgcggtgccgaggagggcactgccttcaggatggaggctgtacaggaggggcggccggggtggagagtgagcaggcggctttgggagttggaggcagtgctggtggcagatgacataatggcggaggtggaggtggtggcccaggaggaggccctcgtggaggggcaggtggaggcccagcgggcacagcctggccctgggcccatgaccccagagtctgcactggaggagctgctggccgttcaggtggagctggagccggttaatgcccaagccaggaaggccttttctcggcagcgggaaaagatggagcggaggcgcaagccccacctagaccgcagaggcgccatcatccagagcgtccctggcttctgggccaatgttgggagttgccacggacaaatgtggctgtggaaagccggagcaggcgtgggtactattgtcctgcatgcggcagagaaacccttggtgatgccgagcagcagacgtttggggcatctttttgaagagcagaagcgagttcagagcagaagacgtttttcaattgcacaccacccccagatgtcagccctgatcactgaccaagatgaagacatgctgagctacatgatccacctggaggtggaagaagtgaagcatccagttcacctgtgcaagatcatgttgttgtttcagagtaacccttacttccagaataaagtgattaccaaggaatatctggtgaacatcacagaatacagggcttctcattccactccaattgattggtatccagattatgaagtggaggcctatcgccgcaaccaccacaacaggagcctgaattcttcaactggttctctgaccacaacttcgcaggatctaacaggattgctgagatcctatgtaaggacctgtggtgcaatcccctgcaatcctacaagaggatga

SEQ ID NO: 294936 - DNA, 1000 bp, Homo Sapiens
gggtcagcccaaccacagggtcctgcgggacggcgcccacggctccgcagcctttcgggcgcgcggccgcacgctggagccctacccgttggtgatcgcgggggagcacaacatcccgtggctgctgcacctgcccggctcggggcgcctcgtggagggcgaggtctacgcggtagacgagcggatgctgcgctttctggatgacttcgagagttgcccggccctgtaccagcgcacggtgctgcgggtacagctgctggaggaccgggccccgggcgcagaggagccgccagcgcccaccgcggtgcagtgcttcgtgtacagcagggccaccttcccgccggagtgggcccagctcccgcaccatgacagctacgactccgaggggccgcacgggctgcgctacaacccccgggagaacagataagggggacgggcagggtgggcctaggtttgagagccctggggctccaagatgcgcccagcccatgctgggtgaaggcggaagccgaacagggccctttccaatgaatctgccggaaaggaaccaatctttcagtggcagctgattttacaaataatgttgagatacgaatagcaaggtgcttccctcccatctttctacctggtaagaaaaatttaggattttaactcccctaaatgacatttagagaactcgtgttatgcctaattcttcttcctcctcgtgttgtttctgctgttggctctgctttgagctcaagataataataaatatttaggatcagtgtaaagacttggtgttgccgctagattttagcagccctactatactgattctggcctgtaacccctgagaaagccgattttacacggctgggtagaatttgtagaaaagatccacagggcaagcatgctgtatatcagagtgcgtatagcaccattcttcctaattttcagatcaagcttcacagcaaatattaaagattatttaaatttgaagtcgatgttttgggaaatc

SEQ ID NO: 294937 - DNA, 1000 bp, Homo Sapiens; identical to SEQ ID NO: 119247

SEQ ID NO: 294938 - DNA, 940 bp, Homo Sapiens
atgctctggacagtgctgaggttctgcaggtgctccggcttgattttcagagtgctgtgtcagggggagacagcagaaaacacactgttttccttaaaatctcaaaggaccggtggccccagacactctgaggccaccaggaggcttcatgcacgtctccaggagtgtgacatgttttcacgccacatctccgtgctccagcggattcatgaagttgggagcccactgccgccgcctctggggctgcctggggagatggggctgaagaaagtgacctgcgcctggcctgtgcctgcttggaggtttctaagtgtagacgaagtgtcagaggagtccatgtccaccaggcaaacctggggccctgatctgacctcctcactggctgagatcacagtgcctgaattcccgttctgcaaaacccgcggtccacagctgacgctgggagagaggctccaggatcttgggaatggggagacgttttatgtaatcggagagcagaaatcttcctcctgtctatctctggagggtcttgaagaaagaagaaattctgtattatccaaacagatggttatgaggatctactttcaaccttccacgttatgtgctgtgaatcaagtcttcaccctaccatttatccattgtctccaagagcttttgatatatcaggaaatagggaagccctacatatggaaaagtgtaaggattgtagtggtgagatgtgtgttccagactctctggattcaaatcccagctctgctactcataacagtacatgctgcccatgcataaacaatcaaagttaaaccgagaaaagatggatacacatggagctgctaccgattgggaaaggatttggttattttattatttcataatgctgagctgtgatggacctgacgacatctgagaaaaaaaaaattgcccaaatgaaaaaataaat

SEQ ID NO: 294939 - DNA, 775 bp, Homo Sapiens
atggtcatgctgcaaattcccgtggccagcacccgaggcctgctggctccgatctgggccacgtgtacaaccagcgtctccgtgcgcctgtccgctccaacacctgacattttccttcaactccaccctcccctccccgagtccacagacacacacccacccacacgcctcttcccttcccctccaccctcagtcagcggcagagtcagtccatccaataggcaggagcccaaaagactgtccacggacagctgtcctctcgcccaggagagtggggctgcacacagcagcaggcccaggaggaaatcgtgctttgatagccccaggcatcgtatttcatcgtatttcacaactgctccatttcctgtggtctattcttgcacagttaggtctacaagccaggttcaaggccaccaactgaggcacctgtcccgagacaggaccattctaatctgccctgaaaaggacatcccattgatcatactaaatttgtggatggatacctatctgttgaccagaccctccctcttcaatgaaaactgcctctccttccactccatctgtgaggcacccttggatgctgacatgtgcttacataggacttcctgtccacagccagaattagccagaattcactgacccatggttggactcctaaaatactcaagatgagagacatgttacttttctttactatagtaactatcaaatgcatcccataaccttatgttgtaaatgtcaaatatgcacaataaaatttatttgaaaaaataaa

SEQ ID NO: 294940 - DNA, 1000 bp, Homo Sapiens
tctacccacccaaccatccaccaattgatccagccagccacccatctatccatccatctgcccatccattcgtcagcccacccatccatccactcacccaccaatctattcatgcaccaatccactcatccatctatccatctatccatccatccacacatccatccagctacctatccatctacccacccacctcttcatccacctgcccatccatccatctattcatccatctacctatccacttgcctatccatctattcacccacccatctatttatccatccacccacccatccatccatctgcccatatatgcatacatacatacacacacccattcacccatccacccacccatttatccatccatcttccaattcatccagccagccactcatctatccatccacctgcttatccatccatctatgcacctacacatccatccatccatccaactacccatacacccaaccatccatccatccacccacctatccatttattcacccatccatctattcatccattcactcacccatccatccatacacccacccatctatctatctacccatctatctatctattcatttacccatccatacatctatccatccatccatccacccacctatccatccatccatccatccacctactcatccatacacccacccatccacgcatctcatcaatcatttatttattcagcaaatattaattgagctcttgtttagagaatggggaatcaggtcaaagaaatatatatttgagcttctctacatgccaaatacagttaaatgtcttaattgcattatgttatttaactttcacagcactgtaggagaagggcatattggcctagttttacagatgagaaaattcagaaggagtaagcaggttagcccacatcaccaagctcatgagcagcaggatccagattcaaacccaagaccctttttttccccagacaatgtcttttcttctccactac

SEQ ID NO: 294941 - DNA, 775 bp, Homo Sapiens
ctcaacattgtgggtttgcaattcagccatcatcatctcttcaatcaagagcaagtattatgcgcaaggcttctccaactttatgaatgttttcaggacaggcagcaacagaatgtatctcagctgctttatgagaagctttaaaaaattgtacaagtaataccggaatacgttctccctggaaaagattaattgtagaagtgtcaagatgtgaaagccctacttcgttcatcacctcatgctgaaagcactgacagatgctaccaaattgtcaaatgaaaattcagaaattaaccagctgaccagaaaatctttacaagattattattggcaaataagtaatacaaaacagatgtatgacttagaaaggggaaaggacctctccctactacacagtatattacgaacttggaaacagattaaatctcttcgacatgggcaagggtttacaagcaccccaataaagttacaggttcagaggattaaaatgaataaatgtgatgaacaagagcaaatctcagaaatgtctgaaactgagaagaaaaatgaaggaaaagaacttaagaatgggaaaaaactggaggacacccatataaaaagactatctaaacaaggggaagaatacaggagccataaaatgaaagttggagggagagagaagaaagaggaggaagaagatatttgtgctggaaaacctagactaaaacttagtggaagtcaaggcaaaaggatgtatggtgttttatatctttgcaaagccattgccatccgatag

SEQ ID NO: 294942 - DNA, 1000 bp, Homo Sapiens
gggataggatccaagtctaaatatgaaattcatttatgtttcatataccacttatacacatagtctgaaggtaattttttacaatatttttaactatatcatgcatgaaacaaagtttgtttatgtcaagtcaggtgtggaattttccacttgaggcatcatgttggcactcaaaaagttttggattttggagcattccagatttcagattttcaaattagggatgccccatctatatctccattttattgaagaggaatctgaagcttagagatgttaagcccaaggcacgcaaaccataaagggcagaaccagaattccaaccatcaagatgtcttgttttcccaccacactcgaaatccggaagagcttattcttacctatcactgtttccctaacaccctgtacagtacctgatatacggaacacatttttaattatctgagcaagaaatggagaaagaggaaaatgaaagagagtagaaaaggaaaacgtgataaagaggggtttaataaaggaaggagtaagagaaagaaagagagagagggacctagtaagtgaaaacgatgaggcttattcctccacgacctgactgcacagatgtcgctcaattccccctgcagtctccccagcactctctcccctccactctcccacctcttgtgtgtaggtcccttcctctgtctgcaacgaaaaacgtcctgtggaaaccaggaagtcaaccctatttgagaagtcaaaatgctgctacaaaagccttccctgacccagaagagaaatcgcaatgtcaccaggtaaggagggaggctggttcttggtcagagggtggccagccatcagccagagtagacttcagatgaaagctgtgtccacatcaaggaaattccttcaatggaaaagtccagggaagtcgagaccaaaaagaagatgtcaatgtgaccttcctagatgctacattaaagccatttgaggctattaaattcattctttcttttatcaa

SEQ ID NO: 294943 - DNA, 559 bp, Homo Sapiens
atgatccagaagtctgacatcgagcttctgctcattagccgcaaccctcccctgggtcctggaatctgttctcaggtgaccgtggaggaggcgatgctgagtgatcaacacctcggatctccagctgtcggtgcaatgaccaagaaggccttgggaagccacacttcagccaagtggggccctccacctaaggccgagcatgaaccgcatcacacggccacccccagttgcaacagagactgggaaggtggagtatcagatggaaatcctattgtcaggacccaggctgagcatgctgcctccccacacgaaaccagacttctgttagcaagaaagatacaagatcgccggccactatggttattgacatgttgtgctgtcatcttccaaaaactgacgagggccaggtgcggtggcacacacctgtaatcccaacatcctggaggctgaggcaagaggatcacttgaggccaggactttgagactagcttgggcaacatagcgagacccccatctctacaaaaaataaaaataaaaattttaataaaaaaaatagccg

SEQ ID NO: 294944 - DNA, 1000 bp, Homo Sapiens
gtaggataaaattcacagatgtgaaagttgtggtaatgaaaattggatcctgaccaacatggttttctagaagagaaaggacaaaggcctttcacgggctggtttaggggataattgcatgggaaaggaaaattaaaatgacctgtggatggagcctctaaacatttaatgtactgctgttttatggctttagcatcaaagtgtgttgttaataccaatatacatttaattgaactaggaaagtttataagtctcccattcagggactactgcagtatagagagatgtagtctaaaagaaacaacatacaaccgcaagaggaaaagaaataaaagcacaggtttagttgaaaacttagttactcctgtagtactcaggccattttccattataaccagctatgtggactttgcagtcaccaaggtgaaatatcctgagtactccaagagtgacctttaaaaagataggcacctcttaggctgctactgagctcttgaggaaacaacagcggccagaggagcttcctgaaagcgtaactgattcatttatgcatactgcaggcagttatcactatcctgagagtcatcctattggaaatgttgataaggaatttgttcttgactttagctgcagtcatcagtgacaccacctcagctctggatggcacttaagtcagcctcaattcattggccagggtggttatgggtgatagaattgctcttcctctttgtgggccaaattggagtcagtgcaatcactaatacatcccactgtgactggattaatgtctcagaccgagtacagggtcaatacagaaacttgagaatgccacttggctttctaaggtagatcctgatggtttatgattgttggtttttttttcctaccttgttggatacaggcccttggatatggctgaagtcagtactgattggtcttatcctgttacatagagttctgttgatagtacctttaattaaatgtaataaaatactttgaa

SEQ ID NO: 294945 - DNA, 1000 bp, Homo Sapiens; identical to SEQ ID NO: 224961

SEQ ID NO: 294946 - DNA, 1000 bp, Homo Sapiens
ggctgttcctgcgggtggagtggagacattccaggaagagaaaactaagcacagggaagctaaatactgagccctggaggggtcaggatatgggcctcatcatcatctggtgctgtttcacactgcgctcgggtcaggccgctggggacctgggagacatcctgctgctgcaggagtcctgtgcagagcagaggagagagcagtttggcaagtgcaggggtcccactcttcttttggttggtggcagggagcaggtggggcctaacctgggtggacagtgtctacctcccttctgtgcattttgcattggccttaattggttctcccgggatagtcacgaaagcccgacctttgttccagaaaagaacactgagcctcagagaggtcaagcaattggcccaagatcacacagcctgcaagaaacagagatgggactcagaccctggtctatttggctcccatgtgccttactactatgttatacccacccctccagtctccttctaggtcaccagctgggatgggaggccaactctccaaatcagaagagctttattgaaaaacaaatgacaaataaaagttgtatatattcaaggtatacaatgtgatgctttgatacattgtgaaatgatgacctcagtcaagctaattaagatatccatcacttcctggaggtacctttgtgtctatatgtggtgagaatacttacaacctactctctgaaaatttgaaacatacaacccattgttattaactacagtcacctgatggataagagagctcttggctagtataaatagagcaagtattttccataaaaatatggaaaataagcaagtgttttccataaatagagcaagtattttccataaaatatcactaaaaatatgcaggaaaggcctgaattagttcatatggcagatattggtataatcttttggttttcaggattttttgaagtctaaagtgggcatgcttacaataaattaatttaaaagtg

SEQ ID NO: 294947 - DNA, 712 bp, Homo Sapiens
aaattgtgcggttaacggtcaaagcccccctgcctactttgacactcatttaaagatgacagggaacaatagagatttgttctgtgcaaccctttcttgttatgccggcgacatcagctccgcacatgaaactgcccgatatttcattccacctgccacctccctcccgcctcggtcgactctctcctctgctactttgcttgtccccactttaacacaaagagacagctctgtgttcacagcacctaacagtgttgaaaaagaatgctatttaaaacccgagttgagacatcacctttccaaacccatgactgcttcctggctcactaaacacgaaccagaaattaatgctgcaaagagcagagacaagagattcgactgtgttagccaggatggtctcgatctcctgacttcgtgatctgcccgcctcagcctcccaaagtgctgggattacaggcttgagccactgtgcctggcttcaggctgggatttttatagcttattatggcaagggaggagacggagagtaaaagaagaaggaagagcatacacagtcaccccttgtgtgacaaatatgcaagaaataaagataaatgtgtacaattcttacaattttacttttctgaattttgctattgcactgaatgatttgtgataagacagatggggatgaaaaatatacttattaaataaacagctattaaaagcccct

SEQ ID NO: 294948 - DNA, 771 bp, Homo Sapiens
aataagctgattctataggacagaaaaaggaagagggcaggggtcataaggggatgtaagcataagatacccaagccagaaacagcaacccttccaggtccccttcccccacgtggaagctttcctttcactttcgctttaataaatcttgccgcagcacactctctaatcgagctgtaacactcgccactgccgtccacggcttcattccttgaagccgtgagaccacgaacccttcgattgagaagaaccttcggtcggaagaagacttctcgtctcagtaacaataacaagaaaaacagcctagactagacgcacatcaggaagacagttaatcccgtcatgtattgacccggaaacatcatctcatttgcctataagacagagagagagaatgatagaaatgctggaagaacgagccttggggcggtatcgcccagatctgaatccacacagcagctgcttcggtccctgtaactcaaggcttcctcttaatcctctgtcctccatcaacacctggctgagcaggaacaactatgacctaggaccagggccttcaggaatcttcacccctaacttgaacttcataacactggagagagagactgtggaatggaatgactctccagagctgcagattgaaggcatattttcatctgactttgatctcaatggcgggaacaccttcatggcccctttatagctggtatgttttcttcttatggacaatgagaaacatgtaataaactgtgtttccttctcgctaggaaa

SEQ ID NO: 294949 - DNA, 1000 bp, Homo Sapiens
aaagaaagtgcccggaatctcagggcgcgacttccggggcgacgggcggcggcggagaggcgctccccgggcttcctacccggcaggaggccgcggcgccgggacctcgcctgccctcaccgcgcgccacctctcgggagacgccgcgaatctctccagggaatcccgggcagcggcgcagacccagcaaggaccggcagcaggccgagaccggccgtcttgggcgagagcagcgggacacgagcccccgggcgcccgctgggagcgcggggaggctctgggctcagggaagctgcgctccgagtggccttggaggacggtcaaggagcccgggccccgcggcggccgggagtggacgcgactggtccgcgccggccgcaggggaaggggcgggtcggcgctgcctgagctctatctgctctaatggctggggtagatccgcggagatacttgaataccaggccgaacgcttccccaaggcgtgttgtagacaacgggcccatttgagcatgtgcaaagaacaaatttcatccatttttctgtctaaaacattcaaagactcaaatctagacaatagtttctctgaggtagaagtgttgggggtggggggtgggtgggaataaactaaaagttggggtaatgagcttgtttcttgtctattttgtctgactatagatttacaaaaggagcaccctgctttactcagtaataccaggccctcctagaaacttacccaccagcttcacatggcatgatcatttgatgaatcgctttttagtttcccattccggacaaatatccacccaagagaaccaatcataacactggatgtattaacgcatgtcaagactctcacttctctgtagaaatgagaaataaatgtcgattgttggttttctgtagacttgtgatcacgcccaggaactgtcattttccagttaccagaatctgaatcattgtctaatgtgccacgtatataacaatatatcactaacagcga

SEQ ID NO: 294950 - DNA, 704 bp, Homo Sapiens
gaaaatcttggcatagatatggaataaatattaatgtctccaaaatcttctcaaaatttatactatggcacaaacaagttaaatgtaggtctcttcctcaccatctatcttaggtctctttctcatattttcctccaatctctactgctgggaaggcgagggacatggaggggagagatcacctcaagtaggcacaggcttgaaagtccaagatcaaggtaccagcatctggtgaggactgcaatcgacttccaagatgacgccttgaatgccatacccaccagaaggctggtacactgtgtcctcacatggcagaaggcagaagggaacagagagacagatgccttccatcaagccctttgattacagcatgaatgcataagtgagagtggagctttcatgaactgaatgcctccccaaaggccccaccttccaacactgttgcagtgggattaggtttctaacatatgaattttgggagacacattcagaccatagcagcaaagctgtagactaattgaagaattagtctgtaggcaaataagtacaataagatgttctgagagaaggttgtgtatgacactgcaatgtaggaaatgtgttgaatttgtgcttgttgagtaaaaaagtaaattgtatttgctaaatattttgtcttcattatcaactgatctgtataaacaataaaagtattctattatctt

SEQ ID NO: 294951 - DNA, 1000 bp, Homo Sapiens; identical to SEQ ID NO: 119248

SEQ ID NO: 294952 - DNA, 1000 bp, Homo Sapiens
gtgtatgagtggaatgaagtggtcagatgagagagcgcggcggagatggagagaagcggagaacttgatgcatattttggaggcaaaatcaacaagattggctgatggattaaaagcagaagattttgccatagagaaatctcttgcttttcaatctctccaatttgggaaccaaccaaccaaccagtctaccaaccagccaacgaaccaactactcaaccggtcaactgactcctcccggagacaaagattggagaattgcttgaatctggtacaaagactaaagcaaagtaatactgtatcatgcacagacctcaactctgtgaagacagtccctcatgctgtaggaagtcagccttgaatatctaggcttaggggaggctgagaaaggtcaccactggagaagtaagcggttggggcaggtcaggatccagggctctcaattcttatggagagattttgcttttttaaaacatcagacctgctggtgtttgcactcagttttctttcttataaaaatcaactctattgagatgtactgcccaatcaagatatagaacatttgcatcaccctagaaaacttccttgtgccccaaatcacatcactgatgtgatttctatcactatagctgagttttgtctatcctagaactttgtgtaaattgtccttttcttttgactttatgtagtttttttctcatgtggaagaaaaagaattattgtaggtttatggtttttaaaaaatattcaaatcggattcatctgacatttattttggtgtagtgtgtgaaaggcacagatctaatctcatttattttctcccagagagctacctggttgtttcaacatcatttattgacaaatgtatcttttttctcactggtttaaatgccacctttatcatacattaaattcccaagtgtgctcaggtatatttctggaccgtccgttcttttcctttgatgtgtttattcatgtctcaatacaatactcttttaat

SEQ ID NO: 294953 - DNA, 899 bp, Homo Sapiens
agtggtttgtcaggggctctccagccatcagccacagactgaaggctgcactgttggcttccctacttttgaggtgttgggactcggactggcttccttgctcctcagcttgcagacggcctattgtgggacttcatcttatgatcgtgacctggcttcttgagactggaatagaagaagggggaaaagcctaggacaataaactgatccagtcaagactgcttctgagactcttctgggtgaaagagctcctacagtgatggctgacttcaacactgcttgggagaggcctggcacccataacatctgagacatctctaccaactgggatctcctttcaagttcagtcaaaaacagtcaaagttggccctgttcttccaacaacccatgtctgatgcagtctcaaatctttttctaaataaggcagggataagaaagacaggcaaatggatcctcatccagaaatggattctagaactaaacctgtatcaccccagttgcagatttcacaagaatatggtcctgcctggtcctgttgggtttgatggggttcaaaacatgctaccccaaaatatggcaccttggcatattgaatattttaagctgaaggaatttgagaagcagccattgcaggaaggactctctaacctcccctttctcgccagagcacgtcataagaccctcacagaagaggtgccctccctataactggaggaagggagcatccttatgtcagaagacggaaggatgctgagaggaatttgagggaatgggccttgctatgtttcctccagtttactatccttagttcatatcctttgtcctatcacattttcccacaacactccactcttcattaaatcaaatataaaagtgctcaggcttaacctgaactggct

SEQ ID NO: 294954 - DNA, 448 bp, Homo Sapiens
gagatgacatctcttcaggatggtgtagagacgtgggcggagtgtgcagggctggcgtgcaaggggtggggacacgttgcatccatggtgctgtttgtgcaggtggcctccaggagggcagtttccagagatgaatttccttccccttgcccagcccaccactgcccagccctgtgggctctgaggctgacggagagagacctggtaggtcacctcgtcccttgtccctgggaaactccatgttaccagcatgttatcagcatggctccgaatcctatatccaccctccagccacaccccgggacactctggatcgaagccacccagcgtcagagcttggacgatcaaggtggacctacccgctcagaaagacagtggcgcttctgtcaagggagacctcaacgaccttcctctgaaaagaaaaatgtccttgcaagtaggtaaatga

SEQ ID NO: 294955 - DNA, 1000 bp, Homo Sapiens; identical to SEQ ID NO: 119250

SEQ ID NO: 294956 - DNA, 1000 bp, Homo Sapiens
ctggtacatttacaaaaattaacctgacttattttgttccagcaaatctcaatatatttgagagcaatcaaatcacacagcatgtttctgatcatataactgtgctagaagtcaatgattaaaagctaattcaaaattattatttgcttggaaattcaaagtgcccttataagacataaacataagaaagaatccaaaatgaaacaagattgcctttcaactcaatgatgagatcataacatggcaataaaatgtctccctctggcctgggaattcctctttgtggcacaaggttgtgtgatctcaaatcaccgctaacccacctagacattttaacatccgaaaccgagtgatgacgtccttatctatatcatcttactgcctgtgtgtgtggactttaaattctgaacccaaatgagggggagaaaaccaagttgactttcatgactgagctctcagggacgtccaaggaatctgtgcatttcaagaaacaaagttcatcagcttctctcctaaggtatttgcccacaatacccagagggcttggcagcatcatgtgtgatgggtggggagctccaagcaggtgggcaggacccaggggcctggtgaccaggacagacccccactgtccatcaactttcctggccctgtcctctgctaaacttcccacaggccttctgcccgatcacacagagtatgcccaaactctctcaggcctctggcagctgaaaaccactgctttaaatccctttaccatttactatgacataaggttattgtaaacaggaaatattctattgatgctacaaatggaaagccaatgcctttaccataaatagaaaaacaaccctaagaagcaagcaaaacaaaaacaaaacaggggctgggtgtggtggctcactaaatacattttttattatcaaaaaagagtagtgtatggttggcgtattctgtgtagaatgtattttattgatgtctcctatttttataatttctgagt

SEQ ID NO: 294957 - DNA, 445 bp, Homo Sapiens
ttcacttcaacatacaagttgaccatggcatgctctgggctccagtcctctacaaagatgtagggcaggaactaccagttgtcagcacagcaccatcccacattgctcttctaatggagactttcaccccagatgttctttctcgtctgatgggaaggatccaaatgaaaaaattgaggctcaaagaagtccaccaaattgagagtgaagtaggggaaacagcatttaacgcttacattctaatgatttgtgtaagagcagcaggacaagctatacaaagaaaaaggtggaattatcaggatggaattaaagatgcttccaaacagaggggatatctcaagccatgactcagagagatccaatcgagtaccaggtccagcggtaatctattcgcagatgtagtggaacatctcagaagaataaaaaagaaaataacctaaacaaa

SEQ ID NO: 294958 - DNA, 1000 bp, Homo Sapiens
tccagaggaactgtactccttggctgtttctagaaagataaaaactggacacatatttctgcaaggcagcattgttgactctgactacggatacttgagcctctgggcagtggcagataatgacccaccaaaagattccaacgcctacctcttaggtgtgaaatctgagccaaaaatcttaaaaggccagaaccggtaccaggaaaacctgcagagacaaaccccaaatagagtgactgcgtggaaaaaattggcagatttctatccaaaaggtccttatgacacttacaaggctaagagccacggggagaaaagagaaaaaaaagaaaggggagaaggaaaagaggacaggcagatctgtcagttggcaaaacaccggagctcctcaggctcacagaaaattcacagcaaaactaaagtgaaccccataaagcttgttctgggttttcttctgcagaaaagattaaaggaaaattgttttagcagaaagaaagctccatcctcaggaaaggcaagcaagggagctgcagctaagggaagggcaatgaagaaggtggcagccagactgaagggaagaggggctgcaagacttggagttggtgatggcaaccctggagaggaaaggaacatggccaagaggttgggattcatgctagatcaagaaggaagaacccagaagcagcccagaggcttcacagctacataagaaaaaaaagggggccaggcacgatgcctcatgcctgtaatccagcactttgggagcctgaggcgggtggatcacgaggtcaggagttcgagagcagcctgaccaacacagtgaaaccctgtctccactgagaatacaaaaattagccaggcatggtggcacacgcctgtaatcccagctactcaggaggctgaggcaggagaatccaggaggcggaactgcggtgggcagagatcacgccactgtactctattctgggtgacagagtaagactccatctcaaaaaaaaaaaaa

SEQ ID NO: 294959 - DNA, 767 bp, Homo Sapiens
aatgaactggggccaaactgtagagagcttggatgaatagtttagtgcaaagatgaatactgtagtcaatctctccttactccttaacttcgctcctcttcattgtcccccatgcttcgtgctctggtaccagacatttcacaattggccaactgttatccactttctccatccctaccttacatgtggaagaatggaactaaccccaacaagcttcatcagccacctttgattttcctaagccaatcagcagggcttatctacctattcacaggaattggttcagggacagacctagccgactgctggagccagctcccaggggcttcagagagtccactgcaggcccctctaccgcacgctgggtccagggacatcgcattggtagtttgaaatcagccatgacagggagagagcattgctagacattcatctgtacactacctggatgaacaagacctaatttaggtccatgagacgtgaggagatatttaatcagggtttggagaaaccatggaagaagagtctattcttttgtgtagggagagttataaagaaattggatgtgagactactaaagccattttggccatcaaaggacctaaccagaggacagagttgacacacagagaagagatgctctgaaaggatcaaagaggtctggagtcagagcgctgagggtgtggacttctgaatccacccccaaagcccgtatgcctcttcactcttcagttaaatgagccaataaagtccctgttttaaaacca

SEQ ID NO: 294960 - DNA, 704 bp, Homo Sapiens
ggataagcactgaggaggggtcccagccctcagcgatgggatttcagagcgggagataaagggttgcccagaagggtggaactgaagaatcaccaggaggaagaacaacaatcggaggaaaaactccagccacataagaagttaaatgtgccgcaaccaccagtggcgaaattgtggacatcacaggagcaaccacagccatcacagcagcagccatcagtgcagccaccatcacagccaccaccacagccatcaacattgccacaggcacaggtgtggccagggccacagccaccacaaccacagccaccacctcagccaacacaaccaagtgctcaagcccgttgtactcagcacacctccaaatgcaatctccaggattcccaaaggccaggtcaccagcctacttcagcggggatctactaagctggagggcaatctctgtatcaacaacagattccagggtctcatgaacccatgccaatctagccccatcagaaacactgggtattcacaactcaagtctaccaattacatacagcagtggtgatccagagattgaacccaggaccccatggccatccccaaaatgcagatgagcaaccacatcttctcagcatccagcaatatctccactccaaaagccacccactctagaagaggaggctgccaggaataaaatgtaatttttttcctgggaagaa

SEQ ID NO: 294961 - DNA, 1000 bp, Homo Sapiens; identical to SEQ ID NO: 119253

SEQ ID NO: 294962 - DNA, 1000 bp, Homo Sapiens
aaacaaaaataatagtttttttttaatagtgctggacaagtgttacctacatgtaaaagaatatagttagatccctatcttatatacaaaaattaaccaaaaatagataaaaatctaaatgtaagagctaaaactatacaactcttagtagaaaacagaagagtacatctttgtgatagtggattaggctgtagtttattagacataaccaaaaacaacaaaaggaagaatagataaatttgacttcatcaaaattaaaaacttctgtgttacaaaggataccatcagtgaaaaggcaaccccacagatggggagaagagatttgcaagtcatgtatatgataagggatttgtatccaaagcatataaagaacgcttacaactcaggaaaaaaataaaaatgaaaaggcacagaacccaatttgaattcaggcaaaggattagaacagacatttctctaaagatgacatacaaatggtcaatacacacatacaaggattctcaacatctgttagtcatcagagaaatgaaaatgagaaccacaatgagttaacacttcacacctgctaggatgggaataataaaaatgacagataataagaagcgtcagtgagttaatggagaaattggaggctcagactttgatggtgggaatgtaaaatggcacagctgctttgacaaacagtttgggattttgtcaaaaagttaaacatgggctgggcgccatggctcacacctgtgatcccagcactttaggagggaaaggcaggcagatcacttgaggttagcagcctgaccagcatggtaaaaccccatctctactaaaaatacaaaaaattagctgggcatggttgtgcatgcctgtaatcccagctactcgggaggctgaggcatgagaattgtttgactccaggaggcagaggttgaagtgagccatgatcgcgccactgcactccagcctgggtgatggagtaagactccgtctcaaaaaaaaaaaaaaa

SEQ ID NO: 294963 - DNA, 1000 bp, Homo Sapiens
ctcctcccctccaatcagcagtggccctttgtctctaccacagggagtcccgtctctcctcagaacttattgggagtagtgggggggtgcaaaagcagcaacagggacccacaagttcaaccgctcgcttcacagacgagacccctggggcccagagaggtgcagcagcttccctgaggactctgcatcagctgctgagctgagaccaaagcccaggaccaccggcacccagtccactacacagcggagccccaaggagggaggtaaacaaaggtctagggcagactgggctgctccctctgagcatctagaaacttccccagaagcagaagcttcaggcagggcctggaggggctccagcagcagctccttccccctcttgccatcaaactaaataagaggtcaactattgtatgatgccatttatatgagatatccagagtaggtagatccatagagatggggctcagattggtgactggcaggtggttgggagagaggggaatggggagtgactgtgagtgggtacaggcttccttctggggtgatgaaagtattctggaactcagtggtggttgtacatcattgtgaatgtactaagtgccactgaattgctcacttgaaaatgattttttttttttttttttttttgagaccgggtctcgctctgctgcccaggcgggagtgtggtggtgcaatcatagctcactgcagccttgaactcccaggctcaagtgatcctccactttagcctctcgagtacctgggaccacaggcgcgtgccaccatgcttggctaatattttgtatttttagtagagatgaggttttgacacgttgcccaggctgatctcgaactcttggactcaagcaatgtacccacctcggcctcccaaagtgctaggattaaggcatgagtcagtcttaaaatggctaattttatgtcatgcaaatcttatccccatcaaaaaaataaaaaaaaataaaaaacatacaatggg

SEQ ID NO: 294964 - DNA, 846 bp, Homo Sapiens
atgagggcaggggtcatggaagaaagccttctgcccatcagtcctctgagacaggtgaagaacctgaggtcgcaggaggacacccagaaggtccagagagagcctcctaggccccccacctccccccgtggcagctccaaccccagctttttcactagtaaggcagtcgggcccctgggccacgcccactcccccaagcggggaaggagcttcgcgctgccgcttggctggggactgggcaccgccctcccgcggctcctgagccggctgccaccaggggtgcgcgccagcggtgtccgggagcctagcggcgcgtgtgcagcggccagtgcacctgctctggccctcgccgcggtctctgccaggaccccgacgcccagcctgaccctgccattcagcggggctgcggctccacggcctgcgacagcagccccacctggcattcagcgcgctcccgggggcagaggtcgcggtgtcctcacgctgtggtgccggcctacaacccccacgccgggctcgggcccggcggaggagggcgatgctccccgggtaggacaaaccggtcacctgggctgcgagggcggcttaggggcagaagcggcggtccagggccgcctggcgcagcagcctgtcccagccgcggtccctgcagtccctccctggcggctgcgcagccgtcccacgacaggggccataaactctccagagcggaaagccgcaccctggtggcccggccccgcgcccagacctggcggccgctggcacctgacccgctgcatgggtctccagggagctcgctgcccacccggcgctgcaggctcggctccctcgtacactctctggtag

SEQ ID NO: 294965 - DNA, 725 bp, Homo Sapiens
atgtatgtaagccaaagtgacggcataaggagttctttgttagaaaacagggaaagagaagcaagagagcaggcaggcagaagggcagccaggaccatcagctcggtgccagccatagcaatagtttcagacccgtggagtcagctgtgctgttgccaacctccatcacctgtccgcctttatcctgggctctgttcctgtggatttgaacaaatagatgagcggcatcggaagaaagctttagctgcatgtgtttgggtgaccacgagagggcagcacgtaagagaccagtgtcggccccgctgccttcttgaacacaccggaagcctcctaggaaaactgcagattttgtcagactgtgaagtagaagagtcaaagagccttcattgcttccttttaaatgaccagcctactaaggaatttagaatgcccaagtaaggactgctggtcagactggacttcaaaattcctggatccttaagacccaatgcatcagacaaatgtcctgctggatcctcccaccgtcagctaagggacagtgctagctctctggtgagggagatccgtgtggaggtctctggcattcctgggtcagtggatggctgggagaactgctcagctccaggttccagggcctctgatcaaagccaaccctgggggccagccagagatatcgcaaacctaaggactaacgtggaatctacacctgccttgggagtaaagaa

SEQ ID NO: 294966 - DNA, 1000 bp, Homo Sapiens
gtatctttgaatggtttttattttctgatgtccagtgtggcagcctggcagagacatttagttgaaagaacacggggctctggaaacaaccagtcctccttggttcatattctcgtgttgtcacttattaaccgagtgacattggaggtgatatgctgcagtttatcactgaggtcctgagatggtccatactctaagctttgtgtctactgtggggggcaaagggaaaacttcccccttgctctctgaagagtcattgaaaatcaactgacaaaagaatctaaaatattcctggaaatggagagtcctgacatgatggccccatgatgaaaagaacccaggttcctgagtcacgacgtggacatgaggcaccaaggagaaaacacgtgaaccttaataagtttgggggtacacctccttgccatgtgttaccttctgtcatgttatgatgcagcaagaaggccctaatcagtggtagtccctcagtcctggacttctcagcctccagaactagctttgacattcttctgtcaagtcaccttgcaagtctcatgctttctggattcactgcagattagagtacccagaattagccaagaccttcaacatttaatgactagccatggagaagaaataagatgaactgcttgtcccagaaagcgatagaactttgaaagcagctatatatttcctagctacctctaaaaaatggagctgtcttcatgagacctgtaagaagccaacagttttcctcactgccaccatgtgaagaaggatgtgtttgtttcccttccttcatgattatcaaatggaggttcccatgattttctttttcctcatggaaacatgtttggtcagaagggaaacaaaccaattaaggtgataccaaaggatgatccttgatacagttgtattttggtggagcgttgagattcgccagtgaactctaacagtgaggatggcactggaataaaaagagaagaaacatgtactagaagcc

SEQ ID NO: 294967 - DNA, 1000 bp, Homo Sapiens; identical to SEQ ID NO: 220460

SEQ ID NO: 294968 - DNA, 691 bp, Homo Sapiens; identical to SEQ ID NO: 119255

SEQ ID NO: 294969 - DNA, 1000 bp, Homo Sapiens
aagcgtggttggggaactccagagtcccacatcacagttcagcatgtgcctcaggagcttcagcaagtctttcgtggaaggagagtctgccggtgacgggggaagcaggccatcagcccgcccagcttcatctcaggccgcttccaacaccgccaagcaaactcccttggcaagatccatgcaaggccgcggctgaccaccgggaggcagcagcctactctgcaaggcactttctttacccgacccccacccccttttaacaggtggcaggaaacctgctggcccagccatctgccgcacccacccttcactcccagtcccatctccccatagcacagatttccctatcatgagccctgacgtgacctgggtgtcctcttgccttcctctgcccaaggaattcctacagagattctttctctatcctcctttgtacatttccaaggaattgtttccccagggcccctccccttgaagaaattagacaggaagctggagtagatggttccctctttcccacctctcacactcccaagctctggttaactctctgtgggccagtggctagattccccaacacagatgacaactgaacaatacacatgcagcgtaagaatgttgtcgctgccaccagccacttacagatacaccattgctaaggtccacccaactggactgtttccccctcccatagactaagccccaaaggccaaaaagtaaaacccgctaccccaaacctgcctgtaactgtttgaccagaggccagctgtcccaggatgcggttaagacgtctactttgcacaagagaactggcaagaaaaacatctccaggaagcggtcagacacatggcacaaaggacccccccccttttctttttccttcaccctgatccagttctatgtcctataaaaccttgctctagcctataagtggggctgccttctctgcttttgtcaagaggtagccaggcaggactgacaataaatcagcttgcctgaa

SEQ ID NO: 294970 - DNA, 633 bp, Homo Sapiens
atgttctacatcgatgttggtgaccttgagacaaagaccaacgagccaccacagccaccagtcccagaacctgccaatgctggggaacggaaaatgagggagttcaactctgctcgagctgtaaaagccaaaggtccggtgatgatcccatacccttttttccagtctcatgttgaagatttttatgggtgctacaagttgaccactgcagcagtaaagatgactctgaagaatggcgtgggatggttcctttcaaatgcacttgagcagcggtctccaaccacagggccacagagctggagctggatctaccatgaaagacttgtgaatccaggaagagagactgactgggcaacatgttattcagggtctccctctgttgtccaaggctggagtgtagtagtgctatcgcagctgactgcagcctcaaccttccaggctgaagcgatcctcccacctcaacctcccacgtggctgagactacaggtgggaccatccagttgcaggaaaacaagcttaacacgcccactaattctacattatgctcctacctcccggcagcctctccaggcccagaactttctccagtcagcctctacagaccaagctcatgactcacaatggcctatttag

SEQ ID NO: 294971 - DNA, 1000 bp, Homo Sapiens
tctgacacgtcatgccaataagggtcttctcctccaagagcacagaaatatttgccaatactgtccttaaaatcggtcacagtttcattttttatatatgcattttacttcaattggggcttcattttactgaatgccctatttgaagcaagtttctcagttaattcttttctcaaagggctaagtatggtagattgcaaacataagtggccacataatgctctcacctcctttgcctcctctcccaggaggagatagcgtccatctttccactccttaatctgggcttggccgtgtgacttgcactggccaatgggatattaacaagtctgatgtgcacagaggctgtagaatgtgcacgggggcttggtctctcttgctgccctggagaccagctgccccacgaaggaaccagagccaacctgctgcttcctggaggaagacagtccctctgtccctctgtctctgccaaccattaacctgctgcttcctggaggaagacagtcactctgtctctgccaacccagttgaccgcagacatgcaggtctgctcaggaaaagctttggatcacaattcccagtgctgaagaaaaggccaaactctggaaaaaattttgaatattttgagccaaatgtgaggaccacaacctgtgagaacggaaaataaatcctgggaccccagactcactaagccaaagggaaaagccaagctgggaactggcttatgcaaacctgcttcccatctggttcctaaataagatagctattacacaaagataaaaaagctacatccctgcctctacctccatcacatgtaaaatgtgtattcagtgaacgctgaccaaagacagaagaatgcaaccatttgcctctgatttacccacacccattttttccacttcttcccctttccccaacacccacacttctcccctttacttactgaggtccccagacaatctttgggaaaagcacggaccacagtttttcctgtggttct

SEQ ID NO: 294972 - DNA, 1000 bp, Homo Sapiens
gcgtggcggtgcggcggtagcgcagggccctcctgcggggccaggcaggggcgggtgggcgctccttgccacctttctgctctccctgctgtccgagaagttcgtgcggtgccagcccagctcccagctggggacagaacaggaaacgtccccggcgagcctggcgggggtggcggcaggggtgtctgtcgcctgcgctgggcaggacgcgcgtcctaccggcctcccactccgcgggcctcaccagccacctcattcccggagcccgggccgccgagagcgccgcggatggacctcagggaaggcctggcgcgccgcctccgggaagccttccggccttctccctccaccgagtactggggagtctcaggccacggtgaatgaagagcaacgggccggagagacctcggcctctgcccaggagcagcgcccagcaaccccgcccacaggggacccggtggacgccctggtggccactttgccaggctccccatctcccagcgaaccagagaggatttccgttcccctcctgcttggtgcctagcgccagggcggggcgtgggctgagcagcccctcccatggagggagcggccagtctacatattggaggtggggctctggggaaagggtgttgttaggaaggcggtttgaggcagcgggaggtggggatgcgcccggcggggaggggcaggtgtgtggggagggcctggggagcgcctccccagccgggcagcgcttccccagccaggccccgcagctggaccccggctccgtccagcctgggaaaggactccacggtttatgctgaagtggtggtggggtgggtgaacgctgcgcaatggaagggcatggccctgtgctaattgccccggggtgtggggctgtggaggcactgcgggggggatgtgctgtgtcagttgggcaatggcggccaactgtggcgtgcaggccttggagctgcccctccatggagctttaataaaggcactagccctgcaa

SEQ ID NO: 294973 - DNA, 1000 bp, Homo Sapiens; identical to SEQ ID NO: 119256

SEQ ID NO: 294974 - DNA, 448 bp, Homo Sapiens
atggagtcacatgtaaaggaggcaggggcattaagttctaaaatcagcaggtgctttctggcatgtcctcacctggttattgccaagaactcagcagtgaccaagttcttggtaggcacccacgcctttgaattcctggtgaagtggagggttcctggaaaggccttcggaaacagaaggccactaccaggcttggtgatcacccagccacattcctctccacccccaggcattaactgcatactcacttcgtggtgtagtgggagctgcttcagaggacaaaagtctgacactcctgttatttggcaaatcccatggcttctctgcgactcagtctccatgtctgtaatatggggttttacctaattcagggctgctgtgagaagtgtgagctagtgtgtatttggagagaacaagtacttaataaatgagccatctctttcctccc

SEQ ID NO: 294975 - DNA, 684 bp, Homo Sapiens
atgcagggccgctgtggctcacttcggtgcggggccgctctccctgcccgtttccggcggggcactggggcaggcggcacacgtgagtcggccagccggggcccagcccccaggacgctgctgacagctccgggccctaggcgccccagctctcggtgggggccacgccgccccgtcgacctctgtctctgccttccccgaaccgggacccggccagccagaatcacaggcattcccacctctggcgccggaggggaccgactgacccgcgcagacggggtcgcgccgccgcccggccctcggcccccagccagcctgccccggcccacccggccccgccggccagacacggcgacctatacggaccgcccccacgccgaccctccaaagggcccccggccttgggtttcccgtgccggggcccccgggcagtcctggcggcgtcagggccgcgaccggaccgtgggccccgcccgcccgaccgcagatgcagagccggcctccgggctcggggccgggctgacacggccgagaaagggcccagccccgcgcggaccacagactggcaggccggccagacagacggacaggctgaccccggcccgggggagcaggcgcagcggctgcgcaggtcccgccaccgccttctggccccaggcggcccctcagggcacgagctcttag

SEQ ID NO: 294976 - DNA, 799 bp, Homo Sapiens; identical to SEQ ID NO: 119257

SEQ ID NO: 294977 - DNA, 714 bp, Homo Sapiens; identical to SEQ ID NO: 224966

SEQ ID NO: 294978 - DNA, 573 bp, Homo Sapiens
atgtcttcatctataatatcaatgaaagagatcatttgctgctcttccctcagtggtttaggcttgtgtattgtagggaagagggatccaggtgaaactcttgctctacagtgttggctgttcttctcccacagattggcacgagggataccaacaccggaatatgtgatgagatgtgtgaagagcatggcaatggatgcaaactccctttgtgtttctggctttaagcagctctatactctcatgctgtcctacactcagcagcaatttgtcacaagtttgggaaattcttcctactcttttgaactccagcccaatttcctttctatcactgccctaggtcttactcttccagaagaaaaagggaaaacccaacctgaatgtcccctaaaagtgaagaaatgtccacacttctatgtgcagattgtagacctttggaatctacattcaacatttgatactgcgtgtgactcctgatgaacacgctgaagatacatgatgtccagtaatttttactggggataatacctgcaatatacataagatggtgtcattaaagtacatttaaaatta

SEQ ID NO: 294979 - DNA, 1000 bp, Homo Sapiens
ccatctcagcctcccaaagcgctgggattacaggtgtgagccaccgtgcccagccctgatgcattttctgaaagctcttcagaagcaagtaaattgctaaagtattgtgtctcctaaaacgttcatggaaaggatagaaaggaccctgacatcatttgcgctggaaaccctgagacaaagtcagaaagatctggaaagacctgccagaggaaatctgccacccctctggactaggagacttcatctacataaaagtgggctgtcaccatgctgggagggaccctttaaagtgctgtcgatgacccataaggctatcagtgcaaaaggcaaactgctgaatccaggcttcctatgtgaagctagcaccacaggacaggtggactgtgctttctacaaaggacctaaaactgaagttttctactcaactgaaaagaagtattctagaaaatgtattactattcctataggctgcctggctgttctgttcatgacggtggttattccaattactttgagaattatatttattagaaaacaaacagtattatttgttgcacttcttttttcttctgcactcccagtaaatgttcccataaccccacatcaccaatcagctttaaattatgctcccaggattaacatgatctggacttacaagtccaacaatttcatttttagcagagtaaaccaagtgagtttgatccctgaatccaaactctttaccacaacgcactacaaagtatctctaagaattttccctaaacacaatggttcagaaggaatggcagcggcctcaagttaccatccccacaccaagatctggttagatgagctcaagcccactggacctggccggtctctcgcctacctgcctaagtcctgggaggacagagacctttatgaatttctcaccccaccaaacacagctggaccctccaggttctactttcaaaagccattcctaagctcccagccctcaccagggatgaatcaggggtga

SEQ ID NO: 294980 - DNA, 1000 bp, Homo Sapiens
cccctgaatagggtttggagcggagatgtgcctggggagaagagatcgcagtgctgtgtatgaagctttgggcacgtgctcacaagagcacacacagcaacctgagcaggtcattccttttgataaggatgacaaatacacataccaaaccctgttcccctcacccaccccaaaccagtacccccaggatgattccagatcagctctggagcatttgcatcaagggcctgcagactcacaggacctactagagcaaaatatcagtgtctcagaccccagttttggcctcaaatactgggtttttctgccaggagaagtagctgctagtctaggaaatgctgggacttgtccagaaagatgaggtttgtgaatacggggtgtggggttgggtggggaattaaggctgatgtatctggaggaactttggttgggctggaggcaacttctgccctgttctattcaacagttccctcccctccactaccccatttaatctggccacagctcagctacctgtgtataaaatcttgatctctctcctatttcctttctaccttccgtgtttttacttactcgaaaactgttcccctctcctgtgtgtatttttttaattgaaatataccaggcatttaggaaaggaacacgaaacctaagtgtacaggtcaacaaatgatgacacagtgaacacccccatatgaccaccatccagatctagaacgagatcattattggcatcccagataccctccttctatccgctcctggtgactatgccacactccttctcaaaagtaacgtttatctaacactacaggttagttttgcttacttctgaactttatatacatggaaccattcagtaggtattattttgtgtctggcttctctcactcaatactatgtttatgaaactcatccaaaacattgtggtagcagtagcttatttgttttcattgccgtacggtatgccattaaataaatataccacaatttatctgtt

SEQ ID NO: 294981 - DNA, 883 bp, Homo Sapiens
atggaccaccttgatgaaagcgtcccaccctatttttgtgagacaaaggagataggtgtggtcaacaccaccaccacggacatcatcaccattagcgtgacccacaccaaaacctcggggagggtggctgcagggcccggagtcgcctggatcgcagcgccatctcgtggctgctggcaggtctgccttgggccctcttggcacaaggcaaggaaacaggagctcttcccatcagtgacagcccaggagaatgctccagtgtcaccagtgactcctgctcccacatctgcctacaggaagccctcttggaacaaaagcatctcacttctgggaggcatcaagtatgtgcatcaccagcaggacagacttgcagcgcctattctgagtgaaaaagagaatcttttggtgctaccctcaaccaacctcatcctttctccacttggattcttctcaacattgaccctcttgaaaagatcataaaaactcactttaaggtgtatatgaggagttttgtctcccaggaaggtttgcattgtatctgtaatggtggagtctcaggcattgacttcccaggtgaaggaagggtgattttgggatgggggggccttcctgaaacctctgaagaaacagcacaccagcacctctgccagccagctgcatccaggatcaatgttccccctagttctggttcactcttttgaagctttccaagtcccagaagtgaattcttagcctttctttgagctctctttggtccaggcacagctgtaggaaaaattgtacagtggcatgaaaaaagtgaagggtttagtgtagtaaattctgcaaattttcttttaaaaaaaactgcattttaaaaaataaaaatactatgtcctattgt

SEQ ID NO: 294982 - DNA, 802 bp, Homo Sapiens
atgctgctgacccaggtggatgatacagggcactgggccctctctgttcttgtactggatttccttaaaggagaggcctccagtgcacctcgtcagctgcactcagctcttaaatgcagctattcacagagggcccaggctctcccctgccctgtgacactacgtgggacacacacctccacagggaatttgaagaatctccaggagggccagagagtagacttggatgccacccagccagcaatagagaagttgggaccacccagccagggacaaggccacacctcagccatcaccacccacaagcaacgcagcatgtatgagctgggacaggacaccagaaactacctcatgattgctccggaagaagcagctgcaggtgctcagccatctttatttcctgccacccccaaactatgaagacagcaaagcagcctgtggagaggctgctcacagaggcaaccccacccttacttggtgatggcacgtggaactccacctcccaggtggaaaatggaaaaattgtttccttctctgatctactgcctgagctgtcatcaggattttgaggactgacttaatgaataaaatataaaggcttagcgtgagcctgggatatgcatggtggaagagaataaatagccttttgtatatcaaagatactttctgggtaacccaatctgagaaatagctacttcagccacatctgctgttagggaaggctgagaaaatagtgactataaaatgaaatgaggcttgtaggtgaaccacatgaaatcctgtgaaccggggagaagtcacc

SEQ ID NO: 294983 - DNA, 1000 bp, Homo Sapiens
caagagagagctccacaagctgaccttgttaaactaacccttatcttcttagtcgcttctttacccaattaactaccctagccgaagcccctttgccttattacattttgcaacagtgttcgttgtccaattcagtatacaagtgagtgactctggatgctttttggggtcttcgtttccttatgagggcttctgtgccatgtaaaacttgtattaaataaatttgtatgcttttctcctgttaatctgtctatatcgattgaactttagggtccagtcagaacccaaagaggatggaggtggagttttggctcctctacagctatctgaataatcaaaattcaagatattccatgttctttctgagtttctttgaaattaaaaatgcagacaaccactcaactaatacgtcagcgagatacgttttctgtccttattgccttactgatgaaattgcctttattcataaaaaataaatgtgggagtcttgtttatttatttctaatgacattaacttgacattaaccttggtgctcttgggaaccataaatgggccctgtactacttgttacagagtataaattcccagaactacaagtacatcatattcctcaagttactgaagaatttcatgatccatgtgtcaggcctctgagcccaagctaagtcatcatatcccctgtgacctgcacgtatacatccagatggccggttcctgccttaactgatgacattccaccacaaaagaagtgaaaatggcctgttcctgccttaactgatgacattgtcttgtgaaattccttctcctggctcatcctggctcaaaagctcccccactgaataccttgtgacccccaactcctgcccgccagagagccacccccctttttcctttacctacccaagtcctataaaacagcgccacccctatctccctttgctgactctcttttcggactcagcccacttgcacccaggtgattaaaagctttattgctca

SEQ ID NO: 294984 - DNA, 960 bp, Homo Sapiens
atgactgacgacgggcccacaacaaatcagctccgaccaacagggtccacaccaccatgggtctacacagatccaggtcccgcctgtgagcctacagtgacgcgggcccctgtggggtggtccctgcaggcccgacgggccccggggcgcgtgcgcggaccgacactgtcagctcctaacgccgcaggttcctcctggtccccgaggcccccggtcgggcgttgcctgccccgcgcgggcggccgggccgagggacgatggtcagtggacggacggcgccagggagcagtgcccacgcgcggcagggcggtaccttcaggcctccagaggctggggctggctctgttggcctctgtgctgggtttcttcctctgcaccgcaggactggctctcctgacctctccaggtgtcatcgaacacccttgtgcttgctgtcacccgctgcctgtctgcaggatcccggattccgtatcaggggaccgaaattagtcggaaaataggaagcaggtgctcgcttggatggaaccctgaccctgtgctcacacttgtaggaggagggctctgcaggccgcctcccggaacgggaggttcccaagccactgcacttcggaggggctgtaattagagttgcacattcattcagttcccagtaaagtagaacgtgctccagccagtgaggaaaaggtgtttttaaaaattagattggccgagtgcggtggctcatgccttttacctcaacactttgggagacaaaggtgggaggatcacctgtggccaggagttcaagaccagcctgggcaacagagcctgtctctggggaagaataaaaaaaaaaattgagcctttgtcagtgctactattttattatctggtaaatatgagagggttcacgcggtctatgtgtgtcatttatctgagtttgcctatcgtcacgttttggaaataaatgtcaataaagtc

SEQ ID NO: 294985 - DNA, 1000 bp, Homo Sapiens
catgcgggagaggggagaagcaggagataccgtggggcagtcaggctctgggacgggcaaaccaactggacttagatgctgcttccagagctcatggcccagccgggagattggcatttatcacatgatggcacagatggtgaagatgcagctctccaggagctgggaggaaaaggacccaggttttggatggcctgtcatgaggggggttgacttactaggggagtggaggaaggggggcttcctggaggaggtaacaaggaaaagaggagacagagggtgtgcctggtggaaggaacggcatctgcaggggccctgcagtggaggggagtgcagtgaatccaagggactgacaaaaagcccgggagccagagttgagaggcagaggacgcgaggagaaagagggggaccaaggtcagccaaaagccactggggttttaagaatggaagtgacaccgccaggggcaggggcaggtgcgggctgcgggagggactcggagcccacagaggtaattccactctgcgcctcaattattcatcgcgctggggctgtctctgcgtggtcacctgcgcgctgcagagtcccccagcgctccggggactgctcgggggctgctggggggcctctgggaggcctgtcgctcgaggggaggccggatcaaggagagtcacgcggctccctggggagaacgggcgccgggccctcacagaccccagagcggccatgagctggtgtgcagccgcccaggaggggaccccactttgccaggaggaagcagctggttgaatagcatttaaaaagagatttgaagattgaggagcagatgttctgagttctggtctggtcctgggagccatgcagccttggtcaagtcagttccatcttcctgaggctacacttcagcatctgtaggatgggagtgttgagcgctagatctatgactggtgggccaaacctgccctgctgcctgtttttgcaaataaagttttattggaacac

SEQ ID NO: 294986 - DNA, 1000 bp, Homo Sapiens
ccacgcccaccccaatccaggacaccgcttggcagggcgcttggcctttgttagcgtatctgacccccttcagtgcgggctgctgggctctgcagaacagtccttcctgcagctggagcaggagaaccacagcctgaaaaggcagaatcaggaacttcgggagcagctgggggccctcctggggccggggcagcagttcctgcccctgtgtcccgaacactcaagctgcactgctctggcctggccccccgacccggctggcacgcagcccttggggaacagggcacctctgcagctgctgcggcgggagctgtgccaggggcaagaggctttcgtgcaacagtcccaggtgggcctgggggaggggctgtggggggggaggaagcttcgtaacagcactccaggtgggcctgagggattcattagggagggaggtcttcgtgcagtaggccagtgggcccagcggggaggtactggccaccctgctgatgctgcccaagcccatcctgggccccaccctcagaacgagctgcagcagatccgcctgtgctttgagaggaagaagatggtcatcacagaggtgtgggacaacgtggctgagatgcacatggccctgaacaaccaggccaccgggctcctgaacctcaagaaggacatccggggcgtgctggaccagatggaggacatccagctggagattctcagggagcgggcccagtgccgcactcgagccaggaaggagaagcagatggcaagcatgtcgaaagggaggccaaagctgggaagctccaagggcctggcaggccagctctggctgctgaccctgaggctgctgctgggcgccctgctggtctggaccgctgcctacgtgtacgtggtgaaccccacacctttcgaggggctggtgccacccctgctgagccgtgccaccgtctggaagctccgggccctgctggaccccttcctgcgcctcaaagtggacggcttcctgcccttctag

SEQ ID NO: 294987 - DNA, 907 bp, Homo Sapiens
atggggggaacaaaaggcctgagaaacaccacgtacgtgacttggtcttcatggtctcttctctcctgtaattgtaggtggcctcaggaaaggagtctgtattctgcaatcactgacttgctgctgaaaaatccagatgaaaagaaaggcggggctttcctgctggcttcagtctggagatctgactccagcttcctgctggccaccaggcaggggtggtggaaggagcggtttttgcagcacaggtgcctcatctacattctccaagggaaccccaccgccgctgtgggctttccacacattgacgcattcatggctcaccacagccttgcccacgggctttccagccccacgcctcggaaaatgaggtacagagaatgacccaggctcctgagcttctctgtgagagagctgcagggtgagtggtggggggcggggcatgtggaagctcaagactactgggtggcattcatcactcagcggcaggctcactggtcgcagtgcaggggtgacccacccccatgtatatgcctggaagtacctgggcatacggagttccaagacaccactcatggttaaaaggcggcccccgtgctcacatagctgatgtcatctctctgtgtacataccacagatttttgcccagccattagcctaaaatgtccaagtcatggaaacagagtagaagggtggtgtcggagaatgaaaaagatggggaagacggtgaaagggcacaaagtttcagtgatgcgatgagtacgttctggagacctgacacgcagcatggtgaccgtagttcatagtgattaattgcacgctcgagatctatgagaaagtgcacctcgaatatcctcaccacacacacaaatggcaacaatgtgaagcgatggatacgttcattagcttg

SEQ ID NO: 294988 - DNA, 1000 bp, Homo Sapiens
gtcacctgcgtccgcccgcctttcaccgcagccaggccgccagcccgccgggggcacctctccaaagccacgcccctccgcgcctctctgccaggaagcgccgccccggcccagtccgccgtccgcggggaggcagcccaggcgcgcacgaccccctcgaacacaccccggccccgcgcacctgctcctcatcgtgtccggatgcgcaggcgcctgggaccagcggaacaagccggggagggcttgttcggccacaaagttggttgccggggtggggagaatgtgctggattacccacccacgagccaggagtcggggtgggaggaatcagccttcctccaggacggcgcagcccaccgggcgcctgctaagtgcccagcactgacctcacctttagaaaagaaatctacctatgccacgatgcggagcatactaataagcccagggaagaagagtcagacccagtgccagcgcaggggaaacgcatctaatccagaacagcagacacagctcctctcccatggaacacccagagcagacattgccagtcgatcccagcaccctttccccgggagcctgggctcagcctcaagactttgcctccgcttcacaaagctctgcacagccagttctcatcaattggagttggtccaaaatatggaaactctttgctctgcctgacccaaaccattcctctttcccataacaattctgacatttaaaaacagcagaattccccaacactcatccccgggaaaagaaatttggcattgttggtactttcaactcctgaccctggtcagctgttgagtcaacttgtggttgagtctgagccccatttctgcagacagaaagaccgcatttgcgtttctgagtctcaggtttaggatgaattttgtatagtcactgtaacaaattactgcaaacgtagtggcttaaaataaaacaaatccattagcttacaattccagagattaaaagtccaaaatgaatctttaaa

SEQ ID NO: 294989 - DNA, 1000 bp, Homo Sapiens
tgacaagatggcatgggaagcttcccggggaacgctggaactgggtgtttgaaggaggacctcatggcggcagctccagcccaagtactgcaactgtggggccgtgccaggagcaggtgctgcggagcctgtgtgggtccaggacaagaggagcaccagaagctcctggagggcggtgcagacgacactgtcgggccggcccagcccaggccccagcagttgactcctctgtgatcagaggatgtggctgaggatgtgcatttccgtcaagttcccaggagaacctggtgctgctgcttcggggaccccactttgaggaccactgatctaacactgcccctcgtggcaaacgcggaatgactcaagattcagctggatggatcattcagggagcaaatccacccttgccgcctggcacaccctggccattcggtaacgatgccatcagggttactggcttcttcattctccactgtgcattccagggtgggcatttccacagttgtgagcccatcatcaactcagcgagttcccattttccagttagaaaataagctttctgatcgttagccattcacttcaattggctctagaaaagatttctgggatgtataatttatttttaacataaagaaaagctaagtgtaaactagataagctacaattgtcccagacgttatagacactcacagcaccgttttcctcttctagcaaaacaaaacaaaaaattctgcaatcatacaggcagtaggaaaaaaaaattagctggacaccatggctcacacctgtaaccccagcactttgggaggccgaggtgggaggatcacttgaggccaggagttagggactggcctgggcaacatagtgagatcccatctttataaaaataaaaaaaatctgggcgtggtggagcacacttgtggtcctagctactcaggaggctgagagtggggaatcgtttgatcccaggaggttgaggctggagtgaaccatgtttgca

SEQ ID NO: 294990 - DNA, 1000 bp, Homo Sapiens
gctgcctctgggcaaccttgtaggcaccttctccacccaggacatgggcacccgtgacgatgtccccgaagccaaggtcctggtccccgtggccgtgtactgcgggagcatccctcggaccagtgctgggccccgggtgctcccgcctggaagcatcaactccagtctgcctcatggagaaggttctctccagcctgagccaagagccctgctgaacaacgaggaaccgtcacagctcctgcgtggactcggacagctgggtggcctcaagctggacaccccttccaagggctggcaggcaaggaatggtcaccccaggaacctcagggccttgtctttgggggaccagcccctggtgctcctcccttctccggagtcagaggccaacagcgtggccagggacaccatccagattaaggacaagctcaagaaaaggaggctctcagagggcttggcagcgtcttcccgagcctctctggatccagggggaggcccccaaggagttcccctgcacagcaccatcccccgagccacctctcagaggctgctgagggtgcccaggccgatgcctctcatccagagcatccctaccacccctgaggccagcggagtcaaagagaagggcctggacctaccggggagcattccgggtcctcacgagttgagacccggtgctcaggaggcgcagatctcctggcaatacctgcactgcaatgatgagaagatgcagaagtccctgggcgccatcgtgatcccacccatcccaaaggccaggacggttgcagcgaccccctcccgtgtgcctggctcccttcccagcccgttacctccaggccagggagtcctcacaggcctgagggccccacgcacgcggtgtgatgacgtacaccagcttgtgcagcttgccacggcctcgataagagagacaattctggccgtgtgtgacagacgagctggcacacgaaggctctgtgagcaggatgtcctccctggtcgctga

SEQ ID NO: 294991 - DNA, 1000 bp, Homo Sapiens
ccagatgacagctagtgagggagcagagacaagacaaggcgagcctgtgacagagcgagaccctgtctcaaaaaacaaaaacaagacatgtgagcttggactccagtgtggaatcccatgtccgctcagtgcacctttctgccgctgaaagtacaagaggagaggggaaacccacaggtggagctgaccatgaggactgtcacagctttgagaggcaaatccagaaatcagccctccagcttcctctaccaagaagactggcggttacaaccctggctctgtggggcttctcttgccctctcttctgactgccctacttggctccaggtgagggtgagaggaagctggagatggaagatgcagctgggggaactcaccaggcaggtctcagggaactctttgaataagaggacaccagatcatgcctgcagttccagcccaggagcaactagcaccagcctcagcatggagcaggacttcagttccagcagcgaggactgagatcagacacaagagaaagctccctgatgaggaggggtgattctaaaacgaagggcggaaattatctggggaatttccttcccgtgaagcctcaggaacatgccagtcccccacttcggtctgtcctggggggtctcacgcccctgtcctcctagagaaatctagatcctccaaactctgcctgggttcttcctggggagtcttgacccctgccttgtggttgatgtgggataggggacccgggaacagggctgccttcctctggccaaggcctggcaagcaagtgtgggatgggtgctgtcttcctgagagggacaatagaagtgacagagccccctaattcaagaccctgcagaggtggtgtgagatcttataatatcagtctctaagccagtgcctctcaagctctctttggtgaagaatcaatttttaaaatatataatcagtcacagatcaatgcttttgtaaaatgcaataaaagttaatttccaaaaaaatc

SEQ ID NO: 294992 - DNA, 1000 bp, Homo Sapiens
tccagcttgaggaaagaaaggtcggagtgctccggaccaagtgccccctgcactttcaacgccgtaggtctcccggcagccctggaaggacagtcttacccggacgccacggtggtctcccggcagccctgggaaggacagtcttacccggacgccacggtggtctcccggcagccctgggaaggacagtcttacccggacgccacggccgagctgcccttccctccctgctgcccccagggaaggctgctggtgtcctcagatgcgggcaggaggaacccgccagcgcctgagagcctggcccgaaccaggcctggaggtgctggggcgaagacacagaggatgtggcctccatccctggtaacagacggttaccagggcggctttgggtgaggacattgaaaaaggtcagactccctgggagcagcgccctggactccattctcatcacagaccagtggttcccaattgaagtcagttttgctcctcagggcacacttaacaacatctggagacatttttaattgtcctgaccgagaggacaatgctactggcatctagtggacagaggccagggatactgctgaacatcccgcagtgcacaggacgcctgcaacacagattatccagccccaaacgtcaatagtgccggagttatggaaccctaatgaagacaattcttgaaggcatagactgaatcttatttatctttgtttccctcatgtctcacaagcagagtatgagttcagcaaataggagttgaacagaaatcaggaggaggtgctgattgacaggaaaaaagaaagatttagtttagagctgagaattcagctggacagccataggggctctggcatggagactggaagtcagaagagaatttgcagcaagacatttagagccatttatccagccatcataattttattgagtaactattttgtgtgaggcactgtactggatgctttggcaacagagataagcaaggcaacccctgtga

SEQ ID NO: 294993 - DNA, 1000 bp, Homo Sapiens; identical to SEQ ID NO: 224969

SEQ ID NO: 294994 - DNA, 666 bp, Homo Sapiens
atgcgtagaagtttttctaaaaatcaggtagaagcacagaaaaaaggagttggagagaaaagaaaactagctgttgtctgtagaaatttcccagggctacaaagccttccctgtatgagctgcaaatcaagccaaaacgttaccagagatgaagagatggggacagccatcaggcctggggatggacctccctggagctgggcattcaagaggatgagtgcagcagaagacgtatccagggagcctttcagtgactgtttgggcaaagcctcccttgtggtagaagatgcctcacttctggggagaggaggctcctcatcttgcagacaagaagcagcacccactggttcctgctccaaaagccattaacattataaactggccaggtgcggtggctcaaacctgtaaccccagcaccatttgggaggttgaggcagaaggattgcttgagcccaggagtttgagaacagcctgggcaacaaagtgagacccaatctctacaaaaactagagaaaaaatagctgggtgtggtggcactcacctgtactaaggaggctgggctgggaggatctcttgagcctaggtggttgaggctgcagtgagccaagatcacacctctgcacttgagcttgggtgacagagtaagaccctatctcaaaaaataaa

SEQ ID NO: 294995 - DNA, 1000 bp, Homo Sapiens
gcccgcatggggccgaggttcctggccgacgcgcgagggcgcgggcgggtaccgggttcccgtttttcccaggccccgatccccgcccacgcacgaggcccccggcccacgcacgaggcgcccacgcccatcgtggaggctccgcctggaaaagaagtccgacttcctctccaagctgctccgaggggaatggggaatcggcaggaaatgacccgaactgccagcctgcgcctttgcagccggccctcgctttgctgaagacgagcagctcccaccaaagtcttgcctccccttaccccgaaagccccgctcagttcaatatttcaagtgaaaatctgcctgttcgaaaataaaatattcacaaatgagcagtgtattagaagacaactgaattgcttctaagaatgggtctcactctgccatcacccaggctggagtgtggtggcaccatcatggctcactgcagccttgaactcctgagctcaagtcatcctcccacctcagccttccgagtagctggaactgcaggtgtgagccaccatgcctggctgatttgtctttttaaattttttatagagaccgagtctcaactatattgtccaggctggaaaagaacttctttccctccaagtgataaccttttccagacaagtcagcttaaaaactgacccaaaggccctgaagtacacagttttcttggagaaagaaaaaaataagtgaaaaggacttgctgacttgctaattcattttggggcctgtgggtaacatcagaatggcaaagcacttggggcttttttctaatttgtatttttttaatcttctgagaaatgacttttatatgccaagattcattccatgattagtttttatgaccaagttatgaacgcttttgaatatggggacctagaatagaaatgctaacctacctgcaaggagagctctgtgattggcatccccatcatgctgtaactgacacaaaataaacttagggtaattgccg

SEQ ID NO: 294996 - DNA, 1000 bp, Homo Sapiens
gcggggcgcagccaattctgcgcgcccaaggctcccctctgccgtggatcgcgtgtgccgagtgttggcctcttccccgaaagggccagacggaccaagggggccttcccagccggctgcaagctctcagacgctaaaatgggaacaaagcttccagaaaggcagcgcctttgggcggccgcgccccgcccagccgcgggggccattgatacagaggcttgctgcgcttggtgtgcgcggcccggccgggcctctggaaacgcccatgagaaatgagctcatgctggatgcgcgcgctccttgggcgcaactgcccagcgcaaaacgggccccgaaagcaggtgagtggaggacacttcaatctaaagtgatcttaaaggaggagtagtaggatttgaagatgaagaaagaagaggggaggtaaattactttccatcacttcaatttcaacccatcagataaaacctctctttagtaaacctgcatgtgggtggagctgtaacagcaattaaggacagtgtgactctgttcttctgactttgggaaaaccagtttggctggaacaaaaagctgatagagaagactaatggaagataaggttgaaaaggtaggtttgagggagctttgttacaggaaaaaaaaaaaaaaaaaactgggctttgtcctgtagacagtggagaggtactttagcagatgtaagacattaccattataggaaagcctctgaagtaacatacactgtggtttttcctgttgctgaaaatatgcccagagtaacaagatgtggcatagttggttatgtgtcttataaccagtgaggtgtgcccaaatgggaaattaatgaatgactacccaaaaagaagagggagagtgtttgaaacactgtcactgtgaaatagactggttgtatgaaaagttgcatatcaagcctttggcaaattatataaatactctgattttgacatcttaaaggagtatactatagaaaataaaagaaaaa

SEQ ID NO: 294997 - DNA, 774 bp, Homo Sapiens; identical to SEQ ID NO: 224970

SEQ ID NO: 294998 - DNA, 1000 bp, Homo Sapiens
cagaagcagtgaaaggaggttctgggccaggaacaagttttgcagataaccttcgtgccctggcctcttcatcaacgatgctgccctccaaccaccttctggcccaacagacagctgtggtccctgtaggctcagatttcatccctagcaattctgaagaacctgctatccagatctttctctcagagtttggccaggtcaagcccaaagctggctctggggatctaggccatccttccgactgcccttccgggacgcgtcttggagaaactacagccacaagctgtctccaccatcagatgtggcttacctggttcctgagtcaattccatccaggtaggaggaatcctatcagaaagtatgtgagtgcgtttgcagagtgcattcctgtggagcccccttatctctggctgcatctgcttctgcagggagaaagtatccctgctgtgagaggtctgggatctggagtacagaggatggtgaagccaaggcctgaagacctttcctgcaaggtcgcagaggaagaggcagaagaaggaccagaacccagctcccctgactccctatccagtgctcttctcatagattacattgcttcagcatccacctggctattgctccatccaggggttacaggagtcactgactgttttggttgcttcttggttggaggatgttgtgcctcaccgatgagagccggaagcaaaggtaccagttcttagaggaagcataggaatgtgtcccttcctgctcgggtctctcaactgaactcaacccttccttgattgattgacaagcatgttatctctcataatccctgcccggtaagggctgatgtccccattttacagatgaggatattggagctcagagaagtgaaatgattgctgaaggtcacacagcctggcttcaagcctctcgggctccaaaaggcatcttctgttctctccgtcaggaagcctcttttggatgattaactgagattaaaaatgaaaagaca

SEQ ID NO: 294999 - DNA, 1000 bp, Homo Sapiens
agtccgaaagcacagaacgtggcacgttggaggaaatcagtaagtgtttgctaaaggtccaacaatgaaacagaacagatatatccagtgctatgccgcgtcaaaagagtatgagaggagcattccagcagccaggccttcagttgctccccgatcccagatggggaaaaccttgtgcggcacatttgcctcaggaagactgcactgggctccccggcgcccctaggacagcgtcccttcacgtcggagagactgggtgtgggccgtgaggtttaggaggctttaggagaaggaagatcctctctcaggagtgaaatgatcttatctgagaggatggaagtggtgagggcatcagcatgggtcctgggctgcggctgtgcctcttcctccccatgctgacacgtgcttgcccacaagcgccccgggcctctacatctcttggtagtttaaagctctattttagtctcaactagcagtttctctcactggtagatctaagttctaagactattcaatgggttctgtttctttttttaagaattaaaaaaactgttccagttaattcacggtcactatgaaaaaaataggcaggacatgtaaataaaagattaaaatatatacaaatcaaagaaggaagtacacccaggccagttatcaggcaagcttgccagacatcaatccagcaagaaaacgatagtgtgctttgaaaatgccaaatccggccgggcgggcggctcccgcctgtgatcccggcactttgggaggccgaggcgggcggatcacgaggtcaggagatcgagaccatcctggctaacacggtgaaaccccgtctctactaaaaatacaaaaaattagccgggcgtggtggcgggcgcctgtagtcccagctacttgggaggctgaggcaggagaatggcgtgaacccgggaggcggagcttgcagtgagccgagatggcaccactgcactccagcctgggcaacagagcaagactctgtctc

SEQ ID NO: 295000 - DNA, 845 bp, Homo Sapiens; identical to SEQ ID NO: 224971

SEQ ID NO: 295001 - DNA, 880 bp, Homo Sapiens
atgctacgagtgccgtctcgcagcccggatccccatgacaagcccgtcgccgcccgcctgggaagcccggggagccagtctctgcgcctcgcgtctgaatgggacccgggaggggaggcggctcggtccttcgtgccgtcctccccgctgggaggggcagctccagctccgctcggctcgctccgcccggccacaccggctttttccccatcaggcggtccgagtgcggctcctcgcgagcctgcaaaggagcagcaggcggttccttttcggacgacctggagcgaggcctgcgggactgcgcgccccggcgggcggcgtgcggctcccggcatgcgcggcggctgcgttcccgccgcctccgagctcgcctggggctgccgcccgcctcctgccgggccctcgggctcgcccggcaccgcggggcttgatcagggagatattttagtacaacatcttttcatcacagaaatgatatcttcagggaaaagacttcgaaaaagtgcctgaagtgacacaacacatgttttcttctggtatctggctaaagccttctcttctaagcagcataaactactgctgcctacatgttgcctgttcataaaggctgaggcaggggagtcgcttgaactcgggaggcggaggttgcagtgagccgagatcatgccatttccctccagcctggcgacagagcaagactccatctcaaaaaaaagaaaagagaagaaaaaaacaaagaactttatgcaccttctggaataacaaaatgcaaatgtaatgttatctaccaggatagaaattggaggctagaatatgttgggtagggtagagagactagagggaatgatttagcaataaaataggtttaaatatcttctca

SEQ ID NO: 295002 - DNA, 567 bp, Homo Sapiens; identical to SEQ ID NO: 119263

SEQ ID NO: 295003 - DNA, 1000 bp, Homo Sapiens
gtcaaacacaaacaccaccacctctctggatcagaagcacatggaaagcccaccttgcaagaagacccagctattccaaaagtacccatatccctgtagcatcctcttagctgaatgtctctactccttaaacttgtaccactttgaagagtaaaaatttaaattcattcatattatcattttttagtttttagtataagtggagctgtttatcggccatttgtatgtccttttcttttttttgcaaattactcctttgccaaattttctctcaaatgactcatctttttcttattgatttgcagaagctatttacatattatggatgtggggtgtctaacatacacagcaaatactttgtcccagtgtgtcactttttaaaaaaattcttataatgtctttcatctttaaaaaattattaagctattgtgagcttttatgccttttcagtttattttcttacatagataattatatgaagtgcaaataggggcagtgttagtctcatcttcccaaggctgcacctcagatgtggaatgttgacagcaacatctgttaccttgtttctgtttttaggattttagcgttaaggccaggcataatggttcatgcctgtaattccagcactttgggaggccgaggtgggcagatcacttgaagccaggagttcaagaccagcctggccaacatggagaaaccctctctatttttaaatacatttaaaatgttaacaattaaaacaaaatattttaccgttagtatgatgcttgatacaggatttctggtacatacgccttatcaaattaaataagtttccttttactcttgtttattgttattttttaaaataaggaatgaatcttggattttagtgtatcaataattatattttattctttaacttcataatattccttataattccttatgtcatattaaagatgtaaattcatatatattttatcatacaaatgattaataaatgtataagcatgtcatt

SEQ ID NO: 295004 - DNA, 618 bp, Homo Sapiens
atggaccccagcatccctcacttggtcattcatcagcgattagttgactcctttgtatgtgaacatcctgatagaaagagcatcaaaaaaggaactaagagttgcagaatagcaaaactgaagttcagttcaaaacaaatttcatctcttctttttccagttttcctagacttagtcctgatcagttactccagaaaacctacaggaatctggctgagggagacagtgcggactaatatttcatttctccccactcctccctctgaggaatccaggacttcattgtggacccctgtattagtccattttcacactgctacagagagctacctgagactggttttacaacttgagggaaaaaagtgtgactctgagatgtaccagctgttaggccagagacaaccctcagatcacctgggacttgctccttgttgcctcctctttgatctttgcatcagagggccctgccagtctctgtcctcacagtacccagtctcttggagcccaaatggactacgacagtgcccaagaaagacataaggggaagagtaccagctgagaatacataccaaagatgctgtctccagcactgcatgggacaaggatgaagcctcatca

SEQ ID NO: 295005 - DNA, 288 bp, Homo Sapiens
ggcatggtggctcattcctgtaattccaacactttgggagaccaaggagtggaggatagcttgagcccaggagttccagaccagcctgagcaacatgctatcatccctcctgttatatttgcatcttctctgcacacctccacctgtgatgtcttcctaggactctccaatgtgtctggccctgaccaagctttttgccctaagtgtggcttatctgcgatgtctttctccctaacatccagttccaacccctttgcggggtccaagggctcctggaggaggagatga

SEQ ID NO: 295006 - DNA, 621 bp, Homo Sapiens
atgtgtcagaactgtgacgctgaatccggagccccaacctctcctagcctcctagaggaggatgacccaggacccttgtcctcccaacagcaggccaccagttcaagggacaagaagcccctaagctccctccacctttcacatagggcccaggtggccttggagtacctgcctttcttctgcacctatgggtgcctcctggaagaggaggggttggtcctgcagcccaagacaccgctccaggaggactcagaactgctcagtgggttcttcccttactaccgctctgaggaggagagtttgcccagcctggcccttcctggctggtcacacaggggctcccaagatctgcccactgagaaggaggcacgggctggctgcttctgcaggacaacagtcagggacgaatgctctactctaacaggcccctggacaggcccctctcagggctgctgcggcccttggagcaaggtgtcactggttgggagcacagacactgcaggaagactgtcctgttcaagcccagcttgaccacctgctaggagagcggcctggggaacgtggtttccttataaaagagagaacagcagcagcaacaataaagccattgtgagaattaca

SEQ ID NO: 295007 - DNA, 807 bp, Homo Sapiens
atgactcaaagctgcagaaatcccttcagtcggcagagtctgttggggcaaaatcagctgacgttggtgtcagctcagccacggactcttctgaatgaatcacggaggaggatcctgcaaaatccagtattccctgagatcctggagaaccttttgggcatggactcagaactgttgggaatgttacaagttccctggcctccagaacatgagggagggctacaagaagtgagggtgctcatccaggccttaaaagttggcagcatcccccaggaactaccctgtgaacaaatccaggctttcggaagcacagagggggagagagctgctgcctgcagagtggctgctcctgctttgcacggcccctggcttctgcatccctccatcctccagctgggcacagaggttgccaaaagggccagtaggaggagaaggcttcatggaggacgggggcaagagcgggccgaccatgctggcttcctcgccttgtgtctggctgactgcacaggcctgaggaggctgtgtgtaagttggcaaatgacaggaagagcatgtgcttctaatcacccacccatcttaataacgtcgaacagatacagtgcagaaactattgcacaaccaccagcatttcattacatcagaatccttgccaatttgaaagaggtccttgaatccagggagagttacatctttacgtttttgatcacgatcctcttggaagatacttattagggccatttgttgatgacaatattaagaattagcaaatatcttcttaaatataacaaaaattgaattgtttcatta

SEQ ID NO: 295008 - DNA, 1000 bp, Homo Sapiens; identical to SEQ ID NO: 119264

SEQ ID NO: 295009 - DNA, 1000 bp, Homo Sapiens
cattcagggttctgcatctcctgaccctgtggataccagcatttctgggccaatgagaacagaagctgcttttgtcctcccccaacatgcaacagaaacaggagaactgaaacctcagctgaagctcctgctctcccatttcagtatcccatatgacgtagaagagctctgggactctgctaaggaaatggaacttttttccttggtttcccaaaaatttcaaagcgtcttcatggagcaacagagattgcaaatgtttccagactgtgaagctggaatagctaaagcagataatttgggtttggcaggacccagaatgaccctgaaaaagaaagccaactggatttccttcataaagatcaagccaaaatgtgatccatggcaaaagaagcttttgactaaattaaaagaacggagaagaacagatgcattattgcaactccaagcaaagtttttgaagaataaaaatatgaaagatgatgacctctccatgaaacaaaatgaaaatgatctatcacagataactctcagccaacatgctgatgggcctctcaagcagatacaagagacagggtacaactatgcaatgaccctacaactgctgggcttggaagacggcactgaccccagtgataggaatcctgttctgatgagaggggcctacttgtcctttctgtatctgtgccaccttcgaatcagagaactgcagcacatctgcttaggaattctgaattatttcagatctgttgagcgaaccctgacaatcaatacttcgggccttaccttggtttcagggaaactggtccccaccatggaagatagttcctgggtaaatatggcaaaaggaggtctgggcaccttgcagggcctgggcgctcaccactatgtccgtgagacacctgctgagcacaaggcatgggggcctgataccctgtggcatgttcaggatctgctgggacttgacgtgctggtagcagaggttgttgtgaggaagcggtag

SEQ ID NO: 295010 - DNA, 639 bp, Homo Sapiens
agagagtgaaaagaccgcttacccaatttgaaattggtgagatgttccttgggctggttggtctgaggacctgaggtcataggtggatctcttcacggagtgaagaacaggtggagaggtatgaagaacgaggaacactgcccggggagtttcttcctctgcaaaataagggagtgtgtactgaattaccgtttccagctccaacatccaggatttcagcactacctgcagagtagtgggaggagagatagaggaagaagtgaagataagaaaccactcgaagccggtgtctggtgctgggaccgtggtggctgggacggcagcagtcgtgctgtccatctgctcttccgaggggtggcacatcctagcctctatcttttccccagagaagatccccctcgtctgctcttcccccgtctcagccttttagtgtgtgaacagttctggtgttactcagcaacgcttttgttagcgcctttaccagcaagtacttgttaaacacttaaatcttacaagtggaaagaaaattccgtggtaaatttaagtacaaaagtcaaccaaaattctgagtctcggacaagactggttaaaaatcgttctacaatgaaactaataaattaaatcatataaaacttttat

SEQ ID NO: 295011 - DNA, 424 bp, Homo Sapiens
atgccctacctcaacccttcctccgccctccacagctcctcctgcatcccccacccccaccaccaaccaccagaaggcctcttgaggccctggttccttctccccttggagacaggacctggtagaaagctcaggtcatgtgtgccagggaacgctttgtcacaccaaggccacctaatggttccttcacaagcgcctcacactttcagatccaggtcttccaagagctacagagtcgaacagaagctgcatctatctggcgtgcaggctgtcacctgtgacagagaggaaaggcaggatggggacaaagaccaggatctcactatcagtttaggaaattctctggtcttcatgctggcttctgacccttgtgtcgccgagtttccgtgagtgccagcagtttcaattacaggtttacaaagct

SEQ ID NO: 295012 - DNA, 845 bp, Homo Sapiens
gcaacacactggtttggcatctagcgggttgtgcttgcagaacagcaggctggctccgtgcacctgctcagtggggctgggctttagcaacctgcattgaggctgctcttcttaacttttctctaacttgcttcatgaaagttaattctgctgggaccccacgaggcagcggagagcccactctgcccatgattggtgccctgggctggcacgcagagtttaatggaggagcccgggagagagggatgcctgagaaccagggatgtgggctggagcagtgccacctcctctaactcacccgcaagcccagccaaccggctaaaccttccccacagagcctcagtctccttatctgtaaaatggattacctggcacttgtccagtctttctgcagtcaacatcgcccagattccatgcagaaccctttgcagactcctgaggaggtacagacaaggagtgtccctgtcctcatggtgctacatgaaaagggatcaggacagcatagtgtgtcctctgtcttgagaagttcgcatccagctctgccatggaccagccatgctcatggattgcctctcattttgctacggacaggagacaggaaaatactgggtagaagagggcggttcccgacaaaggccccaacctcaagcctgaagacccacgaccctaaatgaggacagccatttctgattttgtgcccaaaaatttgccttttggcctgccacacccaacatcttgcccctatataaacccgagaccttagcgggcacacacacaatcagccaaatgttgggattagcagaccagtggaccagcggaccagcagaccagttaacggtggaaca

SEQ ID NO: 295013 - DNA, 801 bp, Homo Sapiens
atgggctccgcccctccagccgcggtcatcacagaatggcctggcacggtgaccacggagtgccctggcaccggtgcccgcggctgtgacggaaaaagggtgggaagaacagggaagaggaagcagaaacaggcactccttgatgaaataagtaagaaagcttgtcaagagccatcactcttgctcatgggacaagagaaggcactgacctgtgcccaccagcaccccatcactgagccaacaccaccttcaggaagacagtctccagcagggcttcccccaattcccctagctgctttgcctctgctactccggtaagcacctgcagggaggcaggcaccccagcacccactagcattctgcaacagctgttgcaccttggctcccccagtacagtggattccaaacctcaaggagtcaaagaacagatggggcccaatacaaattccccagaattacaacatgccgtccaggagttgagagctgagtgttgaccttctaaaatctcccagaaacaaagccaggtggctgaatccaccttatattatagtcaaaccctcaaggtcatcaaatcatcaaataggataaaagaaaaaaaaatccaaaggtcagcaacatccaagattgaagacagataagctcacaaagatgagaaagagtcagcacaggaaaactgaaaactcgaaaaaccagagtgccctctttcctacgaacagccacatcacctctccagcaaaggttctgaactgagctgagatggccaaaatgacagaaatagaattcagaatatggataagaatg

SEQ ID NO: 295014 - DNA, 912 bp, Homo Sapiens
gcacccacccaggatgtgtgcaaggaagtgcaggatgctcctggtcttgcaaactgtggtttgtgggactccaaagcccctatccttccacagtgctttctgtcttgttatcacatttccttggaggagagcccagccttggtggagagccctgctctggctttgtccctcggcatgagatggcaaaggatggtgctgctgggagaccctcacgtctgcacactgggggctgcttgccttctccattcctccttcaagtatctgagcagctcctgtgtgccagctgctggtctacaagatggatcggtccttggagatcatgctgtagcagaggaggcaggctgtagcccacacgccacaaccagccccctgcctgttcacacaaataaagttttattggaatacagccacacccatttcagtgcatattgtctgtggctgctttcctgctacaatagagagttgaatagttgggacagagacctatggcctgcaaagctgaactatttaccatctggctctcaagaaaagggaaaaaaatgcttatctttgtaccccgacagtcttagattaagagtactttgtaccaccctgacgtcccaggcagccatgagtccagccacccctgaaatgtacacaagtctgggctagggttgcagcaggtgagtcccaattttgcagatctttggcatcaggggcacaacccaggattttgagtggggtttcctcaccactgtggctgggcactgggctagtgtgctttctgatttttgtatggggaagagaaaggagggaggaaatggcaacttgttgccctgttctaacattttcctaagatgggtctccaggcaagggcttgggatctcaccttacacagcttacaaaacccagtgaggccggctgtcttggcgc

SEQ ID NO: 295015 - DNA, 513 bp, Homo Sapiens
ggggagacaccagagcaccaacttctctcacttaaaccttatgacaaccttaagaagtaggcagcatgatccccttcttggaaatgcagaaagagagaatgggggagattgagaggcttgcagaatgtgacatcattagggagaacagtggttgaggtccagcagctcctgcagatgggtggtggtggaaggaggagagaatgggccacaggcaggccaagggcaagcttagcagcactcaacatcctccatgaactcaacagaagtcaagaatgcaggcagctcatgatgaagacctgcagcggcccaggtttaccaagctcattcacaattgcagttggagaattcgtctttggtcattttctactttggaaatacgagacaggatctccctctgttgtgcaggctggtctcaaactcctgccttcaagcgatcttcctgcctggcctcccaaagtgttggaattacaggcatgagccactgcacccgcccagtaaatcctttctgataca

SEQ ID NO: 295016 - DNA, 487 bp, Homo Sapiens
atgtctgcagctttgcaccaggaatggtttatgtccttgcaggaggagaaaagcggggcagcatcaaacccctcccactggggcaacctgctgagcatctccctggccttggcccctggccataccacacaagtgtccaatgagtcactgatcctgaagaacaagagaagactgaccacagaccccaaaaggaagcaggagtacaaccttcgaagttggtgggcaacaagaggtcagaggttgacaagcatccacacagctctaagactagcatcatgtggctacccaggacctgggagagtgctgcagagcaggagcaggaaagggaccggctgttcccatagaacttcatgtcacaggtctgggagccagggggccttggttctagtcccaactctccctctaagttgtcttatggccacaggtgagtgaaatagcttctctggcctcagcttcctcacgattaaaatgacacagttgtgcaaaa

SEQ ID NO: 295017 - DNA, 1000 bp, Homo Sapiens
gacttcccagcctcaagaacttcttgctctgttgcccaggctagaatgcagaggcaccatcttggctcactgcaacctccgcctaccgggttcaaatgattctcctgcctcagcctcccgagtagctgggattacaggcacctgccaccatgcccagctaatttttgtattttcagcagagatgaggttttaccatgttgaccaggctggtcttgaactcctgacctcaagtgatccgccaacctcggcctcccaaagtgctgagattacaggcatgagccaccatgcccggcctccatcttttactttcaatctatctgaagctttatatttaaggtgcatatattttagacagttaataatttcagcttgcttttttttttcctagttggggaaactctgctttttaattggattgtttattctggttacatttgttgttgtggtgaaatttggaaagttcaacctgccacaacgtcttcacttactatttttaaaggatattctcaatgagtgtgaatagtgagtcaacagctttctttcaccatttcacacatcctgagcctccattgttttgagtcagctgtcgttcatatctttgttacctgtgaatgcacaaaatttgctctgtatgatgactatgatgtgtccaggtagggttttctttacatttatttttatgaggggtttatgaactttttgaatctataagttgatgttttttcactacatttgagactatatcaactttttttttctttcatcttttccagccatttcttcttggttctggttccgtgtgtactgcatgatattgtaccacgtgtcacggagactcgcttccttgttttctttcagtttcattttcccttgcacttcagatggaatgatatctattgatctcttttcaagttcactcattctttcttctgtaatgttcaatctctcttaagaaagtccaaataaatttttcatttcagagagtggaattttcggttct

SEQ ID NO: 295018 - DNA, 672 bp, Homo Sapiens
gacaaaggatcaagagatggtttccacactggcaaggagtaatcttggagacaggaagagactggtgattcaagagagagtagacagaagaaggcgctgtctgggggagacaggttaatattcatctgtagcctgagtgaccccaaaaagatgacactcttctgtccaccaaaaccttccagaggcttcctgtgctcacttgaagtaaaatccaaagtgctgactgtggttaccagctccccgggctggcctgctgcgggacggcttctccaccagcctcccgttcaaggcctccatttctgccactgcggcgtctgcatggttcctgagcatcccaagcacattcccacctcaaggccttggtgcttgcagttcatctgcttctctcctggtctatgcctggctggttcttatttcttttgaattcggacgaggtgcacctcatgagagaggccttccttgacctccctcctccattcctctcacaggccccatctgacatgcttgccctccccctcccctacccccatccccttgtgagccccatgagagaagggcctctgtccttaggtagatgtgattccccagaacccaggacaggacagccacacaggaggaaactgacacacttttcttaaatgatggaataaagtactgactgtgtttcaagca

SEQ ID NO: 295019 - DNA, 872 bp, Homo Sapiens
actctcttttcggactcagcccgcctgcacccaggtgattaaaagcttcattgctcacacaaagcctgtttggtggtctcttcacacggacgcgagtgaagtttcgtgccgtgactcggatcaggggacctcccttgggagatcaatcccctgtcctcctgctttttgctccatgagaaagatccacctacgacctcgggtcctcagaccgaccagcccaaggaacatctcagcaattttaaatcggcctttttgatatttcattaacacacatgaaaatccttctgaatgatgttcctgtgctttgtaaaaacgcatctagcatcccacaggtgatatagacaggagacagggagatactgagtagaagagggtggtttcctggcaagaaccccaccctcaagcctgaagaaccttggccctaaatgaggacaggcattcctgtttttgcactcaagaagttgcctttcggcctgctacgttccctatcctgcacccatataaacctcaaaccccaggctccaggagcagaccagcagatgaagagaagcagagggacggcagaaggacacagcagggagacaggaagaggaacgttcagctgggggtggttggaaaggagtttggcagctggacagcccaactccaggggaagatcatcttcccactccatcccccacttccgctttcccatccatcccgccaagagccacctccaccactcgacgaaaccctgcgttgatccttcaagcccgtgtgtgacccgatactcccgggatgctggataagaactcgggatacagaaagatttcacactggccctctgaccttgcaaaaaggcagagggtccatagagctggttaacacttaaa

SEQ ID NO: 295020 - DNA, 1000 bp, Homo Sapiens
tcttctctcccactcagctcgtgttcttcgccttcccccagcgagcgaggccggcgagctagactgcctcaccgaggcggctcccgtaacaactgcattggaagaccaaaacacaatgcattttgcagaaagaatccgaatgggatttttagtaagttggcctgaccacttccccagcaaaaagatgcctctaattgatctctacgtagaaatggcagctggtgatgataaccactgtgctctgcttgggctttatcatgggtctggtgcctccaaaatggacctggccatggtacggagcagcggtggcacctggtggaagattctggtgcctgatgaaagaaagagaacagcatctcttggcaatgatagcatccagcagctggctttagctgtggatgacagaagagtgaaggaagatgaaggggaggacaggagattaaatgaggaggtagcgtgggatgggcagtgcaaggagagctgtgcattagcttttgtgggctttaatgaagcaggatttgacagcatttcatatcagaaaaccttcagctgtgagtccaagaccatcagctcctttcacccaaatgcaaatgtctccaaggcctctctggctggccggcctttcactggcgctggcgagcagtggcagcgacagaactctgctaaggacaggagcttccgacagagaggggtttgtgaaattcacagaggcggcatcacccagatacactccctgaagcacaagctcttaaagctctggacctggtccaggggcgtcaatcctgttctcctctcacatcacttcctccttgctgggtgttgcaaggaggtccttgcatcacactttgacctccctccacagggcccctgccatcttccagctgctgaagggttggtgaggaaaggtgatatagataatgtgtctggagaagggacaccttatcagagtcatggacagatcaaagtcacacctgagaagcctcgggtggttcagaaatga

SEQ ID NO: 295021 - DNA, 926 bp, Homo Sapiens
atgctagttgcgggggtttggcgggtggggggcgagctccgccaggccgcagaggcgttgcgtcagaccaatgcggatcatcctggccaatggcagtgcgaggctgaggaagcccctccttctcctggcgcccgcagcggacccagccaggcccgtgcccctgctcgcgctgcagcccgtggaagggttccgtccagcgtatccttcagatcttgctgtaggcctctggtgtctgtgcgcgcgcggcaggggcggcggcggcgacggccggaggtgtacggtcagcgggttgcggaggatcgtgcgggtcgcaaagggaagccgagtgctcctgcggctcccagactgcaaccaggtgtaaatccaaaccgcttccaactcaaggcaagtaacagcccacggtgttctggcaggaaaacatcagctaagaaaggaaactgggtcctatggcttggactttccaactctgacagaccggcaggacagaaacaactggttcaggagcccttgccagcctctagagaaatcccagaacactcagccctgatgacacattaataccctgcacatattggagactgctgaccacgcatactcaccaagccacagacttgtcttccacaagcacgttcttacctcagccacaaagtgcccaagccacatgtactaaaggttgaaatcagagacatgtacagggtattaaacagataccaaggggaacagttaacttgaatatagcttgaatagaaagtcaaaatcagcaacaagtctacaatccagtgctgatatcagatacaagcttcaaggacaactttctgtgtatgtttttttttttttttttgagacgtagtctcgccctgttgcccaggctggagtgcagtggtgcaatctcggctcaccacaacctctgcctcccaggttcaagt

SEQ ID NO: 295022 - DNA, 458 bp, Homo Sapiens
gggaagaggctgtcgggaaatggcggccgcggccgggctggggcttcagcgggaggcagcagaggggaagtggtcagcgtggcgaatgacggaagaaactcgcattgtctactggatcaaggacagacagctcaccaaccgtgacagcaccatactggaacttcaaaaagttctgaaaacatgttgtgctcagagcatgaaaattttctgctgtctttggaactttgtctacaaacagttagaagatgcagcccaagggctcaccatgggtggcgatgttgaagaacatgaagaccttactgctgatagcaccatcttcaaatttgtggaagcttatgtgagttggataggaaaatttcctacatataatgttggctcttccatttgtttctaatttagtatttctcaattgatattttttttgttgattagaaaaacaattttacttcctgcagaat

SEQ ID NO: 295023 - DNA, 1000 bp, Homo Sapiens
caggccatggccagctggaccctgagatggtgctatctgagaaagccaatgggagcaccctccgggggtgcacagaggaaaggacgctcagcctgaccttcccggggctgtccgtgccagcggctccgcgtgagggaggggcccgctcctgcttggtgagagagtcagcacgcggtggcctgcagtgtcttctgtggcttcagcgtcacctagtgcaggctgccattcaacaaacgcattgtcaacagtcaaccaaaagaaacccattggccaccataccctgaggactaaccctgacacagatgcccttccagatgccctcagtagtctaactgattccatcgccccagccttgggggagaagcactgctgcctatgcactccatttacaggctaaaatcacactcgatgtttttatgggatcatttgatctggacattgtcaaagaaaaaattgcaccagacaagttaaaccttcaaggaaggactcagtcaggactactgcaacacggaagagagaaggagcttaactttgttgaaacaaaaggctggagagtttttaagtgccggggtgagatgctgagaaggaactggagacatcaggaagaggttaggaaatgctgtaaagctatctgcgttggctcattggaatttttcaaaactaggaatctgcccttctacaaaaactgagacacagatgtatcatctccttcaataattgcattttaaagggatggctctgaagtcttgagaaaggcattcctgggttgcaaaactaggaagaggctagaagaaaatttgggagaagatttgcatctcaaagagatagagaaagaactcacaattgcaagtttcctaaaataaatcctccgtgaaaaaaggaggcctgatggatggaactggaggtcattatgttaagtgaaataagccaggcacagaagaaaaatactgcatgttctcactcacatgtgggagcttaaaacctggatctcatggagata

SEQ ID NO: 295024 - DNA, 1000 bp, Homo Sapiens; identical to SEQ ID NO: 294713

SEQ ID NO: 295025 - DNA, 1000 bp, Homo Sapiens; identical to SEQ ID NO: 294882

SEQ ID NO: 295026 - DNA, 1000 bp, Homo Sapiens; identical to SEQ ID NO: 224975

SEQ ID NO: 295027 - DNA, 617 bp, Homo Sapiens
ggggcctgaagccggaagctacctatctggtagggagctcccccagcaccgaagactgcgatgacttctgcgctgacccaggggctggagcgaatcccagaccagctcggctacctggtactgagtgaaggtgcagtgctggcgtcatctggggacctggagaatgatgagcaggcagccagtgccatctctgagctggtcagcacagcctgcggtttccggctgcaccgcgggcatgaatgtgcccttcaagcgcctgtctggtgtgtctctcctccagtggtctttggagaacacacactgctggtgacggtgtcaggacagagggtgtttgtggtgaagaggcagaaccgaggtcgggagcccattgatgtctgagcctgccggagggcgagggtcggagaagcggattgggtcctgggcctctgtgatgaggcaggcacacctgtcggtcttggcttgctgctagaactagggccttctgctcgcccacctcccacccctacctggacgggcccaggcttggggactctgagctgtgttaaggagaacaagggcaaggagacctccctttgtgctccctcactccctaataaacatgagtctgatgttctcca

SEQ ID NO: 295028 - DNA, 1000 bp, Homo Sapiens
tccgctccatcctcctggtgggcccctctggcatggggaagaagatgctggtcaaggcagtgtgcacagaaactggcgccaacctgttcgacctgtcgccggaaaacctgctgggcaaatatcctggcaggaatggggcacagatgatggtgcatatagtctttaaggtccggagcccccagcttttggcatttgcggttctcagacctgtggcaacaaaggaggggggctttgaggtcacgtcacccatcagcctactgggtatgatttcaggtgctgaactggtagcccgactcctacagccctctgtgatttggattggaaatgctgagaagaatttctataagaagacccccaaagaagacaaggagatggacccaaagcggataaagaaggacctcaccaaggccttgcggctgctgactcccggagaccgtgtgatgctgattgggacaacctcccggccacagctggccgagatgcggggtctgtgccgggtctacgagcggatcctcttcatgccccggcctgactacgcatcccgctatgtgctctggaagcgtatgatagaggcccggggcatccagccgacccagcacctggacatcagtgccctagccaaggtctccgatggctacacgccgggtcacattctccaagccatccaatcggtgctgagtgagcggcggttcctgcaactgtccaagcggcccctggtggcctccgagttcctgggacaactggtgaagctggatccagtgtacagggaggaggaggagtccctgaaggactggtacttcaagaccccactgggcaagaagagcatgaaacacaggatggaccagttggaggccgaggaggccaagctggacaaggagaagaagaaaaggaagtgatggctaaggcttgcgggcacctgagattagtggcgtgggacagggcagtggcccaagggtaaagggatggggcagaggcataaatgcccagatgacttgggaac

SEQ ID NO: 295029 - DNA, 1000 bp, Homo Sapiens
tctcccaaggtaaggctggcggccaaacccagctgcgcacacctgaacctgctccttggcagagatgaagggcgtcatgtttcgtagccactcaacacccatggacaatttggctccttgtaaagacttagtcatgcctttgaactgacttacttgaaatataattgctcctattttgctccaaagaccagtggcatgatgggttagagttatttgtatttattgagattgttgtaattagcaatctcagggctcagtctaactgcattatccatgctggaaaacttaaaaaaaaaatacagtccttcatcttcagttttccaatggtcgccagttatacacagctaatctttgcagtgaaagttgtctttggagaatgtgctttcttggtcccgggtggtcctggtcttgggctggaatctacgtgagctgctttgaagtaagctgacaatacacaattattaaggctattttgacctgcaagtatggtttcttaaaaaggaacaattaaataccatgtagcagttatttagactttagcattgactaaggaaaggagaaaatggaagaagaaccccctcctgcttagatgtagtcatttttttaaaaagtaatcttttggggaataaacttaaccaaggaggtgagggacttgtaaacaaaatgttaaaactgcactgaagactagaaaatgttgatgaaagctgttaaagaagacacaattagatgatgaaaacacatcccatgttcatggattgaaagacaatattgttaagatgtcaatactatagattctatgcaatccctgtcaaaacccaattttttttcaaacataggaaaatccattctaaaatttacatggactctcaaggaaccctgagtagacaaaacaatcttgtaaaagaacaatgttggagggctcacactttctggtttcaaaactacagtaattaaaaagctacagtaattaaaacagcatgatattgtcacaaagatatag

SEQ ID NO: 295030 - DNA, 1000 bp, Homo Sapiens; identical to SEQ ID NO: 224977

SEQ ID NO: 295031 - DNA, 1000 bp, Homo Sapiens; identical to SEQ ID NO: 224978

SEQ ID NO: 295032 - DNA, 1000 bp, Homo Sapiens; identical to SEQ ID NO: 224979

SEQ ID NO: 295033 - DNA, 1000 bp, Homo Sapiens; identical to SEQ ID NO: 119267

SEQ ID NO: 295034 - DNA, 1000 bp, Homo Sapiens
gtcccagctgaccagccagagcgaggccatggccctgcagtcgatccaaaacatgcgtgggaacgcccactgtgtggactgtgagacccagaatcctaagtgggccagtttgaacttgggagtcctcatgtgtattgaatgctcaggtatccaccgcagtcttggcacccgcctttcccgtgtgcgatctctggagctggatgactggccagttgagctcaggaaggttatgtcatctattggcaatgacctagccaacagcatctgggaagggagcagccaggggcagacaaaaccctcagaaaagtccacgagggaagagaaagaacggtggatccgttccaaatatgaggagaagctctttctggccccactaccctgcactgagctgtccctgggccagcagctgctgcgggccaccgctgatgaggacctgcagacagccatcctgctgctggcacatggctcccgtgaggaggtgaacgagacctgtggggagggagacggctgcacggcgctccatctggcctgccgcaaggggaatgtggtcctggcgcagctcctgatctggtacggggtggacgtcatggcccgagatgcccacgggaacacagcgctgacctacgcccggcaggcctccagccaggagtgcatcaacgtgcttctgcagtacggctgccccgacgagtgcgtgtagtatctgttttatttgactgcagtctccttggtgcaaaaacaaaatgggaaaaataaggataactcagaatttcaaaaggaaatcacaaattcagctagtaatagcattttcagtacttttcgtaaactaagtaaatacacaaaatgttgatttttctgaccataagacatattttatgtccttttgccgaggtggatgtgttagtctcaggccctcctggccacattgcccaagtcacacaggcttctgtattatgtatttagataaaatgtgtgaaaatatatttgaaaaaaagttcataaa

SEQ ID NO: 295035 - DNA, 1000 bp, Homo Sapiens; identical to SEQ ID NO: 119268

SEQ ID NO: 295036 - DNA, 1000 bp, Homo Sapiens
gaagggccagcttgggaggggacaggctaaaggaaacccatgaagcattgaatctgagctcaatttcaatgagaaccattcctgaacagtggaaagaccagagacatcagaaccatctttcccacttccattaagccaaggcatttggtcttatcaccaggacatgtagctttttggccatgttgaagaatctctgtggaaagaattcagctgctcctacctacagccagaatctggtgatttagaagagaagattgaacaaccaagatgaaaacccctgcttcctttacctgaggtgtggccctgatggagtaaacgcgaaattattttctacaaaaattacttaatattggcatcctccactcatgcctgtaaaataaagttgcgctcctttggtgaaagacagtgtgtgttcatcagtaaagttgtgatacacatgagagcagtttcagcaaattattcaacaggctctcctgctgtaaaatcaagaatagaactagacaggatccaaaccataatggagtccatggggtcaaagttatctcctggagctcagcaattgattaatatggttaggtttcagcagtggaattgtattcctattgaagagcagcttcagttggtgttgggcaatgctggatacaagcaaatgactggactacaatgctcatctgccttaggagccttagacaagtcatcctccacacctttcccttttagaactggattgacatctggaaacgtgactgaaaacttacaagcgtacattgataaaagcacacaggcatctagtggagagaattctacaaagcttgatgagtgtaaaattgtgccacaaaaccattcccttcttgaaaatgatcttaaaaatgcaacatcccctttcttaccaaagaaagcaaatgacaactcaaatatacctaactctgagttgctgccttttctccagaatttatgtagtcaagttaactatctccttgtgggacgtaaggccgagtga

SEQ ID NO: 295037 - DNA, 1000 bp, Homo Sapiens
tatgggctaagtgccatcatttcatttgcattgacaccctggaaggtagcacataaagagtgcgtggaaaaagatgggcaacccatcctgtcctccactctaaggacagatggcattgtcagtactgggggcacttctgagggctacactgaaaacaactattttgatcaacaagataaccagggacccgaatatgagaaagagaaagacattaagactgctgatgttgttgactcgccagagttccttgcacactgggcctgcaccgaaggcagccaggtgggatgccccattgtcttggagctgcagctgcaggtcccaattagccagaggaaggcagctgagcaagggcagcagtgggcagggccaggaaagatgaacatccaagggctggccacccaccctcaatgtcaggaagcacagaccattttcccacgaccctttctcgctgagcgtgtgattccaaaactgtccacaagaaggtgctcgggagccagaattcaggcgttcccggcccgcggacgcttagagaggggagcttcggaagaggaaggtcggagaaaccagtgccgtggaaggctctggggcgttgacaggcgctgtccccagctcaccggctctatgaccctggaagaatggaaacttcgtcagagcagggacgtgagggtgaactgctcacccgggcaccgctggcgaccggaacccagctccctccgggctccgggagaggcggcctcagctgtgtgctggtgctgccctccagcggcgctgggtccccatggcacctggctttctcctgctccccaggggccttttcttctcccgcccacctgtcaccagccgccagggcaagtctctgtgtgactctagggtgaaggtggagggaccttgcctccgaggattcatcccacccggattccgatgagtgagggaccctctctggcacctggtgtttgaatggccagcctcacagttaataaagacaagtttggtatcagct

SEQ ID NO: 295038 - DNA, 1000 bp, Homo Sapiens; identical to SEQ ID NO: 224981

SEQ ID NO: 295039 - DNA, 1000 bp, Homo Sapiens; identical to SEQ ID NO: 119270

SEQ ID NO: 295040 - DNA, 1000 bp, Homo Sapiens; identical to SEQ ID NO: 224982

SEQ ID NO: 295041 - DNA, 1000 bp, Homo Sapiens; identical to SEQ ID NO: 224984

SEQ ID NO: 295042 - DNA, 1000 bp, Homo Sapiens
gccctgtaagactcattttggatgtctggcctccagaactctaagcgggtgtggttttcagccacaaagtgtgtattgttttaagccactaagtttgcaataatttattatagcagcaatgggaaactaatacaatccaaataaacttctaggaattcaaatcattggtaagcctgagtacccaggggccagtctaggtgacaacagtatccaccgctcagggcttacagtgacctgcaggaagagaggaataacagagcacatgctatgaataaatgtggagatcaatttgtggattttaaacttcatgacatgctgcagataatcctttaggtgtatctgtggtaaatggtgccttgctatgttctgaagcaatcaaacatgatgtcctaatagctcaatttatcagttcctcattagcttgtgtactcactgaaattcttttagcagttaatgtccttgtattagtctgttttcatgctgctgataaggacatacccacgactgggcaatttacgaaagaaaggggtttatcggacttacagttccacgtggctggggaagcctcacaatcatggcagaaggtaaaaggcatgtctcacatagtgacagacaagagaagagagattgtgcaggaaaactctcccttataataaccatcagatcttgtgagacttactcactatcacgagaatagcacaggaaaaacctgcccccatgattcaattacctcccaccggtccctcccacaacacgtgggaattgaagatgaaatttgggtggggacacagccaaaccatatcagtccccttcttaaaactctcctctctagctcctatgactgtacatttgtagttctcccacctctctgaagaatcctctgtgagggtctctggggactttgttttgatttgttattgtttttatattcagtctttaacctatgtgaagccacctttgtaatactgccttaagtaaagatccagtattatttttctcc

SEQ ID NO: 295043 - DNA, 1000 bp, Homo Sapiens
aaggtgagcaaatttttgcaaaccatgcatctgacaaaggtctaatatccagcatctataagcaacttaaacaaatttatgagaagaaaataagtaactccattaaaaagtgggcaaaagacatggacagacacttttcaaaagaagacatttgtggccaaaactcatatgaaaaaaagctcaacatcactgatcattagataaatgcaaatcaaaaccacaatgagataccatttcacaccagtcagaatggttattactaaaaagtaaaaaaaagtaacatatgctggcaaggttgcaaagaaaaaggaatgcttatacattgttggtgggagtggaaattagttcaaccattgtggaagacagtgtggaaattcctcagacctaaaaacagaaataccatttgacccagaaatcccattactgggtatataccccaagaaatataaagtattctattataaagacacatgcagatgtatgttcattgcagcactattcacagtaacaaagacatggaatgaaattaaatgctcatcagtggtagactggataaagaaaatgtggtgcatatataccatggaatactacgcagccatgaaaagaatgagatgtcctttgcagaaatatgaatggagctggaggacatcatccttagcaaactaacacaagaacagaaaaccaaatactgcatgttcccacttacaagtgggagctaagtgaggagaacacatgaagacttagaggaaaacaatagacactgaggcctattggagggcagagggtgaaaggaaggagaggatcaagaaatataactaatgggtactaggcttaatacctgggtgattaagtgatgtgtacaacaaacccccatgacacaagtttacctgtataacaaacctgcacatgtacccctgaacttaaaagtttaaataacctgtcaattctcagccaggctatagggaggagaatgtaatctctcaattaaacatatcaaagt

SEQ ID NO: 295044 - DNA, 1000 bp, Homo Sapiens
tttcaaagaggtggttctcaggtcctagagaaagatattcctgagttgtaaaactgggaagaggctggaagaagatttagatctcaagaaatagaaagaactacagcaaattttctaaagcaaatattcttaagggaggtcaagggcctgaagtcaggaagaaacctatttggtcaagctgaggggaaagttaaggctatcttgtcacaagagaacagaaatatctgacaatatttcatttaaagaactgtattagtccattctcacactgctataaataaatacctgagactgggtaatttatacagaaaagaggtttaattggctcacagttccgcaggctgtacaggaagcatggcaacatcagtttctggggaggcctcagggagctttaactcatggtggaaagcaaagtgggagcaggcatcttacatggtatgagcaggaggaacaaaggaaaggggaggtgctaacacttttaaatgaccagatcttgtaagaactcactcattatacagtaccaaggggagatggtgctaaacgattaatgaaaactctacccagtaatccaatcaccacccaccaggccccacctccaacaatggggattacagtttgacatgagatttgggtgaggacacagatccaaactgtcaggcctctgagcccaagctaagccatcatatcccctgtgacctgcatgtatacatccagatggcctgaagcaagtggagaatcacaaaagaagtgaaaatggcctgttgctgccttaacagatgacattactttgtgaaattccttcttctggctcagaagctcccccactgagcaccttgtgacccccacccctgcctgccagagaataatcccctttgactgtaattttccactacctacctaaatcctataaaacagccccacccctatctccctttgctgactctctttttggactcagcctgcctgcacccaggtgattaaaaagctttattgctcacac

SEQ ID NO: 295045 - DNA, 1000 bp, Homo Sapiens; identical to SEQ ID NO: 224986

SEQ ID NO: 295046 - DNA, 1000 bp, Homo Sapiens
ttcttaaggattcaaggatggtttaacatatgcaaatctattgaagggatgtatcacatcatgaaaatgaagacagaaacatatactcacaatagatgtagaaaaagcatttgataaaattcaacatctcttcatgacaaaaactcaatgaactagacatatgagaaacatacctcagaataataaaggctacatatgacaaatccacagctaatgtcattctgaatgggaaaggttgagagtctttcctctaagcactagaataaaacaagaatgttcactttcatcactctttttcaacttagtattaggaagtcctagacagtccaatcaggcaaaacaaaaaataaaagatatccaaattggaaaagacaatgttaaatagttcctatctgcagatgaaataatgttatatttacaaaaacctaaagactacaccaaaataactcttagtgcttaaaaataaattcagtacagttgcagaagacaaaattaacatatacaagttaataacatttctatacaataattaaatagttgaaaaataaatcaagttggtaatcctatttccagtagctacaataaaaacaaaatacctaggaataaatttaactaaggaggtaaaagatctgttcaaggaaaactataagacattgatgaaaaaattgaacaaacaaatgaaaagacatcttatagtcatggataagaagaattaatatccttgaaatgaccatactaccccaaataaaatacacattcaatgccctccctatcaaaataccattgtcatttttcacagaaatagaaaagcaatcctaaaatttttatggaaccaagatgtagtcggaatagccaaagcaatcctaagcaaaaagaacgaagttcaaaacctcacacaaactgacttcagattataaggctataataatcaaaacagcatggcattggtatagaaatagacacaatgggacagaataaagcacccagaaataaatccaaa

SEQ ID NO: 295047 - DNA, 1000 bp, Homo Sapiens
aagataatttttttctttttctggtccatataaagatgatgctctaaccctcctcccttacaagcatgtgtacctatcaaaagaaaacttagaaatttgaatcttgagtttacatttaagtcatagcacggagaggattgagaatgtggcacaatggaattctcatccctactatttctaaatcactcagcaaactgaagctaggtctctttgcatggtttccagaggcgtcatgatggaatggatacagaaaatggacaaaatactcaaaatttatgtcttggttctcaccactcactcatggttgagactcattgtctacctgtgcagatacggcattgatggaggctggtgtgtaagtgaaaaagccacaaataatgatacttccctgttgagttctattaatacacagtcaatctgtaagttattcagtaacaccactgagggagcaaaaatgtagctgagacaagagcttttatgcctcccactaagctgcactttcaagggggcaaggtaaccctgaaggtggagtaggaaattagacattttaactgaggaaccatgcagattgtgcccaagagtcagagaagtacattttctgctaataaagaaatggagacaatgaattagggaaaacaactgtgatcctgggagctaataaaatcacagactgccagtgctaagacaacatcccacatctttcaacagcctctaaattcatcagcaggaggccacaccaggtacacaggatgagcaaagccagagacttacactcagaaaatgaactgtgaccacattttcttcttgaaattagatgccatattagggagtaagaaaagttagggagaaacaaccctgataagaacttgaattttaaatggtttgaatactaatacaaaagagattaagttaaacatttttttaaacaatgattttcactttgtcttatctttcttataggttggtggcctctgatgaaggtattccaaatatagacatt

SEQ ID NO: 295048 - DNA, 1000 bp, Homo Sapiens; identical to SEQ ID NO: 220461

SEQ ID NO: 295049 - DNA, 1000 bp, Homo Sapiens
gtcttcaagcatgtgctgtcataacagattaaagatgactgaaaattatctgccactcattgcgtgaaaggtgggatctgtagacctccctcttgaatttgggagggttctgtgactgctgtgaccaatgaatatggcagaagtgacgctttgccaacttctgggtccaggctatacgagacaggcagttccactcactgtctcttagatccatgtaaaaagttcatctaccctgctggaaaaaccatgtagagaggccctgagactacattgggtgggagaggggctcagctgcaccatcttccaactgtccccatcaagatgacagaaatataaatgaagccttcttgaactccagaccatccatgctacaagctaaatgccaccaagcgaccccagttaataccatgtggagcaaaaatatcacttaaccaagcactgcctgagtttctgaccccacagaattctgaccccatacaaataaaataatttttgtaattttttataattcgtcatgtaatagataaatggaacagccttcttccagtcttttaaatagctgcaagaaatcttattcaagcagaaggaagtttctactttgttcatacagtctcaagacatccctggagcctttcaagggaaatttgggcagaagtaggtagagaggtaaagctattatgtaacattacttaacatgattaaaaccaccttaatgtctcccatcctcaaaggctgccagtgaattggaaattaatggattaaatgaggacagagaaactagtatttgtgcatatgcactgtgccaggtatttaacgtatcttagctcatgtggtcttcgaaacaaccccatattgtagtatcaggctcacacgggtaactaactagtgcaaagacacaaggctcacaaactgctacttgaccctagagctctttgactccgattcccatgtacgtgccccaataccatgttgactcccaaggtgtaaatcttcaggtata

SEQ ID NO: 295050 - DNA, 1000 bp, Homo Sapiens
taattttataatataatcttcatctaattttgatggaaattacattaaacttgtgtaacaattcaggaagaactgatatatttacacctcttgagaccaaatctggaacatggtgtatctttccatttatttaagccttctttgatttcctcaacatttcttcttcaataaaaacattgtagtttttgttatataaattctgtatctgttttgttacatttgaacctaaacatttaattttttgagtaattctgaaatgatattgcatttctaattgtttctcatatattctttgctaatatgtaaaaaaacaatttttttatgtttatcttgtatcctgtgaccttattgaagtcactttttagttctgagagtccctttgtagatttcttgagattttctacagagacaatcataccatttgcaaatagaaacagttctattcctacctttctaatacataagcattcatctccttcatctatcatacttgccaaaacttccagcagatgtctttactttgtttcttctgtttacccaagacagtctttctgtctttttctttctttctttctttcttttttagcttttcttgttattgtttctatatgctctttatcaagttaagaaagtcctcctctgtctctatgtttcttggaatatatataatgaatggatgttaaattttgtcaaatactttttcttgactgatattatcatgtgatttttctttaacttgttaatatgttagattacattgatctttgaatattgtaccagccttgcattcttgtaataaactttatttggttacagtgtataatcaaatatagtgagttatttgaattgaatttgaattgttatagttgaattgtttttgttaatatttcattaaggattttgtttctatgtataatagggatatttttctgtagattttgtttcgttttggtttttaagtatcagagtaatgccagcttcttaaataaattgtgaagtg

SEQ ID NO: 295051 - DNA, 1000 bp, Homo Sapiens
ggggacagtcccaggcataactgaaggtgaaaggacagaatcaccatgtgttactggcacagatgcatcggctagtgaagaaagaagacattcaaactagtcccgctctgtcgcccagtctggagtgcagcagcgccatcatagctcactgccacctagaagccggggtgaagcaatcctcctccatcagccttcagagtagctgggactacctgcgcggcccaccacacccggctaatctttgtggtttttgttttgttttccgttctgggtttccgtcgggcgcagtggctcaggcctgcaatcccagcactttggaaggcagaggtgggcggatcacccgaggtcggagaccagcctgaccaacatgaagaaatcccgtctctactaaaaaaaagaaaaaaactacaaaattagccggatatggtggctcatgcctgtaatcccagctactagggaggcccaggcaggagaatcacctaaatccgggaggccgaggttgcggtgggcaaagatcacaccattgcactccagcctggacaacaagggtgaaactccatctcaaaacagagaccgggtttcaccatgttgcccaggcggtctggaactcctaggctcaagcgatctgccacactcggccttccaaagtcctgggatcacaagggggaggcaccacgccaggccgatctattcctttctggttactaaattggaccgggggcgcggtggctcacgcctgcaatcccagcacccagggaggcggaggcgggcgtatcactcgaggtcaggagctcgagatcagcccgaccaacacggagaaaccccgtctgtaccaaaaaaataaaaccaaaattagctggcatggtggctcatgcctgcaatcccagacactcaggaggctgaggcaggagaaccacctaaacccgggaggtggaggccgcggtgagtcgagaccacgccactgcactccagcctgcaaaacgagcgaaactccactcaa

SEQ ID NO: 295052 - DNA, 1000 bp, Homo Sapiens
agctgggattacaggcataactgaaggtgaaaggacagaatcaccgtgtgttactggcacagatgcatcggctagtgaagaaagaagacattcaaactagtcccgctctgtcgcccagtctggagtgcagcagcgccatcatagctcactgccacctagaagccggggtgaagcaatcctcctccatcagccttcagagtagctgggactacctgcgcggcccaccacagccggctaatctttgtggtttttcttttgttttccgttctgggtttccgtcgggcgcagtggctcaggcctgcaatcccagcactttggaaggcagaggtgggcggatcacccgaggtcggagaccagcctgaccaacatgaagaaatcccgtctctactaaaaaaaagaaaaaaactacaaaattagccggatatggtggctcatgcctgtaatcccagctactagggaggcccaggcaggagaatcacctaaatccgggaggccgaggttgcggtgggcaaagatcacaccattgcactccagcctggacaacaagggtgaaactccgtctcaaaacagagaccgggtttcaccatgttgcccaggcggtctggaactcctaggctcaagcgatctgccacactcggccttccaaagtcctgggatcacaagggggaggcaccacgccaggcagatctattcctttctggttactaaattggaccgggggcgcggtggctcacgcctgcaatcccagcacccagggaggcggaggcgggcgtatcactcgaggtcaggagctcgagatcagcctgaccaacacggagaaaccccgtctgtaccaaaaaaataaaaccaaaattagctggcatggtggctcatgcctgcaatcccagacactcaggaggctgaggcaggagaaccacctaaacccgggaggtggaggccgcggtgagtcgagaccacgccactgcactccagcctgcaaaacgagcgaaactccactcaa

SEQ ID NO: 295053 - DNA, 1000 bp, Homo Sapiens; identical to SEQ ID NO: 224988

SEQ ID NO: 295054 - DNA, 1000 bp, Homo Sapiens
ataagtctaagaggggaacctcaactggttggcggggggctgcaggttgcataggtgaggctgggcccttcctgctgggaaaagcagaagagggagactccgcggcaggaaaggcaggtgggctcgctaggcggagctcagctgggccagcaagcactgtggtctccttggctgaatagcacaggtgacccctaggagcaacaggccaaggtccgtgagcctgctggctggcagtagtgcttcagtagtgctggccagggacccagccttcagtcacatgctagcagctgtgatggtacctgggagggagggaagggggctgtgtgtccttgcatggcctatgaagtgtgttgtgggatgaccgcgtgtataggactctcaggcttttatcctagatcaccactggattgctgacagatagaggacgtgggaccgtgactatcacccctaatctgcagtggatttggctctcggcactcccaggctgggagctggatacctgccctggcagcatgactcagactgcatgacagtcacagactcgcctctgctcctgtggtccagtggccggacaccccctgggatggctcaaaggagtcaggacttggaagtggggacatcagggtagctgaaggaaatccacacacccagagcatctcggagttcagactctcagacctgaagtaggcgcccccgggactgggctaggagttggacggaatggaggatggaggacagcgagaagaaaggaagagaaatgcaacgtgtgggcagccgccaagagtgaaaatagagggaagtgtcatgcaagtgctggacagaaggcggcaggtgggacgagccccacagccccctcctcaaaaacgaccacctccaggactcagtgatccctggggggcaggctctgccagccctgggtgccttggtggggccttctgggactgtgcgctggacttggagccccttggagtatgggttttcacatgggcttctataccgc

SEQ ID NO: 295055 - DNA, 1000 bp, Homo Sapiens; identical to SEQ ID NO: 224989

SEQ ID NO: 295056 - DNA, 1000 bp, Homo Sapiens
gaccccacacctgccccagcaccagcgccaggagggggagctgggcatgggcaccaggagacagtgggaagcagagccgtgtggctgtggcagagacagtggccggcctgttctccaatatggccttgtggttttcgtgtcctccgatgaatgcatacagcctacagcctacagggggcagggctttcagcaatgctgggcctgccttgagtggccttgtcccgtcctttatacagaagggatatcgagacagagtctcgctctgtcacccaggttggagcacagtggtgcaatcatggctcactgcaggctcaaagtgcgaggctcaagcgatcctcccgccttagcctcccaagtagctgggattacaggcagacacgccatgcccggctcattttcaaattttgtgtagagatggggtctcactgttgttcaaactggtctcaaactcctggcctcaagcaattctcccacttcagcctccccaagtgctgggattacaggcgtgagccaccacacccggcccacttataatcttgataaatacacttgatatattctttttcagcatgacatgtatcaaccagtgatataacttgataaaatcataaagaaacaacaagggctcaccaagtcctaccttggcatgatttaaatacatatgctttcagccaggcacggtggctcacacctataatcccagcacgttgggagggtgaggtgggaggatcacctgaggtcgaaagtttgagaccagcctggcccacatggtgaaaccccatctttactaaaaaaaaaaaaaaaaaaaaaaaaaaaaaaatagccaggcgtggtggccgaagcctgtagtcccagctactcgggaggctgaggcaggagaatcgcctgaacccagaagcggaggttgcagtgagctgagatcacgccactgcactctagcctaggcgacagagtgagactgtctcaaaaacataaataaacacaaatgctttctaaagtg

SEQ ID NO: 295057 - DNA, 1000 bp, Homo Sapiens
cttaccttcatattcccggatcagtttcttacctctttctcttagaggtaaatactgtgagaagtttaggtcggccgggcccagtggctcacgcctgtaatcccagcattttgggaggctgaggtgggcagatcacctgaggtcaggagttcaagaccagcctggccaacatggcaaaaccccatctctactaaaaatataagaattagccagacatggtggtatgcacctatagtcccagctacttgggaggctgaggcatgcgaattgcttgaacccaggaggaggaggaggttgcagtgaggtgaaattgcaccactgcactccagcctgggtgacagaccaagactctgtctcaaaaaaaaaaaaaaaaaagtttgtgggcatctccctagcacacctctctctacacatgtgcgtgcatgtgcacacacacacacacacacacacacacacacagtcaggcaacttttccatctttttttgtctttcaagagatatgagagtccttgagagtagatgccatctcaaagcattcttttttgttgtttgcttttttttatcaaagcattctttaaaataaagactgaaacaggagaatatgaagttcccagtaatttttaaattctacaacaaaaatatctcaacaaatttaaagtctattatgggttactccaatagtcgctttgggttactcaaaatattttctgatttccactctgatgtcttctttgatgcatggaatttcaaaatttttagaaatgtgttgctgaacttccaaacactgggggcttcttatctttctgttgttgatttctgttttaatttcctttcatcagagagtatactcaattccagttctttgacattttgagaactgtttatgactagtacatggtatattttgataaatgttttctgtgaatttgtaaaaactatgtgtgctataggttttgcttctggtgttctataaatgccacctgggcaaagttggctaagt

SEQ ID NO: 295058 - DNA, 1000 bp, Homo Sapiens
aaatctgcgaatctaaattaaattcatcgttgtcagattgtcccaagaaaataaattctaaagggggaaaaaaaccataaagtatcaatgagttagtgtcctcccatcccactcctcccacccttcccccacaaaaaagaaagaaaggtttggttttgctttgaaattatatcagaccttcaagtgaaattttcagtaaatcacaaataatttattgcaatttccacagataaagaataaaatagaactttcaaacttttttcttttcaaactgttagaacatgaaaacccaaacctgacaaaggtggcgttaaaacacacacactctctcattcatgactagtgatgcaaacatagcacagtgggaaaattatgccacacaaccacatgaaccttatccttttgaatcactattagaagatctgatatgattcctggttgcaagacgttaaggagaaaatacacggttccctccatatatgttagaaagacatttgataaaattcaatatttatttctgatttttttttaactcctagtgggttataaatacatctagccaaaagctgccatcatgcatgatgggtgaaattctacaaacatccctttaagatcaggaataagacaaaatgtccagtattacagttacccctgttaattaacactaacagttaatagccacataagccagtgcaactacaaaagataagagattaggaaaacttccaggagcagtggttcacacctgtaatcccagcactttgggagctcaggagctctcagcacttgagctcaggagtttgagaccagcccaggcaacatggtgagacctcatctctgcaaaaaaatacaaaattagctgggcgcgttacatgtgcctgtgtcccagctacttgggagtctgaagtgagaggactgcttgagcctgggagatggaggttgcaatgagctgagatagtgcagctgtactccagcctgggcaacagagcgagactctgtc

SEQ ID NO: 295059 - DNA, 1000 bp, Homo Sapiens
ccctcagtccctgcctggccgaccactgtggcctgcacgcgaatgggtcagagccagaccccggagctggtgctgtccttctaggtggctgctcatagctggggatggtgagtggctgtgttctggccttgcccacgtgggtgtttgcagagacaaaatgaaggggatatgctccccataaataccaccttgccaccacaagaggaccagaaggctactcagccttgctgccacagaaggggatttgtagggtcagcctggctgcagaaaggctggctcagatcttgaccaagaaaccccagcgatttccatcaaagaccacgcaggtaacagaggtgattcctgaagacccagcccacagagggtggcagccaagcatctctgagcagtgtccctgctagcatcgccagcggccatcactctgcctccctcccacctcttgtccctcgtcgttaaaaaacagcaccctatcctgcttccccacatttctgttcctccaatgaagggctaagactatttagtaatctctttcttaagcagaggagtggcaaggatggcaatcttgaattttattttctgtagagatagcatttcttctggtgcggagctgaaaggaatccacccagaagttctgtagcatcctgcgtgcagcctcctggagccccagactccatctgggggagggacttgtttacaagcagttctgaccaccttagtggtgtactgttttctaggcaaaaaatatctgtctgttgtactgtatagcctttaaaatgcagtccaggaatgagactcttttaagaaacacatcctgcttctgcaattccagagagtgctgggggaaaaaaagggataaaaattcctacctactcatcagtgtttgaaagatggagctgaatagcttttcttgttcctggactaggcaatgaataagcaacaatgtatcttttctgtgttcaaaataaatacataatatcaataaaatgtagcaagaagtaac

SEQ ID NO: 295060 - DNA, 1000 bp, Homo Sapiens; identical to SEQ ID NO: 224990

SEQ ID NO: 295061 - DNA, 1000 bp, Homo Sapiens; identical to SEQ ID NO: 119272

SEQ ID NO: 295062 - DNA, 1000 bp, Homo Sapiens
cacaccagagctcactgagcctccacctggggtctctgctgaatctctgacaggctaggagagaagggactggggttactgacccccagaaagtcagagaaagtggcagttggaggacctgggtttgagtcctggatcaccccttccccgccttggcaaactactcagactctggaaacctgtttcacctgtaagatggggatgacaatcaaacccaccttgcagggccgtgaagatgcttaagacaagtgcatgcaaaaactttcacacacacaaagccttcctaaagatggggagacaaggcctcatgagcagcaggtggccaggcactatgtgggggctggagtcctgttttcccttcaacctgggaaaggactgatgggcacttagtaggttttgaatcatgaccctggacctcaggtggcggtatgctttgtgtctgcagcagaaggccccagcctcgtgcctgtgagtcccactaccgatgttgaaggggtggacagcaggcgggtgagccccaggctggcagctagcaagacctctcacgtgtgagcccagcaccccacttcccctgaaatgtgatgtccagtgctccaggctgggggccgtggatcctgattccagctgtgtgagggctggaaggccctgggcaggtcacctgacctctctgggcctatttccatcacacacttgaggggctgagcacactggactctatagctgtacaactccttggctctgcttttgttcctgagggccccttagtaggcagggaaagtgagggcctcagggctgggccccaagactcagatgctctcaaccccttcctggagtgcctaactcaggggagcagacaggcccagcaggcagggtgcctctcttgctcaactcctggagctatatgtttttttagcttactattttacttaagaatagatcatgagcattgactattctaaaacatgactttcatgactatataaaagtccattgtatcaat

SEQ ID NO: 295063 - DNA, 1000 bp, Homo Sapiens
atggaatctcgagtctcgactcccgactcctctcagatctatgcacacttgaggaaatctcggtgggcagcgacctgccagggtctgtccctaaggaggtggtccgctgacctctcaaggggtgggggtggggtcagagcttacaggtttctgtcttcttgtgcttttagatgcagttgctctgtcctgaccaggtgaccgggcctcagctgggggtggaggggcaattggaaggctgtttgcctctggcaaagtctgggatctgtgcttgtgtgaggttaacccacccccacttccactctaggccccaggtgagactccaccaccagtcctgctagtgagggttccccggtgagggtaaggttggtgggggtgcagcgcttcacaatgctaaagccttagccctcctccaagagctgagacctctcagggcctgaatcttcttttccacaagataaatgatgcaaaggccacacacacaggaaaaaaaaaaaaagaggcagaactatctattctttgcacaaagtttccactgcaagaggaggaggtgatgcaggtgccacctccaccctgcacttgctcctcagaaccagggataaactgcatttgtaaaaggcactgttcttagcaatttctggacattcaacaacgtggggggcggccactggtcagaggcaggacagcagccaagatggggagagaaacggggagagaaagaaacgattctaactgactcctatatgcagccagttggaatcatgcctaaagctttgggtctgaaggggcccccaacacaccacctgccttgggaaacagcgaggatggtgcagagctttattgagactccagtggcccatccagttcatctccaggcacccccaaaaacagcaaattacacaagaccccccccaaaaaaaatgaacaccattttccacacatacacacacacataaagtttgtttcctgtggcatttaaattaatctggttggtccatagaaa

SEQ ID NO: 295064 - DNA, 1000 bp, Homo Sapiens; identical to SEQ ID NO: 224991

SEQ ID NO: 295065 - DNA, 1000 bp, Homo Sapiens
aagtcctgactctgccatggaagaggcatcttctgggcggacactgatgttcagtggcctccaggggacttggcgggtccccttgacacactggaggctccctggctagattcccctcccagacaccctcattcctgtatctccaggactggagaggcctgctggccatccaggaggatgtttctgttgtcgggcagatggtcagccccatgcagaggatgggaaagcttcacctgccacagttgtgattctctggcctcagcctcccgagtagctgggactacaggcatgcaccaccacatccggctaatgtttgtatttttagcagagatggggtttcaccatattggccaggctggtcttgaactcaagatgattcgcccaacacagcctctcaaagtgctgggattacagtctccggtatgtcattatcagcagtgtgaaaatggactcactcccaccctgtctggatctggacaagagcccaccaccccgttggcagtagtcaggcagctctgcttctaagaacctgcagcttttggaagaaaggcaccctgtggtttcagaagcccaagagtccctgcagctcagcacccccagcctggtgcttggcagatgactgcctcctcacttagcagagggagcagaaaactgtgtattcttcagaacatcatgataacctggcactcatgggtctatggagagaattcagggggtctgggagcttggatggaataaatttgcatctttattttcaggaaagttttactgaagtttagcattttctttcattataaatggaatcagtataacccaatagtatgagcagttacttctccgcaacatcaaagtggctgcagatatctcaaaatagtatttacatttatcataacttagaaatttgggtggtaattaaaccagcaactattctttgtttaatgcattaagaaagaagtatgtatactatcatatctcaattaaaaatattttaagaactgga

SEQ ID NO: 295066 - DNA, 1000 bp, Homo Sapiens
aggctggagcaggagttgctccgagacacggtgaagtttggtgaggttgtcctgcagcccccagagctgactgccaggccccagaggagcgtaagcaaggaccagcctggcaggagatcgcagatgctgcggatgcttctgagccccggtggtgtgtcccagcctctgaccgcctccctggcccgccagcggattgtggaggaggagagagagcgggccgtgcaggcctacagagcgttgaagcagcggcagcagcagctgcacggggagcgaccccacctcacttcccggaagaagccagagccgcagctgtgatggagagacacccggggcctggccacgctctggggcaactggcaccaggagctgctacacctgggtaggagagaggcaggccatgccagcagtgtggggtgaggcctccagctacttgttcacacgttgggcactagtgggtccacatcttgcagggggtgagtgcccgatggactagggccaaggcctggttgacagacggcccgtggggcccggtgtcactcacagctccatctctttgttttgaacgtccattctgagtctcagcccaggtggaccttaggaagggctggatccctgtccctgaacaccaaataccgagacagctgatgaggctggctcagtgtgtgacggaggcccccgggagtcagcagagccgagcgtacagtgcacatcaggcagagcaggccacgggcagggacgacgcatcgggacagggctctgcaggggaccgtgactacaggccagctgtgagtggtcccctacagaggctgcccacccaaggtttggttggggtgaaacatgatgacaacacatacacttaagaaggtgggaaccgggggccgggcgcggtggctcacacctgtaatgccagcactttgggcagctgaggcgagtggatcacctgaggtcaggagttcgaaccagcctggccaacatggtgaaactgcatctctactaaaaa

SEQ ID NO: 295067 - DNA, 1000 bp, Homo Sapiens
aggtggctttcttaattagctgcctcaccggctggcggagcagttcgtagtcgcctacatcgagagggagagccccgtcctggctcagtactggggcttcgtggacgcgctgtagcgggtcttcgccgtcgtgggtaggaaacagtcgggccggatccccggtgtctggggagcggctgccggccgggcccgcgcgagccgcttcactcctacaagcccggctcactagttccaagctgctggactttgaccctcgctgggaagcttgatcgccgcctgttctcgccaatctctatgcctttgcactgcccagcaacccggtcactgcccaggacctgttaaaagttgaatggacctcccagaatcacgccgctgccaccgccgtttctagagacggcttttggccacctttgagaatcagggtcaaacttggaagggcctgcatttgtcacacttcctcggacactaatttggatagttcaggcccagagacggcttcccgggttagtgtgcctgacaacactgaagaaaaattgtgacattttccttccccagaattacttcgttttatacatttcacttctcttctgaaatcacagcaatgccagtttgcgccttttggtctgaggaacgcaggccctggccactaccaggaaaaagtatttacttttaaaacttgaatgtatatctttaccgtatgcctagtacagtagtgcttggaagaaacagattagtaagacaaaatatatgtcttcaagaacacttacgttctgagaaagaattctgaatgcagattctaatgtctggtaaaatgctttacagtgtaaagaatgcatatatgattcttattttatggcattttaaactttccaccccacggttttaaagtgttaatatatgttaaaaatatatgcaatttataaaggagaaggaaagcccagcttgatttttgctgccaaagatggtatatttaaaattaaacgtaactaatggcaaaaaa

SEQ ID NO: 295068 - DNA, 1000 bp, Homo Sapiens
ggcacatgccttgggagctaagtggttgctgcccttgaccactgtgaagactggtgtgggaagggtcgctttggatgcacttgagcaggggtccccaacccctgagccatggagccgcaaggagccacacagcaggaggtgggaccatccagttgcaggaaaacaagcttgacacgcccactaattctacattatgctcctacctcccggcagcctctccaggcccagaactttctccagtcagcctctacagaccaagctcatgactcacaatggcctatttaggcccataccctacgtcacggcagcctccgcagatgaggctactgcctcacaacagcctccacaggcacagctccatcgttacaatggcctctttagacccagctcctgcctcccagccttctctccaggccctgaactttctcaagtcgacctcaccaggcccagctcatgcttctttgcagcctctccaggcccagctcctgcatcttggtggcccctccaggcccagcctctgcctcccgtcagcctctacagtcccaacgtctgcctcacagcagattcttcacgcccagcatctacctcactgtggaccccccaagccaagctcccaacctttcagcagcttctacacacccagctcccgcctgccagtggcctcttcaggcccatggggctcattcctgacaacggcctttccaggcccagtttttcccttccggcggcctctccgggcccagaacctcctcaagcccgattcctgcctctcaacaacctctttggactcagtgcctacccatctcctggcggccttggtcggcccacagcttcctcaagccaagctccccaggcccaggtcaggcctcacggtggcctctccaggatgagctcctgccctccgatggcatctccaggccccaaatggtctccggtcggtgggctcctccacgccaaggttgggcctcccggcgactgccgcaggcccaagttgtcctga

SEQ ID NO: 295069 - DNA, 1000 bp, Homo Sapiens
acccagggggaggaagggtggaggggccccaggggtcaccgtgtgcaccaggggccgtgaggggccggggcattcagctcagctctgaaccggggaagctggcacggcaaggactgcctcaggtgacgggccgtgagaggggacgggtcaggagccttcccaagccttctcctcagcccgacacccatggccatcggaggctaggatgccagacacagccatttgcagaaatcaggcacagtgactgcagctcacgtccagccaaccaagcatggggccgcagctcaggaagtcccttcccgccacaccacagcctaattcttactgggacggaggcaactcggctacgctgggcaggacgacaaacacgagacgccactgtggaatgagcaacttcggagcacggggtgacttgcttgggaccgtgcccacgtgacagccccttatgcagaggaggaaagagaagccccgagtgggaggggaacctgtccaaagtcacacggtgtgtgggtgacacagctggggtgagtcgaggctggcccctgaggcccatgctccctgaacgctggagaccactgtcggctagcagcggctctcagggaaggcctggtctccaccctcccagcctagcctcgcggaccctcgtcctccccacatcggacctgctcacctgcctggaccctgggctgccagatgcaggaagcatcaaaccccccagcctcgtgggtgcggggcagggcgcaggcagcacagcttagatgccctggtttgtccctcttgtctcctgggaagagcttgctcccgcccagctctcctgccactggcctttcagggttgggctgggcccagagtgccttttagtcgcttctcacggtggcctgatggctcaacccagtcccaaacgggcccagtgacactgccgcctgcgccccagctcaggcccccactgcaccagcaatgctagaaaaccaagccaataaaagtgatttcttttttcatt

SEQ ID NO: 295070 - DNA, 1000 bp, Homo Sapiens
cctggggaggcccaggcccagggcttcccccgccccctgaactacacccatggctgccacttcagctgatctgcggtgacatgcccaccaccacctcagacctctacagcttctgcatcctgatccaggaggtcttcactgagaaactgtacatcaagtggctcacagagccaagaccacacccaggcctgtggcccctgtgatgtccccaggccccatcccatgccaggcctgagactcctgaggtcagagaccacagcaggatcccaaggggtgcagcctggaacttgggcagcagcttgactctaggcagcagctctgggcccagcccaggacccagccctgggtctggccacagccccacagccagggtcagcctgcactgctgcctggagcccagctcaacagtacagatacccccagagccctgcacaactgtcccactgctaacctgtgaccccctccgcccgccctccaggagtcaccaacccgaagttccctggctgcctctcctttgaccagggaactttagggtcgcccaactgtcccctcactcacctatgacccttaaccaaccctgcttcccccagggcccttccctgcactccaactccagcctctaggactcagcctccctgctggggacccagagctctgcggaacagtttgaggaagctctcagccaagattccagccctgcaggggctgctgcggcgcacacacagggttattctgctggagccccagccctgcacccggtactgagctgactagaggaggtctcttctccagcctgcagaagatggacctgctggaggagatcatagcagagctacaaaaaggatgtcagcttggagaaaagcccagcctgagccccactcctgacctagactcccagggtgcccatggttcccctctctgcagataccacctctcagaggctcccaggagtaactcctgccttggtgcctccccaaaaggaaatagaatgataaagtgc

SEQ ID NO: 295071 - DNA, 1000 bp, Homo Sapiens; identical to SEQ ID NO: 224992

SEQ ID NO: 295072 - DNA, 1000 bp, Homo Sapiens
gtactagttaactgtgaaaattgcaattaatagggcagatcaagcaattctcttgcctcagcctccagacttttttgttaaaaactaagacacaaacacattagcctaggtacacacagtgccaggatcatcaaaatgtcattaggcagtataaacttttcagctccataaaagttggaaaaaaaataataataataaatacaattttataaaaagaaaattttcagctctgctataatcttatgggaccactactgtatatgtggtccctcattgaccaaaacatcattatgtggcacatgattataacaaatgatggatggcgaggttgtgaagaaactggaacccttgtgcattactggttgtaatataaaaaggtacagccactgtaaaaaaaaaacacagtttggttatttcttcataagttaatcatagaattaccatataatccagcaatttcacttctaggtatatgcccaaaataattgaataaggtgtttaaacataaacttgtacaagaatgttcatagcagtacatttcacaatactcagataatcctctcattggaagcaactcaaatgtccaccaactgatggtattacccatgcaatggaatattattcagtcataaaaaggaatgaagtactgaggcatgttacaacatgaaggaactttgaggacagtttgttaatacgctatatactgtgtaattctatttatatgaaatatccagaataggtaaatcattagagactagagacagcagattagtggatgccaggagtttggggaaggaaggggtgggaagaatgggaagtgactgcttaatggatacagggtttctttttggggtgatgaaaaatttctggaactagattgtagtgatggttgcacaacaccgtaagtgtaataatgtcactgaattatacactttaaagtgatttaaatggtaaattgtattatttatgtattttaccacaataaagaagtcacctatca

SEQ ID NO: 295073 - DNA, 1000 bp, Homo Sapiens
acacaggaaattgggcccgtgggtatgactgagaactgcgatatgaaagatgttctgacctgtcatcgggggaccaccttgaagaagcaggaaaacttgagtaaagaacccactgattgggccacatctaataccgagacgtgcgaggtggggcaggtgtgtcaggagatgctgctgctcatagatgtaggactcacatcaaccctggtggcgacctaaagctgcagcgctgttggggctcaaaattcccagaagaccaccatccactcagcccctcctggggtgcttgtggcctcctatacccacttctgctcctcggacctgtgcaatagtgccagcagcagcagcgttctgctgaactccctccctcctcaagctgcccctgtcccaggagaccggcagtgtcctacctgtgtgcagccccttggaacctgttcaagtggctccccccgaatgacctgccccaggggcgccactcattgttatgatgggtacattcatctctcaggaggtgggctgaccaccagaatgagcattcagggctgtgtggcccaaccttccagctccttgttgaaccacaccagacaaattgggatcttctctgtgtgtgagaagggtgatgagccgcctcctgcctctcagcatgagggaggtggggctgggggcctggagtgtctcacttggggggtggggctggcactggccccagcgctgtggtggggagcggtttgcccttcctgctaactccatttcccccacgattcttcaccgctgctcaccaccacactcaaccgtcccttgtgcttgtaacctaatggccttggacaccagattatttccccatcctgtccatgaatcatcttccccacacataatcattcatatctactcacctaatagcaacactggggagagcctggagcagccggacttgccctgtgggagaggggacactggaggagtggctgcatgtgtctgataataaagaccctgtgctttc

SEQ ID NO: 295074 - DNA, 1000 bp, Homo Sapiens
accagcagcagcaggcgggcaagagtcccccagtgtgtcctgagtgcggccaaacctcgcgacctcgccctattgtccccgaccccccggcccagcgactgtacgcttgcgacgagtgcggcaaggccttcacgcgcacctccagcctgctgcagcaccagcgcatccacacgggcgagcggccctacgagtgcgccgagtgcggcaaggccttcgtgcgctgctccggcctgtaccgccaccagaagacgcactcggccgagcgccaccggcgtggccccgtcctggcgcggcgcgccttccggctggggtgcccgccctgcggggactacagcgagcggagtccccgacgggggtcgggagccggggagaagccgtacgagtgcgccgactgcgccaaggccttcgggctgttctcgcacctcgtggagcaccggcgcgtgcacaccggcgagaagccctacgcgtgccccgagtgcggcaaggccttcaaccagcgctcgaacctgagccggcaccagcgcactcacagcagcgccaagccctacgcgtgcccactgtgcgaaaaggccttcaagggccgctcgggcctggtgcaacaccagcgcgcgcacaccggcgagcggccctatggctgctccgagtgcggaaagaccttccgcggctgctccgagctgcgccagcacgagcgcctgcactcgggcgagaagccctacatctgccgcgactgcggcaaggccttcgtgcgcaactgcagcctggtgcgccacctgcgcacgcacacgggcgagcggccctacgcgtgcggagattgcggccgcgccttcagccaacgctccaacctcaacgagcaccggaagcggcacgggggccgcgccgcgccttgactgcagggagccgagagtcgacgcgtcgcccaagcgaaccctgcgtcgaggaggggcctttgtcccggaaaacccaccaacgtttgtaactttgattaaacttcactttgtac

SEQ ID NO: 295075 - DNA, 1000 bp, Homo Sapiens
agcaggttaactggttggcagagacagagggactgagggactgtcttcctccaggaagcagcaggttaactggttggcagagacagagggacagagggactgtcttcctccaggaagcagcaggttaactggttggcagagacagagggactgagggactgtcttcctccaggaagcagcaggttaactggttggtagagacagagggactgagggactgtctccccccaggaagcagcaggttggctctgtttccttcgtggggcagctggtctccagggcagcaagagagaccaagccccagtgcacattctacagcctctgtgcacatcagacttgttaatatcccattggccagtgtaagtcacatggccaagcccagattaaggagtggaaagatggaggctatctcctcctgggagaggaggccaaggaggtgggagtattatgtggccacttatgtttgcaatctaccataattagcactttgagaaaagaattaactgagaaacttgcttcaaatagggcattcagtaaaatgaagccccaattgaagtaaaatgcatatataaaaaatgaaactgtgaccgattttaaggacagtattggcaaatatttctgtgctcttggaggagaagacccttattggcatgacatgtcagaaaccacaatgaaagaattattttaacttgcattcataaaaattaaaattattcattaaaaacatcgtgaatgaaattaaaagtcaaaatgtaagccagaaaattatttacaatgtatgtgtcaggaaaagacaatacccttcaaactttgagagtttacatcagaaagaaaacagcaaatgacatgatccaaacttgataaaggacatgaaaaagagccagcacttagtatgttttctgaatgaataagtagccaacagcacatgaaaatgcgtgtaatccatttgtaagcagagaaatgcaaactaaaacagtaaagtgtcattttcatttcctgg

SEQ ID NO: 295076 - DNA, 1000 bp, Homo Sapiens; identical to SEQ ID NO: 224994

SEQ ID NO: 295077 - DNA, 1000 bp, Homo Sapiens
gccgggggcgcttggcctcagcgggccatgggagacccagggaaacgactctagtgtgaggcagtggtcctgccagtgactgacaaaccctctttgtaagcaaacttgacaaataatgaatctactgaactctgttatagaacaagttcattttgcatgaacttctcttattgaagcagaagccacgtcatgagcctgggggctgccctctccccgtctgggagtgggacagaactgttcagtgccttgaaagtcacagatttctgactcctggaaggaactgggcagtcccaccagagcagaaagaaaggaggcaaacttggggagtgagaagccagcctcccagaggcccaggcctcgtgttccccacctccaaccctcccgtgaggagaggggcttggcctgggaccttgtaacttccttgcaagttaagtgagctatcctgtcacaaaagatagaaggaactgccctttgggacttcttttcactggaaacccagcactggttttatgttgagtgagtgggaagctgggactctgttttacagccatctgtactggagcctggacaaaccactggtctctatgggaggccccagcctcacatttccctggcaaggagagagaggtttagccatgtcctgggtctaggattacagcccagagatgggcacttaagaagacctggtcattggtccagacttgggccaaggctctcctctgtgagggatgggttttactggtgaattacctgtgtggagaagctatcagggccatgtttagcacactgaagggaccagtctccaccaagcactttaacatccctccagccagcatagattgatctcgtgttacagagagggcaaggtttttggcccctgtttgcagactccatgtcttaatcagagaccacagttttctctttgttccaatctgcgccacctcggtagccccactttccttgctgtgtggacttgaaacaaaataaaatgtgttgcttc

SEQ ID NO: 295078 - DNA, 1000 bp, Homo Sapiens
ttttacaaacctgagtcagtgtgctttacctcagtgacccaagaacccaggtgctagagtcaggcctgcatccaaatcaggggtgggatcagtggtgtgccctgaacaaatcattatcctcttttttgttttattttttggagacagagtctcactctgtcacccaggctggagtgcagtggtacagtctcagctcacagcaaccactctctcctgggttcaagtgattctcctgtctcagcctcccaagtagctggggactacaggtgcgtgccaccacgctcagctaatttttgtgttttagtagagacagggtttcaccatgttgcctaggctggtctcgaactcctgagctcaggtgatccacctgccccggcctcccaaagcactaggattacaggcgtgagcaccccacccagctcattaccctcttttaacttcaattttctcatccacaaaatgagggcaataatctcctttcttccccactagccatgttcatgaaagtacttatttgcccattttaaaatatgtagcaatgtgccccagaaaggctggggcatgagtcctgcttggggtggagcagggaaggcctgctctgccccactggggtgtcctcagatgaaagtgggtgtgggctgactttctctgagctccctgtggagtcacacggggaactgggttgagtcacagcacaagggcactcacatgccccaccccgaggaggtccctgttctgacagaagccctgagccgtgactgtggactgacacccactgcctctgtgaccttgggtgggttacataacctcccacatgagaaggaggcggaggcacccgggcttgtggcctgagctaacctgggtagtgggagccctatctgtgaattgccaagggactgccatggggactggtgagaacacagctctgcaaggcccttttgatttgttttaacctttaacttttcaaaaatttcaaatttaaaggatgcatgacacagtt

SEQ ID NO: 295079 - DNA, 686 bp, Homo Sapiens
ctccaggcgccatggccagaggcctccagtccccgattctggcccgcgctgagtgccaggggcggcagggggcaccgttgggggttctccagtgggaggaacgtgctctgtgaggtcagcgcgccgcggcccgggtcacaatgctgccctcctcgacgcccgggcccgggcacgccacagagacctgcccggctccgcctggaccggagcgttctcccgcggccagggctccggcagctgcttctagcctgggaccggtctcaaccgccgggagagcgccccggggcttggacatgagcgcccaggagcccccgcagggtcggagattccccattgaggccggagactcccgtggccttgccgccgcccccgagtcccaggacagcccggaggcggtagcgacggagcacaacccggtcaggccgcttcgtcgctgccctggatgccactgcctgacgctgctgcacgtgcccatcgacgtctacctcgccatgggcgggagcccccgggcccgcgccacgtgagtgcgcctgctccctgcggctccgcgggagctgggcgggaacgaggcccccagcgggccaccacgctgaggtcgcatgcgccgagcacgagacaatgatgcacattttaaaataaaagaatgatgcacattttaataaagcacagcacaaactgttctttcc

SEQ ID NO: 295080 - DNA, 1000 bp, Homo Sapiens; identical to SEQ ID NO: 119273

SEQ ID NO: 295081 - DNA, 1000 bp, Homo Sapiens
caccagttgagcaagaccacttggctccctggcttcagtcccctttccaggggagtgaacagttctgtcttgctggggttccaggtaccactggggtatggaaaaaaaatctcctgcagctagctcagtgtctgcccaaacagccacccagttttgtgcttgaaacccagggccctagctgtacaggcacccgagggaatctcctggtctgtgggatgtagaaactatgggaaaagtgtagtatctgggccacagagcacagtccctcatgacttcccttggctaggggaggaagttctccagccccttgtgcttcctgggtgaggcaatgcctcctgctccccctccatgggctgtacccactgtctaaccaatcccaatgagaggaacaaggtacctctgttggaaatgcagaaatcacctgccttctgcattggtctcactgggagctgcagaccggagctgttcttcttcagccatcttgcccgctcatctctaaaattactttcttgattacttttttttccgtaaatattagctgcttttccatttatttagatcttttatttctttcaaaaaaaattttaactttacagtggataaatcttaaaattcttttgttttgctgttgttgtttacttttattttagatacaggggtacatttgcatgtttgttatataggcaaatttgagaatatgtagtatttggtattcctggtcctgtgttagtttgcttacaataatggcctccaactccctccatgttgctacaaaggacataatattgttcttttacatggctgtgtagcataccatgctgtacatgcatcacattttctttatctagtctaccgttggtggacatctaggttgattccatatatctgcaattgtgaatagtgctgcaacaaacatatgcatgcatgtgtctttatggcagaatgatttctattcctttggatatgtatgaatccattattacattgctataaagaaata

SEQ ID NO: 295082 - DNA, 1000 bp, Homo Sapiens
ggaaattctgctgtccagctgctccctgtgccgtgcctgtgattcgctggtgtatgatgaggaaatcatggctggctgggcacctgatgactctaacctcaacacaacctgccccttctgcgcctgcccctttgtgcccctgctcagtgtccagacccttgattcccggcccagtgtccccagccccaaatctgctggtgccagtggcagcaaagatgctcctgtccctggtggtcctggccctgtgctcagtgaccgaaggctctgccttgctctggatgagccccagctctgcaacgggcacatggggggagcctcccggcgggttgagagtggggcatgggcatacctgagccccctggtgctgcgtaaggagctggagtcgctggtagagaacgagggcagtgaggtgctggcgttgcctgaactgccctctgcccaccccatcatcttctggaaccttttgtggtatttccaacggctacgcctgcccagtattctaccaggcctggtgctggcctcctgtgatgggccttcgcactcccaggtacggctgctgtgggatgtactgacccctgaccccaatagctgcccacctctctatgtgctctggagggtccacagccagatcccccagcgggtggtatggccaggccctgtacctgcatcccttagtttggcactgttggagtcagtgctgcgccatgttggactcaatgaagtgcacaaggctgtggggctcctgctggaaactctagggcccccacccactggcctgcacctgcagaggggaatctaccgtgagatattattcctgacaatggctgctctgggcaaggaccacgtggacatagtggccttcgataagaagtacaagtctgcctttaacaagctggccagcagcatgggcaaggaggagctgaggcaccggcgggcgcagatgcccactcccaaggccattgactgccgaaaatgttttggagcacctccagaatgctag

SEQ ID NO: 295083 - DNA, 1000 bp, Homo Sapiens; identical to SEQ ID NO: 119274

SEQ ID NO: 295084 - DNA, 1000 bp, Homo Sapiens
ttactgagtatcttttatgaaccctgtgctgttctaaccattgtagatacaatgaagaagaggtccagataaatttctacccctcatgtaaatcactgttacaatcatcacaacctgcacctgactagctttttggccatttcatcttccagtcagccctgggaaatgactttgggagagttctgtattttgttgtacaaagacaacattgaatgtgttctattatgggctttttgtgtctgtgctctccactgaactgtgagaaaaacacattcttactgttctctgcatctctaatacacaacgagtaataggtgtcaaaaaatgtgggtctgacaagtatttaaaaagcatctgcgctgggtgttgtgggacacatgcagacatgataattggctgtagacgttcacagtctccctctctctacggggcctgatggacatttcagttccgcccccacattcggctacctgaaggggcctccagcccagccatgcctctgacttgtcttccttcaaaatcattttccctgtttctctgtcttcctgtcttccttttctcccaattactaacttgtggtcattgttcattcagcctcctttgtaccccactccctgaggaaagaatttcttccttttttgattctgggagttttggggattgaatagatttcacctggacatggggagaaaccaagaagagaagtacgagatggcggccatcctgtgagacacagagttaaagaagttcgcatgtggagtgctgcctgaggccagcatttcctggtgtgagagaaggacattgacactgattaaggcataaaccctatttcatttacaaactgagttcaaaattatcaggaaactgctatgtgtcttctgtttaaaataatctgtttatgttttattgaagtgtgtttttaagtgttcagaaagaaaaaggagcttatttatttaagaaaaattgaatggaacataaaaacattgttattgtcacacat

SEQ ID NO: 295085 - DNA, 1000 bp, Homo Sapiens; identical to SEQ ID NO: 119275

SEQ ID NO: 295086 - DNA, 1000 bp, Homo Sapiens
gtagaatgttcgcattgagtttaaaagcctttgaagctaatatagaagtttaatgcagaaatgtggcaagcaaaaggccaacttgcattttagagacagagcttgctagtatagaagtgcatatttctaagaaatgtctcagtaaaattcattaataaatactaatagctttttaaatttttttcctccacgtaaaatgaaaatgaacttaagacttacaaggaatgatgtgagtgggctatttttttcctaaatgcctcacagtctccaacagctcagttaagcactctgatggtctttatggagaaaaataactctgggggattctcgagtcttcttgccttctacagctttccctgtggcaccctccacccccaaccagtgtctttgagcttggtgagactctgcatacattaatatgaaaagctggaaaagaattaagggctagcgatttctacactgagtacttttaaaaaaataagattgacaatggtattcttttcaatatatggatagaaataatatctaaaatctgttctgaaaatattcctaaatcctggcagagttctgccccagtctaatgtgataaaatgatcctcactgactgagcttttttccctccccactcccaaacctttgaaatttcctgtaacaagatctgacctgtaaagatcccatatacatggaacttctgccaactcccctcaaataatagaaaaatcacagaaatggaaccatttaacttgctgatacaggtttgattttaatcacgtaaagtggaagagtgctttgatctcagttgctaatgatgatggactaatctttagaagaacggaggccttgattggtgatttcatgggaacaaaacagatttctgcattacctctgcctgctttgtgggtcccttagttggcgtacactttctgatagtgcctgccttatgaatgcctgaagtctaatcctgaccttactttgttgcccataaatatctttcaaattg

SEQ ID NO: 295087 - DNA, 1000 bp, Homo Sapiens; identical to SEQ ID NO: 224996

SEQ ID NO: 295088 - DNA, 1000 bp, Homo Sapiens
actcagactgatccaccactggcttccttgctcctcaacttgcagatggcttctcacgggacttgactttatgatcatacttggccaataagatgttcctgcctaagactttgaatctggaatggggaacacagagaacatgagcaacgaagaattattcacagcacagcacagcagtgctgacagcatcgacagtcctgtggtgccagcaagaatccaaaagaagtgtcctacataaattcccttaatcactgaccatttaatgaggctgattcagcctcatacaaattttgtatgcttcttcatacaatttttaattgtgctgtaaaagttaaccagagacaatttctgttgcttgcacacagtaagttgactaagcaaaaaaattcaggagagattattttatagaagtcaatgcaaatgcattaatttacaagaagtgaaactgcaagttcactttgctgccttatggccagcatattctcttacaagggaagtctatatggcaatctgtgttatgatcagaagatttgggaaagatggaatctgtgagagagttttatgacacacggttacaactgatcacaggatcaaacactaaaactccaatatatatatttattcttattagcaaagcttttatgctatggaggaaaaagaaaaagaaataagaaattctgagtttctctaaacttccagtatgtggatgagttaaaaactatgtcatcttggattccccattttaaatatttcataataatgcattataattggtacatgttaatatcaattttttcttttgctgtttttgaagtggtgtgaatcacctgtaacaaggtttccttatcatccatttaattattgtcctataatatacttttcaatacagcaactactttttatgttttgggattacttttactattgttagataaaacctatggttgattgtgtgcctctagaagaacttcaaaagtacaatataaatcttgctaacaat

SEQ ID NO: 295089 - DNA, 1000 bp, Homo Sapiens; identical to SEQ ID NO: 224997

SEQ ID NO: 295090 - DNA, 928 bp, Homo Sapiens
atggttctacttggttgcatgtgggtcacaaaggatggcgccggagaaaggagcacccggcagcaccagccctgtccccattctacaacgcctcctacccctgtccccgccgtccgggccagggagagggcactgagggcaggacccaaaggaagcacctggttgggccgggccgggaagcgaaggcccactcctcggctccggggaggcggccaccacggcttcgctagccgcgtcccgagccacgccagctgcagccagctgtgcggtgccgggcccaggcgcgcgtccgcagccccgccccaccccctacggctggacctcccaccgcagccgcgcccgaggccccgccccagccgcggccgtaacgcgccgcgcggagccgacgagacggcggggctagagaggccgtcccgaccgcgccccccgccggaagcggcttgttcgggcctgagctggcgctacgaagttccggtccaggtctctgacttcgggcttgttcgctggtggcgtcggagccgagccggactggtcaggatgatcacggacgtgcagctcgccatcttcgccaacatgctgggcgtgtcgctcttcttgcttgtcgttctctatcactacgtggccgtcaacaatcccaagaagcaggaatgaaagtggcgctttctccgccccagggttccaggacatagtctgaggcaagatggagggtatgaggggccttcacacttcacttcatcccttctacccatcacaacatacaaagcaactacacctggatttttccaaacaacttttatttcctcagagtcttccttaatcctatggaacaagaagctgccactgaatagggcccagtataggggcttgcttttctactccctccccccaatataaaaatatagacttttttttgtggtcccaaaatctt

SEQ ID NO: 295091 - DNA, 1000 bp, Homo Sapiens
gacttcttgaggccttttgtctaattgtggtgggtaatgtgggcagggtaaaaaatggggaagatagagcaaattttctgggcaagaatgaggggagaggtgagtggagcgtcttcatctcgctctggttttgtatcatgggtgtctccagggcctactgtctcctctgagactcctagaaagtgaggagccatggattggtatcctactaacagatggaacatcagaggcccgtggtaaggagtataataagctcagctcgccatgctctgttttgtttttgttggaagaagtgttgaaaaaaggagtggttatacactggcctatctagctatagaatacaaacacttagggtgagcagcagggaatgccttttctgaaaatgatgctgcatggaatggatgattaattccctggttaaaatgaagccagactatctttcagagtcttaagcctcctcccaataccctccacatactagtttctaattggttaatgaatatggtcactatttctagggcctgttgctccagtgtagtggtcaagagtgtacactcctatttacaatagcaaagacatggaaccaacccaaatgcccatcaatgatagactggatgaagaaaatattgtacatatataccatggaatactatgcagccctaagaaggaatgagatcgtgtcctttgcagggacatggatgaagctggaagccatcatcctcagcaaactaacacaggaacagaaaaccaaataccacacgttctcactcataagtgggagctgaacagtgagaacacatggacacagggaggggaacatcacacaccaaggcctgtctggtgtggggaggggagggagagcatcaggacaaatagctaatgcatgtggggcttaaacctagatgacgggttgataggtgcagcaatccactatggcacacatatacctatgtaacaaaccataccttctgcacatgtatcccagaacttaaagtaaaat

SEQ ID NO: 295092 - DNA, 1000 bp, Homo Sapiens; identical to SEQ ID NO: 224998

SEQ ID NO: 295093 - DNA, 1000 bp, Homo Sapiens; identical to SEQ ID NO: 119278

SEQ ID NO: 295094 - DNA, 1000 bp, Homo Sapiens
aagaagcagctgggggcaggaagcagagaagaatgtgcagcaaaatgtgaggaggacaaagaattcacctgcagggcattccaatatcacagtaaagagcaacaatgtgtgataatggctgaaaacaagaagtcctccataatcattaggatgagagatgtagttttatttgaaaagtaaatgtatctttcagagtgcaagactgggaatggaaagaactacagagggacgatgtccaaaacaaaaaatggcatcacctgtcaaaaatggagttccacttctccccgcagacctaggtaagactttccctttcatctttgtgttcatctactgtaaagttgtccctctgtgtctgtgagggattggttccaggacccctgtggctaccaaaatccatgcttctcaagtcccttatgtaaaatggtgcagtatttgcatataacctacataccttctcttgtgcaatccctaatataatgtaaatgctatgtaatcgttgttatgctgtattgtttttatttgtattatgttttattgtcatattgttattttctctcatctttttcaagtcttttccatccacagttggttgaatttgtggatgtggaacccatggatacagagggccaactgtatttaggataatttcatcacttttaattcaaaccagaatatgtgaataagcagacagaaagaatctttttgatgtcgatgttcaactatttttggcaccatagtagaacatcgttgctttctattttttcttgggtatggaggtttcttgaagacctagaacatagaagaatgcctagttaaaaaaaaaaatcaatgaaactacgagttttaggccaaatctgagaaaagaccaaagatgactatgtttgggactgaagtaaacatatcaagttagaactctcatcacatgtttgactcaaattgtggagcaaaatagtaaataaaatataaaaatgacaatgaagatacgtgaaattcaaatgtc

SEQ ID NO: 295095 - DNA, 1000 bp, Homo Sapiens
ctagtggttaagatatttgggaataaaattaatacttttgactagaagcgtctaaggataaaccaacagaaattgaatctggatacatctttaagatgtaatcagaaatgaccagatgactctagttagaatttttgaaggagggattacattaatatttcaaaacccttactctgtagataagtgtattttaattttttcccctcgtatacttttatttacctggggaaggagcttttagggttggggggtggtttgctatctctttagctagcagaatagtgtgcctttgatcctcacacatcctgtattatggacacagtagccatgcttcacggggaggtcagagctggctaccagcagtcttgccctttactgagcttagtgtcatctttggatgctgtcatatgctgctttgagtgaaccagagaaacagccatttgcagcatgagaaagccccaaaagctctgggatttacctccacttcagtaataatgaatattttttagcattagaatgtgttatgtcatttgaattaattttgactacactttggcttgggagaggaattattttaaatagacattggtactttttgaacttgatagctaaagattctaaaatgcatgttttatactaagttttaaccagtcaggaaaattttatgtaactagtgatagtttatttttttgtatgaattttgtttaggctgcaatgtttagcttttgttaactcctcactcttgctgtcttaagttcattactatgtttaatggcctacttgccaagatatttagcatgtaaaaagcagggttttgattaaaaaaaaaaaacggcttcatattgaagctgagacttacaataacaagttgagtggcaagcctggtatgctgtgtcttattgccagaatcttagtaaatgtaatgttttaaaagtttgttgtctttgtatattaataacaaagtatgacaagttaagtttaaaaaaaaaaagatttttgc

SEQ ID NO: 295096 - DNA, 545 bp, Homo Sapiens
agactgaaagtccagtatgctgctcttctgaggatccggcaagatggcagaagtagagcagaagaagaagcggaccttccgcaagttcacctaccgcggcgtggacctggaccagctgctggacatgtcctacgagcagctggagcagccgatgcagctgtacagtgcgcgccagcggcggcggctgaaccggggcctgcggcggaagcagcactccctgctgaagcgcctgcgcaaggccaagaaggaggcgccgcccatggagaagcaggaagtggtgaagacgcacctgcgggacatgatcatcctacccgagatggtgggcagcatggtgggcgtctacaacggcaagaccttcaaccaggtggagatcaagcccgagatgatcggccactacctgggcgagttctccatcacctacaagcccgtaaagcacggccggcccggcatcggggccacccactcctcccgcttcatccctctcaagtaatggctcagctaataaaggcgcacatgactccaaaaaaaaaaaaaaaaagaagtcc

SEQ ID NO: 295097 - DNA, 1000 bp, Homo Sapiens
ggggcccggggcggcgcgcggggcgcagagggcggcgagggcggctggggcggcgggggcggcggcggcggcggcgcgcgccatccgctcgccgctggtcttcgtgctgtgccgcgcgtcgtcgctggccgcccgggagccgcggcgccgcctgcgggagatgctgcgggacgtgcgcggccggcggcgggccggggcggcgctggtcggggtgctggtggccgaggccgggccagaggacgcggtggcgccggggctgcggctgctggaggcgctgttgcgcgccgtgttcggccgccaggcgggggggcccgtgcaggcggccgcctactgccccggcctcccggcctcctgcctggccgtccaggcggccgcctgcagggccctgcaagccgccggagccgggcaaccagtggaaggagcctgggagaggccaggcctccccggactgctagcctgcttttcctggggtccctggagccggaggaagaaccaggatgttgctgcctgcagaagctcagctcaggaagacttccaggaacctgaggaggagctgccactaacagccatatttcccaatggagactgtgatgaccttggaagggggtcaaaagcctgtgatggagtcgtacacactcctgctgagcccaccggagactcaagatgaaggctggacccttgcgctgtccctggctctaacctacagactggggcctggctccgtcttactggcccccaggtctccatggagactgcagaaacccccgcctgctggaggcctgccacactcacagttaccagctagacagtggggcttactaagacaagcaggacctaaaacagtgtctcccctgggaacctactccccacccagcatttgctaagtctgatcacagggaggttattttgtctctctgtctcggtttctctgagccactgagacagatggctgtccgctttgaggctctgcagagctgtggcaccccatggtgtgtctgca

SEQ ID NO: 295098 - DNA, 1000 bp, Homo Sapiens
tgcggaaaaccttgcttaacagaatttggagtgactttcttatgctgtattgccagcccctcagagtcattacctgggcagtgaccccttgcatacataggagaagctaaggcacagtggcatttagcagcgtttccaatgtcacctgtatgttggctggggaagtgacagcattcccctcttttgaggaggggaatttgctgaattaaaacccaaatgaaaatgtcatcaatttgggaaataatactcaggttattgatttagtttgagtttttctttcaaaaattaagtcagtgataaggctaataaagccaatttattaatagcataagtaatacaatatatctctgtgtgaatactctttgcaggaccacccaggctcacttggacttcagtaaaatatcacgcaacaaagattcacagaagtaaatacagttcttggggtacttattcattactgagtatggaaaatcctgtgaatgcttcctttcatatatgtaaaaaagtgtgctttgtttcatgtgactttgtgttttttaaaaaaaaatgaactggtgttctgaaagattcttctattgcacattttccttagggcagcaagtaacagaaggtgatatgttttcacagcaaatttgccagctattagattggctttaatcttgctgcagtagaatgacactgcagggattgtcacctggggatagtcttcaagaatagcagccaggcacggtggctcgcgcctgtaatcccccaactctttgggaggccaaggcaggtggatcacctgaggttgggaggtcgagaccagcctggccaacatagtgaaagcccatttgtactaaaaatacaaaaattagctgggtgtggtggtgcatgcctgtaatttcagctactcgggaggctgaggcaggataatcgcttgaacccaggaggcggaggttgcagtgagccaagatcatgccactgcactccagcctggacgatagagcaagactgtgtc

SEQ ID NO: 295099 - DNA, 1000 bp, Homo Sapiens
gacacactggccaacccctatgtgatgggagtgggcctgccggtctggcagccccttgagaaggagggcaggctgcattggatgaccctgggtggttatggctcagaagaagaaatgaactgtgaaggagagggcagcctggtctccgtggacaggaagaacatcgacacaagggcctggccccactctgggaaggtggccagaaaccgtcccagaaactgcccccaaagaaaccagatctgaggcaggttcctcagcacctggcatcggaggtgccgcagaggaggcaggaaagagctgttgtcactgaagggaggcccctggaagccagcagggccttgccagcaaagcccagggccttcactttataccctcggtcgttctccgtggaaggccaagagattcctgtttccatctctgtgtactgggagccagaagggtcggggttagatgaccacaggataaagaggaaagaggaacatctctctgtcgtgtctgggagtttctcccagagaaaccaccttccatccagcggcacctccacgccttcttccatggtcgacatcccacctcctttcgacctggcctgcatcaccaagaagcccatcacaaagagctctccctctctcctgatcgacagcgactccccggacaagtacaagaagaagaagtcatcctttaagcggttcctggcgctgatgtttaacaagatggagaggccaggcacgatggctcatgcctgtcatcccagcactttgggaagctgaggcgagcagatcaccgaaggtcaggagttcgagagcagcctggtcaacatagtgaaaccccgtctctaataaaaatacaaaaattagccaggcatggtggtgtgcacctgtaatcccagctacttgggaggctgaaacaggagaattgcttgaacctgggaggcggaggttgcagtgagccgagattgtgccattgcactccagcctgggcaacaagagtgagactccatctc

SEQ ID NO: 295100 - DNA, 1000 bp, Homo Sapiens
ggttgggaaatatcctagtgcttttcatagccttccatgtcatggatcagggacacacacttgtgcacatgtgtgcacagacacaaaacagagagaatgcttaacaggagcacattttacaaaagtgagatcccaggcctggaaaatcccaaactcttataaattttacaaatccaaaatggaatattcaaaaagaactcaacctgtttctcttgagtaacttttcagactctcattacaggccccatgaggtcagtcagatttctgttctacaggatactgcaaaaagagaccagaaatttaaaaaggagtgatggtaccacacaaaatagtaaaaatgaaatagagaaggtgtgaagttagatccttgatttatgtgtggaaagctagtgccaagaatattgttatgggcctggctcctagaggcaagatttgttagcaaaaactgtctctaaatatttatgctcagctaaataattgctaaataattccggatcccagctggaaatctaggatcaggactagcctaaattagtagatctatgtgatagtatattggtattttatccagaaagtacttgctcaatgataggttcaacttcagcatataattcatatacttttataaaagccttttcatggcattacatagaaggcctttccttggaaatatttccataaaataaacaaagcacttaaatcagtccattcaatagcatttgttttaggattattaaagaaatacagagttttgacttccgcagtgtgctaacatggattattctttcatttgctgatccttgtatgtgcagtaggatgttgaaagtgggggtggtggcagcatatttctacatcaccttggactttacctttctgagaatcaacataggtttctaactttttttatggccctgactggtgcttcagtaaacccacgaataaaagcagtactccaatctgcagagactctagaagaaaatactttctatgaaccaaaaaa

SEQ ID NO: 295101 - DNA, 1000 bp, Homo Sapiens
ggctcccgagctccgagcttccaccacatcggccggctcaggacagggcttccactgtaaagtcggctgccagacgtgttggagctcaccggatttgtccctggtgccttatttagttcacttggtgaggtcatgtttttttcctggatggtgttgatggtagtagatgttcttcagtgtctggacattaaaatcttgggcatgcagcaccatatgagaggtttaaaaaataaaattaaaaaagagaaaagaacccagagttgatctctgcagcatgccatcactgctggggatgaggaaacggtgatttcaggactgttttttctgtctcttcagtgcctctttcagtgatctgaggttaaaaccagagggacaatcagtggagccttctttctgccgtcttgctttactctcacgcccaagaatcagaattcagaacttttaataagaaaagctttcagaactcaggaaggacaaggaagacattctggttctccatgcttaacattggactgtttcttcaactgagactatggaggattcatcaacagaccaggaagcaacagcctgggctccagaattgaccagtagtccgtgcacagacgaggagaggtcccatgaaacttcggcgcagtctgggaaccgagctctttttgtaacaagttgtttgtcaggaggcccggtcatgaaagcccttcctgactgggctcaaggaatacaaaaaggacaacttgtttttgccattgtctgttgtttttcaataactagttctccgaaacagcactggatgaatgcctcaaggggctcacacaactcgttccaggacttagtgaccattgtttctgtccctgttcaatagagttcaaatttaatatttaaattttgctccacaatgtgccatattatctgtatccaacctgtcattgggcatttaggttgattccatgtctttactattgtgaataatgctgcaataaacatttacgtgcttgtgtcttta

SEQ ID NO: 295102 - DNA, 1000 bp, Homo Sapiens
ataacctatggccaaacttgcactgttacgtgttaaccaagacatccctttaggtgacaagactctataacagtggttacctgtctccatgttgacacttcatcctagatttaaggagaggcatcaatttttttttttttttgcctcaagagaaatttcaaatatccaaattaaaacacagtagcatttgaaccttgaccttaccatctctttaagtaaacgtggagttgatttctctactaaataacagaaacctcagtttttcactcccattgtaagtaacttttatttaagtaagtaaaatcaggtaggaaatcacctttgacttagcttccagtagtcattaccaccttttactgcacaattcacaagcatgttttcctggtgaattggactgaaaattacattttgacaactttttttccttttatccccaacttttgccagaaagcagaaaaatgctctatttttataaagaaagattaaattctccaatgatattttaaaaaatatcaacctacatgcactttagaatgtaaaataacaatgactattttaaactcgaagacccactattttgagtattttttatagactttaaatactgggtttttttcctccttcaatctcaggcttttctccatcttttaagcagcctctgtaactcccttttgtccataggtgttgcgtgcctctcatctgtggggaagtattatttaataaaatttatgttacaggataactttattttaatgggcatgggcttgtctatacacaaaggtatgtatattttcattataaaaaaccagtttaaaattttttcttattttaattgtttgaaatttttctagagccaaagaagctctttaaagaagttgtttcttccaaagaacaaagccaggttaatgacattcaattctaaatgatacattggaattgtgccttttctaccacactggattaaataaacttgtcaaaatatggttttgtcattttctga

SEQ ID NO: 295103 - DNA, 1000 bp, Homo Sapiens
cgcttccccccccgagtccccattatataattctttttttcttctttttgagacagagtctcactctgttgcccaggctggagtgcagtggcatgaacttggcttactgcagcctcctgagttcaagtgattctcctgcctgaacctcctgtgtagctgggactacaggcatgcaccaccatgcccagctaatttttgtattttttgtagagatggggtttcaccatgttggccaggctagtcttgaactcctaacctcaagtgatctgcctattttggcctcccaaagtgttgggattacaggcgtgcgccactgcgcctggtccattatgtcattcttatgcctttgcatcttcatagcttagctcccacttataaatgaaaacacaggatatttggttttccatacttgagttacttcacttagtataatggtctccagctccatccaggttgctgtgaatgccattattttgttcctttttatggctgagtagtattccatggtgtatatatatcacattttctttatccactcattggttgatgggcatttagccttgttccatatttttgtatgcagtataacttacagatggtaaacaatatacagcttgatgtattctgacatgtaatgcagtatgtaaccaccacctggatcaagatatggagcatttctggcacttcagaaggttccttcatatctttttccaatcaatattgcctcaaaagggaaaccatatttggatttctatcaccataaataacctttgcctgccttgagcctcgtataaatggagcatatagcatgtatgcctttatgtctagttttttctgtgcaacatatttttaatattcactggtcttgttgcatgtgtcagacatttatttctttttattgctgtgtaatattctagtatttgcttatccatccatatgttgagggacatttgtttccagtttttggatatcataaataaagctgctgtgcacattgttg

SEQ ID NO: 295104 - DNA, 1000 bp, Homo Sapiens
ggacaaatgaggtcaagtcagaggaggaagctgagggccccgagtcccttctgctcagatgtccgcatccagagaggagttctgcttctctcaacctgtgtttcttgcaagagtttatctataaattgctgaaaaatgggtaatcaagttcagcaactccctggcatctgtgatgacctatggtttgtaatcctagtcagaatcacctacatagaggatataatattaatcagaacaaaacagaaaagtcgctagaggaataacaatagtaaaatttacaatcagatgaagaataaagttttcaatgaggcacagttctaagcacttcatacaaataacctgtcttaattctcataaaagtactgcaaggcaggtgataatatcatctccttctaaagataaaatgcagcacagagaggttaagtaacttgtccaatgttgaacagctagtgagtggtcaatctgagatttaaatccaggctgtctgggtccaagaactctgttcttcactacttctcaacaacatcaactatgtaaaatgacacacatacataaacccacatcaatggtaatggtggtaatctctggccggcaagatgaaagaagatgttatgcaattcttcagtcctttctgtgtctgccacattttccccaatggatagatgtcacttaaattatcagaggaagaaacaaactctattaaaaggaatttcaagggccgggcaagatggatcacacctgtaatcccagcactttgggaggccgaggtgggcggatcacctgaggtcagcagttcgagaccagcctggccaacatggcgaaaccctgtctctactaaacatacaaaaaaattagccgggcgtggtggcacatgcctgtaatcccaactacttgggaggctgaggcaggagaatcacttgaatctgggaggtggaggttgcagtgagccaagatcgcaccactgcactcaagcctgggcgacagagcaaggcttcatctc

SEQ ID NO: 295105 - DNA, 1000 bp, Homo Sapiens
catcaattattctgaagaaatattccttctcatctctgctttatgcaattttctgcttgataatgaagcagaaacaaaaatacattaagtttcattgtgtatgtcacttcctccatgcaaatttctctgatcttttatgtaaaaaatgacttgaccttcctgggaatatttccagataagataaataaattattgcttccacctcatttattttagtaatttgtatatatgttttatcttccctaaaaatctacaatttccttgagagtagaaattgtgtcttagtcacccttgcatcacctaatagcacctagctcagttgcttgtctatagcagttgttcaacaaatgattgatgaatgtattaataaatcatcccaattcttaggtgatacctttaccctatgcctcaggcaactctttttttttcttgagacagacttttgttcatgttgcccaggctggtgtgcagaggtgcggtctcgacgcactgcaacctccacctcccaggtccaagcaattctccttcctcagcctcccaagtagctgggattacatgcacccaccaccatgcctggctaattttttgtatttttagtaaagatggggtttcaccttgttggccaggctgatctcaaactcccgacctcaggtgatctgcccgccttggcctcccaatgtgttgggattacaggcgtgagccaccactcccggcctccctttttttagatttgtgtaactgcttgtcctctatattgaataatacagctgcatgcatactgtcaccaagcaaatataagaggatggatggtcctgtgcttaacctaaaggtactccacaaacccacaaaagagcagaagaaaccaagctatgaaagatcagacaaagaggaagaaaatgctgttttcagcaacatatgaaaactttatgttgtttccagtcctgataacaacagagtgacagcacatatatggctggtattcaagggtccaagatcaatg

SEQ ID NO: 295106 - DNA, 1000 bp, Homo Sapiens; identical to SEQ ID NO: 225000

SEQ ID NO: 295107 - DNA, 309 bp, Homo Sapiens
atgcctattatgctaagcgaatctggattgggaaagttgacattaatcaactcattattcctcccagatttgtattctccagagtatccgggtggaaccaaagttttaatcaaagaaggtggtgttcagttgctgcttacaatagttgataccccaggatttggagatgcagtggataacagtaattgctggcagcctgttatcaattacattgatattaaatttgaggactacctaaatgcagaatcgcgagtgaacagatgtcagatgcctgatgggtcaatgcccattatcactctagatggataa

SEQ ID NO: 295108 - DNA, 1000 bp, Homo Sapiens
tgtttttttgtttttttttaagagaaacatttataactggatagcattgcagtgaaagcagcttgggatgttggagctaatgccagctgtttatactgctctttcaagacagcctccctttattgaattggcattagggaataaacaagcctttaaacgtgataaaagatcaaaaacctggttagacatgccagcctttgcaaggcaggttagtcaccaaagactaacctccaagtggctttatggacgctgcatatagagaaggcctaagtgtagcaaccatctgctcacagctgctattaaccctataatgactgaaatgacccctccactctatttttgtgttgttttgcacagactccggaaaagtgaaggctgccaatctgagtagtactcaaatgtgaggaactgctggtcttggattttttttccattaaattcagctgatcatattgatcagtagataaacgtaaatagcttcaaattttaaaagtggaattgcagtgttttttcactgtatcaaacaatgtcagtgctttatttaataattctcttctgtatcatggcatttgtctacttgcttattacattgtcaattatgcatttgtaattttacatgtaatatgcattatttgccagttttattatataggctatggacctcatgtgcatatagaaagacagaaatctagctctaccacaagttgcacaaatgttatctaagcattaagtaattgtagaacataggactgctaatctcagttcgctctgtgatgtcaagtgcagaatgtacaattaactggtgatttcctcatacttttgatactacttgtacctgtatgtcttttagaaagacattggtggagtctgtatcccttttgtatttttaatacaataattgtacatattggttatatttttgttgaagatggtagaaatgtactatgtttatgcttctacatccagtttgtacaagctggaaaataaataaatataacat

SEQ ID NO: 295109 - DNA, 1000 bp, Homo Sapiens
tatcaaagaggactatttaaataaaaagggtaatccaaagaaatttgcaggacttgcatcatatttgcatggtcatgaaccttcaaatcttgtttttgtaaattttctcaagagaggccttttccataatctctgtaagccagcctggaaaggctcacaacaattttcccaagatgtgatggaaaagctcgtgttagtattggcaaatttgtttggaagaaaatatattccagcaaaattccaaaatgctaatttaagtttttctcagtcaaaggtgatccttgccgaactcccggaggattttaaagctgctttatatgagtataacctggcagtaatgaaggattttgcctccttcctgctgattgcttccaagtcggtgaacatgaaaaaagagcatcaactccctttgtcaagaatcagtaagcagattttagttccattccggaacaatttaaagagtaaacaatcttggttaagaaagcctctggatattggatgcttcaaagctgaattcacaggtaaagaatgtgaagactcccaactcgtgtctcacttgatgagctgcaagaaaggaagagtagccatttcaccatttgtttgtctttcggggaacacagataatgatttgcttcgaccagagactatcaaccaggtcatcctgcgcacagtcggtgttagtggcactcaggctcctctgctgtggccatggaaattagataaccgaggaaggagaatgccactaaatgcatatgtgctcaatttctataaacacaactgcttgacaagattagaccaaaaaaatgggatgcgtatgggacagcttttaaagtgtttgaaagattttgcattcaacattcaggctatcagtgactccttgagtgaactatgtgaaaataagcgtgacaatgtagtcctggcatttaaacaattgagtcaaaccttttatgagaaacttcaagaaatgcaaattcaaatgagtcaaaatcatttagaataa

SEQ ID NO: 295110 - DNA, 1000 bp, Homo Sapiens
ccttcctatcagacacagtgattgtctctattacctacataaatacctgcgccatagtataggtagattttaaatgtaagctttcacatattgaaaggctgtctttgttctatgttgtaactaatcatgtattctgagccttttgtcaccagtttgtttgcaatccaccttaaaaatgttttaaaatatatttattgattgaatacaataaaattcactcatttcaagtgaagagttcagtaagtttgaccaatgtataaatctgtgtgacaaccacaacgataaagatatggaacattttatgtcatctccaaaggttctttcattccccctttgccgtccattctcctttcaactctcagccccaggaagacactgacctgctttttgtcgtgatagtttacttttgatattctagaatttcatataaatagaaatctatatattcttttgtgtctagcttcttttgctcagcttaatgtttttgataattttatattatgctttatcattagtttatttctgctcattgctgagcagtatttcactgagtagtactttttttatccacttaccagttgggtggacattttgattatttctagtttttggctacgatgaataaagctgctatgaatactagtgtataagtctttgtgggactacagtcatccctcagtatatgtgaggaattcattccaggaaccattccccttcttaaaaaatccatatactcggccaagcatggtggctcacgcctgtaatcccagcactttgggaggccaaagtgggagatcatctgcggtcgagagtttgagaccagcttgaccaacatggagaaacctcgtttctactaaaaatacaaaattagctgggcatggtggcatgtgcctgcaatcccagctactcaggaggctgaggcaggagaatcacttgaacccgggaggtggaggttgcagtgagccaagacgccattgcaccccagcctgggcaatgagtg

SEQ ID NO: 295111 - DNA, 1000 bp, Homo Sapiens; identical to SEQ ID NO: 119279

SEQ ID NO: 295112 - DNA, 1000 bp, Homo Sapiens; identical to SEQ ID NO: 225001

SEQ ID NO: 295113 - DNA, 1000 bp, Homo Sapiens; identical to SEQ ID NO: 225002

SEQ ID NO: 295114 - DNA, 1000 bp, Homo Sapiens
ggaaagacaaaatgaggcttgttcatgatcaaattctgtgtactctagttgcttctttcccttggagtgacaggtacttttatatccaggatgattacagtgatgacatccattcttttttgggggcattgagaaggtgggcttcctaattattttacaaaggtattacaaagtgttaatatacaaaattctcatgaaatagtacaagttgtaaggactgtaaagtaattcatagttttgttttttcctctaatagttgtaacttaattacttcaggagactacgacagtgtagaatttgtggtaacatgatcttctagtgactatttatcaaatccacctgtttctagatgaaggacacattgcctggggaaatggcctcggtttttttgccatgtaggctctcaagtttccctgcattgagggtcacacaacttctttatattatgctgggtaaatttcaggctgctaaatccttgggtgaagcttcaaattttagcttatgcaactgaagtccattgcaaaatgagacatatttacactgtttatactgtaatttatgctgcataaagttttgtagtgaatgtgtatgagagttttaggtttgcttcaatgtatgtttatatttatgtgacttatacaacttgacatagtagtctgttttaatttattaggtatatcaatatttgttagatttaaaataagagtctaatgctggatacaaactcagtttatttcactgttctagaaccatggaggaatgaagactcccactgaaatgaatgttctaaatatttgttctaaatcttttaatttttgtttaataatttctggtgaatatgtgttcaatctgttatgttaaatagaatataataaacataagacttttctttactgatacatcactgaacataagctgcaatactttaacttatttctgttccataatttcagtaggggctaatgacccacccctgctacattaaagacttcagactgca

SEQ ID NO: 295115 - DNA, 1000 bp, Homo Sapiens
tcgaaacagaaggcagcagcccatgattgatgggctccggcccgctggggtgttattaaccactctgtcaaggtgacaatgtcatttttaatgttccatcttcagacttgaggcttattcttaggttgagagttagccaaccttgacagagatagaacccctaaaagtttaagacgtggttcttgaccctggctgctggggagcttgcaacaataccggtttccatgagggtaccttctgggatgcaggaaatgttagatgtctttatccacgtggtggttacttgagttcatatatgtgtagcaaaaacttgggctttggtgaggatatggagaaactgaaccctggtgccttactggtgggaatgtaaattggggcagctgctgtggaaacacactggtggctcctcaaaaagttaaacatgtaattaccctgtgagccaggaattgcactcctaggtatatacccaaaagaactgaaagcaaggacagaagcagatgcttgtaagctaatgtttgtagcagcgttattcacaaccaccaaaaggtggaaacaacacaagcatttgctgatgaatggttactgttctgtccctacaatagaatgttattcagccacgaaaaggaatgaagttctgacacacactgcaatgtgtatgaaccttgaacccattatcgtgacagacactggtcacaaaatgacaaatactgtatgattccacttacatgaaatacccagaatagtcacattcacagggacagaaagtagaccagagcttattcagggaaggggagagagaaggaatggggagtgaatatttaatgggtacatagttttagtttggaatgatgaaaagtttctagaaatggatggtggtgacttttgcataacactgtgaatgtacttaatgccactgaactgtacacttaaaaatgggtggagtggcaagttttacgttatgtatattttaccataataaagatatttgagatgtacagtt

SEQ ID NO: 295116 - DNA, 1000 bp, Homo Sapiens
gagtggacaaagccaggcgcaatggatagcaaagatgtggaagtctcctcgattcaagttacaagaaaaccgcagcatggagtctgctctcagctgttggggaattaccgatgcctttgactaagtcaagactgacttttccagaatatcacccaagagatagagccgtccctgtccaagtttgtgcgctagcccttcatggaggtcagagaggaagaaacaaaggcagctgtggcctcggcggtcacagtgtcagaacgcacaagccccataaagaggtttcacgcaggccacccatcccttttcattctccagcagaacaggacagagagcgttctgttctgcggaaggtcttccactctacaaggcaatccctccagctgctttgctgtattgtgctgtctcctgtcacactatgaatgcagtgacctcagccagcaacagggagaacccccctgcctcccgaacaaaggacctcacgtgaaatcctgagctcagagcttacagatatgtgtgcgctttcactttacatcggccgtgacttccaaacaacttcaggaaactttaggatctctgaggtatactggagatgacagcagcgtagaatgttcatttggatttagaacagaaatgcttattttatatttggctgctcccaaactgtccccagacttcctctccagtggttaccctccactgccctggatgtcccacgtttacactccacactcacacctccaccttaacaaagtcctccactgggtcaaaccatacatcgcttcgtctctgtagtgatgacttcctgtcctctgctctgtggataaagaccccagataaagatgcctgtgttgctcaactcttgtaaatactcttgagacattttgaaagcagaaggaaaggagacagacggggaaaataaaagggatggtctgcttgtgcggaaacgttttgagaatgcccttccctaagagagaacagtaaaagtgagcaatacttcctg

SEQ ID NO: 295117 - DNA, 1000 bp, Homo Sapiens; identical to SEQ ID NO: 119280

SEQ ID NO: 295118 - DNA, 1000 bp, Homo Sapiens; identical to SEQ ID NO: 225003

SEQ ID NO: 295119 - DNA, 1000 bp, Homo Sapiens; identical to SEQ ID NO: 225004

SEQ ID NO: 295120 - DNA, 1000 bp, Homo Sapiens
ggcatatcacgtggatgccatagaactatcacagcaatttcttttttccccaagtcagcctctcttgtacaggggattagaaaacaaacccaagagaataaacttgaaatggaaggaacgtgctttgtagtcgagtgtttttcaaagcctgcatcattttaaaaactgatttaagtatattcatttgctttctaaaataagtcatatgtatgtttctactgatcggccagaatagttaaggtctgtctgatcttcatatggaatgaaaggggacattctttggatattctggaagtccacacgtgttctttacagagtttggtttgctttctccgtttcttccttcctttgcaaaatcaaacaaacaggaataaaaaccaaaccaaaacaaaattaatgaaaacccttgtgttgaggactttgttttgttttaaatgtgtctggtattaagcagtatgtttagtgaaatgactttaaacttaagtaggaaatacagctccatttcacacgtggattttgtctgcatttacatctctgcaggcctcacatgccgtgacaccagacatttttttaattaagatatgaagtgctcattttttttttgtggaactgctgtattctaacaaatttactacacgtctcagaaaacacatagctttgccaaagttggtgagtagcccagcatggtttatctccagcccacagctctttccctgaattcaatactgcaggcacaatttaatgcaaacccaatttatgacttaatgctctagggaccgtagtgggagattgttacattattcttttctaatcctatttgtgttttaatttgctaagtctgtaatgaggtgcatgccttgaatattcaagatctttgacattgcttttgactttgtttaatataatagattttacagtttgcattaaatacccaggtgcttcggtcagtattatctctttattttctcaactagagtgaataaaattacacgatgaaagt

SEQ ID NO: 295121 - DNA, 1000 bp, Homo Sapiens; identical to SEQ ID NO: 119281

SEQ ID NO: 295122 - DNA, 1000 bp, Homo Sapiens
cccaggttccaagaagagccccccagagcctgtggacaagcgagccaaggcccccaaggtgcgccgggcactgccgcagcccagtcccgcaccacccgccttcaccagctgcccagcacccgagccatttgtggagctgccagctcctgccaccaccctggccccagcacccctcatcaccatgcctgccacacgccccaagcccaagaaggcgcgggcagccaaggagtcgggtgccaagggccctcggaggccgggggaggaggccgagctgcttgtcaaactggatcacgagggtgtcatgtcacccaaaagcaagaaggctaaagaggccctgctgctctgggaggatccgggggcggggggctggcaggagcccaagagcctcctgagcctgggcagctatcaccctgcggccggcagcagcgagcccaaggcaccctggcccaaggccaccgaccgggacctcgcccaggaacccgggccggggctcacgttcgaggactctgggaaccccaagagcccggacaaggcccaggctgagcaggacggggccgaagagtccgagagcagcagcagcagcagcagcagcagcagcggctcggagacagaaggggaggaggaaggcgacaagaacggggacgggggctgtggcgccgggggccatgaggactcttcctgcagctcggacgatgaggcagcccccgcccccacggctggcccttctgcgcaggcggcgctccccaccaaggccaccaagcaggctggcaaggcgcggccctcggcccactccccaggcaagaagacgcccgcgccccagccccaggcgcctcctccgcagcccacacagcctctgcagcccaagactcaggctggggccaagagccgacccaagaagagagagggcgtccacctccccaccaccaaggagctggccaagcggcagcgcctgccgtccgtggagaaccggcccaagattgccgccttcctgccagcctga

SEQ ID NO: 295123 - DNA, 1000 bp, Homo Sapiens
tgatgtgagttgcccaagggaacaccctagggaaacgtctgaacaaggaaaagaggatccgggacctgcttgtatctgcgaaaaggagccaaaggagcaggcttaggagagctcataagtgtggcaagaagccgactaggctcattctctctccctctctctctctctccctctcctttctttttacttcttcctttcctccattccttctttctttccttttcctttctacctttcttttctttttgcctttcaccttttttctcatttaccttctctcttgagcaacgtcagtaattgatcttgcatctcagagagagagaaagagcatgtgtgagagagaaactggtttctatgccagcactcctgaaaccccttactgtaaggatattttctcttaccccttgggatccaggctctgagtctcttctctttgggagtatccatcaaaatgactttttttaaaaacagattttcccccaaccagaagaatctgcacaaacttggcagcgtttttacttgtttaatgagtttaagacattacatggtgaaagagaagcattttggactcctgcatttttatttaccattcccagactgacgagaaaaagaaaattcctcacataacagcccttctctaaagaaaaaggaaaaagtggctgtaagattagaacattgctacaaagggaatgctgcatgttttatcaaaatgcaatgaccaggaatgatggttgattaaaaaaaaacaaaacaaaaaccactctttccccaccccacccccccaaaccctgaactggaatcaggaaagacggaggaaacaatcaaaatcaccattctattgctttgacacctttactaggtgaattggtggcattcacaaagctaatagggacgtttatatcaagaaacatttctgtatatattgttgaattttagttgtacatatactttgtatgtttttgtcttctttcatatatggagtaaaagccacaaaacgctg

SEQ ID NO: 295124 - DNA, 1000 bp, Homo Sapiens
cccacagccccagtgactaggggtgacatctcctgacctcccccacctgtggatatggccaagtcgaggtaccggttaaccaaagatgctgaaggagtgaagaaccagccatcccctaatacgcaggatggttatattgattatgtcaaactgaaaactttggagaaactcctctctcagaaagcgataactgggccagacacggtggctcatgcctgtaatcccagcattttgggaggcctaggcaggtggatcacttgaggtcaggagttcaagaccagccaggccaacatggtgaaacccgtgtctactaaaactacaaaaattctgggcatggtggtgggcgtctgtaatcccagctacttgagaggctgaggcaggagaattgcttgaacctgggaggtggaggttgcaaagagccgagatcatgccactgcactccagcctgggtgactccgtctcaaaaaaaaaaaaaaaaaaaaaaagtgctggtgttccttaggactgtgttgcgggccctctctctccccattccacaccctcactctccctggataactttccctttgtctatagctccagccaccacgtccttgcggatgacttcccagtgcagatccccagtctgggctacctctcgagttcaggcttgaaatcctgtcgttcggccaggcacggtggctcacgctgtaatatcagccctctgggggtcgaggcgggcagatcacctgaggtcaagtgtctgagaccagtctggccaacatgcgagaccccccatctctaaaaaataaaataaagtacatataccagcaatgatgtataaccgaaaaataaataaataaacaagttaatattgaaatgtcatgtttgcccccaacccaaataagcactataacctcttgttattcacttctcatgcaaccagtcttctgttctctgtgagtctttaggaaatgaggagcatgatcttctagcagtaaaacacctgtagagaattgcc

SEQ ID NO: 295125 - DNA, 1000 bp, Homo Sapiens; identical to SEQ ID NO: 119282

SEQ ID NO: 295126 - DNA, 1000 bp, Homo Sapiens
ggcatggttttatcctttggtgccactattcatcatatcctcattgcattggaaaaattaattgattactcttgacttcacttttctgtcaaattaaaattccattaccattcatttgaaaagatctgatgtggtttaagtgagattatatagtgtgtggatcattgctcagcatgtgataagcactcagacattttagctaaatgaaaacaacactaataccagtactactaaaactgagccctaaagtaatcacctgagttttatttaaacaaaaacataattttcttccatctttctgtaaaattgttcaacaagaaaatattaacattcatagatgatttcagagtttataggaacttttgcatacagctcacttatcagagcaactcagttggatcctgttattaatttcctcactttagaaatgaagggactgagatcaagaaaaggaagtgacttgctcaaggatacatatacaacaagtaaccatgctaagaattctcatttgatgtgcgatttcccccaatcagtgactatagatatatatagatacatagatgtgtatatatatagatgatagatagatacgtagatggggatacagatactacacctgtgtataccatatctatgtatgtttatatgctatttgtatgttccacttcggatatcttctcacattcagatatctagtgtccacatgtttttttccctggattcctctcgaaacataatcatatggcaaataaagtgagttctgcaataaactttaagatttaatataatacattttcagggagggtgtgggcagaaaaattgtgtggctttaagttttcttagcaaataagtgacttccctcctaagatgcagctgcttttcttcattttttgtaactgttttatgtttcacgaaattgctctgtcctgattttaactgtgtcatattccagctctcagagggtagccaaaatttggaaacaaaatgttgttttgctaat

SEQ ID NO: 295127 - DNA, 1000 bp, Homo Sapiens
cccatcaggaaaggtctgtgtcagggaagtagcaccagatggcccactacaagaaagctccacaagactgtccctgacttcagaccccgaggagggggacccactggccttagggcctgaaagcccaggagagcctcagcctccacagctcaagaaagatgatgtcactagctccaccggtccccacaaggagctgtcaagcacagaggcaggttccacagttgcaggagcagccctcagacccagccatcattcccagcgttccagtctctctggggatgaagaggatgaactgtttaaaggggcaactctgaaagctctgaggcccaaagcacagcctgaggaggaggatgaagacgaggtgagcatgaagggacgcccgcccccaacgcccctttttggagatgatgatgatgacgatgacattgactggctgggatgaagacccaggaaactggtgcaaaggtttctctgcaacccttccctaagcatgattttgcacagccaaccctgggtctaggcgaaccacagggtgaggtcaaggtgagcattctgggaacaatatttgggctcagagggtgggttggccaccttctgagccccacccccgccagacctggtgaagaggatcataaccctgtcttcaagaacactgggatttcagcagcaagttggaagaaggactggtaggttcccctccaagccagtcacctgtaagagtcctgtcctctgccagactttttaatctcttcattaactctcagactgacctgggagccctcctctacctgaatccagtgctcaactgtgccccggcaacaagacctgggctgaggtctccctggtagaactaagggagattacaccatctaaatcccagtgcagtcaacagcctggcctatagtcctgggacatgtatcttcttctttgccttaaatctgatacaagaggtcaatgactttgaaaataaaactaaaataaatgtctataatgaaacttg

SEQ ID NO: 295128 - DNA, 1000 bp, Homo Sapiens; identical to SEQ ID NO: 119285

SEQ ID NO: 295129 - DNA, 1000 bp, Homo Sapiens
atcagggaaatgcaaatcaaaaccacaatgcaatatcaccttactcctgcaagaatggccataatcaaaaaataaaaaaaaacagtagatgttggcgtggatgtggtgaacagggaacacttctacacggctggtggaaatataaactagtacagccactatgaaaaactgtgaagtttccttaaagaactaaaagtaaaactaccatttgatccagcaatcccactactgagtatctacccacaggaaaagaagtcattattcaaaaaaagatacttgcacacacatatttatagcagcaaaattcacaattgcaaaatcgtggaaccaacccaaatgcccatcaatgagtggataaagaaactgtgatatatatatacaatggaatactatgcagccataaaaaggaattaattaacagcatttgcagtgacctggatgagattggagactattattctaagtgatgtaactcaggaatggaaaaccaaacatcatatgttctcactgatatgtgggagctaagctatgaggacacaaaggcataagaatgatgcaatggactttggggacttggggggaagagtgggaggtgggcgagggataaaagactacaaatatggtgcagtgtatacatgggtgatgggtacaccaaaatcttacaaatcaccactaaagaacttatgtaaccaaataccacctgtaccccaataacttatgttaaaataaaaaatatatatataaaattttaaaaaagaatgtagccatagatgctatggggttttaaaaggtaatacaagggccagcctggccaacatggtgaaaccccgtctctactaaaaatacaaaaattagccaggtgttgtggtgggcgcctgtaatcccagctgctcaggagactgaggcaggagaatcacttgaacccaggaggtgggcattgcagtgagccgagattgcatcactgcactccagcctgggcgatggagcaagactccatctc

SEQ ID NO: 295130 - DNA, 1000 bp, Homo Sapiens
cctctgggtcagggggtttgtctcatatgcactcctgagtgcccacctgccagtgactcccctgtgtttcacacccctctcgggggatctcagatccactcggctcctggtctctgtctggatgaccacgaccagtttcccttggagaaggaccaatggggaatggcaatgccaggaaggcaacgcttcgcttgactgctctgctccttaaatccccaaaagcaccactcacaggactgtagacgctatgccagttacagacttcagcgaagggtcaatagtgactacatgaaattatagtggaacaaactactagtgagcgatggctaagcatccatgctgctagaatccaaaaagaatcacccatcccctgcctcccacggaaaagataaggtcttctgaggacattccatttccggtgaattcccgttcatggcttttcttcctgttttgagcactgcccttttctctccctggaaagaaggaagtccctccattaatctgcttcattgtagggatttctttatctctcagtaatgggatctgtctatgtctccacctccctgtgaacatgtgaacacccagagacaatcaccaaacactaaggagctatgagtgtcacatcataatccctcacctagctctgcgcagtggctcacacctataaccccagctatgcaagacaccgaggcaggaggattggttgaggccaggagttggacacgagcctggtcaatgtagcgagacctcatctctaaaattataaaaatagaaaaaattagccttatatggtggcacgcatctgtggtcccagctactcgggagactcatgcaggaggatcacttgagcccaggagtttgaggctgcagtgagttatgacagcaccactgcacagagctttgggaggctgcactttgaaggcaggagttcaagaccagcttgggcatcacagcgagaccccaactgcagaaaaaaaataaaattaaatttaaaaaaatt

SEQ ID NO: 295131 - DNA, 1000 bp, Homo Sapiens
atggtcgcacctgaaaaatcagtagacactcaacaccagcctgtaaatgcagccaggatccgggctataacctgcaaagcaacaggggcggagctgcccaaggctgtgggaacccacctcttccatcagtgtgacctggatgtgaggcatggagtcaaaggagatcattttggagctttaagatttgactgcctcgctggattttggacttgtatggggcctttagctcctttattctggccaatttctcccattgggaatagttgtatttacccaatacttgtacctccattgtctcgaggaagtaactaacttgctttttaattttacaggcttgtaggcagaaggggcttgccctgtctcagataagactttggtctgtggatttttgagttaatgatgaaatgagttaagactttggaggactgttgggaaggcattattgtttttgaaatgtgaggacatgagatttggcaaaggaccaagggcggaatgatatgatttggctctgtgtccgcacctaactcttatcttgaattctaattcccataattcccacatgttgtgggagggacttggtgagacataattgattcttggggtcagtttcccccataccactgtggtagtgggtaagtctcatgagatctgatgattttataaggggtttccgctttggcttctctctcatcctctcttgccaccaccatgaaagaacttttcaccttccttcatgattgtgaggcctccccagccgtgtggaactgtgagtccattaaacctgtttcttccaagtcttaggtatgtctttatcagcaggtctacagatttgtcattggttttgttaaattatgccaaaattaataatgtttataagctgtgtaatcaaataccaatttatatattttctgttttgttttgttcttttttttgtcattggggaaaatttagaaactgtaaatgtaaagaagaaaattaaaattatgtatttacttcaaga

SEQ ID NO: 295132 - DNA, 1000 bp, Homo Sapiens
cagcggaagcaaggaggctgctgggttaggggtcggtgcagcagtctgggtgggagacagtggtggcagagaattggtttcagagctgacaggacttgatgcactgaatggcttttggggactgcgggtgttgctgctttctctcaatatcctgcgggatctgtctgatggggccctagggggcctcagtttcctggagcagctgaacctcagccataaccagctggcccatctgcccacagacttctcggctaccctgggctctctgctctgcctggacctctctcacaacctactcacttccctggaccccaccagcctgtggcgcctggggggcctggagcagctcaacctgagccacaaccagctggctgaactggccgcaggggtctttgggggcctcttccacctacactggctctcgctggctgggaaccagctgcagcgggtgaagggtgctgccctgaccactgtgccgggcttggaagtcctctctgtagctgggaatgacatcagtgagctggaggccgaggcgtttgcaaccttaggagcactgggccttctctctcctgggctgtcaggggcagtgctgagtggtgtggaggcccagctttgcctggctgagactgccactgtgctgggcatcacaggcaccgtgctgctcacagtggctgtggctgtgctgatggctgagcgcaagcgaagacagggcccgcaagaagccggggagctggggagctttctggagagaaatgaggatttggccccaggtccttcccttctcagtatccctctgggaaagaggaaagagcaggaaaaggtagagagggacttcagccctgagaaggggcgcagtgggtaccaagacgagaaggctggacttcgcaactgggtcaccttagatccggaactagagaatgacaccgttgtttccgggaggaaaaagaaaaagcgcttgacccggaagctgcgtgtcccatccccgcgcctgcttctctga

SEQ ID NO: 295133 - DNA, 1000 bp, Homo Sapiens; identical to SEQ ID NO: 119286

SEQ ID NO: 295134 - DNA, 1000 bp, Homo Sapiens
tgcgtttaacggcttcactgtgaacgctagaactcgggagcctgctcgctctgccctggcagctcagccagaagcaccaggcaatgtggccatggaagccagctcggatggagaggaggatgcagaaattacagacgaggtaactgagacagtgatgaatggaggcatgaaggaaacgctcagccttactgtagatgccaagacagagactgcggtctttaaaagtgaagaagggaaactgtctacctctcaagacgctgcttgtaaagacttggaagagggccccaagaccgcagaggcgaagtgtgctgggcccggccctcaagcagaaccgcctttccctggtgagctcctctctgaagagactgtcctcgggccttctcctctggaaccagcatccccagaggacagggctcctgctgtctcagggctgcctgacttgtgtggcgttggacctcggggattgctggtggataacacactgtggtcttgcctggtggcgagttttgacggccatggacaggaaagtcccaactgcccagaatcccagactcatctaagcgcgggggcacgcagccgactggcatttgagtcacccaccaccttccccagccggccagctaattgttttgtcagtttattcggcgtcaaagaagtgagcccggcctggtggcgcatcctgggcctctcgccatcgaggctcatcctgggcctccagccaccaaggcgcgggccgggagccccggctggagatcaggggtgccaggggcgctgggcggccgtcgccccgctcgcggccccgacgaaaggcagcggcgaagtgggaaaaccagtcctaagtcgcaggaaagcagcaggacaccgcttggaaaaccgcgcaagggagagggctgctctgggtggtgatgtacagaagcgtatgagcacaccagggcccgtcaatggttgcaatttgttggcaccgattctagggaaagagtactgcaagcgaaaatgttaa

SEQ ID NO: 295135 - DNA, 759 bp, Homo Sapiens
atgagtgtatatgtggaagagggggtggatgtcactgtgaatgtggatgtgactctgtatgtggatgtagctatgtatgtagatgaggatgtggatgtgattgtgagtgtggatgttgctggagatgtggatgtgggtacagacaatgacagagtgagagaaagtcagtgggtcttgaagaatggtcctatgactatgaactccaccactggtacttcgccttatgccactatcatcaccactggtacttctccttatgccactaccatcaccactggtacttctccttatgacactggcaccaccactggtacttctccttatgacactggcatcaccactggtacttcttatgacactgtcatcaccactggtacttctccttatgacactggcatcaccactgatacttctccttatgacactggcatcaccactggtacttctccttatgacactgtcatcgccactggtacttctccttatgacactgtcatcaccactggtacttctccttatgacactgtcatcgccactggtacttctccttatgacactgtcatcaccactggtacttctccttatgacactgtcatcaccactggtacttcttatgacactatcatcacaaggtgggaagccataaaaagtgccacatctctactgtgttctcaagttcgcttttcgtttacttttaagcttcccaaaacatggtctataatgtgtaatttctactttacccctcacctaagaccttga

SEQ ID NO: 295136 - DNA, 945 bp, Homo Sapiens
atggctttctctgctcgcgcgcagtgtggcggcagcaggtgcggctttgagatgcagaatgacactggtgagttcataggcctgtacatgccatggaaatggtccaatagcaactgcatcatcgatgccaaggaccacaaatccatccagatgaacggggccaaggttgacaaggtagcaggcaggtttaaccaccagtttaaaacctatgctatctgcagggccattcgcaggatggcctttgtcaagctgttctttgtccctatccgtggcttttccttgacctctgccctggcatgcacccaacagagccccttctctttgatcacttcttccgtggtaacagtgaacagaattctgctgggagccacagaatgtttactgaagatttatgggtcaccggagaaaacggggagcgataggaacctgcagacgcggacccacgcgtcccgacgtgggcagacctatgtactttatgatgctgctctggcaacgccctccctccacccaaaggcggccgagagcctgaccatgcacctggccgacggtgctgctccaccgagcgctgaactcgctgtctccctgaagcacgctccccgtctggctgaccttgcaggaccgtttgttcaaaccactcccaggaacttcctgcccaggccccgcactcttcacccgaacttccgtgactcctcagggcaccgtcgcttaggggtccgtttttgccaattcactgtgtctttactgcattctgctgggtgctgccagcatgtggaaggctgtgataggagcagcacttgcccccggggcggcctggtggtcctcccctgctgggcagagcagccccatgagatcagcagcaatgttcaatcccgaggagtcacagagttgcctatttctcagggcaacagcaggaaaggccctcctgaggcccatggtgccctgtga

SEQ ID NO: 295137 - DNA, 1000 bp, Homo Sapiens; identical to SEQ ID NO: 225010

SEQ ID NO: 295138 - DNA, 996 bp, Homo Sapiens
atggctcttcatattcatgaagcttgcatacttctgttggtcatccctggattggtcacctctgctgctatcagtcatgaagactatcctgctgatgaaggtgaccagatctccagtaatgacaatctgatctttgatgactatcgagggaaagggtgtgtcgatgacagcggctttgtatacaagttgggagaacgatttttccctgggcattccaactgtccatgtgtctgtgctctagatggacctgtttgcgaccaaccagaatgccctaaaattcacccaaagtgtactaaagtggaacacaatggatgctgtcctgagtgcaaagaagtaaaaaacttctgtgaatatcacgggaaaaattacaaaatcttggaggaatttaagccctctccatgtgaatggtgtcgctgtgagcccagcaatgaagttcactgtgttgtagcagactgcgcagttcctgagtgtgtcaacccagtctatgaaccagaacaatgttgtcctgtctgcaaaaatggtccaaactgctttgcaggaacgacgataattccagctggcattgaagtgaaagtggacgaatgtaacatctgtcattgtcacaacggggactggtggaagcctgctcagtgttcgaaacgtgaatgccaaggcaagcagactgtaaaacagaaagagagtacaactgggaagctgaagtgcagaaattttgcatcaaagcattggcacagcgagagtcacagcaagaatttactagaattgaatgggacatccattaaggatctctcttcagagagtttgcagaaagcaggctgttctgtggcctctgataaccagctagagagagggatttttatgactgagcagggaaacagcagggcaagaggctttctaccaactgacctccaagggtcaaagagccctggagcaagaattgttgctgatgaccagaacgcagaagacagtgcctttgatgtgtatgtaagctctccttag

SEQ ID NO: 295139 - DNA, 627 bp, Homo Sapiens
atgccctccctggagcctcagtctaaagaaatagaagacctgaaaaagaagctcacagaaggggaagaaatatcaggctgtgatgtcagtgggtcggacggagatgacaatgaagagggtaagattggagaagatgaagagaaaaggaaaaaagggggaaataaagtcttcccagagaggacggttgaaacgccggcgacagcggatgcggagagaaaggcacttgaaacaaagcttgacgtggaagaagaaacaaggctgcagctaaattcgagaaacaggaaaaaagatcttaaaacccaacaagagcatcagtctttgccagaaaagttctctgccctggagaagaaggtaattgttggtggcgttgatttgttggccaaagccgaggaacgagagaaacttcttgaagaatctcatacagagctggaagaaaggaggaaaagagcagagcaactttgcagagaacttgagggaaaaaggtggtgctacaaggcctgctgcccggagcagatgctggtggcctggggagcctcgcttggggcctggagcttgctgactaacaggcaaagaaacaggcaggcacaactgctgccaggggccccctggaagaaggcccagtcctag

SEQ ID NO: 295140 - DNA, 1000 bp, Homo Sapiens
caaacaccaccagtcagagtcgggcatcaggggggcccaggcagcttgggctggggatgcggcagaagccactgggccgcctgctgcgaccaggaagcccctgaggtccgaggcaatgggtatcgtgggctctgacgacctgccctacaagcacagctttgccatccagacagcagggacggaggtgccgcgtgtggaggccaaggacaaagacaggccagtcgtggtggagctgccctcctcactcagacttgaccatggtggggaactgtcctcactcagacctgcccatggtggggaactgtcctcactcagacctgaccgtggtggggagctgccctcactcagacctgaccatggtggggagctgccctcactcagacctgaccgtggtagggaactgccctcactcagacctgaccgtggtggggaactgtcctcactcagacctgaccgtggtggggctctgtcctcatgtcctcacccagacctgcccaaggtggggagctgccctcactcagacctgaccgtggtggggaactgtcctcactcagacctgatcctggtggggaactgtcctcactcagacctgaccgtggtgaggagctgccctcgctcagacctgcccatggtggggagctgtcctcgctcagacctgaccgtggtggggagctgtcctcgctcagacctgaccgtggtggggagctgccctcgctcagacctgaccatggtggagaactgtcctcactcagacctgaccgtggtggggaactgtcctcgctcatacctgactgtggtggggagctgtcctcgctcagacctgaccgtggtggggagctgccctcactcagacctgaccgttgtggggaactgtcctcgctcagacctgccccacaagccagcgagcggacctagccccagcaactgcacagcctggacaccaccacgacgtggccacgctcaggctggacagtgtccagctcggcagtgtctcctctga

SEQ ID NO: 295141 - DNA, 485 bp, Homo Sapiens
ccaaaatgacgaacacaaagggaaagaggagagacacctgacccgtgttctctaggccttttagaagacatggaggaaggggtactgttcaaaaaggaatgccccacaagtgttaccatggcaaaacgaagagtctgcagtgttgcccagcatgctgttggcattgttgtaacaaacaagttaagggaaagattcttgccaagagaattaatgtgcgtattgagcacattaagcactctaagagccgagatagcttcctgaaacgcctgaaggaacatgatcagaaaaagaaagaagccaaagagaaaggtacctgggttcaactgaagcgccatcctgctccacccagagacacgcactgtgtgagaaccagtgggaaggagcctgagctgaggaagctattccctatggattcatggcatattaactgtttaaatgaaataaaagacttctggactgtaaaaatgtttctcttcattgagtag

SEQ ID NO: 295142 - DNA, 1000 bp, Homo Sapiens
tcaatgaatccttcattctagaaacactctatatctttggttttcatgagaccattctcaccttgttttgtcctgtgacttttttgaaaaaaacaaaaacaaaaaaccctttttttctttttaaattctggtaaaaaacacaatgaaaatttgctatcttaaccatgttgaaatgtgcagttagtaaagtacattcacattgtggtgcaagccatcactaccatccatcactagaacccttttcatcttgcagatctgaaactctacccattaaacgacttcccatcttcccatccccacagctcctagcaaccaacattctactttctctatcagtttgactactctaggtacctcatatgagtagaatcatacagcatttatccttctctgcctggcttatttcacttgtataatgtcctcaaggttcattcatgttgtagcatgcatcagaacttcctccccttttaaaggctggataatatttcatggtatgtttagatcacattctgtttatccattcatccatcagtgaacacttgtgctccttccaactttgggctgttgggtgtcctgccactgttgctcctagtgctcaatctcgtttattccctcctaatcaagtgtacaacgttggacactgtgcaggatgatgccacttcatcttggatgctaatctgccatgttgacttctgattaaccccaggcccaggaatgcctcaagatttctactttacttactgttgcttgtgtaagccaagacaaccttgatgttatcataaacatgtacttacctaagtcctgtcctttggcaaattatgggctatgagacacagcattcttgcctttccctgaggggtcaatttcagcgatcctacacattccttctgaagcacttatgctctttctatatggtatgtaagctctcggtctggggagtaacagtgcagagatctacctgtcttgttgccacatgtttctaaactttccaataaatcac

SEQ ID NO: 295143 - DNA, 1000 bp, Homo Sapiens
gatgctgttgttgacagaattgtagataaggaaatagatattagacaggtcaaaaccacagataatgacattcttatggctgatataagtgacaagagaacaggtaaaaatagttgctatgaaaacatctcagaactgaagtattcagatgatttgtctagcccttgctattctgaagatttctgtaccagtgaggacaccagcagaagtttcaaagctcatgatagcagttcaaggacagaaaatccaaaacatagtcaatatacaagcaagtctagtgacacaggagtgtccaaaaagaaaaatagtagtgacaggagttctatccttagcccacctttttcagccgggtcacctgtacactcatacagaaaatttcatatttcaaagactcaggataaaagtttggaggaagcatctagtatctctgctagtgatttatcttcaacacattggactgaacaaaaagaaaaccagatagatcaaaatagtatgcacaattctgaaattacaaagagagctcaagacatctctgttaaaacaagaagtagttggaaatctttagaaaaaagccagtcaccacaaacatcccaggtgagttcttacctgccttcaaatgtgtccgaacttaatgtcctggatagcagtacatcagatcactttgaagaaggcaatgatgatgttggttcactaaatatttccaagcaatgcaaagatatttgtgaattagtaataaataaacttccaggatacacaatgtaaaaatacatgcttttaaaaaactttcaaggacctatgtgtactgttagtgaaaaaaattttaaagctgttttagttcatgaattatgtgaataattttttaaagaaatatgaattaacgttattcctttgatgtttaaatggtattttaccattaaatctgataatattgattattaaatcatataaacagatttctttttaaattgtttaatcataagaataaaagtgtgtctttcta

SEQ ID NO: 295144 - DNA, 1000 bp, Homo Sapiens
aacatattggccatcctggatgtgtgttgtgaaatcaggtgcatgtgacgtagacatacctgtgaaaaattgcattttagatgtatttgttaatgaaactacaaataatgttaaaatttttaatgcaactcaaaaatagtccaacagatggactgtgcaacgaaggaatagaaataaataaaaatcatgaaatgtctcattgttcttccctgctatgaataaaaacaagaattttgaaacactacagtatgctcatgtcataaaacatagttcaatttatgtcaattgaatgtaatagtcttctgattggcttacatcccattatattaaacttcatttgtatctatctccgacctttgataaatcagctcttggcaaaagcctaaggataagggatactttatgatacaccatcacagaacacctgatccgactggttttctcttgtgcagccataaaccaaattcctattgatgactgatacaagtgaaattttactgcactatgttcatctttatattctgtgatgaagaaaacatcctgatctatgaaagataaatatgcttattttgcgattcttatcaacatgtatcacattgaatagaaacagtaataattaataataataataaagtgccaatatgtgtatattctcaagttagtgcaaaatgtatcttactgaaaattgcttgaattagaaaagcaagccaagagggcctcttcctctctggggtattgcagtctttaaaaagcttgagactgtggaacttgatactattcatcctcctttttgaccttagccaagaaaaccttcttacatgcttgtctcttgcccaagtagattaatgaattcaggatataatagatccctgaagtgatttgcatgtattgattaaatgtcatgagtaaaatgctggaggttgaattactagagacacaggaagtgcagaaagcacaattgtaagcattgttcaaataaattacttggcaattcttcttg

SEQ ID NO: 295145 - DNA, 1000 bp, Homo Sapiens
aatccctttggaaaattgcttaagcctggcatgttttgtaatgaactttatctcttcactaccaaaagtcgtaaaaaggaacttcagtgaggaaagaaacacaattgataattgaatatttcaaagagatcagcattttagaaaactggctttttggattggctcacagttttcctacttttctgtcctgtcagttgagaagaatacatttcaagagatgctcttggaaaacacgtttgatggagaggttgatttttgtaacctgtatgccgtagtcagaagagccgtcctctggcagatatgtgaaagaactgcctatgaggagcgagaggctacttcgcacacctcgcagctcaggtccccggagacggctttacaggcacacaagcccctctcccaagccatctgccaggagccccatgaggaacacagcacagcgcctgcatcagaagcccatgggtttgcctatcacatgtcttgttttctcctgatccgtggctcacaggctcagtgtgacccaacctcctagatttccccatcagtgctatttgcagtgcccccaagcactttcctccactccagtccctgagcgcatgccaacggccctattttcagccacccctctccatgcctcttgtctgtctctagctgacaagcagattatctcttctgtccactttgtttgccaatgtactttggcaccattgaattccaacacatgaagtaaactgaactgtgtacaacgctgagcacacacgtggtttggagagcagccccttgtcaggatccaaaatgttcccaagccttgttgatatttgggtcactgcagatctctgagtcccccttcctttttaatcttcttcccctcaactcattctcaatttctctctctgaaaccacctgtgaacacacttatgcattcaaatagatgcatactgttcatgcttatatttttctgtaaccgtcatatctaataaatacttatcatccaggaaaaaaa

SEQ ID NO: 295146 - DNA, 1000 bp, Homo Sapiens
gctgaccagccagagtgaggccatggccctgcagtcgatccaaaacatgcgtgggaacgcccactgtgtggactgtgagacccagaatcctaagtgggccagtttgaacttgggagtcctcatgtgtattgaatgctcaggtatccaccgcagtcttggcacccgcctttcccgtgtgcgatctctggagctggatgactggccagttgagctcaggaaggttatgtcatctattggcaatgagctagccaacagcatctgggaagggagcagccaggggcagacaaaaccctcaataaagtccacgagggaagagaaggaacgctggatccattccaaatatgaggagaagctctttctggccccactaccctgcactgagctgtctctgggccagcagctgctgcgggccaccgctgatgaggacctgcagacagccatcctgctgctggcacatggctcccgtgaggaggtgaacgagacctgtggggagggagacggctgcacggcactccatctggcctgccgcaaggggaatgtggtcctggagcagctcctgatctggtacggggtggacgtcatggcccgagatgcccacgggaacacagcgctgacctacgcccggcaggcctccagccaggagtgcatcaacgtgcttctgcagtacggctgccccgacgagtgcgtgtagtatctgttttatttgactgcagtctccttggtgcaaaaacaaaatgggaaaaataaggataactcagaatttcaaaaggaaatcacaaattcagctagtaatagcattttcagtacttttcgtaaactaagtaaatacacaaaatgttgatttttctgaccataagacatattttatgtccttttgccaaggtggatgtgttagtctcaggccctcctggccacattgcccaagtcacacaggcttctgtattatgtatttagataaaatgtgtgaaaatatatttgaaaaaaaatttcataaatgtgc

SEQ ID NO: 295147 - DNA, 1000 bp, Homo Sapiens
ctgggtccaagccatccagagccagagcgaggccatggccctgcagtcgatccaaaacatgcgtgggaacgcccactgtgtggactgtgagacccagaatcctaagtgggccagtttgaacttgggagtcctcatgtgtattgaatgctcaggtatccaccgcagtcttggcccccacctttcccgtgtgcgatctctggagctggatgactggccagttgagctcaggaaggttatgtcatctattgtcaatgacctagccaacagcatctgggaagggagcagccaggggcagacaaaaccctcagaaaagtccacgagggaagagaaggaacggtggatccgttccaaatatgaggagaagctctttctggccccactaccctgcactgagctgtccctgggccagcagctgctgcgggccaccgctgatgaggacctgcagacagccatcctgctgctggcacatggctcctgtgaggaggtgaacgagacctgtggggagggagacggctgcacggcgctccatctggcctgccgcaaggggaatgtggtcctggcgcagctcctgatctggtacggggtggacgtcatggcccgagatgcccacgggaacacagcgctgacctacgcccggcaggcctccagccaggagtgcatcaacgtgcttctgcagtacggctgccccgacgagtgtgtgtagtatctgttttatttgactgcagtctccttggtgcaaaaacaaaatgggaaaaataaggataactcagaatttcaaaaggaaatcacaaattcagctaatattagcattttcagtacttttcgtaaactaagtaaatacacaaaatgttgatttttctgaccataagacgtattttatgtccttctgccaaggtggatttgttagtctcaggccctcctggccacattgcccaagtcacacaggcttctgtattatgtatttagataaaatgtgtgaaaacatatttgaaataaagtt

SEQ ID NO: 295148 - DNA, 1000 bp, Homo Sapiens
gcctgctctgagcctcacagccgggaggtgacagccccaggattggcggccagggtttgtctgcctttaaaacttatgtcatgtccttctgtgttatctcggtctgtacaggctgctacagcaaaataccatagcctgggtagtttatgaacaacagaaatttatttctcatagttctggagcctggaagtccaagatcaaggctctcgcaggttcagtgttcggtgaggacccacttccttattcatagacgtccccttctcactgtggcctcacagcaaggggtcagggttctctctggggcctctttaaatagggtcaccaatcccattcatgagggctgtacccccatgacctaatcccctcccaaaggccccacttccccataccatcaccttgggggttaggattctaacatgaattttggggggacacaggcattctgatcatagcatatgtgtagttgctcctggcccgctggggaaatcaccgtctccaagcatggctcccatctggttaccctgggtggccaaggtcagcagaggtgctttgccaactgattggcacccacactacttctgtccaggtgggctggggcgagggttgggtcacagtgggactctgtggggctccggggactgtcagctgccccggggctggaggtcctgctgctctgtgcccataggcacctcctgggaatctggcgacttgcatcagggcccggaactcaccctgacagttctttcagctcttgtcttttcctcccctacctacctgctcatctcgctttcacacacaaagcctcccctgcactccccgctcccctcctcaatccctttcccggcttttgtactttatgatgccgtgacttgggtgaggaaactcattaaagtcattattccgtgcacagaaatgtgtctttcatcccattcatatttaatgttcctcccacttgatcttttgatgctttttaattcttgatattacatgacatacacac

SEQ ID NO: 295149 - DNA, 1000 bp, Homo Sapiens
ctctagcagtaagtccctctctcttctgcagcaccagcctctgcccatccctgccctctgcacacaaagctctcacattgtctgcactttaagaacttttgtggcaaaccctggcaaatcctgccacttgtttccactcttctcaaatggctttgaggtcatcattgacctatcccatttgaccctgtcctgtatctgatgttgtaccctttctccttgatcccactctggcaactctcccactcccctttcttggatcaactgtcttgctcctcagtcttgatcaatgcctccttctctctctttagccttggccctttttggccagggaaataaatgtgaaatacataaagcttcattttatcttatgattatagctatgttgatgttacccaagacctaaaagtcacactctctaattacacttccctcctgtgttctgggtcctcttggaccagtccttactctggctcccctcctggatgtctcccagacttctaattagaattactgtttcctatatcaagctaattatctttcccaccaacctcctccatccttgggtgaaagcatcacttggttgcaaaagtcagaaatctgggtttcattcttgcggtaggtagaataatgcccccaggccccaggttttgacatccgaatccctgggactttgcagatgtgattcagtttaggattttgagatggggagattatctgggagagcctgatgtcatcataaggttcttataagagggaggcaggagggttagagtgagtagtaagagatgcaacagtggaagcaagaggttggggtgatgtggccacaagcccaggagtgctgacagacatcagaagctggaagggacaaggaatggtttctcctctggagcctccagaaagaaccagccctgctgacaccttgattttagccttggaagactcattttggacttctgaccttgaacgttgtaagagaataaatttacatattttaaactgg

SEQ ID NO: 295150 - DNA, 1000 bp, Homo Sapiens
ggacgtgagggtgttgagcatgtagaacatctcctggatcaggaagtagatgttagggtcactgttggtggctgccccagtgctgccacagtcccacttctatggctcattcaggagcctaagcagcgaggggctgttgctggaatttgccttctggaagagctcatacgtgtttagcaggtcccccgagggagggttcttcttctccatgaccttgtgggagatgccatacagaggcttcttgtagtaaggggtggtggcatggttgcggggctcctccttgcctggccacacagagcccgagctcctgccttgccggcctgctctccattgccttggcagggcgagctgttctcgggttccacatgcctgctaggagcgcctctgggatcagctacctcctctccacgctggggatggagtctggctggccattgctgaccagctgagtcctggagggcagtaaagacgctgtccagaaggtgcttctcagaagtcctggaattcacggagcagcctagagcagcatctttggcctctgtctccactctcacttcttagaagttcttctacatcaattttttttggagatggttctgactctgtcacccaggctggagtgcagcagttgctcagagctcactgcatccttgacctcccagactcaaaagagcctagctacttaggagtagctaggactacaggccacggccaccatgcctggctaatcttttaaattttttgtagaggcagaggtctctcattgtgttgcccagacaagtctcaaattctcgggctcaagtgttcctcccaaagtgctgggattaatggcgtgagccactgtacctggccatattttttttttcaaaaaattcatttgtagagtttaaaaagtatcttttgatcaagagttcttattgtatttatgtttgcaaatttcatttcccattctgttgcttgccttttcactctcagtgagttattttatgattacaaatcc

SEQ ID NO: 295151 - DNA, 1000 bp, Homo Sapiens
tcccacacttgaagatgacagctgagcatggtcctttgtgggcgtgctgtcaggaagatgacagtgcaatctgtttaatgtgccagttgtctctgtgagtccctcatccggatgagcacttgtcacacccctgcagagccccagctggttcttagagaggtgctccagctctgtgattacctaatctggcttcccaatctatcccacaatgtgtcattgctgaggtccctgtgggtcttgcagataaacttgctacagtcatcctacacaaaaaagaagctcgttatcatgaaaccggcctgctttttagctcctgggccctaactcaccccagattgctgccagctcttttgttttcccacttagaccaaagggattgagaagctttcccattccttggagctgccaccctccattctaaggcagtctcccccttcaccctgcttgctgcaccccagatgctgcaaggcccatgtgctgtttttgacttcagtacttcagattgctgtgggaacacaggaggcagcagccagatgagaaattgagtctgactctggagtattataaagtccttatagttactggcattaggtatagggtctgtattattaaagagaaattattcaccaaacacttgttaaaaatggcaagacagtttatttaagagcattgcaataggtaagtgctatggtctcaatgtttgtgtctccctcaaattcataagttgaaacttcacttccaagatgaaggaattaggaggtgggcactttaagggatgattatgtcataggccagagccctcatgaacgagatcagtgcccttctaaaagaggcattgggagagacccctcaccttttccatcatatgaggacacagccaggaagcatcatccacgaaccagaaaattggcccttaccagacactgaatctgctgatgtcctgaccatggacttctgagccttctgaactgtgagagataaatttctgttgtttataagc

SEQ ID NO: 295152 - DNA, 1000 bp, Homo Sapiens
ggcaccatctgagggcaggacactcctttggtcccctccctgattctccccttccctacttcttttgtgagctgaattccttcagagcactgtgacaaggtgaccataccacatgcaccagcctcctccaggcactgtaatcctgcttggaaggagcggggagtgcttgccctttggaagtactgggggacatagacagaccactgagtgacagagacaggaagggaggagaagagacaagttcccagagatgctcaagtcctgggtgcccactctctgcagcctctagaacagccttctcttttggttccaagcttttgctcccctcatccaagggttgggatgatttgtgtcccttcctttcctggcacctcctgctctgtctctagtgctcaactcatttcctgggggaaaccttctctgccctgttcagctcctctgcgctccttagcacattcccctggatgtcactgtcatattgccaagaatgtgttgctttgtctgtctgtcctgcctctctctctccatctgttgtgaacttgggaaggaaggacctgaatcacctctccatgcccctatgccagcccagcatacaccaaggggtccaagcatttgttgagtaaataaactaaataaataaacaagggacaaaaatggagccagacagggaacttagcctgtgcctcagagagaggaccaggggtaggtgtattggttttgccagctgcctgcagatgcgtgcggtgctcctactgctcacaccaatatactcagaggggcccagaagcctcattctctaatgctttttggctatggagtgagtttcctgggttgtggacccagctgtggtggtgtggtctgacttagtaatgaacttccttcatttgctttttttgtttgtttttgagatgaggtctcactatgtcacccaggatggagttgcagtgagccgagatcgcaccactgcactttagcctgggtgacagagcaagacgctgtc

SEQ ID NO: 295153 - DNA, 1000 bp, Homo Sapiens; identical to SEQ ID NO: 119287

SEQ ID NO: 295154 - DNA, 1000 bp, Homo Sapiens; identical to SEQ ID NO: 119288

SEQ ID NO: 295155 - DNA, 1000 bp, Homo Sapiens
gttcaggctatggaatattgttcagcactaaaaggaaatgagctatcaagccatgaaaaacatggaggaaactcaacacatattactaagtgaaggaagacaatctgaaaaagctacaaattgtatgattccagccacatgacgctctggagaaggccaaactatggagaccgtaaaaagatcagtgtttcctgggagtaggaaggcgggagagatgaataagcagagcacagaggacttttagggcagtgaaactactgtgtatgataccataatggtggatacttatcattacacatttgcccaaacccatacaaggaacaacagcaagagtgaacctaatgtaaactatggactttgagtgattatgatgtgccagtgtaggttaatcaattataacaaatgtgctactttggtgacagatatcgataatggaggaggctgtgtatgtgtggggggcaaggggtatataggaaatctctgttaacttctgctccattttactgtaaatccaaaattgctctaaaaagaggtctattcaaaaaggcattatataactcaatttaatcaatttaatcaagaccatgtttacacagtactttgtgtccacacatcatgatcataagaccaaaatcatgttggaaactgaagaaagaaaattacctgacagtcttccaatccagaggcgaagtccaggtcccatctcctggaattctgataggttccatgcctacttcaactaacacaatgtggacactgccagtttccagagccaggacttatgaagctggcagtttgtattctccgctatttgaaatactgtctctgggagcaatggacttcaaactctgaagccaccatgctaatgtggctgcatgtaggtgttctagccaatagttacaactcatatgtaagttgctttgctggagggatggcttgaaagcctgcctgaatttctgacccacaaagttatatcataataaaatgatgttatcttaaa

SEQ ID NO: 295156 - DNA, 1000 bp, Homo Sapiens
tttgttctaactgaggatgtctactgacacagccaagctgtaaagcagaccacggacggcagtgcagcggggagaacaactctacatctggttggaggtggagtaatgtccagtctgggcacagagagatggcaggtgtgcagctgcactcagcatgggatagagcaccacctgccaggccagaacagaaagaagggcgacggagactggcagagaaacagcaattactgctcagtgagaagtaaacagcgtctgcttccagaggctttacggaccagaaagcccacaggaaatagctcctgcttcccagcctggaggtcctcatgcactagccctccctgctacaattttgatggtttttcgcatatttacagaattgtgcaaccatcaccatgatcagtcttagaagagttaatcacccctgaccccagaaaactctgtattcattagcagtcactccctttcccctttccacccctctccaacattaggcaaccactaatctactctctgtctccataaactggtctattttggacatttcacataagcctccctggatcccagtttaagcatcctggggtttgtctgcctgccagagccatggtgccactggggctacctgtcctgtgggatgacaaggcaggtccaaacctttgcctgctctcccatccattccttttgtgttagtccatgtgtctcccgactgttctctccaacaacaacacagactgacaaaacctactgacttggagtcaggaacagactttgctattttctggctgtgtgatcctgatgagtcccttgaacctcctggacttgttcctcagcctaaaaaccaagactaataaatcaagtctatctcacagccttacgtggggatcaaaaaacatggagcatgtgaacacacattgtacatcacgaagctgtatgcaaataaatatcgtgtaactccagccctttttgagtttataaataaaagtgaaaacctcataaccct

SEQ ID NO: 295157 - DNA, 1000 bp, Homo Sapiens; identical to SEQ ID NO: 225013

SEQ ID NO: 295158 - DNA, 1000 bp, Homo Sapiens
gactgggttttcgtcatgttggtcaggctggtcttgaactcctgacctcatgtgatccacccacctccgcctcccaaagtgttgggattacaagcgtgagccactgcacccagcctgtaaaatattttaagagatttattctgagccaaatatgagtgaccgtggcctgtgacacagccctcaggaggtcctgagaacatgtgcccaaggtggtcgggatacatcttggttttatgtattttaggaaggtatgagacatcaatcaaatacatataagaaatacattgatttggttcagaaaggcagaacaactcaaagcggggggcttccaggctataggtaaatttaaacattttctggttgacaattgtttgagtttgtctaaagacctgggatccatagaaaggaatgttcagtttaaagataaaggattatagagaccaagttttattgtgcagaggaagctctcagatagcagacttcagacagagcaagttgtaaattgtctcttatcggacttaaaagggtgcctggctcttacttagttgattatctcctggatctggaaagaaaggaaggaaaacaaaggcggaaggggaatctctatagaatgtggatttttcccacaagagactttgcagggcaatttcaaggtatggcacggaaatatattttggggttaaatatttttttccttgtctcataatgttatgccagagtcagattgaaaagtaaatcacaacatatagggtcaaataaaacccatctgatgagaatgtatggtttgtagggcatgacttcctagacctcttaggtaggaatctgggtaagacagaatatcagacttagtcctcaattcctaatgcaaagttctgagatccaaaatgctccaaaatctaaaacattttttagcaccgacataatgccacaagtggaaaattccacacttgcttcaatgtgcacaaactttgtttcatgcataaaattattcaaaatatta

SEQ ID NO: 295159 - DNA, 1000 bp, Homo Sapiens
tagctcctccattgcacacatgaggagggtaagtggccagcctataaggcagagaggacacttgccctaagagaggcacaggtagaaagacagaaacaaacgtgtatcaagctccctgctctgtgctaggccctggcttgtgtgagcttgcccagtcctcacagccaccacacaaggggtgatcacccccaccgctttgcacatggggtgcagggaagtaaagtgacttgtcctggatcacacaaggagtaagtagtaaagctgagattcacaccaagtcttccagagcctcaaacctgtacgcttttcctgcctcccaaggctgggagagggagcacctgtaacagcagaactactggacgaaagcaaattcccatccatcgcctccacagccctgggagagacgaggttttgccatgttagccaagatggtctcaagctcctgacctcgtgatccgcccatctcaacctcccaaagcgctgggattacaggcgtgagccaccgcgcccagctgaaatcatttcttcaaatacaaccttgagagcccaagaagtgacagggatgacaggctgctggggtggtcccacagttcctcagggtttgtctctcacttgcccagcccacacaccctatctccagggctctgtggaacacagtttgaaactcctgctgcacagaatagcaagtgcagggccaggggatgcactgaagacgggcattcaggtggatgccccctgcacactgtggaaaggcaccctggtgggctggcacctggtcagacccatcttcctgagcaagggcactggacaggcagggacaaagctgattctgagcagatctggcacaaggaagtcaccagaaaacactattgggttcctcaagggtaaagactggatcttatccatcttgttgcccattcctgcctctgcaatcatgtgcactctgggaacttggaaaatacattgtggcatccagtattaaatctcatggtacctagaa

SEQ ID NO: 295160 - DNA, 1000 bp, Homo Sapiens; identical to SEQ ID NO: 119289

SEQ ID NO: 295161 - DNA, 1000 bp, Homo Sapiens
gactactttgattctatttcttggccttctcttctctggactaggtgaccccaactttctccttactcctgaaaaatttatcccagtctgctaaggaagagaaagcccatgtgtgcacatacacacatgcacctacacaaacatttacatacagttttgctcttctatacagagttaatagagctactagagtgtctaggaaccaatctgaaagagaaaggaaacactgctttttttttgtttgttttttgagatggagtctcactctgtcaccaggctggagtgcagtggcgcaattgtggctcactgcaaactccacttccctagttcaaatgattctcctgcctcagcctcccgagtagctgggactacaggcgtgcatcaccacacccagctaatttttgtatttttagtagagatggggtttcaccatgttggctaggatggtcttgatctcttgacctcgtgatctgcctgcctcagcctctcaaagagctgggattacaggcatgagtcaccacgcccggccgaaacactgcttattacaatttataggtttatgttcaaaaagttgctaatcttattgctgtgaacccctgccatctctagtcctgcccacctataggtactgcagaccaaattacagattcagatttgcccagttcctgttcctgtcttgaccaatcctagtaacttatttggggcccagccccatcttcagtggaaggtctaaaattggccttgcttccttaagctgggtacacagtgggcccaggactaagcctcatgaagcttttagaggcccactgagattaacctttctcaccagtgctcaccttgtcttcctagtgaccatggctgccttctgtctagttctagagttgcactctaattctcttccagcgctgttgccctgatctacatatctatctcttttagaactttccagcttatgtgtccaatgtcagtctttcttccaaataaatagaactttatcttg

SEQ ID NO: 295162 - DNA, 1000 bp, Homo Sapiens
atcactcctatttcatgagcagttatgtaacttgccccagataagacttggttatggcacagattctgtgttggagccttcagaccactctacttcccaagcaggggaggaacagaacattaaagattttcttggccttggctttcatttcttcatcgtggttctgaaaggaaaattggctacagtcttaaatgtatgtgtgggcccacgctagaagctcagctctcagtgccagccacactgagccctggtctccctaacttccgggcctttactctgcttgtcattgggctgataaccaagatccagcctagagcacaagaagacaaacgctgcgtgatctcgtgtgtagaacctaacaaagtggaactcacagaagcagagagtagaatggtggttgcctgttggaatggggagatggtcagagaatgcaaactttcagttggatgggaggaagaagttccagagatctattgtgccacatggtgacaatagttaataacaatgtactgggcggggggtggtggcctacgcctgtaatcccagcactttgggaagctgaggcagacagatcacttgaggtcaggagttctagaccagcttgtccaacatggtgaaaccccgtctctactataaaactacaaaattagccaggtgtggtggtgtgcgcctgtaatctcagctacttgggaggctgaatcgcttgaacccaggaggtggaggttgcagtgagtcgagactgcgccactgccctccagcctgggtgacacagtgagactctgtttcaaaaaaacaaaaaaagcaatgtactgtatacttgaaaattgctcacagagattttaaatgttctcaccattacaaaatgataaatatgtgacataatgcatatgttaattagcccgatttagtgattccacagtgtatacatataacaaaacatgttgtacaccataaatgtatactatttttatttgccaattaaatatatttttttaaagtt

SEQ ID NO: 295163 - DNA, 1000 bp, Homo Sapiens
ctcattcacagcagccagaaggtggaacaacccaagtgtccagctacagatgaacggacttgtgaattacggcatagacatacaaatgctattccatctccagagagggttgaagttccgacacacgccacacaaaaatgaacctcgaagacatgctgagtgaaacaggtcagacacaaaaggacaaatattgtatgatcccacttagacgagcgacctagaacaggcaaattcagagacgcaaaggagtctttctgcccatgttcgcctcatctaacccctgcctgcagggtctgggggaggtcagaacgggcagttagggttgaaagtatacagagtttcaatctgggaagatgaaagagttctgagatgaagggtggtgatggttgcaaacagtgtaaatgtgtttgatgccactgacctgtacagttaaaaatggctacagtgataacttccgtgttgtgcaaattttcacaataaaaacttaatgaaaggtagctagagacagcaagtgaggggaagcgaggaagggcgagttattggttgaagggtagagtttttgttagggatgacgggcgaagttttgggtacagactgtggtcatgtttccacaacatcgtgaatgagtttagtgccacagcattaaatgtattcatggtgtacttgtgtacttatgaatggctaagatgataaatattatgtacattttaccacaataaaaaagtaatgaattctggccaggtacagtggctcacccctgtaatcccagcactttgggaggctaaggcaggctgatcacttgaggtcaggaattcaagaccagcccagccaacatggcaaaaccccatctctactaaaaatatagccaggcgtggtggcgcatacctgtaatctctgctatttgggagactgaggcaggagaatcgcatgaacccgggaggtgcaggttgcagtgagccaagattgtaccactgcactccaacctgggttacagcatctc

SEQ ID NO: 295164 - DNA, 1000 bp, Homo Sapiens
attcctgggctcaagccatcctcccaccctggcctcctatagtactggggttacagatgtgagccacttcgcccagctgaggcatgcctggtttcaaaactatcttcagctcttaatgttggtgggtgtaaaactcatcccagcgtggactaaatcacaggccctgcagagttggagggctgagaaggggcagctctgaatacaggggatctgcccgaacctcacttttcctggggcccctctccccaaccctggggccaccaccgtgttgcttccagagggtctcgctctccttccctttttccgcccgtcccaggctggatagagtcccttcctttggtcctgtcttgcatctgtcttgaattaggcagggagttttcaggaagaactttcccaaatactaagggagaacagagaggaaatcctatgaaatacagagtattcatgctggcagtctcatgaagggtaggtatcaacttttgcgacaaccataggtacccccctaaatggctattacaagtgggcaccttgagcataacacgggaaccccacgcctggcctccatacctcccaggtcctgcacttctccccagaggtgggccctcttccccctaaagcacagcgccttgtgatgcgaaggccgaggctgggagaggtcacacctggtctctccacatgttccagctcccagcctgctgagcacagcccttgctgacctgggctggccctgaggaggggtgtgcttgctcccgtacacaggagtgacctgaaggcccctcactgtggtcacaaacacagccctaaactgtccagaaactgtatcctcagagcgggaagtgcccacgtggacagagagaaagccagcctctcggggcagattgccgcctctactgtgaggattctccaggggctaccgagaggctgggctggtttatctcctctgcctagaaaggcctggggtggccaatgtgaactcattaaaaggaaaaccagctttccc

SEQ ID NO: 295165 - DNA, 626 bp, Homo Sapiens
atggtttctgttgaaagaaaaattaaaatgtcagccaataagaacacaccaggatttgatgctgagagattaatagcggatgttgaaaaggtgacagagatactgtcacgtattggagtacctcttgtgcatataaccatattaaaacctcccaacattgacaagtattttcgtccccattttacaaatgaggaaactaaagtgaagaagttcattgacttgcataaggaaacattattgctaattcttcattcctgtttaaaatctggcctgactgaagacagagcacaatggaccgtgaattcagaaggacccgggcttccaacaaggctcttgccacaaagcatgaatcctggaaccaggcaaatctggcttgaaatgctagcccctagctcccatgtgtgacttcaggagccacaacctgttttgaggaacaaccaacaactgtgggcctactggaagttcaaaagacgattgttcctgtttctgaggttgacatctaaatgcaagaaaattacaatacgatttcatactgcacaatcatcaaggtctacaactggaacagaaacattttacatacaaaagacctgaagatgatagcgtacttgcataatgaagtggaaatc

SEQ ID NO: 295166 - DNA, 1000 bp, Homo Sapiens
cacgtttatgaacacggaaaagagtgtaaaggggtcaaatgcagactttacaaaaagaaacccaagatggagattcctgttggggatatactgcagcctacatcatgctatgacaattttcatataaagatgctgtctcggaaagaaaaggattgggagtttgaatgatctatggcttccattccaaaaaggattactacagaagtaattactttgaaagaaaagtgataatatgtttttggagaaaggtggaaatgaagcaaggccctgaatatattaccaagatgcatattacactgaatgaaatcatccgttgcccttccggatctatcccgtggatgcagagcaagagcaacccatctttgttcagcatcccaggagacaggcctctattgacagcatcagtctggctcctttgccctctgatttcccattgaatgtggccagtgggagggcccagcagatggagggccaggaggaggaagagtctgcagcatttgttctcctggctcccaccctgccaggtctctgtctgacagtggctcacgcttttccacagcccctgtcaggtggcctctcccaaagtgacagtgttcacttggttctgtaagtgttttctccattgcctcttgccagggagggtaatggcttcctagagccagatgccagcacctgaggttgcccaccaccccatgctgtttcccttaaccctgcctacactttcaagaattgaaactctttgcagcctccttttttttttttttaaaaaaaggtactatcgatttcctaaaggaccgtgagtgatatacactcagagattcttttgtcatgttactttccgtagctcaatatggctgttatccacattatacaaagaacataatacctaccttaaatttttaatattttgtctttattcttcaactctgtgtagcatttccttctggttaagaacatgcagataatccaaataaacagatttgactaaaagaaaaaaaaa

SEQ ID NO: 295167 - DNA, 1000 bp, Homo Sapiens
gatgggccttccgaggtcgggccgtgccccgctgggcagcgcagagggggtgtgtagggcacgcgacttggagccaggtccagacccatcctggctcctctcagggctccttcccctgcccccattccaccccagccctgctggctgtcccgcaggacccagcgccgcggtagccttctctgaactgcggctcaggcggaggtgtcactcctgcctccagcccaggagggcaggtcaggttatgcaacgcgtgccgcgcgatctccccccacctccaacccccttttctcccgggtccacaccgcagttcccaccgctccgggtgtcctccccagtgcgccgcgatttttgtgtccaagccccagagtccctctgagaccaacccccagccagcacagacttcctgccttcccagctcggggatgtggtctcattaggttgcccaagctggacttgtactcttggcctcaagaggtccttccatctcagtctcccaagtagctgggactacaagcatgcaccactacactcagccaaatactttcaataatttgccagctgacaacttgattgggttctccttcaggtttgaagcgccctcgagaagtgtctaaaggagacagttgatagccaaacaacagttttggattcactgactgattatgaaagaagcagtagactggtatcaagaatcagtcagcaaggaggccctcaccagacgccagtgccatgttcttggacttctcagcctccatattcatgaactaagtttttggaatccttaggcttccacgtgtggaaagcctgagctaacctactggaggatgagccatcacctggagcagattcaggccatcctagttgaagcctccctaggccaagcaaccgtccaactaccagacattgaccattcagccttgaacattcagcacaaagacaaaacagaccagaccagaagagtcccacagaataggggaaactattcagagaaaacttaagc

SEQ ID NO: 295168 - DNA, 1000 bp, Homo Sapiens; identical to SEQ ID NO: 119292

SEQ ID NO: 295169 - DNA, 1000 bp, Homo Sapiens; identical to SEQ ID NO: 225016

SEQ ID NO: 295170 - DNA, 1000 bp, Homo Sapiens
gcccttagagacgcttggagatccccagacacgccccgcggaaagacaattcttccccactcccagccatctgcaaaccacagtcagcctgtccctgctcccaaaaatggaattgctgatgccctcaaggctgttactctcccaggaacacccctgattagccaggcccaccgccatccacatctgctcggcaaagaaggaaggcagcttgttccagaccttggtgagcagctgcagactgcctgcctagaacagcctccttactccagcctggcagggaaggaaggaacctgacttgcttcgcaggatctggaagctcagccggcagagctgagagccgcagttgcatcctggagcctgatgctagaagcagcttccgtctttgggttcttgctgcctcggcctctgctctgttcagtttgctgttgtgtttttctcccccatgttggggtggtggggtacagggaaataaaatgctttctcccaggcccctaatccttccccatgcctccatcagcctcaaagctgctgacagtcatgaactgcaccttccagccctgcccataagctactcaaagcaaattcaaattctcttctggccaggaggaagggcagatgctccctccttcctcaagcctccctggctcattgatccattttgagggcatttgggggtcaaagttgagaccagattgcttcagtttgtataaaattagcatttcttatcacaccaaggccacacctgttctctggcctcacaaaccagtgaggatgtaaaggtttgttgaggtggaggaacagaagtgaaatgagcaatctgctccatttagaagtcagtcgcttcggctgttcattccactaatatttatctagtacctattctgtgccaagcattgtctctacctcagtttgccacaaatatgaaaaaaaaaaaattcttggaactgtgaggcttcaatgtgttgtggaccaatatacaaataaaccaatggaaaagaaa

SEQ ID NO: 295171 - DNA, 1000 bp, Homo Sapiens; identical to SEQ ID NO: 119293

SEQ ID NO: 295172 - DNA, 1000 bp, Homo Sapiens; identical to SEQ ID NO: 225017

SEQ ID NO: 295173 - DNA, 1000 bp, Homo Sapiens
gccactaaaccaagactattcagtgtatttgaagtatgtacaataccagtccgaattgggacttctcaggaagaaaaaagggtatatggcagatgggtaagaatagaaagccacaggtctagcagggaagctaaatatggtgtggaatgtgttggggagatgggaaaaatgctcacctcttcatggaagttcgaaaagaaggctgagattctaaataatgctggagtattgcagctggaacaagcatgatagcaatggccaacacaaggcctttctagaataaatctaaaacaattaagagataatatgatagcattgggagatatacctaatgctagatgacgagttagtgggtgcagcgcaccagcatggcacatgtatacatatgtaactaacctgcacattgtgcacatgtaccctaaaacttaaagtataataataataaaaagaaaagaaaaaaaaaagagataatatgccagggggttgatgccaggtaatactgatagttaccttaaacaatgttttctcaacttcagttttttacacaccaacttcatgatttttttctatcaagatacgactactattatttatctagcgttttttaaattgtcttatatctttgcttaaatttatttttttaaacattaatatctgagaattcatcattttgaaggaataattatattgttctaatatataaattttaaagttaatatctttattccatctaaagtggtatgtgtactattctttggaaatgattttctaaaggattaaaaacttgccagtgttggaaaaaaaaggaaacaggaaaattaagactgagttaaagaaggtgaaaacaaaattgaagaataagactaaaggttagacatgaaatagatctgtctctaattagaggtgcaatgtcaaatttttttgtagatcgttctaaaaatatcacttgttcttttgcttgtattttaattcaatgattaaataaacagatgacctagtt

SEQ ID NO: 295174 - DNA, 1000 bp, Homo Sapiens
aacaaaatatgagaaacaaggcagacaggcatttttttaaaattttcgcacccactgatagaccagtgatgcattcacatcgtctgcattcatgatcaacaaaagtgctttcctagaacatgaacctcaacccaagtgtcgcctcaagtagtgtatgcatgaactcaagcattaaattagaattgattttttaaaaaactcacacaaacagatgtattatttaaaaatctttaaagcaggtttaaacagttttcaggattaaaagcagccactattagaaagaacaaaaatacatttgacataaatataaggagcctcaatagaacctcctgtacccagtcattgtcaatgccacatccattcattcaccagcccttatatcaatgcttgctgggctcacttaccacgatcagcacgtgcatgtccttatctgaaagcttgccactcaaatgtgctcagtcttacctgtgtggctgggagtgttggggatttaatgtcaagggaaagaatcttccatcaatgaatgatgaaagttagttttcacaacttccggtccccttggccctcatcaaagggctccaggtgaggtttgggctccttgctatcctccgagtttccacggtagttttaagcaccattgcccgtggtaatggctgacattgatactgcactttttttttatttaagatggagttcccctctgccacccagactggagtacagtggcgcgatcctggccatcgcaacctccgcctcccagatccctcctacaacacatgagaattgtgggtgctacaattcaagatgagatttgagtggggacaaagtcaaaccatatcattagataggacactggagaaaggcaagaaagaaaagacatctgaagaatgaagggagccaaagaaatgccaacattttgctttttgaagaaaagctaaattaaagtcaaaatggatttatcaatttccttgggttcgtgaatgtacagaactttattaag

SEQ ID NO: 295175 - DNA, 1000 bp, Homo Sapiens
ttttatctgtaattgaaacgtgaactaatggattaatattattagtctgtcacctatagacaaaaagagagtcttcggtgatcagaaatcaacttaatatactctaagcacttttaacatcttacaccatttaaaccacacagacacacgcatggggtgagtgtaaaaacaaatagacacatcatagaagacaattagcaattttgtcagaagtcttaaaatatatttccactatgcattcatatttcacttctaaaaatatatcctaaggaaataatttcaatgctgcagttaactattgcttctgcctgccctggaaaggttgttccttctgctactggcacccaaattccctttgggaatgtctctcttgcccactctccatccatgtgtttaggtggggccaatgccttcctctgctcagagagcagccccagtgtcaggtctaagaaattagtgaatttcatcgttttgcattgtaatctgttcaaagctgagaataaggatcagttaaattctaagccagggatgtcccagaacgttaatagaactgtggaaataaggtctctttttaattacatgtattgctggaaggatatgagcttggaaaggtagggtaccaccacacggagagaacctagctaaaaatgtatctgtcacagaaaatagtagggctgagcacgtgaacctaggatggactccaggcctctctcaccgtcagctagaatcttggcttgaggaagacagactttctatgtgcaatgctgtgtctctgctaccaagaatgtcacttgggaaatgctcataaatgtctgtgggataaagactttggggaacaaaatcctgatgaggccccttgagtacctcaacgaagccatttctgaagccaatgtactcctttccagttatgacagttaacatattcttgtgtgggtgtgtgtttgttttctagcttaagccagcttgaattgggttcataacaaataaacatttcaaatac

SEQ ID NO: 295176 - DNA, 1000 bp, Homo Sapiens
tgcagaggacaaagtacataggcctggggttcttggcacctgagatctctgagcagttttctgaattttcctatttcctgttgaagacataggaacacgtggcacagaggcacagagacctggaaaccaacaggtgacctcagggaggtttgtgaagcaccctgatgagaagacagttgggcagacgtggctggctattccccaagtccattttccctcctgggaccagagctgactccatttctcaatctgccttgcagtgagcatagtcagcttcctggcactgctggacctgtcttgaaggctcttttggccggaaatggatgggcagggatctgagagcacctgctatcgggtgagtcctgctttactcatgtcagagatttagactaaaacaaacacaaaatgcaacaaagacctaagtgtaagagctaaaagtataaaactcttataaaaaaagtaagtgtaaattttcatggtcttggattaggtagcactctcttagatgtgctatcagaagcacatacaaccacaggaaaaaaaatacataaattgaatttcatcaaaatttaaaacttttgtgcattaaagttcatgatcaaaaaagcgagaagaaaacccagagaatgagtgaaatatttgcaaatcatacatctgggacaagtatccagaatatataaaaattcttagaactcaacaatataaagaaaaataaccaaattaaacagtaggcaaaggattcgaagagacctttgtccaaagaagatacacaaatgaccaatgagtacgtgaaaagatactcagcagctactcattatggaagtaccactttccactcatgctgagggctataataaaaaacaaaacagaaatgacaagtgcagtgaagatgtggagaaactggatttctcatagattgctggtgggaaagtaacatggtgcaaccaatgtagaaacagtttggcagttccttaaaaaattaaacagagctaccatctga

SEQ ID NO: 295177 - DNA, 1000 bp, Homo Sapiens
gagttgtccccctctgctggggcaagagaactagggtactgatcagctaatttccgtgcttcactggttaagggcattaacctccccaaacttctggcctgtgccccagatagaccaggcatgcttctgtggccagagaaagcccgaggatggagagtcacagatgcttgtggtaggtagcaggtggtgtgtatggaaatgggaatgggatgccaaggggatttgggcagggcaccaagcatctgccgcattaccctaatccaggcaataacactcacagtatcccagggattccccttctagcctcgaattcctcttattctcatttattttgtatttactttctagaccatagtttctcagatagtaaaggttctactgactttcctcatctctctgcaacctctttcctgcctagcttctcttccatggtcaagccaatacacacagaattttgccttccattcttcactcaggtgtttcttccacttggaatctgttcctcagtcattttcactaatccatgtccctcccagtacacagaatttttcacagaaaacatagttaatcctttaaaaatatatttagattgacttgcatgcccctcttaaggttttttctttccaaatgccttttttaaaaccccaatttaagaatttctttagccaatactacaacaatgcagtccttgttctccacttctttccttttatctactcaatgttattaatctttttagtgtaaacatcagtaactcaatcgagccttttctgatccccatgattaggatgagtttttgtgttgcctactccaaaaggtctgtcctttttaatgctcaccacacttgaggtttctgttcacacttcaaaggctgtggggcccgataccatgattttgctgcactcctagacctggcctactggtacatagtaggcattgataaaaatttgctggagcattgcataaataaactatgccatttggggctgattaacatttt

SEQ ID NO: 295178 - DNA, 1000 bp, Homo Sapiens
cagtttcatgaagctactggaagatcttttctttgcttgcctataaacccatgccatccagttctctcagtcatagtgagctattcctggaaaagcccttgcatcaatcagtgtcccaacaggaaatggttggcatcccagatgaagatgataaagggactgtttacaaagttttggggaaactccaaggaatagtttaatagcccagtcctgttaccacccctgcacccaaagtgacaaggggagggggtggagactgggacatgggaaaatcatctagggaaggatacctttactggatcagcagccttcagttggaggaacacagccagctcctggtgaccccacagggagagagcgggagcactaaggattccaaactcagtcctcctgatcttcatcagtattcgtcattggccaaacaaataactgaaattcagagggcaagagagctcattgttatctaaacaggtcagcatggcagacagcgaggcgaagagggaaggaaggtggatttggaagaacaaacgggagtgacctagtgcagccctgataaacccgaaagcagtgttcctctcaagatattatggggtcccagggagatgcagtgtccagggaagcagaggcagcagcacagctgcaggaagaagtcagggtggaatccacacagagcgcattcccaggctgggagctaccagagtatttgaccttgggcacagctggggtggccccgatggcgctgctgtctgctgatggtctccacagcttccccagcgaggccttcctggaaggagtgctgagcagcaaagctctgtggtcaccactcaggacaaaggggaaccagctgaacagagcctttcatgtgacaacaaaaaacgacctggctcaaacatcacgacaggcatctgtggagcctgggaaatgacctttctcatggggagaacacagaacacacaaagctttctcttaaaagtctacaaaattataatctgataacaac

SEQ ID NO: 295179 - DNA, 1000 bp, Homo Sapiens; identical to SEQ ID NO: 119294

SEQ ID NO: 295180 - DNA, 1000 bp, Homo Sapiens
gaaaatatctgattgatttaggctgaaaatctctagttacaggttggttagcaatttctgattggttaaactaaagttttattttagtatttaggttgagttaggttttggtttgcttacaaaggcactggagccatctcagcctagtggacttgaaatcaattattataatagatcccctacctaagaaagccagcatccctaaaggaaaataaatactgaggactttatgcaaagcaaagaaatggatgtaaagacgtggatcctcattgccctcacaatacttcttttccttgaaaaaaggctgagaatggataaagataaatttaggcacagtaaggacaaagataaagaatagcaagaacttgtagcttggattattgatgccagagaagtggagaccccatgtggagaatatttttacccgtttcccaccactgcttcccggacagagataatctgggacccctgtgagtatagcccagctggcaaccttgccatatttccatcctgcaaggcttcattcaggacagcgcaggaacttataggtcagtctaaacactaaacaagaacattagccttaacaacacaaattagtaattcatttcttccttatgtagctgagcacttaatgatccaaatcttggcgactgagttgggtaatagttcattgctggatgacccatcttgactttcaaagttgctattgtttttacattatcctcaagtgttatcattaagttgtgagcaagactaattttcttaatcattcccaatctccccaaccatttttcactgaataatatcatcaacaggctgcacaaattggacatctgagatttagttgaattagtaacacctaaaagatcatttatggctgcagcaataagcctcccatttcatctaattagagagcaagattatttccctaaatccccactaatattttgagttgacaaacaatgaagcaatcctgataaagtgaataaatgagtttcat

SEQ ID NO: 295181 - DNA, 1000 bp, Homo Sapiens
cacggtctccctctccctctccctctccctctctctccacagtctccctctgatgccgagccgaggctggactgtactgccgccatctccgctcactgcaacctccctgcctgattctcctgcctcagcctgccgagtgcctgggattgcaggcgcgcgccgccacgcctgactggtttttgtattttttggtggagacggggtttcgcggtgttggccgggctggtctccagctcctgaccgcgagtgatctgcccgcctcagcctcccgaggtgccgggattgcagactgagtctcgctcactcagtgctcaatgttgcccaggctggagtgcagtggcgtgatctcggctcgctacaaccttcacctcccagccgcctgccttggcctcccaaagtgccgagattgcagcctctgcccggccgccaccccgtctgggaagtgaggagcgtctctgcccggccacccatcgtctgagatgtggggagcgcctctgccccgccacccatcgtctgggatgtggggagcgcctctgccccgccacgaccccgtctgggaactgaggagtgtctctgcccgaccgccaccccgtctgggaggtgaggagcgtctctgcccggccgccctgtctgagaagtgaggagcccctccgcccggcagccaccccatctgggaagtgaggagagtctccgcccggcagccgccccgtccgggaggtggggggcaactccgcctggccgacgccccgtctgggaggtggggggcgcctctgcccggctgccaccccgtctgggaggtgtacccaacagctcattgagaacgggccaggatgacgatggcggttttgtcgaatagaaaagggggaaatgtggggaaaagaaagataaatcagattgttactgtgtctgtgtagaaagaagtagacagaggagactctattttgttctgtactaagaaaaattcttctgccttgggaaaaaaaaataaagttcttttagt

SEQ ID NO: 295182 - DNA, 1000 bp, Homo Sapiens; identical to SEQ ID NO: 225018

SEQ ID NO: 295183 - DNA, 1000 bp, Homo Sapiens
gcaggcccaaagagggaggggatccattcccgcatcgctccctctcctgcctttgacctcccacagggcacctccacatctggctgcagcccatggaggtggccccaaaaggcaaaagcagggtgaaggatggagcatcaatctgggaggacgagagccggacacccagcacaggtgtgcaggaaacttctgcacaaacacctttcttctttgtagggggtttctgtagtatgagacatcaagagaattcctgagccagagccttcctggtttgtaagaacaactgcattttaacagaaccccaaaatacgtatgtcactaccccactgaaggcccttccatagcaccatctatggctgtcatgtaacagccacacctggtggcctcgccggcagtgccccaactctgctcccagcaagccagactgctgtgttctccacagcccctgtggtccgggctgtggctctccaaggcccctctcttccattctaggtggatctgctgacacgtggtctgtccttcaaggcctcctccgatagtgcaaatgtatttccaaataccaccaccttaagggttaggatttcaacacatgaatttggggagagcacattcagtccataacaagcagagcctcatgaatgggattaatgcccttataaaaggggtcttagagagacccctcaccccttctggcatgtgtggacactgtcaaaaggtgctgtcgaccgggtgcggtggctcacgcctgtaatcccagcactttggaaggctgaggcgggcggatcacctgaggtcaagagttcaagaccagcctgaccaacatgacaaaaccccgtctctactaaaaacacaaaaattagccggacgtggtgggcacctgtaatcccagctactcaggaggctgaggcaggagaatcacttgaacccggaagcgaaggttgcagtgagccaaggtcgtgctgctgcaccccagcctagcgacagagcaagactccatctc

SEQ ID NO: 295184 - DNA, 1000 bp, Homo Sapiens
ggggacggggaattctgagcagaacctcttcagaagttgagtctcaaggggccttggggaacttggtcagcagatggcaagacttcatctgtcagtgggcgggtcagctcagcgggactcctgtctttggaactgagactcaagtctctactctgtaccaagacagagatggaggccaggaaacaagacacacaaccattttccatcatcgaggggcaaggcagggcttggcatgaggcagaaccaggctccatcaatgccacatgtcaggaggaaccccttttctgtttcaatccctcctgcccatttgtgggaggcattagagaggcctgacatagttttttttctccacagcctgaggacgtgataggatttcattcccgccccaccttgtggttggatggaatcatgtgcccaattctggtcaagatcaagaaactgagaaacaaagcaaatccgtgggatgcagagggtacgctgatgacttctgctggggagagaagcccaaacacacgtcctgggcagagcccagagacctggagtgtggctgccagtgggcacccggctgagggacaagcaggtgggcctcagtggtggctgccaggtccctggacgcagggggccaccggctttgcctctcctctgcctcggaagcaccggaggctttggggatctggtggtcctccggccctgaacgtggacctggtgtgacaaagggaagtttgccatctccatcctcctcaagctgcctgtgcaccccagtagcactcaccctctctgtgctcccgtctgcaccgcatgtcctggggtccttctttgtgctgcacccagtgacaggaaccagtgtcccgactgtgacttacttcccccctcagggacacacaaggactttcacatcgaggctacttttcaccccttctgcctcctgcagggacgctgcatgcagaggcaggaggacagaggggctggtctcaggtgtggcttctctcatacctggcgc

SEQ ID NO: 295185 - DNA, 1000 bp, Homo Sapiens
cccagctcagactctgccgtggtaggctccagggtcactgataccagatcccatggtattttcactatatcccactctttctttgcatgtggctcttttttagctgcattgcgggtaaacaggtgtggctcttttcaaaccaattccatgcatatgtgaagaaaattgatcctgaagttccttttgccaaagatgcttatggagaagtgtctgtgtctggacagacaaaagtgtccatttttgcctcgaagcttggcaaaattgaaattgatgatggggaagctagaaatacttcagtctacatttcgaatcccagctgcggggaggctggttgaggattgcccatccctcagtctgggctggattctccctccagtctctggggttctcttttctattcacaagagggtgctaatgagatggtttaatctctataccctgtggtccacaaatacaagatgccagcgtggccaatggggcttccataagagtggcaatcaggggtctcaagcttaccatgacgttttgggccctggaatcagatcatagttctacagttgtcctggcactagaactcatgacaaggttgtgactagacagaaggagagaaggctggaggctgacaggaagcaatgtgaacaaatgccttcgcaggatgcatgggtttgggcaacagatggtcaggggaggtgctggtgcagacgggctcagtagcaaagcaataactgtggatggccattttatggctgcagatcacagcacatttataaaagatgtgtgtttcatgaaaatgtgcatttcatcgtggaaatactgtggttggaggagatttctcaaagctgataaataagtgtaggtgacttaacttgcaaaagatgatcatatgtgagaaaggatgtctcaaattaggaaataacttgttaagtaaaaaagcctcatgtgttgatttgaagaaaaagatattttggtgctcatcaaaataaaagtataataagctgaa

SEQ ID NO: 295186 - DNA, 1000 bp, Homo Sapiens
agcaaacacaaggccactccaagaccacactggcagttgtgtggtgaacaatgatgaggagggagtgaaaagggacagagatgtatgtataaccaacagtgcccaccataattccctgcaaaaaaattttttttgtcatatactacctggttatattcagtgtcaagtttgcatggatggatgctcagagattgaacttagtatacaacacatctactctatagaatgtggccacatctgtagtcagtgcttctgcacttcctttacacatactaacactgcccagtttgtttgaaaaaaatcagcctccatcagtatcactgcagttatatatgatgtatgccttattgctcaagacagatcctgtggctggatttttccatgtctttgtgcaggaactatgggttgttggcatccaatgctctgagcttaaaaatactgatttttaaaattgctatctgcagtatataagaaactctttgatttctcatatgctctgagactgctttttgtttcctttggttttatgcttcagctctggacttcagttgccagagtgtgccagatactggggtcgtccttaaagcaactttccctttcttatagtcatcaatttttagttggccacatgtggacattctggaccacataaataaagacaacaccctagagatggtgaagtaagttgtaaactaaaatcctaagccccctaattgactgaatggaacccctcttgaccaaagtgaccccagaaaaaccttaaaactgagttcctggccatgacgggatgggaggtcagacacgcttcattatatctccgtctcttttatggtttagacacaacaactgaccagcattaatgtcaaaataaagatcataaggctgacagaatagaccctttgtggcaataacaaattattcgtaagatctaaggtcatgccaggcaagtgttatgtcatgcactcctacacttaaagaataaactatgttctaactgcca

SEQ ID NO: 295187 - DNA, 1000 bp, Homo Sapiens; identical to SEQ ID NO: 225019

SEQ ID NO: 295188 - DNA, 1000 bp, Homo Sapiens
ttgcctaactgaagatcacaagggtttcttctgttttcttctagaagttttggtgttttgtttttttgtttctttgtttttttgagacagagtttcactctcgttgcccaggctggagtgcaatggcgcgatctcagctcaccgcatcctccacctcccaggttcaagcgattctcttgcctcagcctcctgaatatctgggattacagagactgaaaaacttggctccttggtttagaagcagtactggctgaaacttagttctttggaaatacacaagtaaaaccagaaaattcagatcagcaaataaagaaatattagaatcacctctaatcccagtcatccggagttaacttgctggtgtcattttcctggatattctcatactgtttacccatgtcccattccaggaggcttttcatatagaagatgagtggacaccaactagagacactggagcaagggccccacagtgtgacatttggttgtctcttgatgggggagggaaagtgtgcttttgtgtacaagtatgagataggtggattctatcatgtggaggatattgcttctcagccttttggctaagatcaagtgtagtatcatgaggagttttcttcgaaattgtggatttccacttatgtaactagtggtgctattatgtgcccagcacgaaggtatgtaaatgttgcattaaaaccttcttgaggtggccgggcgcagtggctcacacctgtaatcccagcactttgagaggccaagacaggcagatcacaaggtcaggagttcgagaccagccagaccaacatgatgaaaccccgtctgtactaaaaatacaaaaattagccaggcatggtggcgggtgcctataatcccgctactcgggaggctgaggcaggagaatcacttaaacatgggaggcggaggttgcagtgagccgagattgtgccactgcactccagcctaggcaacagagtgagactccatctcaaaaaaaaaaaaa

SEQ ID NO: 295189 - DNA, 1000 bp, Homo Sapiens
gtttaacaactgacttcatgtcagggagataatcaaaaattccctgctcacattctctggaagtgggccagttttgtagctcagcgttgaaactacccctaaaaacagctctcctcttccacgacaaacagaagagttgatttggtatacttactcttttaaaatcgcctttaaatgtttcctccattgtgaggccttcagatgtccccaggcaagtaagtagcttccttcatctgtgtgtactgtcttacgctgtgactgttgtggactctggacttggggaccacctgttatctctgtccccagcctctatctgtgaggcagttccaacacaacatgaaggcaacaacaagtgctcagcagggtctcaccttacagcaacttgtaaataccccaagaaatccgcttttaaatgtggagttctggccgggcccagtggctcatgcctgtaatcccaacactttgggagactgaagtgggcagatcatttgagcccaggagttccagaccagcctaggcagcttggcaagaccccatctctacaaaaaacacaaaatttagccaggcatggcaacgtgcacctgtagtcctagctacttgggaggctgagatgggaggatcatctgagcctgggagggtgaggatgcatgagccatgattacgccactgcattgtagcctgggcaacagagcaagaccctgtctcaaaaaaaaaaaaaatggctgggcacggtggctcacacttgtaatcccagcattttgggaggccaaggcaggtggatcacctgaggtcaggagttcgagaccagcctggccaacatggtgaaactccgtctctactaaaaatagaaaaattagctggccatggtggtgctcgcctgtaatcccagctacttgggaggctgaggcaggagaatcgcttgaacctgggaggtggaggttacagtgagccgagatcacaccactgcactccagcctgggcgacagtgagactttgtctc

SEQ ID NO: 295190 - DNA, 1000 bp, Homo Sapiens
gccccaaatgtcattggtgctgaagttgaggaaccctgccctcaccttctttcctccacatcttccctcaagctgctcgtggcatgcccttctccactaagccaacttgttaaacctcttcacggctgagatcatgctgctttcttcttcagatctgccaccctctagctgggtgacttttagacaagtgatcgacctctctgagccagagtttctaccttgtaaaaaaaaaaaaatcccttcctgcatggtcagctgtcatgaaaaggacacatggtgatgggcagacaaagacaaggcttagcttcgtgtttgactcctaggagcgcccagttcatggaggctgctgctgtcactaatctgtttccatcttcccctgggaatcctgaggtttatctgtgagcctttggactgctgtatggacaacatactctgcagtagcatgaagaagtgagtgaagaccctcccttgaaccgtttgccctgaaagaacagaagtcacatcttgatatctcagtgcctttacagtgccagggatggggtaggtgctgagcgcctggtatgtgctcaccctatgctgtacaacacacagaaagccccacagggtttgaactgtaattaggtagagggtgtgtgggactcgccttgggtctctgactttggcttctgctcccggccttggataggctgatattttctagtagatatcagagactccggttgatagcaccacaatggcttttctcccaactttttgttttacgtattatcaagccaacagagaagttgcaagaatagcacaatgaacatgcatatacccttcacctggattcaccacttttgtttcatttctctcagtatatatgtttgtgtgtgttggagacatatgacattttacctcgaaaccaggcatctcctaggaaaaagagcagcctcccatataacaacaatacaatgataacccttaaaaaactttgcattaataaatcccattagttaat

SEQ ID NO: 295191 - DNA, 1000 bp, Homo Sapiens
ttaacttatattgtttagggaatatatttccctaactttttttcaacaaggaaaaaagtatgtacatatgtactacagatgcattttttttcaccgaatattttcaatccttggttggttgaatctacagatgcagaacccatggatacaaagtgttgactgtatggcattcaaagggatacagagaaaagagagaagtagaacatactgatagaggttagaagattattttaaagaaagaccagaagagtggacaactagcaacttctttaggaagagccagactgcctgtgaaggtataaatttaacctgaagccaactggaatcttgagactcaggaagaaaagaacctgtgttcttaatcacatgcaagacagacaggttccaagtcattactagaaggctattgggcaggcagggaggctggaagacctggcttgcaagatgaacttgaaggctgtacatcagatgcagagtcaagaccacagaagcagagtggctagaatgatgtcaccagcaccagtggcctgctcgctcagtgctgcttgggctgtgctcttggtgtccccatttctactgggcgtattagggcccaatacctgtgttttgtgcgagttgcttaagaatcactatcccagaagaaaacatccaatgggctaaccacagactatgagaacatgttctagcttccaggggacagcaaaagagagaaatggagtctttgggcatcggtacagagaggtaggcctctgccttctgccaagactttcaatcaagaatctcccagagaaggagaggtgtttggttgctggatgtcctcaacaaacaaatgagcaacaaaccaatacccataaagacctgcactattttgtagaaaaataggagacgtgagcaacttatcaatgtcaaagagtgtatatgtagaccatggccttgaatgtccatgatctctgtatagcagcacaggacaattaacaatgagataattaacaagagacaa

SEQ ID NO: 295192 - DNA, 1000 bp, Homo Sapiens
tttctgggaagtaaaatatttccctaagatggagaaattgagatgagagctcatccacaagattacccatcaatgagcaccaatagcaaccaaatccactagaagactgggagcttttaagtcaagaaacttacatcagtatcatcattccaagaagcggtatccaagctgttttatcgaaagtgcgcatgggagggatctcatcagagagagagacatcttcgccactgccatgaagtttcaagtacagaactcttcctcgtaatcaaactatttctatgaacaattcactcatcattgtgggaaagtctatttttcatcttaacacacaaacagacaataacaaaatttgtgatttggataatctggatctgatgttcatgctcaaaatggaggcaattcgtaatactggtctgaagcatttagtcattcactgagcagatacgttaggagcaacaggcatgggctgtgtttttctaggcactgtgaacacagcagtcaacgaagtcaaaaacctgtgctcttaagggacatgaattgccaaatggaaacactaagtttttctatttatgacctaaagctagtcaaatatctccagaagtaaggtagctgagtgaagtggttcataatctttccatgggagccaaatcctcggtgctgtgactcttttagataaatgatagtaaaaatgaatcaaaagttaattagcttgcacctcaataatccagtctccatcactgatggtcatcgtggaatctgcgtacagaggcagctgtatacagatgacagagacagctctaacacgtgacacatttaagcacacagaggcggaaggacataaagttcctggttgatttccctttggtgtttgtggggaaatatcaaggtcataaaaagtcagtttctaataatccctccagtcctccattccattccctaatttgtatgcaatggcatttaacattttgactttgcttaaaataaaatgtgtgtttgtttt

SEQ ID NO: 295193 - DNA, 1000 bp, Homo Sapiens
atcaactatccatctatctctatcatctatcatctattcatctatcatttatcatctgtcaatccatcttcctactatctatcaaaagcaacacattttcttcctgactttaaaaatatttaagtgggccgggaggatggctcacgcctgtaatcccagcactttgggaggcctaggcgggcggatcacgaggtcaggagatggagaccatcctggctaacatggtgaaaccccgtctctactaaaaatacaaaaaaaaaaaaaaattaaccaggcgtggtggagggcgcctgtagtcccagctactcgggagactgaggcaggagaatggggagaacccgggaggcggagcttgcagtgagccgagatcatgccactgcactccagcctgggcgacagagcaagactccatctcaaaagaaacaaaaacaaaaacgtaagtgatactctgtccactcttttgattgaggaggtctgattttcaggctttggattttattatgtcttcaatataataattgttccatgtatctctcctaaattgccatttgaaaaactgcttttctgaagtttaaagtgcacattttgatacatcttgacacatatatacacccatgaaatcatcaccacaatcaggatagtagatctatccattaccgccaaggtttacttgcactcctttgaactttctccccactcctcaccccctgcctatccccaatccttaagcaatcactgatttgctttctgtcactatcagttaatttgaatttttcagaaatgtatataaataaaatcattcgacgtgtatgctctttttctgttcacccggtacaatttgagatttagccatgtttttgcatgtgtcaatagtttatttttttgttgctcagtactaatccattttatggatacagagaaatgtattaatgcaatcccatattaataggcatttgggttgtttccaggtttgggctgttacaaataaagctgctatgaa

SEQ ID NO: 295194 - DNA, 1000 bp, Homo Sapiens; identical to SEQ ID NO: 119296

SEQ ID NO: 295195 - DNA, 1000 bp, Homo Sapiens
tcccagccgcgaataattataagaacctcttcctcatatgccagctgcaacctccgctaggtacaatacagaatgttacacagctacagtatgtacacgggggaaggggggccacccccagcagcctgtgccctggcctggtctacagttaactccactgtcccgcctcagctgcctctctgagtaagaagatgggagcccccctgagggaaaagttgctttggtgagagtaagaaggccgtcagacctcctccaaacaaaccaactccaccaacctctggctcttaaataacaaacatcatcatccagaaatgtaaggactcagccttggtcaaggtggtaaagggtctgtttgtctccctccattagacaggggtcttgtcttgctaccctaatggtaaagggctgactggggaggggttgtagggacatggtgggggtgaagactccagacccacttctccaggcttatgctgacaggggcctgcttttatttatttttatttttatcccatgactttttttaaatcctgtaactaatttttcataactttttaaaataacttttcataaaactttttttttactttttttccacaacttttttttgccacttttccacagtatttttttatcctgtaactttttcatcccacaactttaattcctgttaacttttttagtttgtgttcttttaataaacacacttacatagttacaattttgtaagaataaaaaccgattacctcatgccaagcatgccgagaatttgcagagtctcaatacccaatactatagttttcaagacacacaaaatttttaggcaaaacagcaccttgaaacaatttaataatgtattacattacagtagcatcacagcagcagtcaataatgccactttagacaaaaatcagtatttccattatgcattctgtgtataagaattcataaatcggtaaaagtcattctaagaaaacttggcaaatacagctttggactg

SEQ ID NO: 295196 - DNA, 1000 bp, Homo Sapiens
aatgatcttggctttgcatggtgctcaggaagccttccccgctcccaaaccagaaaggaatccatccagattttcctccactgtctggatggccgctctgtggatgcttccatctgtatccattgccggcacctggtgaggtccaagtctcacctcctccagaaggcctcccaggactgctggccccagacacagaactcccaagggaaggctcttccactaaaagtccagctgcagcgataatgatgagtttggagagggctgcagaccctgaggcaggggttggtgcaggggctggacctgaaactgggttcacacaacaagctcggactcctcttaacactcctgattggtgacattatggggtcttggatgcctcctcctctctgtccctcgtactgcccctgccacctgggactccaccaagttccttctccaccagccatgaggagagcctgcccaggggccagcactctctccctgagccttagaaccaggaggattctcactgcttctatgtcacaggatattgctcagccaaagggccagcatcccagtgaagaagatcagaaagaggcttccggtcaccaggagactcctggggagggcctaggctgggagtgggacacgggtggggttggatggaagagtaccagattccgtctctagagcctttgaggtcactcctgacgctgacatggctgtgaagagctgggtgccaggcattactgcctccaaggttgctttgcgaggaataggtggggcatcaggaagaagccagttgcaggcaaggcctctgctgatgctgcttttttctcctgtacccatccatgggagggagctgtgagatggcctggcagaacccgctcttggaccccacagaatgagaggctcaccctgcacaggaacatcctggggcagcaggctcagcacattttaaattttgagtatgaacaaagtaaacttcagggttaaaaaaaaacacaaaaatttgtcgagc

SEQ ID NO: 295197 - DNA, 1000 bp, Homo Sapiens
gtctcatgagatgattacttcacatttgcagttcaggcattttctccatacttccagaatcgtgtagggagttgggcacagagaatctttttaggggcaaagaaagtgagtgtcttttccactccccgtctccacacccatcttcctatttcccttccacacacacaaagaggagagctttaactttatctcaggaattctgtccccaggttcaatgctggagtaaaatcaaggacttggctctgtgcctgagtgggtgattccccacttgtgttaatcactcaaacaacctacatgcttttccttgtagttctggaggtcagaagtccaaaacggcccctattggggtaaaatcaaagcctcagcagggctgcatttcttccggaggttttatgggagaaggcagtttcccatctttgtcagtttctagaggccacctggattacgaggctcgtggcccttctcagcttcaaagccagcagtgtgactctaaagcaacatcatttcctaaagtagcggagaggaggcctgggaagattacacagcaaaaccatcagatcctacgtctgagaatgagaaggttgtttccttttcagttgactggtatatctaagcttatatccagaagaatgcctccatttcatgctggtctttatacctttgccttccttgctaatctctgttagtaaagaggaaggagggtcaggtgcagaggctcacacctgtaatcccagcactttgggaggccgagacaggcggatcacttgaggtcaggagtttgagataagcctggtcaacgtggtgaaaccccgtctctaccaaaaatacaaaaattagccgagcgtggtggcaggcacctgtaatcccagctactcgggaggctgaggcaggacaatcgctggaacctgggaagtggaagttggagtgagccgataatcgcaccattgcactccaacctgggcaacaagagtaaaattgtgtctcaaaaaaaaaaaaaaaa

SEQ ID NO: 295198 - DNA, 1000 bp, Homo Sapiens
aattaagaaaacaatctaacctgatgtgtgaaaatttctgcttgtgagaatccgtgttatttcaattatccaatcaagagcctaattcgtataaaagaaacacagcagcttgttgctcatctttttatctaaggacggtttgtcttgacagagggtgtctggctgttttggggaaactattcctgaccttattttgactaaaaagttgcctgctgtaccagggcctgtgatgtgttgataaaatgccacacaaccatttctcagtgaaaagcccaaccgggacttgagttatgttggtggctatggagttctgcaatccacaattgatgttctctaataaccagtgaccttgagtgaactgtccccaaggcaagagcaaccacagctgcggggagcgtttggcaatcactatccccacccaagcttctcccttgggtcttgtcctgtcactctggctggaatacaatggcgtaatcatagctcactgcggcctccatctcctgggttcaagtgattctcctgcttcagcttcccaagtatctgggactacagcaaaaaatcaccatgtaccaacctatccaaacttatccatggatgaatctatccagaagacgggagttccgatgcttgtcttgctctgaatgtctgcttgtcacctgcttagggttatcgactgtgattctgggactcattgttgttctacaggacccctctgactctgtggttttctctactggattaacaatgatagccataggtgctttttttgttgtcctcactggagtgacagccctgtgtacggttacagtcgacgagaacttgcagaaaaccacgaggctaagactaggagtgatacgaaaaagcggaagtctccaaggaactacagagccttccatgactcactcaataatcgctagcacctcgctgtagttgtacattgaaccctggcatcttcgtctttggaactaagtctcctgagcattgtttttaaatagaaata

SEQ ID NO: 295199 - DNA, 1000 bp, Homo Sapiens
atacatcttaaatattcccgtcaacacatgggctcaaagatgaggctggttcttcaaaggaaaacaaaaagattaccaaactcataaattgctggtgggaatgtaaaatagtgaagccactgtggaaaagtttggcagttcctcaaaaagttaaacatagaattacatctaagccagcaattccactcctagatctcgacctaagagaatcggaaacaggtatttaaatataagtggtcggccaggtgtagtggctcatgcctgtaatcccagcactttgggaagctgaggagagaggatcacttgagcccaggagttgaagatcagcctgggcaacatagtaagaccccatctccataagaaaaattttttaattagccaagcatggtgatgcacatctgtagtcccagctgtttgggaggctgagatgggaggatcacttgagcccaggatatcaaggctgcaatggaccatgattgtgcttctgcactccagcctgggtgacagagcaagaccctgtctcaaaaaacaaaaacaaaaaaatgtgatcacagcagcattattgataaaaaccacaaaaaaaatgaagacaacccaagtgctcaccaacagatgaatgactaaacaaatgtggtctattcatagggtggaatattattcaagcataaaaaggaatgaagtaacgatagatactacaacctgaatgaacctgaaaaacattatgcttccagtcacaaaagaccacatgttgtatgattccatatatatgaaatatccagaataggcaagtctatagagatggaaagtggattagtggttgccaggggatgtgtggagggggaatagaaagtgagtgctaataggtatgggattactttgtgaggtgacaaaaattatctgcaattagatagtggtaatggctgcacaatattgtaaatgtacaagaagccactgaactgtacattttaaaataatagttaaaatgataaattttacatta

SEQ ID NO: 295200 - DNA, 1000 bp, Homo Sapiens
ttcacacaacaaacaccacctgagtcccatcaaagcctgtgttgtttcccaacatccaccattgagacatattccagagcagcctctcaaaatcacctaaacaagatggaacaagtgttggaccagtaaacaattcatctttcttatcaaggcaaaggtgagctctaccatgccgtggctcgcagccatcacaagtatcgctgccagggtgaatgtgaaagggtaacacagtctctccaattttcacttcatgtctatgctcaaggacataagggtcacatttagtttgcagctgaaccatctgttttccatgaacaattgttccattttgactgcctttatctacaaggacataacttcgttaagtcatggtcaaaataaatttctgcatgaaatttactgactccaacttcaggattcaaacagtatgctccaaatcattttctcaggtgatagacagacagacactgaattgttgacctatccaataatcaatcaatgcattacacaaaataataggataaaggaaagtaacagaaagatcctttcaacagacacagtgagcatttgaccaattcaatattccttcacaattagtctccctggaaaggaggagtataaggaaacttcctagatctgctgaagggcatcaatgaaaaacttacagctaaccccataataataaaatactggttgttgtgtcatgacatttgagaacaagaggaaaaggttaacatccaaagaaattacataagaaaaataaacacagtcctccatgtgggaaaataagaggttagaaatgtctatcattgtagataacataacttgaatataaaaatttacaagaaattcattaaaacccactaaaaccaataaatgagttcagcatggtcacaatatataaaatcaatatacaaagttcaattgtattttatatactaccatgaccaacctgaaaataaaattaagaaaacaattccatttgtatatgtatgaaaaa

SEQ ID NO: 295201 - DNA, 1000 bp, Homo Sapiens
tatttgctcttggtctctattcctggcacagagctcctaaagtccttggaatgtcctaagtggtgagtttatgctaaagaggtaacttttggaaaacctctaaggatggggggctggttgccaggggagccaaccatgtgattagaaggttggaactttcaccacccaccaccctgacctccagggaagggaaagtggctggaagttgacttaatttgcaatgggcaatgatttcatcaatcacgtctatgtaatgaagcctccacaagaaaaaaatcttaacagaagaccttcagagagcttccaggttgctgaccacatggaggtcatgcccagagagggtgtgaaagctccacaccccttttccataccttgccctacttatctcttccatctggctgtttctaagttgcatcctttatattaaagcaataatgttgtaaatgaactttctctgagttctgtgacccattctagcaaatggtcaaacccaggagggaatggtatgaacctctggtttacagccattggtaagaagcacacatgacaacctggactttccatcaacatttgaagcgggagcagtcttgtgggatcaagctcttaacctgtggggtctgctactaactctgtgctacctacagagatcccagaccaccacccatgatcccaggctggaggaagcagcaggctagcggaattcaggaccaatgagccaggaaagaggacccaatgcagagctcacatcccaccctccttcccccatgacaaagcactggcaaaccctgccaaagaagaagcttggctgcaaagcagtctggaactggacccgggatagattcaccaggagctcaccaccacagggaatgctgcactttgactggacagaatgcatcctccatgcccacagagcatgtgcccaggatgaatctcactgtatcccagttcctcatgcttggccccaaacctctttttcacagtaataaagaaaacacacttt

SEQ ID NO: 295202 - DNA, 1000 bp, Homo Sapiens; identical to SEQ ID NO: 119298

SEQ ID NO: 295203 - DNA, 1000 bp, Homo Sapiens; identical to SEQ ID NO: 225021

SEQ ID NO: 295204 - DNA, 1000 bp, Homo Sapiens
gttgtgacctgcatctcccatgcggcaaacagtgctaagcactgggcacgcggcagtgaacactgacggctctgaccccacacagaccacaacacatcatgtcccgggatacgtgctcttggggctgccccgatcacagacacatcaggaggcggtggactcccaggtgcagggagggtcagggctgaggtggaagtgggcaggggcggtcgtgtgctgcttggctcaggtgacacctggcctggcacctggtgggtgaggaggggctagtgagatgctgtgtcctcagctgtcttcctctcctcctgggagacacataattcccagaaacctcagcaggggctgactcctcactggccagagccagccccacgccacccaggaaccaactctggcccagggaaaggggtttccgtgaggcttgagtctgtcgtggctcccctgcagttctggggctaccttccccgggcacattccacccagttcctgagcaaagcaaagaggcaatggccagtgggccaccgtctgccatgcagtccagtcggtttgctcccatggattgggtgggtgtgaagcttggcgtcaccaggaagctgttgggagagatgcacaccccagttcccgcacgctgagatgtggcctggggagggggtttgagcatttgtagtttccaaggcccccagagcagctgtcctgtggctgtcatctgccgccactgcactaaacaaagcacctccgtttcaacatctctggggaagaggattccagagaacacacttcaggaaaatgcacacttttacatgcccagctagcagtcctttgccctttagtgagaaagggttgagctgtccttctttttccttccttttaaaaagcatttgggctggagcagtgcctcacccctgtaatcccagcattttgggaggccgaggcagggggatcacttgaggtcaggagtttaagaccagcctggccaacatggtgaagctctgtctctacc

SEQ ID NO: 295205 - DNA, 1000 bp, Homo Sapiens
gcttttacactatgagtcagagaacagcgagaggcacgcagggccctactaattttccttcctgcacaccctggtgtgggtcctgtctgaggcctgccgtgtgctattagggaagacgtcatcaggggactttttctgctgtgaggagggtgcagcccctgcctttcagagctcaggacaccctcttcctcttgtccaggatcctcagggatttcctaggcttccaccctcacccagacatcactggaccgtcactgaaacacccgcttccagtgtgctcaggtcctgcagcctcctgtccatccttgccccgcctcccgcccggaggaaagactctgacactgcccctggaagagggaggagagtggatgtgatgagtgaagatttgggtggggaaaggaaggcctgagtcctgggaggaagagctctccccgccccgagcccccggagactgtgagcaaggctgagacgcctccttcctggtgctcaagctgcaggtgttggataggcctccagaagcccagattttaaatgaccgctccaggttaacctggggatggtcaggcagaacaaggaggagaggccagcagtgaagggcagggctggtgggcagtggctgggggtgtcctgggtggggctggccaccctcgctgcctctgacttgggccagacctgcgttaagtggagtggctcctccattctttacaccccaggcccctggcaggtgccctgcctttcctctgcccctctctctgccaacccatcctctccctcccagcccctgcccgcccagatataaatataagagcattttccatgggctgagacagaagggaaaacattcagctttattttcggcttgtgaaattcctgtccttcattcccaacaggtgcaatcgcctcatttagatattgggacccagaaatagaagacaatttacaatatagcttcctttagggatctggatgctaccaaacaaacaaacaaacaaaaaaagcc

SEQ ID NO: 295206 - DNA, 1000 bp, Homo Sapiens
cgtgggtgcgactgctgggccagggttgtcgtgggtagtaaaggtatttaccaagacaaccgtgagtaaagaaaggcaaatttattacagaaactatgaaaatacattgcaagaatgcaacatgcagcacagcagagaaggggctgtctgcaaagataaagggctggagggaagttttctaaggttgtgctggacggcgctatgtgcaggtgagcttgtgctatatgctaagaatatgttggaataattttaactgccagacctttcctcttctggtgcccgagggaaacgccctgctgcttttagctgtcttgtaacccacacgccttttcacttctgaagttgcaagaataacggctgtggtttttcacacaaaagggttgcagactgggttaggtccctgttccgccaacctggctgtttcccagtttcagttaacttagtggtttactagagccccacacctttctctttcatatggccatgatccaggaggtaatccgtcacctcccctccactagagtgctccatggccagggataatccgtcacctcccctccaccagagtgctccatggccaggggtaatcctcacctctcctccgctagagtgttccatggccaggcagtgtttcctgggtccagagcacctcaaacaatttcagtgttgtggtgactcagggccttcaccatacagacttgacagcatagtctagaggctggaggggctctgtgactcccattaatgacagtcactgccacggtttccccaggcaggatgtgccaggagaactgctccatgttggctcagcagaatgttattataggtagctcaaaaagagagggaacagggcttctctagattatttcagggaacgagctattatttgaatgttaatttaagactattttatcaattaaaaatgtaaggcccaagaaacttcagtgaggaagaatgaacaaattgaataaatactgttaaactttatgcttctttcagc

SEQ ID NO: 295207 - DNA, 1000 bp, Homo Sapiens; identical to SEQ ID NO: 225024

SEQ ID NO: 295208 - DNA, 1000 bp, Homo Sapiens
gtcgccccataagcctcggccccgcggcgctgcaaccctcccttctgggaaaggaatgtgcccgatacccactgcttagctcggcgtccgccgctgcctccacagcaggccctaagcccgagtcccggcctcgccgccgccaccgccggccggcctagagctcggagcctccgcttacctccccgccccctcctgctaccgcactcggaaacccgcccgccgcaaacaccctaggaacagtttctccaatcaacgagccgaggccggggccgtcgacggatgtccctctgattggcagcagagagggcccaatggctgagtgtacctcctcatccccggacctgatttcccaagactgacataattcccggcccaatgagtacctaggcccgccccgcggtatggacccaccaatgaggagggcgaaggccctagtgtctggcattctgggcccctcggccgcgccttcgcggcgggcgatgttagtgggcttgggcgttgggtgaagtatccaggttgggcgcttccagcgctttctgtggcgggggaatgaaggcctaggtcagggaataggaaggtgtatcgccgccagagtgcggaacaccctcgccttgagggttcccacagtgacttgcaaaagtctagtgagacccgagaatgctgaggcgggacacgaagcatgtggttcttgtggttgcgacgctcgtgccgccatcttgggtgctggcggcggaaaccggtaccccaacttcccctcggtgcgaacctggagaagccaccccagctgtgagggacggttgcgcctcatggcccaggcaagggtaccttcgctggagcagtaccgcggacggatatcatgagggtggtgggacgttggcggaacgttggcggaacgttggcggtgtgagaggctggactggaactcctggactcaagcgatctttccatttatcagggactactgacgcgtgtctcccaataaatacctgagtataaacaa

SEQ ID NO: 295209 - DNA, 1000 bp, Homo Sapiens; identical to SEQ ID NO: 119300

SEQ ID NO: 295210 - DNA, 1000 bp, Homo Sapiens
tcttcccctgccctaggaaagcccagtcacctctgaggaggcagcaacatcctggctcctcccacttgctttcagtgcatccccacgtccattctctcatggaaccctgtgcacatctctatctgagcacccgtaagactgtgttctgctagctcatgtgttcatcatctccgtgttgactgtaaacttcactttgtaccttgtcccccagaatccagcaccgaatctggcacactgaatgaatgaatgagtgaatcaaagaatgagtgggcaagtgttgatccgaagcacattcctcgtaaatctcctgcatacaaatctccatctcagagctagcttctgggaaccctcatgctacaagtcattaggaacatggattttggacacttctaacaagcctgagttttagtcctggctcttgtacttacttgcactgtaacctagagaaaaattacctaacttctcagaggcttcatctgcaatagaaatgaattcattgagtcgtgggagttcaatgaaatgttgtttgaagcacatttagcacagcacccggtacactgataagtgctcactaaaggattacttgtatcatcatcaatattgcatggtccaaggcacatggcaaggctatggaacacacagaagccaactagattggctacaaggccagcctcaagagaggaagaaacagatatatataaaaaaatacaggggcggaggagccaagatggccgaataggaacagctccggtctacagctcccagcgtgagcgacgcagaagacgggtgatttctgcatttccatctgagatgtggcacctgaggcccagagagacgttcagcaacttacccagcatcacccagtccacaagtgaaacaccccttcatttcagaagtgaatactccagagggtctcactctgtcacccaggctgaagtgcagtgacaggaccacggctcattgcatctttgacctcctgggctcagcctccagattaact

SEQ ID NO: 295211 - DNA, 1000 bp, Homo Sapiens
aataaccgatggctggtaaagttgcagagaaaaggaaatacttatacactgttagttggagtttaaattagttcaaccattatggaaagcagtgtggtgattcctcaaagagctaaaaacaggactaccatttgacccagcaaacctattactgggtatatgcccagaggaatagaaatcattctaccataaaaacatgtgcaacaaatgttcattgtagcactatccaaaatagcaaagacatggaatcaacctaaatgtccatcaatgacagattggataaaaaatgtagtacataggtcccatggaatactatgcaaccataagaaagaacaagatcatgtcttttgcaggaacatgatggagctggaggccattatccttagcaaactaatgcagaaacagaaaactaaatagtgcatgctcttactcataagagggagctaaatgaggagacatcatgaatacaaagaggggaacaacagacactgggacctctttgagggtggagggtaggaggagggagaggagcagaaaaacattaatcttgttgtacagattattttgtcacccaggtactaaatgtggtactattgggtaccctaccactgttttatcaaacaagtttctgtaatagtataaatcctttgttgtcattacaacaatgttcatggcatcttcaccaggagtaaatctcatctcaagaaaccactttttttgcttatccataagaagcaactcctcatctattcaaatttgatcatgagattgcagcaatctggtcacatcttcaggttcactctaattcaagttctcttgctgtttctaccacatccacagttacttccttcactgaaattttgaacctgtcaaaatttggtaccttactgttgtgtaccaggtttagtacctgggtgacaaaataatctgtacaacagaccccccgtgataccagttaacctaggtaacaaacctgcacatgtactcctgaacctgaaat

SEQ ID NO: 295212 - DNA, 1000 bp, Homo Sapiens
aaagcccaaagctggcccttttgggaaatagcagtaaatcattgatatgtgaaggttcccagcaggaggatgaaaatttacaggaattcggaggaaaatatttcagtggtcattactaaaacgctcagagtcagatacattcagcatcataccgtaagtcccgttagtcaaagcataaacaagcgcagggcctggcatggcttccttcaagttggctgactcagtctgggaggattcactcagcaagaggcagaggaaccaaggcaggatgaagacattgcctgtgctcgtgctgtctcttaccttactgactgtcttctcagagacctccccgattttgacagagaagcaggccaaacagctcctaagatctcggcgacaggatagaccaagcaaacccggattccccgatgagccaatgcgggaatacatgcaccacctgctcgccctggagcatcgcgctgaggagcagttcctggagcactggctgaaccctcactgcaaaccccactgtgacaggaacaggattcatcctgtgtaaggggatcaggaccagcctcgcaagcattttaatagacaacaagctggataatgtcgaagcaagacaaggctgcttctttcacttgtttttaaattgcagaaatggatgtcttcagacctcgtgaactgtgggcatatcaaagattgccttggaaatggcaaatatatatactgcttcattttactaacctgcatagatcactaaaaccaatagcttaaagcatagacacctcccaaaggtcttcccatcagtttgcaagagtgggaacaaccagaatcttacctggggttgatggagctggaactcccagaccaggagttggggcaggctgcctgccctaaggaatttggggaatccttgttcagagtagtgaagcataccacttggggttgctgagttgttttgtcctctatttttttcctcttcttttctgccctaataaacattggtattaaattt

SEQ ID NO: 295213 - DNA, 1000 bp, Homo Sapiens
ctcttcgaattgtttgaaaattgaatggactggctcacaccttctgaaatttcttggaagctctggagtaactattccactaaagaacagcgtgtttttggctgaaatctgtgactgtttgtttttgagttattttaatctctgtgtcaagcatgaaaacctcagcagcctgggatttataattagatcccactggcatgccctctcacctctcaaacatgccacagtgctttggctctctccttgtgcaaacctccctttgatatttttggatatcgataccaagtgtatctgcatattttaaccaactgatatgcatatcctgtgatctgaggcattcgctcaatgtggggcatcaggccagctgtgaacttcctttaaaatttattttgtgtcaaatgattccctaatgctatagctcccttgaactgctagatttatgaaaattctgcacaacacatagctcagagaaaaaaaaaaaagagtgttgcaagaccagatataggatatcatttgatttgtttaaaacactctgtccagggggttttgacttgctaatttaaaaataattctaaaattaggtacagttgacccttagtatccatgggggattggttccaggatgccctgtggataccagaatccaaggatgctcaagttcctgacataaatggcttagtgtttgcatataacctactcccctcttcctatatactttaaataatctctagattacttataatgcctaacacaacgcctgtgcatcacttcattcatgtggattcaatgtagtacttggtgtgaagaaaatttaagtcttgctttttggaactttgtggatttttttttctggaatgtttttgatctgcagttggttgaatccacaggtgcagaactatggacacagggggctgactatgtatatttatatccacttgcaaaattaagaataaaaataatgtgcatcagcaggtgcagattctgatgctcggtggacagt

SEQ ID NO: 295214 - DNA, 1000 bp, Homo Sapiens
tgccttctggtctgtccctgcagcgtgagtgccagacagaggcctgttctgatgtcctgacatgctacaattatgcagatttacacagcaagcataagaccttctccgcatgtatggcttccccattcccaagcagaccatgaacttcctaaggaaagtgaccgaattccgcacttctcaaccctcgcggaggggcagggagatggtaaccatgtcacaaccagttcctcccagaggattcaacatcactgctcatctcctcagaccaatcaagaggattggtcattgggaagtcatcctgagctgtgaccactctctggaacccagaacttcctgcttcacatggactggatgaatgtctaggggcacagctgtttccagacacctggtttgtcttcagaatctcaaatcttaaaggctttctggtccaaccatccaatgcatggtgaggccccttctggattgcccctgcctgcagcatcctggtgtgtgcctacatatttccagggacagccaggaagattccatgcaattatgtgttccctgttccaggggagcccacagcttgatcaggggacagactgtatcttccatcaactcaagaactaagactcaaattaaaaaaatgcaaggctgggggccaggatgaagaaataaagagagggtgaaatcattctgggaagtttccttgaaaggggtgagtcataaagagggggttgggtgcaggtgaggaggaggaagattacagactgcagggatgagcaaataccatttcccaggatttcctgaagtttttctcccctcccaaagcccaaatctgcctctttctggggcccagcgaggaccctggaagacagagatcctagaaaaagcagagggaaaagaagaggaagagaacatggagaaaccgccagggaacagaactcttggtccaggaggcgcaaaccacaagtgcaattagtcaaaaaaaaaccctgaaattaaaaaatgattccaagct

SEQ ID NO: 295215 - DNA, 1000 bp, Homo Sapiens
aagcagtaggtgctgcaggctttgttgaggctagaaagctgttggtctttattaggtgatggcaaaacaatggatcacattttcatgtgctgtgtcttgggaggcaaatgatgagaatgtaggattggggaaaatggtaaggaaaatccaaaatgttcatgttttctaaccccttcttgccaatcttaaaagaaggacaaacaggctagattaagcaagtctacagttacaattggaaggaaacacagccgtactaaggaagtactctgtctgtggcctgcagtctagtttgactaggtcctgtatttgagctttgaaagagtaaagaatacaagtgctcgtatacccctgaagtagttaccagcagtgactgcaaggaggtaatcttatgggatgaaactataactctgtattaaccatcatatatagcatatatgtgtatatgtatgtgtgtgtgtgtatatgtgtatataaatatatgtgtgtgtatatacacacatgtacacaccctacaacccagtgatttcaaaaaattaaacatttgtttagctcatgaatctgtgggttgggtgaacatttctattggtcttggctgggctcacctgtacccagtcagctgcagggtctagctcttcttatcttggctgggatctcacacatgtctaggatcagctgctttactagtctaggattgtcttggctgagacaggtggactactcagttctcctccactgccttatccttcagctggccagcccagaaatgttgccatgtttacagcataagagcaagcaagaaagaataatatgcaaccacttttccaagcctaaggtgaaagggcgggcagaacctgtggtgttaggaggcaactcataccagcccatgggtctaccgtttaattttcagaaatttggcaagctgattgttaacacagctgttgtttaatttatgtacttgtaattaaataatttacattaaaacaaagataataggtactca

SEQ ID NO: 295216 - DNA, 1000 bp, Homo Sapiens; identical to SEQ ID NO: 225027

SEQ ID NO: 295217 - DNA, 1000 bp, Homo Sapiens
ctgccagaggatggaggaaggggtgatgttggtcattcaagactgtttttcctacctcttcagtgcctctttcaactgtatgaagttaaaaccagcttggcaggctctagagagactgacctctgcagatggtttaaagggagaagctcaagggtccacagttcacagggctgccaatcaggcctgtgcagaaaactcaacagtctaaaagaatatatgaagacagaacctcaacctagaagaaatggacaaattcccagacacatcaaggaattcctagacaaactatcaaaactgaatcatgattagatagaaaatctgaacagatcaatataagtaaagagattaaagcagtaataaactctcccatcaaagaaaagctcaggacctgatggcttcactgctgaattctaccaaacgtttaaagaactaacaccaatgattctcaaactctttttaaaaattgaagatgagagaacacttccaaattcatatcacgaggccagcattaccctgataccaacgccagacaaagacactataagaaaaggcaattatggaccaatatccctgataaacatggatgtaaaaatcctcatcaaaatactagcaaatgaaattcaaccacaaatttaaaaaagcattcaccatgatcgagtgggatttatccctgggatgcaggaagtttcaacatacacaaatccataaacatgatacaccacatcaacaagatgaaggacaaaatctttataatctcaatagatgcaggaaaagcatttaacagaattcagcaccctttcatgatttaaaaaaactcaacaaaatatagaaggactgtaccccaacacaataaagaccagatatgacaaacccacagctaacattctcaacagtgaaaagttaaaagcttttcttctgagatcaggaacaagacaataatgctcactctctcgacttctgttcatcgtaacgttggaagttctagacagagcaattagac

SEQ ID NO: 295218 - DNA, 1000 bp, Homo Sapiens
cttaaatcagaggaaagaattgaccttacagtttccttttttttctgagatggagtctcactctgtctcccaggctggagtgcagtggtgcaatctcggctcactgcaacctccgcctcccgggttcaagcgattctcctacttcagcctcccaagtagctgggattacatgtgtgtgccaccacagccagctactttttgtattcttagtagagacagggtttcgccatgttggctatgctggtctcaaactcccaacctcaggtgatccgccagtcttggcctcccaaagtgctggcattacaggtatgagccactgcgcccggccagttacttttaaaacttgatctagaacgctcttgattttggaattataatgcttaatattttcctcaattatgactgcccagatttagccaagggcaattagaagaggaaagactgacttcatcttgacccctggggccagagctactatagcaaggccaacttcaacccgtatggaagatgtggctgctgagagcttcctatagagcccctgacataggataaagggaaaatatgtctgttttaaatcatactaacattgtgataaagtaatattatgtcctttgaaggacctaaaatagtgctaaattgtatcatgaccaagaaacatttgtttagcatttactctgtgccaggcactaaactaggtatgaaggatataaaactaaataaggtgtaatgtttgtcttcaaagagtttctttatcctgcaagaaattagagatggctaaatttaaaaaaatttttattaatgtatttttaattttttttttaattcataaaatccagatcctgcacaagatagctggacttctctaaggaatcagaattacaaggaaaacatattgattttatccctttgttagtgaaaataatacattcagatttgaaatggtcaattgttcacagtgatttttggctgttatgaataaagctgttatgaacatatgtgt

SEQ ID NO: 295219 - DNA, 1000 bp, Homo Sapiens
ctcaatgtctgacacatagtggactctcaagaagtttgtcatgcaggggacacttgaatgcccagtatgggccagacagcatcagctcatttcagtcccacagccctgtgagggaggaactctgccctgttttacagttagggaaattgaggcacaaaggctaagaagtcgatatccaagggcacagaatgattgggtgacggtgagcccaggcagtgtgacaacaaggttgctgccccacgccacctctgtctttcgtgggtatgtcggtgtgaggtgtaggcagccctgcactggcattcagcaggcgggactcccgggcaggctcttctgcgaacactcatgggccaccagccctttctggaacttgccttttttttttttttttacctgaaagctacgtgaatcgttggtaaattggtgtaaaaatggaactgagtcatctcaaaagttcctttcagttctaaaattctgtgaattgaagcctactttttcactttaaatgatttattgggtttacagttctttacgctttctgattgaactgatttgaagttcttatttcgtgtgttggggaacacacccccaacccgtcacagcgtggccgtgggtgggagatggacgttaggctggccagtcactagggggcagcatcagcacgggtctggctgtccctggccttagggagcagtttctgcccctcctgccccgtcagaaagtctcggactcctctctgcttgcatgtgtaaagttttcattttcaggggccttttagtcaaaaaaaataaagctgtatgacttagtgctgaaggatatgaattaggcgtagctcttgggttggcagcataaaccaaggggcatcaacccaccaccgacaagctaagaatggtttttacatctttaaatggttgaaaaaggaaaaagaatgtttagtgacacgtgaaaaatacatgaaattcaaacttcagtgtctacaaataaagtgcattagcacacggtc

SEQ ID NO: 295220 - DNA, 1000 bp, Homo Sapiens
aaccttgtttaaagctaaaatggctcctaaatgatagacacgtttctcagttatctctgcaaactgaagatcctatcagcctgttcagggtctcacaggcctctgggtttgtacatgatgtccctacagtggcgatggggactgatgagagccaccgttcccattggaggagggcaagctgccactgagtgtcagctgctggagtaaacatccaatcacatgtgtacctgtatcctatggatattggcttcccctcatacaacttgttgttcctttgttttccattcctgactatatttgaatctttcttggatttccaggaaacatctgactgctttcctatgccacttcatacccaagagaagctcagggagatcctttaaggtcctttatgcccattatgatagtacatgaataggtaaatgtaccactgctccctgtacttcttggataatgcacaaatagtaagacagtctcgcaaccagcagcctagacagcccaaatatgtgaaaccaaaacagcttgatcttccagacctgttctgactccttgagtcttaaatctccaagcctcttgaatgtttcacccacagccttccctttgggatctggcatgggacaggaagggcagagaagggcctggggcttttcctcagggatccaccacagtctaggccagtgggtggcaaactttttctgcaaaggatcagctgggagatagtttcaactttgtagtctcgtcgcagctactctactcgactctgccactggagtgtgaatgcagtcatgaataaaagaatgaaagttttccagtgaaactttagtcacaaaaacagtctgcaggctgtgtctggcccgtgggctttggtttgctggcctgcgggctcctagaaggctctgactttatccctctatgagggaaagcaggttttggggtattctcccaaatctttataccttatgtctgtgtctctttttaaattaaaagtaaaatttaggcc

SEQ ID NO: 295221 - DNA, 1000 bp, Homo Sapiens
ctcagcctcccaaagtgctgggactacaggcgtgagccaccacgcccggccagcaaataccgtatctgactagcactttccatttccctccaaccccctaatggtttcttttcccacaataatctaaatgtttaaggaactggtttgctaactcatttcttaatgacaagaattaagccagcacagcctctggtttctgacattctttccctacaaagtcattcatcatttatccttttttaagggacttccttcatctctgtgccttaggctcacttcctgactgtggggatcagctcctctcaccaatggtgagtagggagtacctgccgttaaacctctgtcaccacaggagagagatgccatggatggatgattttctctctgattcttggcattagttcattgggcaaaaattcagcttccagttaagcaccggcccatggaccgggcttggtcctgtttcccctggaagcactgctgggaaaccaagcccagccctgcagggcttcctcctgctgccgcccacgccaggatcagcctcctcttgccgctgcagccccgtcgctgcaccggtttcatcggtctgaagtccagctgctcctccttggcctctgcacctcagcacaggctactgcctctgaggggccgcccagccgtcgtcctcctcacaacctcccatgatcgtggccctgaggtcacctttccattggcgatgaacaatcccattgtcactccccatgggtgtgcccaccggaagctgctcatgggcaggaggggaactgttcaagctggtttttccagcccctaccacagcgctgggtgtgtaggtggacaagaaagtcattacgtatgtaaatgaggaagcgcatgaacacctgagcgtgtgagaattcggtggggtgaatgccactccaaatgtgtgtcaaatatgatgggactgaatgcaaatgaaagtgggtcaaggagatattcagaataaaatgagcaacttttcctc

SEQ ID NO: 295222 - DNA, 1000 bp, Homo Sapiens
aatgtggctattgtctgccttattggatagcagagttctagaaccacagataaatgtaatactgtccctttagttgatttaaaaatccaatgcctctgtaatcctagcactttgggaggccaaggtgggctgatcacgaggtcaagagatcgagaccattcttgccaacatggtgaaaccccgtctctactaaaaatacaaaaattagccgggcatggtggcaggcacctgtaatcccagctactcgggaggctgaggcaggagaatcacttgaacccacgaggcggagcttgcagtgagccaagattgcaccactgcactccagcctggtgacagacggagattctgtctcaaaaaaaaatgcctcacagagttaaatatttaagttgataagaaaaatggtagtcgagtctttgaggattattttaaaatccacttttggtgataaatagataaaaacagtgtggtagggcccagaagttcttcctgatttctacctgttggagctgaattcctcaattttacttgtaggagaacggcttcctaaagggcaccttacccagccattcctgcatgcaagtgtgtatgagaactgcagggggcattatatgaaaatccaattcctgggctctatcccagatgttcctatccaataggtctgggttggggccctggaaactgcatttttggcaaaccccttactgatttggatgcacaagtttcaaggaacaggcactaaggatcgctgatgtagaatctgtttgtccatccaggaaagccagagtcaccacacttgagtaaatgggttttgatgtaggaaaggtctttataattctttcatgaattcaccaaactttaaaaactgtactatttttggctgggcttggtggctcacgcctgtaatctcagcactttgggggccaaggcgggtggatcatgaggtcaggagatcgagaccatcctggctaacacggtgaaaacctgtctctacgaaaaatac

SEQ ID NO: 295223 - DNA, 789 bp, Homo Sapiens
atggaggtctccacccctgtaactggtctctgctcagtcatccccgctctagaagccttataccatccgccccgagaactgggccccacccacagccccgaccctggaactggtctctgcccaatcagcctcgccctccaggcctggtacggcctcagccggttccccgccttcagccccgccccggaactgatctccgcccacaaccagccccgcccccaggcctcaccggaagcggaagcgcggggcggtaccgtgggaggggccgcgcgtggggcagcggggagcgagtccctccgtccccgcgagtcggcgcttttggccccgcgggaggggccgggctcggtgagcgactggcgggggctcgggtccgagtccagggggcgacgtgggccgcggacaccgccagccacgggccctgcgtccctccagggagccgtgtttcggttcatgaggcctcgggctgtgagcttagatgagaaaagcatcattcaagctcagattcgtgttgaagcctgccacaaggtccacctgttgttgtgggtttttgggtgaccagaccaagtctcactctgttggccaggttggagtgcagtggcgcgatcttggctcatgtcaacctccacctcccagactcaagcaaatctcctgcctcagtttcctgagtagctgggactacaggggttacccccagcagtgtgtgagaatgaagagtgtgggccactgtgtctctgttgacctgccagataggaaatagcgccagagttgctgcaatccacgtctccctgg

SEQ ID NO: 295224 - DNA, 1000 bp, Homo Sapiens
attacatatactataaccaacaacgatttgtcagttacaccagggatgccattaaaggaatagctgaacaattgggtttcaccagccaaatggcctgggaaaatagaatagctcttgacatgatattagtggaagtccaatgttgtacctgtatccccaataatacagcccctgatgtaactatcactaagggtctataaggcctcaccactctaggaaatgaactagctgaaaattcgggaatgaatgatccctttacaggtgtaatggaaaaaatggtttggtagatggaaaggactaatggcctctattctcacctcccttgtgatcataataggggtgctcattctcttagggtgctgtattataccctgtgtctgcggactagttcaaaagctcatagaaacagcccttaccaagacctcccacaactctcccccaccctattcagataaacgtttatttctaagcaaccaagaagagcagtgaagccagatcctgttagaaatatatgaagaggaaggactacaaaatcaaaaggggaaaattattagacaaaatgagttgctctacaaaggtccaacttcgttgtcctttgttctgtaacctttgttctgtaaactgcccttcccgcagaaactgtctttcccgccgaccaaaactgcccttcactatcactgtaatccatacccctactctatttgaaactgccaatcgggatcagcttacattgtgtggttcaaccaccagccaatgaggaaaaaacacagaagcaaaagctatgatgcattagggttaaaaaccccttcctttccctgtccaatgtgctcttgagactgctacaggcgcaagcagccaccttctgcagaagtaaaccttgccttgctgagaaatttttcttttgagtgctggtctctctctgtggcaccaagaacttatttctaacatggagtgatttccaagatagatggttaagtgaaaataaaaactgttgccaggc

SEQ ID NO: 295225 - DNA, 1000 bp, Homo Sapiens
tcggaaaacaggacaaagatgagctgcgtgcccataattccacgtttacgctgactcctccagtgcctcatcaatgaagtaagcaggcagctacgttctggatggctagcatgtaccgaaggcacaaaacctccagagttggcagagttaagtcctggcgtgcccgaggctatccaggggaacacgcgggacagacagcaccctcagcctgtccccatgaccctctgctccagtctgaggggcaggacaccatgagacctctcagacacagagtccaccctcgacatgacccggatgaaaggcaggagtgtgtgccctgcttttgccctcgaagctcgctgaaggggacccatctctgcaagcccacagccctacctgcagcatccacagcctcagagagcagcggggccccttacccctgaaccccctccaagagcatcaggacaacaagccttgagctgtggagacaagagaatcagtatccctggcccagggaggattccaggagaggacacgggcaggagccctggcccagagccagaaccaagagtccagccagaggcggctagagcatcacctcttcacgcaagtgtcttgaaactcagcttgaagatttcagcaaatgtgtcttacagagaagagaagagggagtcagcccatcgggattaaaaatatagaggcagtgacaacacacactcggcttcagttcttaggagagttttggttttgattttttttttttttttggagaagattttttttttaatggatctacactgttaactgagactctgttgagattcactggtttacttaaaaacttctcagggatgtctgtaaatttcagtgttatatgtcatgaaaactggtgtgggcagatctgttggttgaaataatttctactgtttcaaatactgaaggcaggaataattggtttatactgtgttttaaatagaagtattactggtaagtcccccaggacattaaaccttaaaaatca

SEQ ID NO: 295226 - DNA, 1000 bp, Homo Sapiens
aatgcctaactgccggggaatgcagccctgtaggtctcaacctcaatttgcccagccactattcaaaatagagtcactctggtttaaatgcctctgacattaagatacactgtaaaattatgaaaaaagttgatttgaattttagcaaatgagaaatgaaataattagaatgggctattctgaaagatatagcattagttatatttgtgtttgagttttctattaacctatatttgttacttatgaatagataccttgttttattctgtctaaacagatacactaggtggggtgcggtggccatgcctgtaatcccagcactttgggaggccgaggggagtggatcacctgaggtcaggaatttgggacaagcctgaccaacatggcaaaaccctgtctctactaaaaatacaaaaatcagctgaccatggtggcgggtgcctgtaatcccagctacttcagaggctgaggcaggagaattgcttgaacccgagaggtggaggttgcagtgagccaagatcatgccactgcattccaccctgggtgacagagcgagactctgtctcaaaaaataagaaaaaataagcggccgggcatgctggctcacgcctgtaatcccaacactttgggaggccgaggagggtggatcgcaaggtcaggagttcaagaccagcctggccaagatggtgaaaccctgtctctactaaaaatacaaaaattagccacgtgtgttggcaggtgcctgtaatcccagctactcgggaggctgaggcagagaattgcttgaacccaggaggcagagtttgcagtgagccgagatctcaccattgcactccagcctgggtgacagagggagattctgtctcaaaaaaaaaaaaaggacataaatttaatgttaagtgtggactcataaagaatctagacagccaccaagccatttgtttattcttgatttcttaaagcttccattattaaaagctctgcattccattactcatca

SEQ ID NO: 295227 - DNA, 1000 bp, Homo Sapiens
ctctcccatgtggtcccatcatgggcctctagggtctgggataagaggttaatgaatatctcataccctaagcaggggtggtccctgcactttagcaaaaagttaaggaactagggaaaagagatggaaataataaagagatgggacaaagactttgaagaccaaagcccctgggctattctcttttttaaatttttttatttaaattttcatttatttttatcaagatagggtctcactatgttgcccaggttggtctcaaacttttggcctaaagcaatcctcccaccttggcctcccaatgtgctgggattacaatgtgagccaccacgtccagcctcctgggatatttctcaatgaaacattggatgccaagattggttttgtgccacatgccaatttcacagaagccagtctatgagccaccagctctactcagcaattacagtttctggaactttggctaaattcctgtagatgcaccactgcttgtggcctgactctttgccacccaagtgcgctcagcctcccctggggagtctgccaggcttgcatggctcccactgcacttgctgtgctgggaccgaaaacagtttttgtgcccctagcttaactccactggattcatagaggctttggcctcctcaatggctgtcctgggacagggaggctggttagcacaattaacacaacctggtcatgcaaggcattgatggtccgtaacatgaactttgaccagtaggagacagagaatggaaaaaagccagcagataaatcatctggccttcctcccctatgacagactgttctgagccacagtgtttcacatgtcttcctggagatgtcccacatgacttgagcaaccagctggagctctggagaaactgtggccatcctggtaacatatgaccttgtatttgctttctctccttcctgctttatttccctatgtcccttactttggttgttgggattgcacctcccaataaagcattagcat

SEQ ID NO: 295228 - DNA, 1000 bp, Homo Sapiens
cagcttgcgcttgccggggagtcctgctgccttccgaggtgtgaagggaaggcatgcactgtgcatatgctgtaccatacagttttgcctacaactgcttgtagcttcattgtagctgtgaatgctccgttcctctccttttcacccctgaagattcgcgaacatgcaggattgagctgtgcgaggcatagcattccccacatggtagacgaaggcggatgtgggtctgatggctctactgccgtccacccgggaggatggacgtgtgttccgggatatcagagcttgcggctgaccagcccacatgtccatgcagccctcccgctggctgtgtcgacattttgggtgtcactgaaggattttactggtgcagactttacaaaggcaaaattgtttctcaaggaagtggacatgaaagatctaaaatcagggctgcttaaaaaaagcaagcacagattaatgacctatctacatcctacacggttttaggactgcgcctagatgggcttaaagaccctagcctaaaaactgtaaatgtgcttccgtctttgccctgtaggacaagaaagccttacgggcttgcttctaactgtgagaggaggagaggccaggaagggagagggagaaaaggaggagaacaggagacgagaaggaggggagagtgaggagaggaggagagaggcttgtcaaaatctttttagtgcacaaaactaattttgttcatcttggatttggtgagctgggtaatattctgtgcacggctcctaaatgaattattaaatgtcaactcaagatggcttaactaaaatactcaatttaataaccaaaagtatctaaggtaacaacaacaattttgcaggtgattgtagagttgtcaagtcaaaccattatagacaagcatttggggttttcacataatctccttccacatctcatcttctgtcactaaatacccactctggtgagcatattccatttcaataaagatcatcgcttcggt

SEQ ID NO: 295229 - DNA, 1000 bp, Homo Sapiens; identical to SEQ ID NO: 225028

SEQ ID NO: 295230 - DNA, 1000 bp, Homo Sapiens; identical to SEQ ID NO: 119303

SEQ ID NO: 295231 - DNA, 1000 bp, Homo Sapiens
cagagaccccagctgggctgagccaccccgggctgaggccttgtgggtcgcctcaaattcaagcctcatgggcccggcctcccgccctaacggtcgctgaagtgtcctgctctcatacgaacttgtgtctaaaactgtggtctttgcttttctcccaaacccgcctccccgcgctgcctacctcaggcctgggggctcccccgacttgttctctattcccccagcccctcactgcctgggggctcccccgactcactctctaggcccccagccccacactgcctgggggctcccccgaccctctctctattctcccagccccgcactgcctgggggctcccccgaccctctctctattctcccagccctgcactgcctggggactcgcctgactcgctctctattcccccagccccacactgcatctcgggagcagttccaggccgacctctgctctccacggccgggaggtgtccaggtgtggacagagccccggctctccatcagggcacccagccgccccacgctcagccctgcgtggcttctcccgtccttcctgggcatcccctgagggtgtggccctgttgctgggccccctcctgcccccttgccctgccagttcctagagcctaggctgagggcagggccattgctgtgaacaaactggacaggctccgcgggagctcagagctgccccgtgtctgagggcgcggctgtgtggagtggggtcccctcggccaggcgggaaaggccctggatcgtgtgtgtgaccctggtactgggcaacccctgggacaggcaagtccgtggagacagaacggggcggtggctgcagcctgggagctcggcctccctcggggtgacggaatgttctggaccttgatataggtggtggatactcagccctgtgagtgcaataaatgccaccaaattctcacttcaaaattattttatgctatgtgaattctgctccaattaaaacacaaactctcttgcaaaa

SEQ ID NO: 295232 - DNA, 1000 bp, Homo Sapiens
cagcggaaaggacagtgaacgagactttgtccctggcctccaaaggcttagggcgtagtggctgtcatgaggcacagtgacaagggccaggagggggacctcttagggggccatgcagtgatggaagccagaaggaatgaaggcctgcagtgaggatggagtggtcggcctgaagccatctctagcaagtggtcaggacgctgattgttctgcgcaggttggaggtaggtggtgagtctgagaaaggggccggaaagactccccagcaactgctggcaaagggtgaagggcacgttcccacaggattcaagccagctgcctttggaggggagacgggcactcagtttaggcgctcctacagcagggtcagcaagacaagcaggttgcggcaagggtctgcgcactgctgtgtaaatgtaggggcatcggggggcagaaagaccaggggagaagtgtgcatcacccttggggttaagggacagttgtctgctaggtgttgcttcctggagatggctgaaaagccagtccagtctgcagggaccaggccaccacccacctgatgtgggagcatttcccccaatccctgctgggctgctgaatctgggggacatagggaagctgaggctggtgttctgagtagtggcagagctgagccacagggcatgtctgaggtcagccccgagcaaaatggaatagggactcagggtgggtcaggtaactggaaagcgggcactgtgcacgcagcccttgaggggagccagggtgggtggggatcccccactgtgtgcagaaggcagcagccttggaagcagggtgtgctcctcggtgtggtcgctcgataccagaaaatgactctaaaaactgaagagtgtttgagtttcattcacacaaaacatggacatcatctgtgaggctctgtcccagagagacagggccatccctcatgtctgttattgggttgtagataaacaaaagtataaatcaaacaaactgcaaatta

SEQ ID NO: 295233 - DNA, 1000 bp, Homo Sapiens
gtccagacgcagggaaaggtggccgtgggaacgtgagtcagcagcaacaggcccagaagggcagccacggtggacttgtcagacgtggaccctgaaatgacaatcacagcatgatttcaggcaggagcctgaaatggtacagctttggacatcggtttggcaaattcttttagagagaaacacacaccttccctaggacccagcaactccactcctaataaccaagtgaaatggaaggagttgtcctcagcaaaacgtgtgtgcggaagttcacagtcactttctcggtgataaccaagagctggaaaccactgcaacacccaccagcaggtgaacggattaacacactgggctagggccacacaatgagatgctccgtggcaacacaaaatgaaccgtggacacacactgcacggcggatgaatatgcagacatcaggccacgtgaagggagccaggccccgaggcgccacgctttgtgattcagggtggtccctctgcgcccaagacccggctgcctcctcctcttcctggctgcagggagtgcttgtgtctgaagaacgccaggctggtgtccccagagggcggctggaggggctcagaaaccattttcaccttctgtctcctccatgtctgcactgtttgggaaagaaagcacgcagccaaagagcgcaaagaggctcagaggaggcccgggtgccctggagagacgctgcgtcctgacgacacagcatccctgtcccgcagcggagatttcccagatgaaggattccccggcgggagacagggccctgcacacaggtcctctgccacgctgctcaccatgcctgtgtgttatctccccatgaaaagtcacctaggccgagcatggtggctcacgcctgtaatcccagcactttgggaggtggaggcgtgcggatcatctgagatcaggagtttgagaccatcctgagtaacatggtgaaaccccgtctctaggaagaatacaaaaattaactggg

SEQ ID NO: 295234 - DNA, 758 bp, Homo Sapiens; identical to SEQ ID NO: 119304

SEQ ID NO: 295235 - DNA, 1000 bp, Homo Sapiens
cacctacctccctgcagactgccacagccatttgtacaaaccacaaatttgaccatatctctcccccctttttttctcttgagatggagtcttaatacatcacccaggctggagtgcagtggcatgatctcggctcactgcaacctccgtctcctgggttcaagtgattctcctacctcagccttccccccaagtagctgggattatatgtacacgccaccacgcccagctaatttttgtattttttggtagaaacagggtttcaccttgttggcccggctgatctcaaactcgtgactgcaggtgatccaccgcttcggcctcccaaactgctgggattacaggcatgagccaccgctcctggccccatatctctctctcaaaagctccatgggacacacacacacacacacacacacacacacacacacactcatacacacacacatacatgcacatcaattgcttataagatgataaactccaaaccattaagcatgttagtcaaggccctttctgacccagcaggcccagccaccctcctgccctcaccaccatccccaccctcatgagcccaatactccagccctacttgacttccttcattccccagacatgcaagggcgcttttctcatttttgtcccctaatctagagagtatttgcccttcttctttttcacagagaactcccacatagacttcaaaactcaaaccaaatatttcctcctccaggaagccgcaaagttagttgttccctcctctgcatgccaagaggccttgtacctgtctctatgtcacttggcatattgaattctgaattaccatgcatccctcatgtcaaacagaagttagctatatttgtctaggcctcttaggaaaggcgtggtggttgccagaagtggaggggctttctaagaactgtaactcattaatcactatgtcagtaatagttgtatttgacaacttcagattttctggaagcctaaaaataatgtcaaa

SEQ ID NO: 295236 - DNA, 1000 bp, Homo Sapiens
gaagttccttctctgggtcttaattttcccacctgtaaaatgggagttcaattagataatgagtaaggacacttttgttcaaggcgccatgatccaatgagatagcaaatgtagaagcagtggctgtggcagtaaagacagtgagctggagtgcccatgagagccacgaagccttccacagtccccgccacctcccaccccgccagcttctgcatccccaggtgctcaaagagccctgggacagactcagttctgccaggtataagccgtgtggcctggggcaagtccatctcctctctgagcctcagtttacccatctgaaaagaaagagtgatcgctcatgtcctgcagctctcccagagaagatccaagggagaggatgacagggttaccccttggagacattgatctcattctgccccacatttaactgccactccctgtccagactttcggttctagagggcagggcaggactgcctcatcctctgtgcctgatagccctggtagtgaccgaatgagctcaatgttctgccaattccagcaaggtgtcttgagattgttcaacctgtgcaggcagacacatcctcccaccagggcggcagcacggtccggtgactgtgggtaaaaccacagcagttcaagaaagcaactcctcctcttcttgtggggtcttgtacaagctgctttgcctccagctgcctcagtctcttcatgtgaaattggggatatctgtcttagattgggggtcccctgaagcagacctagagacaagaattcaagatcaagtcatttatttaagaagagatcctggaagttccagtagggagtggagaagtgagactgggaaggggaggagagcaatgaaaggcgcgtgaatgagctggtgaccacgctggacccaggcctactggggccatctcaagggttggcaaactacagcccacaggccaaatcaggcctgcctcctgaatttgtaaataaagttttattggaacac

SEQ ID NO: 295237 - DNA, 1000 bp, Homo Sapiens
tctcctctctcttttttttgagacggagtctcgcactctcgcccaggccggagggcagtggtgccatctcggctcactgcaagctccgcctcccgggttcacgccgttctcctgcctcagcctccggagtagctggtactacaggcgcccatcaccacgcccggctaatttttttgaatttttagtagagacggagtttcaccgtattagccaggatggtctcgatctcctgaccttgtgatccgcccgcctcggcctttttttttttttttttgagacagagtcttgctctgtcgtcgaggctggagtgtagtggtgcgatttcggctcacttcaaactccgcctcccgggttcaagcgattctcgtgcctcagcctcctgagtagctgggattacagacatgcaccacaacgcccggctaattgttgtatttttagtagagacgggggtttcaccatgttggccaggttggtctcgaactcctgacttcatgtgatccgccagcctcggcctcccaaagtgctgggattacaggtgtgcgccaccatgcccggcctcagctccttctttcattccagacctgcccccctggagatcgctccctgaatgcccctcagacaccacaggctcggcgagaaattgatctccccagcttttccccagctctgcccccatcgtgtttctcatttccgtggacacccacgccagaaacctggatctcatccttgccttatcgctcttcacacctgccttaggtctctttttaccttgtaagagaccttaagagacctttccagttggttcagttctctcagccccaggttcaacctgtcctgtctgacacgtctcacagccttcctgccttcactccagcgccccctcaatccatttcccacagtgcagccagacctgtttttgattgtcagtcctatggggcttaagtcctggaacatcccattgacctccaggacaaaattcaatctatttcactttcagggc

SEQ ID NO: 295238 - DNA, 1000 bp, Homo Sapiens
ctcctacctcagccccccacacagcagggactacagctgcacaccactacccagctcccttcttcatgtcttacctgtccttattatcacagtgaataatgcctaatctattagtgaataatgcctaatctattaagagctatgtgaaaaacctaaactctttccatttgcaacccttttggtatggtcaagtcagtggatctggctatcatacaaactcaaatcaactactacaaattcagattggctaagcagattccagccattttaaaagcttgtctctgctctatcctgtatctttctgcatttacatgtaacttcactgtgggtgtccttacagtatatatttttatgagacatcaaacttactaagagtactttatagcatagtatttaggaacttaggggtcagaattaagacattgttactatgtcaccttgagtattttgtttaacttcacaacccttcagtttcctgatcagttaaataattatgataatacaagacatagtagcatcacaggattattatggggcctaaatagataatgtatataaagtatttatcacagtgcctggtacagatgttagcttctgttactactctgattctagcctccctaattctcattcttttttgggggttgcaggggagttcactgtgctgtttgctatatttcaagcctcaaaagacaatgaagttcccaaatgctcttcaaggcagaacaaatataaataatgattctcacaccaaatgtgtgcaaagttcaaatattgcattaatggtgctttttattgtgcaaatcatacgactaacccatcatgtcctttctgtgtcaggaagaacatggatgggaatagaaggatctttgaaatcctaccctctgtgtaaatcagtatctgtgaatttttctcttgttagtactgatttatttactctttctggtgtatctgctctttcccttaaaacctttatgataaaaacatatttgaatgccca

SEQ ID NO: 295239 - DNA, 1000 bp, Homo Sapiens
ctggggagattgcaaaagacccatccagagtctcactttgtcgcccaggctggagtacagtggtgcgatcttggctctctgcaacctctgcctcccaggttcaagtaattctcctgcctcagcctcccgagtagctggtactacaggcacacatttgtagagatggtgtttccccatgtcatccaggctggtctggaactcctgggatcaagtaatccacccgcctcggcctcccaaagtgctgggattacagacgtgagccaccacgccctgccaataaaaagattatctccagatgctgactaaggtacagagaggtcaagtaacttgcccaaagtcacacaactatcaaggagcagagctgaggtttgatgtcacagaggggtcaagatacagtcatatttattaaacagcctacttcatgctttgaacagaagagttttatcagttttaaatgtttcttcatttctataccttcttttatctgaggagcttaagccattttgtagaggcattaagtattgcctcagtcttaatatgtgagacaaggtgtgaggaatatagagattcataaaataatccccatcttcaaggaactcacagtcaggaagaacagagcctgcaacacaaataattgcaatatagtagaagtgccaataggagctctatgaagggcgtgaaacaggaaaggctacatagaggagatggcagacactctgtggattgtgacctgttggtgggccatgaaatcaatttgggggtttgagagcatcattcttttaataaaacagaagagaatcatctgcaataaggaacccatggatgaataccatctggtcctggtgatttactgcacagagtccctcaagttgctccatacctttctcctgagagactgaagaatctctgtcaaggccgttctctgctttgccataaaatgtgtccttggaacaagaatttccccattgtcttcttcaataaatactgattcaaagtattc

SEQ ID NO: 295240 - DNA, 1000 bp, Homo Sapiens
gcttggtaccagcatggtgcgccattcatccggacacaatttctgataaagagggtcacaactgggagaaacctcagattctacttgcttctcttctccacgttattagactttttttcccctcttgaattttataagcacactccttttaaaacaattaattaataacgagcactgggatttgatgtagaattgcgtatttgtaactgcaatggcactggttttcaactaccctgtaacaaggaagcaattctaaccagcaaaagaggcagacgtgtttctgtgcaacatcacaggcgtgtgaaattgttcagatattgagatatcaggagtgatataaattggaaatttaaccaaaaatattttccatcagtgaacaaagccgattttaaagtgcctcttgcatttttcagatctttctctttctttttcccaaagtcacattgtagtttctgataaaggaacacactgggaaaactaagcacatatttaatcaatgaaatttaaggtgtaaaaattctgcatttctgacaaatttaatgttcacttttttcttgatttaaatagagcattctaaaaatattacccctataggggataaatttttatatgcatgttatttttctttacaaagtgtgggctagtaaagagtgaaaaagaccttggctattgtacttatttcttgaaagaaataatagcatcttaatgactggattcaaatctctgcttatcacacaacttccgtacagttcaaagagaggacttggattgaatgaaaacagagagctggggcttcctacattcccctgtgtttgtgttcatacagaatatttatgcaatattctgacttggccataatctgtaattcctgcctattattctcagttgcaactataaattctagattaatggttataattttggtaaggcatacatgaaaagttatatgttcctgcttgaaaggaggatcattaaatattcattattaccactcaaatta

SEQ ID NO: 295241 - DNA, 1000 bp, Homo Sapiens
tttctttgtcctcaggaatgtgctggggccacaggcaggtcaggccaggctttctggggagtgaatgctctctgccagtggcggatggaactggtagacacgtcccccggattcctcgcctgcaagtgggatggtgccaggaaagttctacaccatccttcccaggtcccaggaggacaagcacagttgtccacaagggaaccaagaggatgttgaaaaatcctggttggatctgaacttggaaacaaatttgaggaatctattttacttaatcctactgaaaaattccctaatgagttaaagaagaacaaagtaaaagaagataaaaaagcagttggtacttgaaatgaagatcaaatcatcaagtcctatatgtcacccacagatctgagatcactgactcccagagacacccagtttctcagtgtcagtacacactgcctgggttagtaagcacaggctgagacctgggaggaattgatgaaccaaatgtgtctgggcttttcacttcctcggcatgagtcagccaagaaagcccacctctcctccccagcagcgtgcagggcctctgcagataaatgtgcaggatagcagacctgggtgtggtgctgcctggcactgagccagcccccagattctttggctgcagagtggcctggccaactcacacaggtagcgcccttttattcttggaaaaggaagcaccaggtggaaagggaggttaaaggagggaacacaacttttttccagacccctctgcccaggatgttaaaggttgctggaaaatgcctttggtggctttaaatgtcacagatgacatattccaggatggatccagcctccactggacttggcccctctattttgattcctgcctttccccagcctcagccctgagcggcataatatctacacggggttagctgcaggtggaactcagaacacagctcctagacaagtagagtgaggcctatggcttcatcatcaaaatgtaaaattt

SEQ ID NO: 295242 - DNA, 401 bp, Homo Sapiens; identical to SEQ ID NO: 119305

SEQ ID NO: 295243 - DNA, 397 bp, Homo Sapiens; identical to SEQ ID NO: 225030

SEQ ID NO: 295244 - DNA, 1000 bp, Homo Sapiens
ctggggcttctcctctcctggagcccagggcggctctggcccgatgatatggcagccataggtacaggtattgcaggtgcagcctttcttaagtaccctgcctccactctatagcccagctgctgctggagtccaggaccttagacccaggatgagcaaaaggatcccaccaggttgtccaggaccattgccagggtgaccccagagttcttcagacctgtgtctgatactgaatacagtgccatgggaccctgctccaatctaactgcctacaacctgcccgtccccctgctgcagggatgttgctgctacctcgggaggctctctgagactggtgtctggtcttagatgctgcacatagtacctggtgctagggtctaggggctgcccaaagcccagcaggaacagctactactcatcctgcagaggccttggcccagaccagctttccatccaaagcctcacctggtttccatgtccatctcaacagtctggccttcctgtgactgtagcctggcagccacaccctcagtaatcccgcacagtgagtccagcttctctgggagcttggccttcagttagcccagtccatgagagggcagggtaatgaggaggagtaaaggacctatcttctctgtccacataaggaagttgggaccacaaggtcttttatctccttgttactccccaaccccaccataacctcctactcagcacacagctgtatcctggtagattataaggtgagcttccagaacctggcaggaggctggtgtatccccctgcacagagggaagtgtatctgaatgttgtgtatgtggctgatatggaagacatacatgtatgcaatccatcagcgtttaaagaagaagattggctccagttcggaggaggaggaggaagattacagatctattctgagtattttttagagagttaatatttatatttttagtaattttctggtagaaggaaattgcacaataaaatgatttggttt

SEQ ID NO: 295245 - DNA, 1000 bp, Homo Sapiens
ggcagctgattagatggcacccacccagattgacggtgggtctgcctctcccagtacactgcatcaaatactaatctcctttggcagcaccctcacagacacacccaggaacaatactctgcatccttcaatccaatcaagttgacagtattaaccatcacagtgtccaaagagaatgaataggaaaaataaaggacatttatgacctcaagcaataatgaagactgccttgtccttctgcctagtatcagtagaggtcatgtggtacaaagtaacaaggtacttctcctcctcccagataggatgatgccatcatagacctagtgagagcctaaactcccatccctgccgatcagtaacaaagtacaacttcccctttgtgtatcagtgaaggccacacttacctggcagtaatgaggtagcacttctgccagtgtggtattagaggaggcctgctgaaacagaagatttaaataagatctggattctcatagcctaatacgcaatatgtccagaatacagtagaaatttacttatcataccaagaaccaggacaatcaagttgaatgagaaaagacaatcactgctcaactgaaacgaatctcagggatatgcgaacctgtagcaaagaatcaaacacctgtgtcattggagtcccatgagaagataaagaaggtgagactaaaacagtacttaaaacaatgtctgcaaatttaccaattttggcaaaaggtacaaattacagatataagaagcttagtgtaagcataatagaacttgcggcccatttctttgctgtcaaacttttcattatctcctcattcatgcaaagaaggaggaggtgaagaagaaaaagaaaaagaaggagagcacagaagtaggaggaggaaaaggagatgaagaataagaagcagcaacagtttagtgtaccttaaacaggatgaacccaacaaattccatgccaagacgcatcatatcatacctatgaaaactaaagcat

SEQ ID NO: 295246 - DNA, 1000 bp, Homo Sapiens
gatgaagagactggctcacattgcagaagagaacctgaggtctcagaacaagccgctgaccaccagtaatctaatggtagctatgatggcggtaatctccttggtggtgagtcttcctgtagcagaggcagatcaaaattacacctatttttgtaataggaggaaggaggaggaggaggaatgttaatgaatgtttctattggttatcgctttcctgccatctgcctggggccagcagcaggatttttaaattatgatacacaaagttggatggtttatgttcctgcacataacggatcaaaagcctttattcatgcaatcagtggaagaacatttcaatctttggacactattaaataccttgagcatggctatgttgtgacacatcgccagattaataaatttaaacctaataagaacctcctgttattaaacggtcagaaaagctagaggtgctaacctgggaagattatattgcaaacagtgctgctgtactacaaaataattcctatggaatcatcattgattgggcccctaggggacaatttgcagtaaattgtactggacagagtgaagattgtagagagactattttgcaaacgactacccagataatgcaccaaaattacatagaagaattgaaacaaattaccctattaagtgggaggagaacggtatggctcctccaagcccaaaaattattgatccaattataagcccagaacatccagaattgtggaaattaatgatggctcaaagcccaattcggatttggaaagcagaatgtaaaacagagacccatagtaaaaaacttcgatttgttgtagccatgacctctaatcagatggtcccattgcagagttgtgttaaacctccttttatgttggcagtgggaaaaattaatatcttacctgactctcaaaccatatcatgcctcaactgtcgtctttttacctgcattatttctgcctttaataaagataatagcattttactggtt

SEQ ID NO: 295247 - DNA, 1000 bp, Homo Sapiens
tcttcctgaagcaagcagagtcctttcagccacaagtcttaatagtttgtgtgagtgttaatctgcttctcatagagtcaccatgaaacacaccttagacagaataatacaaagctttaacgaagaccgcagaagaacttcatatctgagtaccatttgccatcgatttacaaataatgccagcatccttagcgacttcttcaggcaaggttatactgggggtttttgaggctaagcaggtgaactgggagtaccgcacacagcatggcttccagcctgaagtgactgtaaaatgccagtgaatagagaggctcaaggctgagtaaaggatcctgcacactcaacaggctcatccttctctgcacccgagttgttcatagagtcccagttacagagctttcagaaggcggaattcgtccacagcacactattgatgcctatcgaatctaaggaaattaactaagaagggaagaaataatcttcatagaaaagggatttgagaacccagaagagggtatgggcctggcagtgtgcatgctgcaaactatgcaccatcactggcctaaaacgcacctctgtgtgcatcatttactcacgtttaaaaatcaccctctacttgttctcctgtgaccctcattggactatatccagacagcactgaaagtgatagccagaaaaagtagaaacaacccatgtgttcatccactgacgaatggatcaaaacatgtggcgtgtccatccatacaaggggatattacccagcagtcaaaaggagcaaagaactgatgtataccacaccatggctgattctcaacagtatgttcagtgaaagaaaccagtcacaaaagcacatgtactgtatgtctatttatatgaactgcttggaggaggcacctagtggttgccaggggcttggggtgggggtggagggcaggaatggggaatgcctgccccctccatggggtttctttgtggggtgattaaaatgttctaaaattgg

SEQ ID NO: 295248 - DNA, 1000 bp, Homo Sapiens
cggaaaccacccgtaaatccaagaaaatgatggagggactctctgtagtattgtgtccggaattggtgggttcttggtctcactgacttcaagaatgaagccgcggaccctcgcgacggcagagaccaagagaaaatactgttacatggttacaagatcaagttcacaaggacataaacaagatggagacctcatcccgtttcttcgtttgtttcagggatctgtaacaaagtttattactgaccagcttgctgggctatcttgaacagcaagcttatggggtcctaagctcatgttctattttaaggtacctctcttcatggcagaatgacacagaaagacaaattcacagcacaaagttcaccagattcgttacagcttaagactagcctcatgaatcctttttcctattaattaaaactttgcaagagatagtgatttttaccattcccgcatccattttgcacagtgaaggagtgagagagagaagaattgtctgcgctatctaaggtgaggagttcaggggggccagagaaagacccacccattgcagagacactgaattaatagttcaggtggcagctggttggttgataaagaatcttttccagtcccatcagctctcaacttttcccctttggggagaaaaagttctccatgttccaaagtcctgtatatgcctaatcctgtcagccatagctgccagcaaagagtgcaaggcagattaatccaaagagaatagtggttaaaatcctatagtgccaagtccacttttgaccaagagggactttactgcaccccatcccatcctttacctaggtaaaatgtaccccattgcttacccaaagtcagccaattggtactgcagtctatttcctttggaatgggatagcaacttagctaaaaggttagcagatttaatttttttaagtatatttgtcacttaagctttttatttgcctttcacaaagtcgttaaataaaaatgccaaaatcttttt

SEQ ID NO: 295249 - DNA, 1000 bp, Homo Sapiens
aaacaaccggcatggccaagcatggtgactcacacctgtaatccgaacactttgggaggccgaggtgggtggatcacctgaggtcaggagttcgagaccagcctgaccaacatggagaaaccctgcctctactaaaaatacaaaaattaaccaggtatggtggcatgtgtctgtagtcccagctactcaggaggctgaggcaggagaattgaaggaggcggaggttgcagtgagccgagatcatgctactgcactacagcctgggcaacagagtgagacttcatctcaaaaaaaaaaaaggtccacctggtgcccctggcttcatcaccaatgggcttaccatggccacacgggtcctctttcaggcccttgtgtcactctctcccatgctgaccagctctggccacaaagctgcctcttccatcactgggagctcttccccacctcggagctgttcccgtcacctggattgtcttccctccacattcctgccacctccttctgctcagcctaaaggtcactttctcacagaagctgtccctgagcctcaatctaaattgcatccccacaaggacacaaagatgtgagcaataaacactaaggattccagaaggggggatggaggagagcaaaagttgaaaaactacctgttgggtactatattcactgcttgggcgacgggatcgttggaagcccaaacctcagcatcatgcaatacacccgtgcaacaaacctgcacacgtactttctgaatctaaaagaatttctaaaataaaataaattgtacccccttagttctttctgagcaccctctttttatcttcataacaccatcatttgtatttatggaatgattatgcatcattatttggtaaatgacctcaccagctagactctaaatcaaaaagggctggggctgtatctgacatattctcagttgtatcagcagcacctagcacggcatctaacataaatgatacttatttgtggtttggcttaa

SEQ ID NO: 295250 - DNA, 1000 bp, Homo Sapiens
ccgcctgtcttggcctcccaaagtgctgggattacaagcgtgagccaccgcgcccggcccaggcgcttcttttaactccagatgtgtgcacccgaaagttagccacagttacgtgatggagcaactccaggctgcagggaaacgtgagcgccggccgtggggatgcgcggggaggagggcgggccaccaatgcctcgcccacactgtgtggagtccacaggatggagacggatactgagggaagccatgagttgtggtctggtgactgaagtcacagagtaacggggctgccccaagctgggagccaaggtgcggactcctttctcacgggcctcctatggtgagatcacagcagaagccggcctgggcttacagctggtctccggccagagagggcatttctgtcctaccaaagactgcaacaattctggacagcgaggggcctggagggacaggattcagcccaaagtaccacaggccacacgtttcctccatgtcatcccctagcctggccatttaagacccaatgcagacagcaacctgcagagccagcctgtaacccaccagaagcccagagcacacttgggcttgcacctgagctaccacccagcccctccaaggaaacttctacaggcagaggcacctcaaactgtaaatccagctgaaggcttttccaatagcttgcaatttattatgacatttaagaattctagcataggccaggtgcacgggctcacgcctgtaatcccagtactttgggaggccgagacgggtgggttacctgaggtcaggagttcgagatcagcctggccgacatggtgaaaccccatctctactaaaaatacaaaaattagccgggtgtggtggcacgtgcctgtaatcccagctacctgggaggctaaggcaggagaatcacttgaaaccgggaggcggaggttacactgagctgaggttgcactccagcactccaccatgggtgacaagagcaaaactccatctc

SEQ ID NO: 295251 - DNA, 1000 bp, Homo Sapiens
tttcgttattggcagggaagagccagactccctgcgctcccaagacggggcgattgggagggggttctggagctgcctggggtcggcccggcggggggtgaccccgggccctcgccggtgcaaggagaacaggtggttcccgccggggcagggaagcgtggacggtgtgggctcaggcgcctggcaggcacacggggcctctaaagcttggtcactgtcacagatcgtgtggttgtttcttccgtccccgccacgccttcctcctgggatggggattcattccctagcaggtgtcggagaactggcgcccttgcagggtaggcgccccggagcctgaggcgggaactttaaaatcagacgcttgggggccgggctgggaaaaactggcggaaaatattataactgaactctcaatgccagctgttgtagaagctcctgggacaagccgtggaagtcccctcaggaggcttccgcgatgtcctaggtggctgctccgcccgccacggtcatttccattgactcacacgcgccgcctggaggaggaggctgcgctggacacgccggtggcgcctttgcctgggggagcgcagcctggagctctggcggcagcgctgggagcggggcctcggaggctgggcctggggacccaaggttgggcggggcgcaggaggtgggctcagggttctccagagaatccccatgagctaacccgcagggcggccgggccagtaggcaccgggcccccgcggtgacctgcggacccgaagctggagcagccactgcaaatgctgtgctgaccccaaatgctgtgtcctttaaatgttttaattaagaataattaataggtccgggtgtggaggctcaagccttaatccccagcacctggcgaggccgaggagggaggatcccttgagtccagaggttcgagactagcctgggcaacacagtcagactccatccttccaaaacaaacaaacgaaaataaaacaaacagaaaacg

SEQ ID NO: 295252 - DNA, 1000 bp, Homo Sapiens
agttgttacacttgaagcaggaagaccccttaccaaaaataacatctccctagggcatttctcagaactaaaatggcaaaaacatttgcatttacaaacaagaacaattactcttttggcagaaagaacaaggagtccaaaatttggtcctctaactgaggcccctacaccatttgagtcagctgactcaattacccaggggtatttttttccggtgttcatagtgtatgaatttctgttccctggctgtctctttggttgtctcactttctccaccccctcttctttctctttttcttgactcttttaatactgaacagctttttgtcttcactgcaaacagaaggggttaatgacagtgatgatgaagttgtcataactgacctgctggatcctgttactaaacaccatccccagcctgtaatcatcacaaagaacagagaaaacaaatagcaacccatttgtacttagctaataatgttcccttgcaaataattatgtctcccacccccagaggatttaaatgacttggggctcacgctgtttgtgaaaatagacaaaactccagcgttcccacaagattaataatgttcccttttcttcttttctatgcctttccatcgttataggagatgttgctgagatgggtgcattaaagtttaggctttccagagtttatattgctaacgacttgaaaggaaaaaagctaactagagaactgactggtcttatttgttttagatttcgggctttactaagacttcctacactcaatctctggactgtaaatgctgggtggggtgggagctgggaatgttattctgggaaattaatcacaaatgaaaagaaaatcaactctaagacttcaattacaagatttttgaaaatggcagaacatggctggccttcattcaagtccgaatatttaaagcaatccttgctaagaagaacttgattttatataaggagtcccttaaatacagttgcttctcaagaaaac

SEQ ID NO: 295253 - DNA, 1000 bp, Homo Sapiens
aagattagatacaccttaaagctttaaaacttgtctgtttgcatgactatgtccctctgtagcctgcaacctgggaggactgggaccctatcttatatatccgtatgtatctcctgtgcttgacacagaagagaatatacttgttgaatgagtgaatgaaatgattcaatgtttgctcaatgtgaaatgttgtcatcatcatcattaaggagaatattgcaagacaagttataaagctcatgtcacaaacaggtcctggagactctgggtcctctgagatcaaatcttgaagtgcaattggcatttccaggagtggaatccaggactcacacccaggacaagcaaagacacagtggcagtgagatcattacatatactctcctgaagcactcccctaccatccccctacaacacagtattttggcaactattgctagaaaaatgggaactacgatgtattaagtacctaccatgtgttacctcctatatgagctttatctcatttaatcttggcagtggtcttattttacacacaatgaaactgaggctcagagaggtgaagtcactaagtcaggtaatggcagatctggcatgcacacctaagtctatgtatcacctgagcccaagctcattgcttcttcctgaccatgcttcttccctttcagcccttccactcccaaggctccccactccatcctcatgataagccaaagttgagtactctggacaccagaataataagtgggaaagagagggacgggtctgatgagttaccatgaaatgagcaccggactgtgggtcaagaggccaaccccagctttgctgctgacattctgtgttgtcttgaacaagtcacaccctctcttaaggtctccatttcttcatccataagtgaaataaatctataaaaatatccacctgtcttgtatcatggactttaatgagataatgtctagaaaaaagagttctatggcacaaataaaataagtgaatagtaact

SEQ ID NO: 295254 - DNA, 1000 bp, Homo Sapiens
tagaagcctcctcctcttgctgccaccgtgggtatttaggtgagcagctgtagttgccggggaggcctgagcacaacacttaacgctgctcctgcagtttcatgggccattaacaatttgctaatattgttttagcttgcaaattagtgcagctccgtgggtaaggaaaggctctgtggctgtcatcaatcagatggaaattctccatgcatgagatgaaaaacgatttctagcctttgaggctcagacggcaattactgtaaccaaaaaaaatgggtggtggggagccggggggaagagagctccttgcaaagtctgttagcaattctatgaactttatttcttgatgcacgagagtgaaactatgaggatttccagccaagggaacttgattttcttagttactaataaagtgacaatctaaaggagccctctccaactgacctgctcccagaaggtggggagagaggatgtccgtgtggcaagaaggatgacaaagctgtgaggacctggtgactgtctttgctgagctcccaactggtgacgctcaccaggaggatgccacagatggctctgccaaaagtgcagacaaaccttggccttgtttgttggaaaccatgttgcttatcccccatccctcccacctttaagcaccaacattttttccttttaaatattgatacgagactgggctgggcatggtggctcatgcctgtagttctaatgctttggaaatctgaggcaggagaatcacttgatctccagttctagaccagcctgggcagtatagtgagaaccccatctctacaaaaacatttcaaaaattagctgggtgtggtagtatgcactgtggtcccagctgcttgggaggctgaggcaggaggatcacttgagcccaggagatcaaggctgctgtgagccatgaacgcccctctgcactccagcctgggcaacagagtgagaccctgtctcttaaaataaaagtgagactgttatgaaa

SEQ ID NO: 295255 - DNA, 1000 bp, Homo Sapiens
tgtctgaatgatccatctattattgatagtattgaattatgctattattgcattattttctgtttctgtcttaagaccagcctggccaacatggtgaaaccccgtctctactgaaaatacaaaaattagctgggtgtggtggcaggcacctttaatcccagctacttgggaggctgaggcaggagaatcacttgaacctgggaggtggaggttgcagtgagccaagatctcaccattgcactccagcctgggggcaatagtgagacttcatctcgaaaaaaaaaatttgtacatgtttactttataactttagctgctatgatgttgggtgcatatacatttataattgctatatcttcttgttgaattgacccttttatcattatgtaatgaccttctctgtcccttatgacagtttttgacttaatgtccattttctgtgatataattatagctaccctgctttcttttgcttaccatttacatggaatatcttttttccatcccttcactttcagcttctgtatgtccttaaatctaaaatgaatctcctatagatagtatatagttggatcttgttttttatatatatatccaggctatatcttctggttagtgaatttaatccatttatattaaagtaattatttatagctaagtacttactatgaccattttaaaaattgttttctgttttgtagtacttttgattctttcttcctctcttgtatatcttggtgatttgatgatttttttggtcatgatatactcaatgattatattatctttatggtatctaccacaggtttttttcttgtggttatcatgaggtttgcataacattttttatagttataatagtctgttttaagctgataacaacttcaattacatacaaacgctgtacacttttactgctcccctccttcactttatgctattgatgtcaaaatttaatttatattgtgcattcattaataaatgtttatggttatagcta

SEQ ID NO: 295256 - DNA, 1000 bp, Homo Sapiens; identical to SEQ ID NO: 225033

SEQ ID NO: 295257 - DNA, 1000 bp, Homo Sapiens
gaggcatcgcagaaggatgctaactagatgtcatgcgtcaaggatactacagaaggatctctttgctgacaaggagggtacctctaaggttccttcagatgggatggttctctgttcaccgtgatcactactatgcaaaggcctgtgggccatttaggagaaaagcattcagtccaattccacagacacagtgaggatgtaatatgccctaggcatatatgagtggatccaaggaggaaatactcagtcactactgtcaagaactcatgacctgctgcagggtttgccaaactatggcttgtgggccaatctggctcaccacctattttagtaaataatgttttactggaatccagacacgcttgtttgattacatattgtctatggctgctgagcacccactataagggcaaagttaagtagatagagactttatcacccacaaaacctaaaatatttgactggatggccctctacagaaaaagcctgcgaacctgtggtcttgtgggaggacactgctgggcacagttaactctaattcttggctgtagcatcttgaatagggtggcagtccctggctgctgagggggacagctggacggctgcctcccaggggcatttccatgacttgcaggcccagaaactagacttgggcatgaccacagagttcttgatggactgaagatgcccaaaccacagactgacttgtaggctagaaatgaacatgtggggtggaatagtccttttggggactagaataatttctagagagccaccctttctacatgatacggcgcacattcttgagacctgaagtgaagaagttaactttatatcaagttacctaccaattaggctagcgatttctctgtcttttaaaacattcttttaaagtcttgtcatgtttcatctttctagaattcatttttcacatcttcattcactgggattctggaccataatatatgtaaacacacaaaatactaaagattgaaaatac

SEQ ID NO: 295258 - DNA, 1000 bp, Homo Sapiens; identical to SEQ ID NO: 119311

SEQ ID NO: 295259 - DNA, 1000 bp, Homo Sapiens
ggaccgagatccagaatgttaccctcaaatctgaagcttatttatgagataaataaagctcatattttcaagagagataattattttaaaacttctcatttcaatgtgtaccttaaaaaaataaatacattttgggccaggtgcgatggttcatgcctgtaatcccagcactttgggaggccgaggtgggcagatcatgaggtcagtttgagaccagcctggccaacatagtgaaactccgtctctactaaaaataaaaataaaaaaattagctgggcatagtggcacgtacctgtagtcccagctacttaggaggctgaagcaggagaatcgcttgaacccatgaggcagaggttgtggtgagcccaaattgcgccactgcactccagcctgggcaacagagcaagactccatctcaaaaaaccaatcaaccaaccaaccaacaaaaaacatttcacatctccctgacgtagccaacattttctccaacattctcttattttgatggcagaagggcataactgtaaatctcagtttttatatggtattgtataatatagtggcatcctttgcggccagttgattgtgaagagcagtttgcctttacttagcttccatgaacattagctttaaatgctcattgacattaatgagagccagtttgctaaatctgtgtctccttcatgttcatttgctacttagttttgttgattccaagaagtcactaatttttttaaatcatagattctgatttcgaggtagcttcatttttctagtgttgagtaaaatgtgtgtgtgtgtgtgctttagtttaattaatactaatttttattcaaaatatatttgttgagcacttactctctgctgtggctgggcatacattactttctttccacagtccgttggttgaattgtcctgagcaggggttgacaaatgatggcctgtgagccaaatctaccccactgcctgtttttgtaaataaagctttatcagaacata

SEQ ID NO: 295260 - DNA, 1000 bp, Homo Sapiens
cttgcagtatagggagagaaccaaggaagacttcctggaggaaatggccattgaactgggccttggacatgtggaggtgagggatgagagtattccagatgaagagtccagcatagggaaggcccacaggaaggaattgtgctgtattaatgctgtcttagaggcatttccattgccagacacagatactcaaattacttcagagagagagagagagagtattgaaagggtttctgtgaatacctccacaactgtggttctcaaagtgtaatccctgggccagcagcatcggcatcacctgggaacttgttagaaatgcagattcccaggctgggtgcagtggctcacgcctgtaaccctagcactttgggagtccgaggtgggtggatcacctgaggttgggagtttgagaccagcctgaccaacatggagaaaccctgtctctactaaaaatacaaaaagccaggtgtggtggcgcatgcctgtaatcccagctgcttgggaggctgaggcaggagaatcgcttgaacccgggaggcagaggttgcggtgagccgagattgcaccactgcactccagcctgggtaacaagagcgaaactccaccgaagaaagaagagagagagagagggagaaagaaagaaaggagaaagagagaaagaaagaaaaagaaagaaagaaaagaaaagaaaaaagaaaggaaaagaaaaggcaaattcaccagagcctttgaatcagaaaagaacccccaggggctggtggtagcagtccttgcacaggccctccaggtgattctcatccagggaagcctgcgagcccttgaggtggaatattctcaggaatccctgagatatgtgaagaactgatggcataggctatttctagggaggaaatggggctgctgggtgcacagatgaggggaggtgggagacctctgtaattgtgtaccatgtgcatatattacctattcagagaataataaaacaatgcgtttaatcccc

SEQ ID NO: 295261 - DNA, 1000 bp, Homo Sapiens
gaggaagcctttattttccttttcctgggaaagtaactgtctcttggaattatctgaccgtgaacttcctcttctagcaaactcacatgaaagccctcactgttgagaatcccagctccactgtcaagcctgtttggggattttgcctcagctgtgggcttccctagagtaggttcaggggaatactcagcctgattatcttaaaattgaagaagtgccaccaaggccttcagatctaatgcagatccacagaccttgctcctggtacttgttcagcctgtgctggggagccatggtcctgagttcccggggaggctggcagggtcaagccaccctgcccaccaccctcccacttcccctcccctttcctctccagcattgggatccaaggaaaatctgcatgaagccaattttgagggtagatttgtgtggaaaataaatcattatacagtaagacctggggcttgaggggtggggaatggggagggaagggcatagcctgctcctccatgagtctgacatctcagaaactgtgcagctgccggacgcctgggtcaggactccaagaccccacctcttaaggacaagaaaatgcctggttcctcagaaaagaccctcagggaagaaggtgaaaacattacatccaaggattctcctgccacaactggattggaagaaaaggctgccgcatcatctcagcgaggagtgaaggaaccatgtcccggggaccgcgctcctccacctgcactcaccccctcacattctcttaagcaccctgtggcccttcgaggcctggcagaatggtggtgcccaccgggttgggccagggctcaacgggcaaagttgtgcacactaaaatatcaaatcaaggtgcttggttttaaagtaaatgtttttctaaagaaagctgtgctcttctgctgacccagatgagtagggcacagccctgtaactgcacttgccttctgtcatttggaatgaaataaattatgagaaaggg

SEQ ID NO: 295262 - DNA, 1000 bp, Homo Sapiens; identical to SEQ ID NO: 225035

SEQ ID NO: 295263 - DNA, 1000 bp, Homo Sapiens
aggcaaagatgagcagagccatggccctcttctttgttctctgctggatccaagtagagatgggatttcatcatgttggccaggctggtcatgaactcctgacctcaatggatcctcctgcctcagcttcctgagtagctgggaccacaggtgcacaccaccacgcccagatgaaattgtgctccaagtgttttccaaggttccgtatgacccatcatttgatgaaacaagaacagcagtcagatccattacaaagagagacacacaaaaaagctattcccaacagaagagcttgaacaatgctgcatttgcatcaggttcaaatgagcgagaggaacatttggctaaaatatttgatgaaattctactgcaggtgtttccaaagtttccgtatgacccatcatttaacgaagcaacagcagtcagatccattacaaagacagacatgagaaaaggaaccagcattgcttggaattctcctaaaccagaatatttccttggcagtgtggacaaaattcctgataaagatcacctttcagaggagaagaattttaaagaatcctgtctgttcgacagggatttaagagagcagttaactactatagataaagaaacacttcaaggagcagctaaaccagatgctcactttaggactatgccctgcgggcagcttctgcacttcctgcagaggaacaccatcatcgccgccgtctcaggggtggccatcctcatggccatcgtgctgttgctgcttgggttggcctcatacatcaggaagaaacagccatcggacatgtattcctgaccacagaaggaagagcagctccccacagcccttcagtcctgcctgacactgcactgaatgctcagcttgcccctagagcaatggggtggagatctcctctggcaaacacgacatataatatttttataatggatggaaagacatggtggcacaattctgaagaaaaaaatttcacaaaacttgcaaaaaaacaga

SEQ ID NO: 295264 - DNA, 1000 bp, Homo Sapiens
ctctcacacacacacacacacacacactcccttcataaaaatctcacaatggcaagtgtcttatatgagacacacagaggagaagatcctgtgaagagggaggcagagattggagaatcacagccacaagtcaaggaaggccgacaaccaccagaagctggaaggggtaagagcagcttccccgcgctgtttctagagggtgcatggccctgccagtaccttgattttggacttctggcttccacagttgtgagataatacactttccttgttttacgtcaacattttgtgtaatttgtctcggctgccacagaaagtgaatagaaatagttttccctcagcgcaacctggtgatgcacgtgttcactttgaaaacacgtcatttccacctgcaaaggttttaggttcctcaaagggactgtgcagagggatcgctgcaagtgaagtcaacatttggcctcattctgttagaacacctgcaagaggaggctcaggtgctgactgaacaaatcccctggctcttggggtggtccatgcctttaccgaatgcctcctttgttggggtcattctgctgggaagacattcccattggaagatactggacctttcctttaccatgtcaggcatgacactcctacgttaaaaaactgtccataccaagggcatgacaggcaattcatagaagaaagcaggatgatcaatggcctatgaaaggatcctcagctgtggctaggcgcagtggctcacctctgtaatcccagcactttgggaggccaaggcaagaggatcacttgagcccaggcgttcgagactggcatgggaaacatggcaaaaccccatctctataaaaacttagctgggtgtggtggcatgtgcctggagtcccagctactcaggaggctgaggtgggaagatcatctaagcccagaaggttgagactgcagtgagccaccatcgtaccactgcactccagcctggatgacagagtgaaaccctgtc

SEQ ID NO: 295265 - DNA, 1000 bp, Homo Sapiens; identical to SEQ ID NO: 119312

SEQ ID NO: 295266 - DNA, 1000 bp, Homo Sapiens
ttcattccctgggggcttttattcccctccttgaagccccagttcaaggcccaggaacaaaggggaaaggtaactgatctctcttttggtctttctctcccctcacttccaccccttcacctgcaggccctcctctttgataaatagaggaaagcccgtgggatcaggtacatatgtaaatactgctgacctcggccgcccctcctcaccgaaaagcagaaagcccgtttcaggtgcaggctgctccgtgcctttgagtgtccaccacttctattcccccagactgcttgggactcaaggccactcacttaatacccgtctcttgttaaaaacattcaggacaactattaaatagttattggaagagttaaagaccttctttcaggagtgaaacgtttttaaagctgtgcttggcataagtctttaaggcgtacaaagtagaatcagtagacttgcctgagcgattttgaaatttgaaagatttctccccatgaaatggtaatttaaaatagtttgtagatgttgttttgttctgtgatggctttttcaccattgtcacctaaagattctcaagaccaagctactaagacatttcatttggttagtttctgggtgatactgtgctttctgattagacctatttaatttatttttaactctgcaggagagttttcaaccttggaaatgtaagtgaaacacagactcaccctccttctgagaccttgataggggcagaaaggaacaaatctggctagcccccctcacacctggaagtttccctgtctaaacctgggtacaatgagcgtggtgggttttgtcaccttttattttattgctggctcaaggaaaattctttgaaatgaacatctattctatttcagtgtgcaatgttccagccgacttaatgggcttgccttatgcggagaggcagtcctgcaggacagagctaatgtgtggtctcccaggaagctcatcagaacacctcttgtcccttttcttt

SEQ ID NO: 295267 - DNA, 1000 bp, Homo Sapiens
ttctccacagagtatgaaggtcaaatgagagaatacatttaaattaaatggaaaattaaaatggtaaaaaatgcaaagctgtattgaaagttccgagcttctctataaggagctttttgactatggaagaatcctgtactcgttccccctaaatataaaaaaaaagttgaaggaggcagaagggagagtgatgcacgatgggcaaggacttcacctgctgttgctggctttgaggatggaggaaggaggccacaaacctagaagctggagcccctagaagctagaaaaggcagggacccgattctttccttgagcctccagaagggacacagccccgccagcaccttgactttagcctggtgagatcctcttaggacttttggcaatcagaactataagacagaaatggaagccactgagtctgtagctgtttgttgcagcagcaatagaaaactaatgcagggcccaagaaatcactggtgatgagatcgggaaagtgggctcaggaggtctggatctgtgatgagatggggaaagtgggctcaagaggtctggatctgtggtgagatgggggaagtgggctcaggaggtctggatctgtgatgagatggggaaagtgggctcaggaggtctggatctgtgatgagatggggaaagtgggctcaggaggtctggatctgtgatgagatgggggaagtgggctcaggaggtctggatctgtgatgagatgggggaagtgggctcaggaggtctggatctgtgatgagatgggggaagtgggctcaggaggtctggatctgtgatgagatggggaaagtgggctcaggaggtctggatctgtgatgagatcgggaaagtgggctcaagaggtctggatctgtggtgagatgggggaagtgggctcaggaggtctggatctgtgatgagatggggaaagtgggctcaggaggtctggatctgtgatgagatgggggaagtgggctcaggaggtctggatctg

SEQ ID NO: 295268 - DNA, 1000 bp, Homo Sapiens
gaatcatgcacaaactaaacagcagcaaacaaaaatacactgatcgtgtctacactggcatggtcattaacagtgacaaggtcttcatgtagtctggtttagtctgagaatctgcagcctggaatattcatctggactcaaagcaaatactcagctggtatgttccagtacacccatagccagaggtagattttcatgaaactgatcatatgaaacttatttatacttaggatcctggtagaggccctagtaataatcttttttcctgtttttttcttttctttatttgtgaaagtaagacaatttgtatttattttcttcatggacatattccaaattgtataaatgttagtctgaacaaatcatttatccatgtctagttgtattaattttaaaaatattgacctacttatataactggttaattagtcctcaggcattatccctacactctagctccaagggcttctccttagaaatcatctggatatctttatgatccagcaacggaaagatcatatcagcacagcagggagactgcaggactgtgccccaggtccaagggtggcatctgtttggattggttgttacatgtgctgttatcagtggttaaatattttgaatatcaccccaagtaaacctgaaaatctaactaaatttcaaaactctcatagctattgaaggacactcttaaagcaactccaactattttgtcaggatatattattcatatgtagaatagctgtatatgtgtgcatatatacagcatgtttgtgtgtgtgcatgtgtgtgtgtgtgtgtgtgtatgagtagaatagtcctaaaggaatgttcaacattaaacataaaatgccaaggaatcttctgaggtattggtattttctgtttcttatctgtgtgctgattatagaggtatgttaagtttgtgaaaattcagagagctatacaattatgtgcaattttggcattacattatcattaaatacaaagtttaaaaaaa

SEQ ID NO: 295269 - DNA, 1000 bp, Homo Sapiens
actgtctaccagcgggagctgttcagacacacctctggccagtccccacggcagtgaatctcctgtctctggacaacaatccaacagggaaagtggggaggagggttgggaactgaactctgttccacaagttcaaccactgcactccactaagcaactggcacagccagtccctggtgaaggcttaaagatgaggaagatggggtcagcgcctgccctcctggcctcaacacatcaggatggaggatttaggtgttagcaaaaagtggctcaaagttccaatgaaggacagggagcaaagggagacttcttttagaaaggagacgttggaacttggatatggctttagttaaggagctccaggcatctcaagtcagccctgagaggcagcagccgtgtctgcctctcggacagctatgccccagcctccagctcagcagctggcaggcagcaggtgtgggtgcaggaatgagtgaactcatggggaccagcctcggcaaagacgcacagtccccacagtgccccaggggctgggaaacagtgagcagccaccagcaagaccaaggcagtgcaagtggccacggctcaaggtttcccccaaggaggactatgtcacttaaggagtatggcctctgaagtaatgtaaatatggcctggaagattcagtcaacacctatttccttagtgcctacaatgtgcaggtgcagtttctgctcccggagttcagtcatgaacaatgccacagtcagccctgccaacccacctgcgtcagctcaggcacccagagcaatgtcacctggatctgccctccctcccatgtcactggactcgctgtcttttccctgcaatgaaacctccaacagctttccctgccactgtgggtggaagggccctcttcctcttcccaccttcatacagcttccaggccacctccttaagaatccaaagcaatctggtcacaccacttggtgggaaatacaccgaaatgttaactgtcctt

SEQ ID NO: 295270 - DNA, 1000 bp, Homo Sapiens; identical to SEQ ID NO: 119313

SEQ ID NO: 295271 - DNA, 752 bp, Homo Sapiens; identical to SEQ ID NO: 119314

SEQ ID NO: 295272 - DNA, 876 bp, Homo Sapiens
atgagtcaccagggctggcagaacaagacgccgggttcgatagttctctggtccagggcactgctgcgcgtgagggagaaggggtggggggtctcagtaccggcagggccgcggacaggctggggaccgcggataacctggggtccaggcccccgctgcgcaggaggaggggcggttcggttacctgagaccgcagcaagccgagctgcggggccgaagcttcctggcagcaaggcccaggcgtggcccgccagccgccggctccttcacgaaccaaaacacaaacactcaagtcccaccgccggagccacttccgctgcccggtgccggccccgccgccacgtcgctgcacgcagcgaactgcgccacttcgtcacttcccatcatcgccagtccgcctgctccttccgcttcctcgccccttcccgaatccctccccgcctaggtttgttcgcggggcggggcgaggcaggatgtcacgtgaccctgcgagtggctcagatccgaactggccgcctttctccccttcccccaccccaggtaaagaatttgagacacaagagattgagtaacttgtccgagatcacggctgtgtggtgcagaagctggattctgatctgcggcgggttggctccagaacgtgagttgttgaacacaattctggtgaaagacaacccaagatgttcgttaccctccacgggggacctactgaagatgtgctgctttagttgaatcccacaccacattcagtctctggcgaggcttcagccaccaccccctccccagcctccgccaaaaaaattgttttgataatttagtggaagaatattaaattgattttccttcagaataaaggctacttttcagtttgcagtt

SEQ ID NO: 295273 - DNA, 1000 bp, Homo Sapiens
cccgataagcaactggatccagtctccactccagaacctgaatggactttttgctcaatacagctactgctggccagtcagcttcatgggacatgtgccaagaggtcttccattccatcttgagtaaacaaattagagtcctagcaaaaactcttcccatgagccctttaactgacctaaattcaacatatgtcataatctaggaggaagcaccaaaatggaaaactactttaattcacagaagctaaaggagcaattgtaatgtaagtggtttctacaaagtatatatgcaggatcagcaagcatgggaaacgcacaccagcccctgcagggattctgggctacgagtgcatgaaggcagagtcgagactgtggattctggaagaagaatccccttgagagagcatctgattcaaaattcatccatatatgacttaaaagccacccaggttgtcatatcatctgtaatgattattcactagagccaagagtgtttatattctgaagatcagaacaagattcccaacaaaacagtaagggagcatttcagggagcagtgggaatatgtgtgggatgaagccaaattataaagtcattattagggtgggtatggtggctcacacctgtaatcccaacactttggaaggccaaggcaagaagagcacatgagcccaggagttcaagttcagccagagcaaccctcaggctgaggcaggagggtcacttgacccagggaggtcgatgctgcagtgagctatggtagcaccactgcacttcagcctggacaacagagtgagaccctgtctcaaaaaaaaaaaaaaaaaagtcattactttaaagggcttccaaagtctatatagaatgaactgccagcagcccaaggaactataaatggagctccatgtatttatgcaaatgttgagggcatatattcatttcaaagagtgtttggttcctgctgtattatcaatgcctgtcagtaaaacataatgtttaacac

SEQ ID NO: 295274 - DNA, 1000 bp, Homo Sapiens
ccagataatctaaaattttctcttgaacacatcagaaagctaagatctgggggcaaacgacttaatctaaaatctgatgtaagacaggcactttcaagaagagatggttgtaagcacttgtttacataggacagatgccattggatgccatgtaagctgttaaggagaaatcagctaaaatgtttaatgagttgctgaggtccaagtgttggctagcctgagaatatagagactacagaactcctgtgaaccacagacacaagcagaatttccacccacttgtatattcttctctatggacatcatcaaatgtgtgcacacacacatacacacatacaattgaaggtaaggcaagaagaatcttatgaaaaccttcccgctagaaaagacatgaatccccatccaggtccttctctcctatttcccctacagaacaaaagccctaagcctctgaggatgaaaaagcaaatcttgtcacccttagggactggttaagatccagtggaactgaagggaataaagagaacaaaaagctctccattcacgaaatagcggtagaattgcatcctggttccagaccatggaggtgtcctacagctgaggatagggcaacatcacttaatagaccccacccttaagtctcagagacacagtgcctacctaagattaaagctgaatcacaacagaaaatgccatcccttctaccaccaccaaaatatcaaatgctgagtcaataagaacagcaatctactgctaaaagaaggataaaaacatggagaaagacccctctctgaggtacaggaatgaagggaaggcctaaaggtaagagtggtgcaaacattgagaaaatctcctttagcaaaccatcccacacactaaacttaaggtaatactagaagaatttgaagcctgtggataaccatagcaacaaaaacacctaaacacagtttaactcctgattagatcaactcaagccttcacaataaagatctaccgaaag

SEQ ID NO: 295275 - DNA, 1000 bp, Homo Sapiens
agaagggtaacccagtcagagagggagtggcagatgacactgctgaaaaggagtttccagagagttgcacaccatgagccacgctgtctgtccctgaccacaacctccactggccaccacctcctgggcttcccctccctccacccacagaaaccattgctcaatctcaactggactcttgcaggcctatctctccctccaaacagagatgtcctggacacagagctgcagacctctaaccactcctggaacataaaaaaacccacggtggttctacagcatttacacctccagtttccctcagacagaatccagaagagaagaacctcgctgatctctgagcggagcatgtctccaagctcaggccagccccagaactccaatggcctcaactggagtggaaatccctcaaaggcacaaacccagttcctaccatctccctcagtgcctggcaatgtttgtggttggttgagtgagttaacaggagaccatcttttggccttttttctacctctgttttctcttactatacttgcctacatctcatcttctggtcaacaccaggtactcaccccatgagcttcttgtgaacttgtctggggcccaccggcctaaacatcatcttttttgtttggaattaagctttgttgaacttttcacaggtttcatttatgcaaatgcctgtgatgggacaaaaaggtctgcaaacatggaaacctggtctaaagatgtccaaagtaaactgtctgtggagtcgaatgacatttgagccctggacctaaactccaaatccaagctctttcccactgtgaccttgggcctctcaaggctcagtttcctcacctataaactgtagagaagccaataacagactcatccacactatgaggctgtgcataaggtcatgtatgtaaaactacttgctttgttgatcattctgtcccagataagtatgaattattatgcatcatttcattaaacaagaaagcttcactgtgtt

SEQ ID NO: 295276 - DNA, 1000 bp, Homo Sapiens; identical to SEQ ID NO: 225038

SEQ ID NO: 295277 - DNA, 1000 bp, Homo Sapiens; identical to SEQ ID NO: 225039

SEQ ID NO: 295278 - DNA, 1000 bp, Homo Sapiens
ccgcccggaccccggcccagaccggtcttcccgcacccccaatttccctcacccgggcagtgcaaacccgcagcgaagccggccgccggctgctgcctctctcgcggcgcctgccacatcgggccgcagaagcccgaggccggcagaaaccaaaggaaggtggcgcgggccaggggcggcgcgggcacgattccttccccgcggatctggcgggggagcagaggagggagcagccctgcccggagtctcaggctcccgccagccccaatcccgggcgactgcgccgagcgcctccggagtcgcgggaagctcctcctgctccgcggctggcgccagttgcacggtggccgcccccaaattcgaggaggaaggtgcaaagtggtgggaggctgcgggtctcccggagggtgaggcgttggggaccaggcgggagcacagccgaacccctacctttcgggcggggcggacaccagccgcgcgccctcgccgggcgccgggaccggaaaatcaccgcgaagggagggacgaggaaaggcggcgggtggcttcaggacaaggactttgtgattacattgggcccatccagatcatccaggatcatcttcccatctcaagattcttcacttaatcacatctgcaaaattccttttgctgtctgtgagatatcggtgggcgaggatgtgatgcctgaagatgtggcatctaccttgaaacagtcaaggacctgaggatgaagccagcatctgaggaagacagacagaaaggatctggatacatcatgagcctgaaaagtatcttgcatacacaactggcagcacagaatcctgacaaacctctcatcagaaatcaaccacagactctttatgctcttaccaaaatgctggctttgagaactaattatgaatgaaaattactgatgtgattttcaggtgagagaccctattagacaaaattttggattcatttttttctcttgagtaaaacatggggaaaaaatctt

SEQ ID NO: 295279 - DNA, 1000 bp, Homo Sapiens
gtggtaaattcagcgtatatgattcacattatacctgggacaggccttcagtatttggcatcacctttacatggagcacaaagatgatgatgatgatgatgtgtcttttgccaaatggatgagcagcttctggggccacagctggagagaggaggatcagagaggactccgggaacgccaccgactgcaagccaccagtcacaggaaaacctccctgccctgcccacttcctgtgcttcccagaattccatcatctgactgccatcctagaaggcattctcatgaggaccaagaatttcgatgccgtagccacgtacgggattacagaaaatactcagaggatgggtcattcaaggagccactggaatcaaaaggaagatcccattccaaaattgagaaattttcagagtcctttgaacggcaactgtgctttagaaccaagcgttctgcctctttgggacctgaaagcagaaaggagagaaatgaaagagaatgcctgaggatggagataaaatcccgaaagaaagtagaggaagaaaggagctctaggaaagaagagcatggagaagcacacatggctcccctgtttgaaaaagggcctgaataatactctgcttctgcctcatgacatcagatgctactgttttggtttttttctttgagccccaattcaccatttcaggatgtggatgggggcggggttgggggtaaaaacagctataaaaagcaactgcagatgctgactgactgcagtgggcagggtatgtagctgctccaagatgacttgcatcataccccaattactgctggcatcttagttgagagtataatctgcttggttgcctttttatgggaataaagagaataaaaggtattttaatagaataaagaaaaatttgaaaatataatggaaggtatttaaagagccacccacatagcttcaccaacccttctcacacatcaactcataaatcatcttaaataaaagtcattggtatga

SEQ ID NO: 295280 - DNA, 1000 bp, Homo Sapiens
ctctaccagaaagatatcaacaaattggatggaattcagagaacatgacttcctattatccttctcaaagttattgctgcagaggaaagaagcatacatcttttacccaccaggaaacccccaaagcatctattaccataatagccatgggaaacagaaggcacctcaaataaaggtggggaaaagaatgaaagaaatggctttggcctgtgcctgtttgacctctgagagatactttttgcaagaaattgttaagttttggcccaaaaagtggtcggtcttttatccttccttgtggaggccaaactgcaaaccaggatgaagaaaccatcagtggcagtttggggaggtggaggagggactatctagactcagtgaatcaccaaggaaacatgaggcctatttctctgtgaagctgaacttcaaaaaacaatctaagagatacaaagggaaaagtgtgactgctctgacagcaaaaacaagcaaatatctccagaggggattaatccttctgcttcaaagtaactaaaacaaagaaagctgagccagcttcactggaaacaacacctgtccatcagacaaggatgagctaatcaaaagaaaacactgcctatgtgcacgactcagcagcctggacagctaataccaaggaacacgttttcactataaagattcagctttcaaaatccagttccctcttgtagagccacagggttaaaagggaccttagagatcatctacatacaggccaaaccctcaatgaatgccagtgttcgccttatgttcttcttgccggactcttttctggcctctgttctgtcaggatgtttcctgttttgcaaaacagctttaatccttgagtatatttaattgttagaaaacagttcctcaaatttgaccccaaatttaagtctaatttatgaagaaagttttgcctttggagacaggtttaattttacttccatgtggaaaaccttcaaataaaatgatgactattgtg

SEQ ID NO: 295281 - DNA, 1000 bp, Homo Sapiens
ttgtgtcagcctcactgagaacaaaaaaagcactcctttccccatgattaacactcatgtgtcaggaaagtacagtcaatgtatgctaaaaatccacttgaacaattagctcgcttttttccctcatttgctttcagagtaaatgtgctttcagagtattaggtcggcctaatatatgatacattttaagaaggggaggaaagcgcattgtataccctgatgctgggacccaatagaagacaggccccctggctggcctttggttctccctggagctgacaaagggaaggggcttggaaagcagccactgtccccgcctagtttgggcctttacagacacacctttccttttggcagctgctatggcacggattctctatgccagcacgaagctggaaaacctgcctacctggctggtgaaatgagggtggcagctggaggaaacaggcatcttaggagactagaaatgtccttcaaagggacttcagtgagtgctcaggggaccaggggtgactgtgttaagaagggttagaggttgagagggagccatgagcttgggtcatcaccccagtgagaccatccaggcacacagctcccaggcttgggaggccgcctccagtccaccaggaccctcagggagctgtgacttcattgaagctgggtctaaaggcttccttcaaggctcagcaaactgggttttcaaagatttttgatccctgaagctaatttacacgttatgtggggccatggcaaagacttggccctgaagtggacagaaagaggctgtgctgagtgatgaatgagactaaacagtgttctcatgcttggtgattttgatgagaacatactacataagagttaagagcattataattccctttatcaccatataaacatgtcacttatccggaaagcatacaatttatttgtacatgagaatgtaaatttaaaaattttctgaaaactagattaaatcttgagaagcaattttcaagtaaac

SEQ ID NO: 295282 - DNA, 1000 bp, Homo Sapiens
tcagctgacaccaatagctcccagcacagccagggtattctagaggtgtgtggtgtcaggacagcctgtgcggcctcatttatttacctgagtcatctgaacaaagcggtgactggctttgcctggctctggcaaggactcgcaacaaagccaaagcctcttcctccacggcctttgctcctgcagcacagcactggcatctttttagcatcatagacactgtcacgtggcaatcaatgacagatgaactgtcccttccctgggccacaagctcttcaaggcgggagcctcagcccagtttcttccatgtctccagcgcccagcacagggcctggcttctagctggtttctgatgaataaacgaatggctatagagatgtactcttcaaaacacaaggggcttctatagtggcaacatgttcagtagcacagtgctgtattggttctttacagcttgcaggacccaaagaaggaatgatttttgtttcccgggaaaggtgtacctcgtgggggcactgctcaagggaaggtgcccacaagttggggatcaagggaggcacaggttgatcaaagcccctggaattgaaatggaggtgttcatcctgcggaggctccgaacatctgaggcagagcctcgattctccaggaaattgactttgccggagaacaaggctggggaaggcaggctgtcctaggggaggagtcgtatttcagccccactgagaccccaaaggcgcactcccatgctttaccccagctgtccaccagggggcaggcagaggcaagagaagaggaaagcgggcggctggtcaggcccagcacatccagcctggcatcccacacgctgggctgcctgactcagacaaagccaggccgctcctcctgcctgttgtggcctctgtgattttatatggtttggcctgtgacatcagacaccacgcgaccatggtaaccaaagtatacagcctggagtgaatgttaataaacaggaaagaaatga

SEQ ID NO: 295283 - DNA, 1000 bp, Homo Sapiens
ttaacttccaataactataaagtcattttgtttactaatgtgctaaataaagatatgggctctaggccaggtgcagtggcccaggcctgtaatcccagcactttctggaggccaaggcaggtggatcacctgaggtcaggagttcgagaccagcctggccaacatggtgaaaccccgtctctactaaaaatacaaaaattagccgggcatggtggcaggcacctgtcattccagctagttgggaggctggggcaggagaatcgcttgaacccgggaggcggaggttgcagtgagccaaaatggcaccactgcattccagaaaaaaaaaaaagctatgagctctatatactgcacattgcagtacatccaggtcctaggcttttattcagtaaattacagaaaatattaaagatataaagcagaaagtaaggcaatattaggccttagtcaatctcagatagcttcaccaattcagctccttaaaaggttgcttatgaagtgtgaattgtagtggtagctactgtttcatggtggtaaatattcgttttgactttatgtacattttctattaaacattggagtcatcctgatagacatctttgtaacttcctgtcaaaacaacatgtgggacaggcgtggtggctcatgtgtgtaattccagcactttgggaggccaaagtggaagaactgcttgagcccgggaatttgagagcagtctgggccacaaagtgagaacccagctctacaaaaaataaaataattagccggagtggtggctcacacctgtagtcccagctacttggaagactgaggcaggaagattgcttgagcccaggaaatcagggccacagtgagttatgatcacaccactgcactccagcctgggcagctgagtgagaccctgtctcaaaaacaaacaaaaaaacccaacgtattatgaattatttttccatagcagtaaatgtactatatttctattaaattattgtctttaaacaaa

SEQ ID NO: 295284 - DNA, 981 bp, Homo Sapiens
ttgcgggaaaacaagcttaacacgcccactgattctacattatgctcctacctcccggcagcctctccaggcccagaactttctccagtcagcctctacagaccaagctcatgactcacaatggcctatttaggcccataccctacgtcacggcagcctccgcagatgaggctactgcctcacaacagcctccacaggcacagctccatcgttacaatggcctctttagacccagctcctgcctcccagccttctctccaggccctgaactttctcaagtcgacctcaccaggcccagctcatgcttctttgcagcctctccaggcccagctcctgcatcttggtggcccctccaggcccagcctctgcctcccgtcagcctctacagtcccaacgtctgcctcacagcagattcttcacgcccagcatctacctcactgtggaccccccaagccaagctcccaacctttcagcagcttctacacacccagctcccgcctgccagtggcctcttcaggcccatggggctcattcctgacaacggcctttccaggcccagtttttcccttccggcggcctctccgggcccagaacctcctcaagtcggcctctccagacccacttgcaccctccgggcgttctctccgggcccagctcttcttcctggttgggtctccaggcccgattcctgcctctcaacaacctctttggactcagtgcctacccatctcctggcggccttggtcggcccacagcttcctcaagccaagctccccaggcccaggtcaggcctcacggtggcctctccaggatgagctcctgccctccgatggcatctccaggccccaaatggtctccggtcggtgggctcctccacgccaaggttgggcctcccggcgaccgccgcaggcccaagttgtcctgaagtcgggctctcccggccctgcctcccagcaagtaagcaagctcttttggctcaac

SEQ ID NO: 295285 - DNA, 1000 bp, Homo Sapiens
gtagggtttttctccagtatgaattcttactttcattcagggttgtggaccatccaaaagctttgccacattcttcacatttgtatagtttatttccagtataaattttcttatgttcattcaggtttgtggatcatccaaaggctttgccacattcttcatatttctagagtttctctccagtataaattttattatgttgattaaggtatgaggaccacttaaaggctttgccacatcctttacatttgggggttttatctccagtatgaattgtcttatatttattcaggactctggaacgtctaaatgctttgccacactcttcacatctataaggtttctctccagtatgaattttcttatgtttactcaggtatgtggaccatccaaaggctttgccacactcttcacattcgtaaggtttctctccagtatgaattgtcttatgtttattcagggctctggaacataaaaaggctttgccacactcttcacatctataaggtttctctccagtatgaattttcttatgtttactcaggtatgcagaccatccaaaggctttgccacactcttcacatttgtaaggtttctctccagtatgaattatcttatgtttattcaggtctgtggaccatccaaaggctttgccacactcttcacatttgtggggcctctctccagtatgaattctcttatgttcattaagggttgtgaaccgactaaaggcttttccacattcttcacatgtgtagggtttctctccagtatgaatactcttatgtttattaagggttgcggattgtctaaaggctttgccacattgttcacatttgtagggcttctctccagtatgaattctcttatgttcattcagaactgaggacctactaaaggctttgccacattcttcacatgtgtagggtttctctccagtatgaattctgttatgtttagtaagggttgtggacctattaaagactttgccacattcctg

SEQ ID NO: 295286 - DNA, 1000 bp, Homo Sapiens
agcagcctggcattgtagaaaggcagaggttgactttagtttggtccctggctttgtcctttatttgttctgtgacaccttggacaagttttgtgacccgagtgtcagtttcctaggaaccagtgacaatgatcagagatagggggactcaagggtaagtaaagtgcaggatgaactgcagcggagcgtgtgaggtgcctggcaggtgtcggccacccagtggcgctcgaagcacctgctgctccctccttcctcgctcccagctgccttctctgctgggagctctttggagaggagctgtgtgactggttcatcctgtccctcgaggagctaccagttcagtcaaggacattgagaagcagcggatggtgacagtgcagtgtgacagtggtgtgctgtgggagccccatggagcggctacccaggcaggaacgtcagggaggcttcctggaggaggtggtgcttcagatgagacttgaaggagcagaaggtgtttgctagacaaaggggcttgcttggatgaatggtcttcagagcgtggtcccagtaaggaaggagaccactactactcttgctgccctcctcccccgaccttgcctagtttacaagacaggaggaaagagagaaagcaaaaagttagaaaaaaaaaaaaaaaaaacagaagtaagataaatagccagaagaccttggcaccaccacctggccctggtagttaaaaaaagtaataataataatatcgacccctgacttaaactacttgtattatctgtaaattccagacattgtaggaaaaagcattgcaaaattttctgttctgttagctgattcatgtagcccccagtcacgttccccatgcttgttcgatttatcatgaccctttcacgtgggccccttagaggtgtaagcccttaaaagggccaagaatttctttttccgggagctcggctcttaagacgcaagtctgctgatgctcccggctgaataaacctcttccttcttt

SEQ ID NO: 295287 - DNA, 1000 bp, Homo Sapiens
ctttgcgattttgcaaggatgtttgtgaatgtactttgtaactcctagaaaataggcaaaaaaccgtgagtggatgtagtcgcaccgctggcacctgtaagaacgcgccctaaagctgtggaactgctattcaggttccaggcacacgtctcaagcctcaaacctccaagagttgccttagctgctcattttactggtaagaagacggaggtcaagcctgaagatagtggctctgctgttttcttaggctgcttgaagctttagataagcaggaaaattccatcaaagaaatccctgtatgtaaattgggagaaaaagatatgatgaatattaatgcagaggcctctgaacaaatggaacctccattttcacatccagcacaggatcatttgcagccagacaacctgagagtcaaccccaactctaccttttactaattgcatgatattgggcctcagtttgctcatctgtaaattgggtgcagtgatagaatctatcccacagggttttgctgagcattaaatgagtttaaacttgtagatggcttagaataatgcctggcatgtagcaagtacgcagttactggcgcctggtgtatatagtaagtactcgatatacattaactatttttcaaagacaccacagctcacctgggaaggaatctcaggtatttgcctgagattcaagcaaacaaatatggaagctaccaaaggctcatgaagcctgaaggatccttgcagagagatgttctaaatgttgcctagaaaggcagtttggagggaggcctctccagtcagaggtctggatgctaagtttagctctgccacatattagccaggtaattttgaagtaataaacaatctctttgtgcctccatttcttcttgtgtaaaatgaggggctgttgtgaagattaaataaatacatgtaaagcatttaaagccagacctggcagaaagggtgctttatgtttgctttaaaaatatatatgtacaacattt

SEQ ID NO: 295288 - DNA, 1000 bp, Homo Sapiens
tcatcactgctgaagaacttctaatggtgacttccatctcagctttctcattgccaactattaagaatgtatggattatccagatgttgcaacacagttgtgtttttggcttcaccactccctctgggctgtgattctgttttttttttcttttattgttgatgttctttgtttttaatatgagaaagatttgtgtattatacttcagttttagtttccttaatcacagactagacaaaagaaaattggcttggtttcctattaggaaaccacttagaagccattatcagaatcgtagaccatcactgtgaactatatccaggtgttgtcatgaaagtatgacatcctagagtggaaaagcaacctgggtttccgagactgttttactcttttatctggaatgttgttttagctgctatggctccaacagggtgaacatagcattttatttaatctaaatatctttctgctttttttttctaagttgcaaaaagtcaatgaccacatttcatctctagcctctcgtgaggtttaaattacacaaggaagaaatatttacaatgtcaaatgctgaagattgtttggagtcagaagtgattgttcagaatctgtcttaatgacaagtcagaaattagacaaagagatgaaatgctaagcccccaatgtgttctgaaaagttaaataaccatcttacatcagttggtacgtttttgtaagagtccaggatgtaaaagtgataaataaattaatgaaaagcacttttaaaaatcaacaaaagacatggcaggaaatggaagaaaagagaagcaagggatgcattctaatagatattaagaacaagccaaagtgcagtatttgctctagggttttactgttcattgtgtcaagactcacagattttagatattttttttaattgggaaagtaaatgaggcaggtagataagtagaaaaagttgtgtgaaactcatcagtactgaaaataaatagttgtacttctc

SEQ ID NO: 295289 - DNA, 626 bp, Homo Sapiens
caggatatcggccatgttaatgagtctgatgttgctagtatcacaggcaccggaaaatatgcacattatgctggagcattagaatgcaacagaaagagccctgggcttggagtatgcagaactggttcttgttacaactcctcttactagtgggctgctatggacctaaagtggagggctttgaaatttcctgcttaattgggctgcatgtcattgctgtccttagaagttgctctgggatgcaggtgctggtttcttggatctcctttgctggaattttgcatgtcttgttttgttgttgtaccagctttgtggatcagccaacatccttggcttgccctgtggggagtggggtgggacacatcttggattgctctattccagggatgtccaacattttggcttccctaggccacattggaagaagaagaattgtattgggctacacataaaatacactatcactaaaatagctgatgagctaaaaaaaaaaatcgcaaaaaaaatctcataatgttttaagaaagttgatgaagttgtattgggccacattcaaagctttcctgggccacatgcaggctgagggctgtggattgaataaacttgctctattccctttgcagtag

SEQ ID NO: 295290 - DNA, 1000 bp, Homo Sapiens
agtagggaatggtacattaaagcaacattgtgatatcattacacaccctctaggaatggctaaaattaaaaagactgaaaacatcaaattttggcaaggttagggccaattaaaattttcatacattgctggtaaaaatgaaaatgtcacaaccactttggaaaaaatttttaaaattttttacaaaacttcatatagatccattatatgacccaaccattctactgctagacatacactcaaaatgaagaaacacgtacaaaaagatttctacaagaatgattttagcagcttcacaacaaaccaggtgttggtcaataggaagatgaaaaatcaaaatatagtatagctataaaatacaataatatttaggataaaaataataaatgcatgttataactaataatatcatgactgaatctcaaaaatattttgctgagttaaacaagctttgcacaaagtagtatattatgtatgatcccatgtatagaaatatctagaataaggaaaaacaaattatgatagaaaagatgttgcttctggtgattgggtggagctctgatggactgggaaggagcatgagggagctttgtgggttgatggtaatttatgtaccctgacaggggtttggtttacatagctgtattcatttgtcaaaacttatattaaatggtgcaattaatattgatgcatttcattgtatgtaaattttaccctaaaataattttagacaaattgtaaaacctagttaaagacatatatgctgatattttcagggttacctctcttgatgtctgcaacttactttgaaatgcttcaaaaggaaaataggataatggatggaaatagggagagagaaatggatcgatgtgtaaataaaacaaatctatctaaatgttaaagcttaattgtagatgatgaatgtaggagtgttgaatgttaaattctttcaacttttatgttgaaaaatcgtcataataaaatatttgaaaaatgtata

SEQ ID NO: 295291 - DNA, 1000 bp, Homo Sapiens
tgctgctgccttttggcagcttgtacaggctcagctcctccctcacggtggcctctttcagcccaactcatgcctcttgcaacctgcccaagtgtcagctcctgtctcacactggcctgttgagggccagctcatgcctctcgtggcctcaacaggcccatcccctgcctgtcggcggcctctacaggcccggcctctacctcacagtgggctctccaggcccacctcttcctcaccgtggcctcctggggcaatgctcctccctctcgggagcctctgcgggcccagctcctgcctcccagtggcctctgtagaccaagcccgtgcctcagggcagcctttccaggcctagcgtttgctgctttgcatcctctccaggccctggacttcctccagtcggcctctccaggcccagctcttcctctcggcggcctctgcagggccagactgtcgtcaagtcggcctgtccagggccagctcctgcctcccggcggcctctgcaggcccaagtcgttctcaagtcggcttccccaggcccagctccggcctcttggcggcctctccgggtgcaaaagttcctcgagtcagcctctccaggcccagctcctcctgcctcccagtggcctctttcggcccagcccagctcttcctcccggctgcgtctccaggcccgactttggcctcccaacaacgtctttggactcagctcctgcctctcaaaggcctgcacgggcccggcctcggcctcggcctcacagcggactctccacgcccagctagctctcgcctcactgtggcctccccagtccaaagctcctgcctttcggccacttcagcaggtccagctcctgcctgccagtggcctctttaggcccagctcattcctcacaacggccttcccaggccccgtttttcccttccggcagcctcttggcctctaatttgtttatcttttgtgtataaatcccaaaatatggaattttggaatatttccaccatt

SEQ ID NO: 295292 - DNA, 1000 bp, Homo Sapiens; identical to SEQ ID NO: 225040

SEQ ID NO: 295293 - DNA, 1000 bp, Homo Sapiens
ttaagagaaagactgaggtttttaacattaattttaatgggaatactcaatgattgatgacaccagttttggcttatgaacagaaattttggaactaattatactcatttatcaaagcatgaggatggacttcttcatgaatttcaaattatttcccaatgcatagagtatggatatcataataatcttatgataccaaagtagtaattaatgtttggattaagagcaggctacataagggaggtcttggacttacggtctcatgaaaaattacagataaagtccattaatcagtatttattggtcacccacagaacaggctgtgaaatttttcagtttaaaaattactttcacattttctaagggaacttgatagattcaattttctaaattaaaaaaaattaacagccttattgaggtataactctcataccatacaattttaatctttaatttgaagtggttacagtgcattttcaaatagacatatgtaagttagaaactaaattaccctgccagcttaacaaaacataaaacagcaattactgtttattaggcatcaacttaggtgacaggtacgataagcagcatttaattgatcccaatcctcccagcatccctgaagagtatatcttccattttacagagagaaaatcccacctcaaaggatctggagaactggccagagatcaccccagaagagagtacaggagccaggatttggacgcaggtctctctgactcaaatccttttctctttcccttacttcatcctccccctcatctcctgaaaattagaagccggatcctggaatacacacagaaaaccctccacccattttaaggatacatcaagatcaaaactcattgatattgtaatcttactagtttgaactttaaaacattttactgccatatggggactggcttcaaagaaatgttttagtggtgttacgtttaatgccttgtgtttatgtagaattacatatcctataaatgtt

SEQ ID NO: 295294 - DNA, 1000 bp, Homo Sapiens
cttgtccgtctacctcattcttcctggacacaggacaagaactcgggacctgcaaaagggctgtaacacaaacagggctgaaacacatcccttgctcgccatattgtaggtgacaagaaggagagacaagagaaggagagaagagctgcagcccttctgggagcccaggcctaggagatccctgagccagggctatgacaccctctttggggctctatggttcctggtgtctccaagcttccggatgccactgcattcctcagtgccagccgtggaagctgctgtggtacatttggtccagccacagccttgcagggagctggctcccatgctggtgcctatagctccccgccccaccacagccagcttgcctggccatgcacagtggccagacctcatgctcactcatgcacccttcgccactccgcacctggcccgcccttggcaggtatgggattcagggatccagccccagccgattgcagcctgccaggccgagtgggtggaatgagacctgtgggcccaagcaaaactcaggcaaaggcaccactggccacataggtttccagctggtgaagtgacaccctgagaatcccatgacattatcatacactcttcttaaaaactgaacccgagggaaaaaatgatacccttgaacggtgaggcataatgaaagtttatttaatgattcttgtatttattactactgctttactgcctgtagcaggtatcacaatgtaccgatttattaggctgtagttagaaaacaattgcttctttacacattataaatgtaacctggcattatatttaagctaagaacatgcatgtttttaatactcgaatttcaactcaagagaaaaaaaagttctatgttacactagtgtgatggattttttaattactaaatgctaatattaagggtaatttgaggtaaaacaaaaaataaaaagttcatgtagtaatcaaagcatctactctaggttgttaaaaataaaaa

SEQ ID NO: 295295 - DNA, 1000 bp, Homo Sapiens
atagttttgttttttgtttttttaaatgtatttaagcatttttaggtgttttaaattttatgtgtgtattctaggaatatgtactcagattctttcattaggcatgtgttattaacaacattcatcttcttaaaggctgaaccaactttgcgcgttttatcaacagatattcactgagcacctaatattgccaggctgtgctcaaggcagtgggattcatcagtgaacaatacagacaaaaatcactgacctaaatggagcttgaagtttatatctaaatcattcaaagattctgtggtggaaaagaagttagaaatctttcagctgcaaaacataagccaaaatacaactcacctttggaatcagagaacttacaggttcataaaattgcgaagcccagatgtgcacctgaggtgagacttcgtccagcttctgtctgtgtcactaatctttcctgctttcagcggcatccctcgcaggcccgtgttgttcccaactggtgttcccacctggcggcaaactggcgactgtagttacagatcttcaacatcacactcaggagaagaaggagattgcttttcaggagctcctgcaagccggagaataaaagctcttatttattcagaagccctaaaacataccaccttggctatagactatttggacatttctaagcaaatctgtctgcaaaggtgctgagctgtgttgatcaactgaagcccgtgacgtctcatccttgcagttggagcaaatctcaaaggcaaagccagtgttaaggagagggaaatcagacttcatcttttgatgggagaagaaaagagtttgcaactgtctctattctgccactggcagagaatccataggtttgctaaggatacagagccacattgaaaagataaaccttgctatgctggagattacttaggtgggccaggatttcttgaaaccaaaactttactgaatcacctcttcaccatctgtatgccgtgcatttgctgag

SEQ ID NO: 295296 - DNA, 1000 bp, Homo Sapiens
ggcaggaggagacactcatgatgcgccttttggccatagtcactgtcatggctaagaaagcaactccaacccacacactgcaaatatgaaggaccacaaaaggcacgcaggctctggtttgcatagtgaagatgagcgtgtctgttcctaagcatgaaggaggaccacatgaggatcctggacacctactgcatgaatgtattcaccctttcaggtctagggacctgggtaccttgggacagagggagtgcagagcagagaaaacctacctgtgcaactgagaaggccgctcaggccacggggacagggcaggaatgctctcaggagtgtcccctgcacctgaacttgatttcacgccatcaccttccgcctcttaaccagcatctcctggacagtcagccgagtgtttccatgataccagccatacctgatgccaggagactcgctacacttggaagctcttcaagatgtgtattgaatttgcagaagtcctcttttccaaatgatcaatgaatttcaacaccagagtcttggagtcagacaaggaaactttcagtttaacatcctcccaggatgtcaactggaagatcatgccgttcctgacaattagaagaggagttccctgctcaagggaagcacatggtagggttaatgctacatggaacatgaactttgaagatcctcattttggtttccatgaaggtggtgaaggttctccaaataaaagcatttccaataagggtgaagagtagagagcagtgatgtttccaaaaagtttagaattcctccttcaaatgacttcctaatgaatatcagaaggcaatgtgtggagtcacaagtcattggaatggcagccactgtgtaatttcaacaaaacgcttcatccctctgagcctctggtggctcatctgtaaattaaggcaaattctatcttcaaatttcttcactctttgatcaacaacttttattcaactttgttgaaaagatcaaaaaaattgca

SEQ ID NO: 295297 - DNA, 1000 bp, Homo Sapiens
aagactgtgtatccaaataagagcacattctgagatgctgggggttaggacttaagcacagaagatttgtggggaggtacacagttcaatccatctggaaggtggatagccatggcagggtggaaagacgtgtgtgggtataggccggaggtggcctcactggagaaacctgtgcacggccccacaaggcagcagctgagcgtggaaggggctggagctgccccgtggtagggaaggggccgtgtggccagcagcagcatctgcctttgtcatcactgggtgggaccacgagggcaatgctactcttcccctcacaccttctacaggcaagttggccaggtgtcaatgcagccaggtgacacggccgcctggagggcaggagcagacagccccatggaggctctaggagatagacagggaggccgcagctgtccaggagctgaagtgagcagcagagggcgccgggggagatgcgccctagcaccaggctctgagtgccccagcgagcttccttgccttgactttcctcactgggaacccgggcctggagtccatatgaagcctcagcccaggggagggtctacctgtccaggaggctcccaccatccagctcgccctggatggtgccctcagaggtgcctgggcatggggtcacctcggagagtctggaggggcctccggacagtgcggccacgggctgtcctctgcttctcagtgcccaagacagggaaccagagcacagcactgaacacgttttagtgctcttttagttcatgtgctgcttgctgaatttccctgaattcagagaagagcctgacgcagaggaagcatctgagatcttctgtatgttttctcgtctgtgcaaagtgttttcaactctttcaaaggtcggcattcactgaatttcagctccccttggcttgatctctcatacaaaggttctcaaattccctgaaaatatgcaatgattttctcactcaataaacgacttttctgtcac

SEQ ID NO: 295298 - DNA, 1000 bp, Homo Sapiens; identical to SEQ ID NO: 119315

SEQ ID NO: 295299 - DNA, 852 bp, Homo Sapiens
taataaataaaataattttcgaccatatggagctggcttgaaatcctcttgtttatggcagtacatatcggttatgattcaaaaaatatagcccatttccaaaaacctgcaacgaagagatgctttctcagttctgcaggctgtacaggaagcacagtggcatctgcttctggagaggcctcagggagcttttactcatgacagaaggcaaagcaggagcaggcgcttcccatggtgaaagcaggagcaagagagagagagtgtgttggggtaggtgcactaccatggagacagcaccaagccacgaaggattcgaccccgtgatccaaacacttcccaccaggctccaccttcagcactggggatctcgtttcaacatgagatttgggcgggacatccaaactatatcatctgtctccctcatccaagaccatatgatccgtagctcacttttgtctagcaacagattaaattcaacattttctgtgtgatttcttggttgaggtctttgcagatgctgtttctttgtcctgaaactttcttcatctgctctttcaaaatgactgactcctcatcctcgaagtctatgcttatatattgcttttcagaggaatcttttctgaactgggcattcggccttcaaccaactattttctactatagtttcctgtttgtgagttaatagtccttttcaaaatttgactactcatttactttatcgggttatttgaaattatctcctcttcaatagattctatagaagcatagccatgcctgccctctttactgtttctctactgacttgttgcaatgaatattctcagtaaacatggaaataaatcagttattcag

SEQ ID NO: 295300 - DNA, 1000 bp, Homo Sapiens
gctgaggtttttatcctgtcttttcttcatcacaaaagtagcatggagaataatggacaatagagttcaagtggagcaagaactgtccagaatttggggaagaagtcacatatcagtcctggccatgataactggggcacatgtactatatccaagttgatatccttaatttggggaaagttttcttgcctttcccacagcctcccaagccattgacaattcccacattcaaaacattctcattcacatttctgattcactttgggctacaggaacaacagatgttgagtacttctagggagcaaatccattatagatggaggtaggtcttgcaaacagagaggtagagagctttctcgagacctttggaccaagcagataacatcacaaggtgtaccttatgctaagtgcctgatctctaagaccctccaccagcgtcagagagacagcatgctcacaacatgacagctggtcatacaggtgaagaagaacatgaagaccagcccacccctgaaaatgacagatcaaactcagcttcacaatgtctcttattccatcgctaatggtgtttaaaaacacactttgtcttaaggaacaaggggaactgaccacgtgttcatgacggttcatttcttaccctctgctttggcttgaccaaactttagtcaggtatctctcctccacaaagattcctagactttggctgtcccccaagtttaagcaagcactgaaacactaaggagcagaacatctgttaacagctcatcctgaaaatcaactgaccataggaaaaaacactccctattgagatatcctggttttgccacctgctcgcccacactctatgcccttctcctccacaaaggtctggctggttcttctccctccatacaaaggaaaagcttatttctgtttgattttgagacatttgcagatatctgaggttggcatgttcttcctattgcaatagtctttttgagtaaagtctctctttatctaa

SEQ ID NO: 295301 - DNA, 1000 bp, Homo Sapiens
accgagggcggcgcagcggcagggcgcgagcagagcggggacgggcgggtcgggggtactcacgccgcgggcgaagggctccacgagccgggccgagtcctcggcggcgcgtggggcgcgggtgcgggctccggggcggacgtgcagaggcggcccgggccggggctatgaatcagctgcggggaattccctcccttcagtcccggggggaggcggccgcgatcctgggggaggcgcagcctcacaacccggactttgcgggcgggcgggcactggtgagaagaggaagtgggagaggcctgggaaggaaacttggaaaccgaaaactcggcggccgaggctccgtgccccgcgcgcagcgctgctcctgccccggccaaggacgcacgggccagccggcggaaccagaggggggaatttggacacagacacccagaaagaacactgtgtgaccactgagacagatcctgcttatgctgactcaagccaaggaatggcaaggttgctgaccaccaccagaagctaggagagaggaacggaacaggctccctttgaacccctaagaagaagctagccctgccaacatcttcatttcagacttctggcctccagattgagaatacatttctgttgttttaagccaccaagtttgtggtaatgtgttatggcagccttaggaaactgatacataggttatgttccataagttagttttaaacaattatcctgaaaataactaataggaaaaagatgaaaaataccaatggcttattaagctaagagctaaaatatccatccttgcttagttttgataagattgtgtggccaaggcacatattattctgcttcgttaaacactctttttatttttttatttgtgtgtgtgtttttatttttaatttatttatttatttatttatttagagacggagtcttgctctgtcacacaggctggagtgcagtggcacgatctcagctcactgcatgctccgcctcctgg

SEQ ID NO: 295302 - DNA, 1000 bp, Homo Sapiens
tgattgcaaggttttattgagtggaagtaggtctcagcagatgggggagctggtaggcagatggttttaccctggagccgggctgctccgtggcctgggctctcttcccactgccccagccaaactcgagttgttctgctggtggatggcctgctggcgtctgtcggtgtgctcttccaccagcatgctcccctagacgtcctctcaaagtccagccacttgtgtgtcggcctgttaaggtctctgcgggggtttgtagacacagaatggggcatggcgggccagggtggtcttgggaaatgcaacatttatttggattccaaggcaggagtacctgtcctcacctaggtccgtgggcacaggcccgggggtggagccctcaccagggacctgccgttctcctagcacttccccgccctccttgcctatcacaactgcattgtaattagaactttgaagcgccagaactctatttcactgtcacttcatccattactaactctggaagtacagaaataatgaacatactggatgttcatgaggggtgaaaaatattttaaaactttgaagatttatttatttgtttgtttataattggcacttagagtaatgtcttcacaggaagcacagaacaatagaaaattacagcccattaggatgtgtaaagagatgggattaaagattgcgaagggtgtcatttccttaaaagtaccattccaggctgggcgtggtgactcacacctgtaatcccagcactttgggaggccgaggcgggaggatcacctgaggttaggagttcaagaccagcctggccaacatgataaaatctcgtctctactaaaaatacaaaatttatctgggtgtcgtggtgtgcgcctgtaatctcagctactcaagaggctgaggtagaagaatctcatgaacccaggaggcagaggttgcagtgagccaagattgcaccctgcactctagcctgggcaacaagagcaaaactccatct

SEQ ID NO: 295303 - DNA, 1000 bp, Homo Sapiens; identical to SEQ ID NO: 225041

SEQ ID NO: 295304 - DNA, 1000 bp, Homo Sapiens
tctggggcctcaggccataatgttccctggtttgggacagaggggacagttgaggtcattccatgtgtgatagtagacacctggattctcagagagggaaaatctaaggagctgggggcgcgccctggatagacagagaagaagacggcattccaggtggagagctctgtgtacaaaggtatggaggcaggattgcagaggcattttcagacaacagcagagaagcccagttggctggaaccgagagttggtctgaagctcagtgaggctggaggttggcgaagcagagaaggcctagagtgtgcggtggctttggcaacagaaaccaaagcctcagagcttgggaaaagttctccttggtatctgtctgtccctgggagggggtgcctttctttagcctatttgtccccctccccaaaataccatcagccaagaaccccagtgcagggcagagacctaggaatttggataatgggcaactctgagatgtcaggcaatggggaaaggagagctcaggtgggactaggaggggtaggaagcccgagggctgcagtcaccatcttcagaccactccagagcttcctggggagcaggaacagaggacaggccatgaagcccagaaaggcagatggcagcagaatactaggaagacacctccaatagtctgtccaaagagggtgaggggattaggaagtacagacatatcctgagttacaattttctattttaaaatgctatgaaagctatatgcatttggtaccctcctcaacttatgacgcagttgtgatggggttataaggttacttcggataaaccaactctatattgaaaatatcgcaagtcaaaaatacacgttcgggccaggcgcggtggctcacacctgtcatcccagcagtttgggaggccgaggcgagcagatcaggagttgaggagttcaggagttcaagaccagcctggccaacgtggcaaatacccatctctactaaaaaaaaaaaaaaaa

SEQ ID NO: 295305 - DNA, 1000 bp, Homo Sapiens
tttcattgggctaaaaaagcattaaaacattatacgtaaaagataaaaaatatattgtttcatcataaaaattatggctttgcaaattttttttacctttagctacattcttacgattctttaacttttcactgttattttatacatttttaaaacaatgcataccagtgtttaaaaaacaaatgcagcatttcatctaggactgaacatataacgctggtcagctctttcagcatggtgcaggtgtgggcctcaggctgctttctgtttacatgtatcaaatgacatgaccatcttaactgcacagataccatcttctcggcttctttcttctcccccaaaactatttaatgttgctttaatggcaacatcaatttaactagttttgtaatttctgtatttaattgtcacataacattatatccgttctttttttttttaaaaaaaaaggaaagcatacaatcttagttgctaggccagttcttctgaatcaatttgaaatcaccttttttctctttcataataactacttattttaatcaacaagtcaactattattagatattaacttattttttctagttaaaattttgctatctttcaaataattccaactcttacacacacatttaatgtacataactgtaacatatacatacataagcacaggttaagccagatctaacatgaatttagatatgccaagaaagccacatgaccattatttacataaatatgaccagtgttcacatttatcaaggccaatgaatattaaggtgattgcttcaataagaaattaggtgaagaattatttgttgaatattgtcaaacactttttttaacctgttaaagttatttaagcctgacccaaataatttttaaactttttattctatcatgcctatagacagcttcatatattaaccatttctgctttcgtggtcctttgagaatggtatcttagtatgtaagtgcaataaataaacaacttttaaaggaa

SEQ ID NO: 295306 - DNA, 1000 bp, Homo Sapiens
ctctttgaggaggtaacacctgagcagagatttgaatacagtgagggcctactgaacaaggaagactgcgagatgctgttgcaggagtaactacaggccttgaaggaaggaaatttggatttatttctgtgcctggaaatgattagatttgaaagagtgacatggctgggcacgttttgatagacgcactggtcagcttcaaagaaggcagacagtggtggggctagaggggatacaggaagaccaatgaggaggcaatgacagcagtccacaattacaagtagcctcccacaattatataacctttccacaaggcatttgctttgagagcctaatgattctaagatattgaagggttttgggtgctatgctcaggagtttggatattattgttttcaggaatttaagaatgataatatgtattgagcactaactacatgttgggagtttttttgtttgagacacagtttcacttttgttgcccgggctggggtgcaatggcatgacctcggcttaccgcaagctccgcctcccgggttcaagcaattctcctgcctcagcctcccctgtagctgggactacatgcatgcgccatcacgcctggataattttgtacttttagtagagatggggtttccccaggttggtcaggctgaactcctgacttcaggtgatccgcccgcatcggccccctaaagtgctgggattacaggcatgagccactgcgcctggccatgttgggcacttttacaagcactttacattatctaatgcaaccaaaaactgaggtttgccctattaataaatgagaaaactgaggcactcatctgttaagtgccttgctcaggtcccatgtccttggaaccaggagtccttctcctgttgatgttggaaggttcaaaagtgctcttattacttgtcacccagatggcaaagaactgacatacaaaggcccaagtcttccagaactgaaaacagtaataaaaccttcatttatctg

SEQ ID NO: 295307 - DNA, 1000 bp, Homo Sapiens
gaaataagcagaaaccgaaatggctttctggtgttctccatgctctcagcttactggaaaatcgagccgcaggctcgaggctggactttaaggcagagcactgcaattatagtgctatggccttggcttcctttctcatcacccaggtacagtcctgcagtcctcagaggatgccagtcccacacagggggatccttctccataggaaaaccgaggaacaatgcaggttcgaggtgcacagtggctaagcacactcagtcctcaagatctttcctctcaaatgctaatgctaccttcagatgggctgctgcctgctaccatttcaacattgagtcctttaagatgccatcagagagaggggaagcaagaggccaagaaaaatgaaaggccctgcatgtttttcttcgggaaggctgtgcagtctgctctgaggagacagatcaacctagcccttctccaggacgaactccgaaaaccacaggaattcacgttcaaaggatgacgcatctcagaatcagtgaattttaggaaaatgactcgataactgcaacggtgatgtcatgtgtgtgtctactttagagagcagatggtcgatctggtgctaatttgcccaatacggtagctacgcggcaatgaaattccaaaactggcacaaggcgggcctggttccaggatttccacgaaacttgtggggctacaggccagtggaacacttccaaagggcttgacaccaggccaatggccttcttagaacactgtcatcattgattctgtatctacagaagtcatgtaactgtggctgcctcttttcaatggaaacagagcgaaatacaacctggtcagctaaatcgtgctgaccttaaaaacactgcatcctcttaggcaaccactttggcttataaaccacatgtacaatattcctgctacttcaaacatgacttttttaatgagccaaaaaaaaaaaaaatctaagtttgtaaataaaccgaattcattgcca

SEQ ID NO: 295308 - DNA, 1000 bp, Homo Sapiens
gaagatgctctttggagaaagggaggcatcctctggaccaggagggggcccgggagaagccccattgaggcttgccaggtcaccctcccaaccccaggcagggagattctgagctgggagcaattccaagccctccccgaggaccacacagacccagcctcttctctctggctgtgtctccctgtgtgagctccagccttctccaagacagggccaggtctatgtgcaaggaaattccagatcctactgcatctcccgtaatacgctcaatatgctgcaaatttgaaatcagtgagggaaaaaatcaagtaaacaaccaaaaaagtaatataaaccagagggtctctttggggccagggtaagatgggaaaggagcacaacaaaggtcttaaattgagccgtacgctccccgcgtcgtactttggtttccaataaggtagatatggtacattttgctcaattttccagtcgtaatcacgttgagaaggttcgtggagaagctgctttcattttcctaaatgggttttggagctggaattcatttacttaagtattgtttctttcccagccgactaggacctggaacctgcctgtccggctgcagtgtggccccaagtctgttgaggcctgggcgcaagctccgcatcagggctgcatccggcccatcccccagatggtgcagtggagggcaggcatgcaggcccctgagctgggctcggagtggggacatcccagagaaactttggggccccacagccttctgtgggggcaggaagggaaaaggatggggaaaagtgacagagacgaagagacagacacaaagacgcacagagcctaatggttatgatgcattcccaccgaaaagggggagatgggataaaagagggtgggaaatcaaggcctcggaagcttcagacaagaagacagagccccagctgcaaaggaagacattcggttaaggtgggagggaaagcatcaataataaaagctctttgcaggg

SEQ ID NO: 295309 - DNA, 1000 bp, Homo Sapiens
taggttagatctctcactgtctcagttgtaattttgcgatggtgttttcaaatgttgatttaaagaagaccataaatttgtgttgctttctcagattttgagaataaggacaaaaagtgtatgttttaatgggagaatcttaagaatttcactactgaagtggatttctctgtccattaacagtgctaaatgttttgtatttcccagttggaaaaacaaaatctgcaagctttgaatgatacttgttattaggttttggtaacagctgttgtactattcccatttcaatgctcaatagccacacgtggcatgtcatacctaccaggtggacagcacagatatagaacattttcatcattgtaaaaagccctatttgacaacactaacttaaagtattaatcttttagaagagaaagcttcagtccaacccaaattacacaattttacttttgaaaatattgttgaaacaacgttcaattttttaaaattttggaaaactgaatgaaatccatttgtaaatgcgcaaatggtactggaggtggaaaactgaagccttgctatagttttagttttttggagggttatgatcaacacagagaagaaaagattcatctacccatagagcttcttgagaaaaattttctaacaataattttgaaaatttgtagtgaatttgttcttgccattatttatgggtgctttcatgtgcgaggcacatcaaagttctggggaatgacttaggcacaaccaaatggctatcttgggaagaccaaagtcctttgctatatatgagagttttgagatggcgactacctttctgtatggtagattcttgtttttgaatatgccctctgggttttcaaaacaaattgtttttacaatacctatagtagttatctagggcatattctttagcttcaaaaattctatctttagaatgggcttcaatattcataactgagttattttcctctaataaatcattaacattttcccatgt

SEQ ID NO: 295310 - DNA, 1000 bp, Homo Sapiens
ttctgtttttgacagtgtttgctggtatgataggtcactgttcattttacattactatcagtttagtttcctttgcatttcagaggctccctaatcccttaaagagatttaaaaatcaatgtagaccacttctgtgtgaaaataagatgactgaatttgctttgattggaattaggaactgacctctctttgctagttctggaatttggccaggatgcacatcaaaatctcattcctaccctcctgatttgcctcatggaaacttcgttgctgtgtctgttctctggtcctctattgctatgtctcagctttagattctatgttttgcatagaaatggatcatcagaatgcaacaggcagaagacttagaagtgcaaatcagtagggtaatgacaagccctttgagctgagtgggactgaaaagtaacctaacatataacctattagtaattgtttaccatgaaggttttcagtgctggacacataaattgctgagttcaactgccctctttcccctccaaatctagcataaaagcaactggtgctctcagggcaatttcacacctaatacggctaagaataaaagtctatgtttcaggaactcagtttgtccaaacctgcatccatcatctacctcaaattatatccaccttttcatttctttgcactgtgtctgcttaaatcttgagtcacacttaatgttttttttttggtcttttttctttttaatgtgaaatagaatatacaatacacaaatgaaaatgtatatttagaagaacaataataaatgtccaggtgcccgttgctcagactgagaaatggaacattactacatcccaggagcctcgtatgctctcattcatatctctctcccctgcagccagaggcaaccactatcctgaattttgtataactgtcacctagcttttatagattttactgtctgtgtatccctaacagttgcttatttatagcctttatataaatagaattatactgt

SEQ ID NO: 295311 - DNA, 1000 bp, Homo Sapiens
tatgttcagagattgcagtaaagacaggcgtaagaaattataaaagtattaatttggggaactaataaatgtccatgaaatcttcacaatccacaattattctgccatggcttcagccggtccctccatttggggttcctgacttcccgcaacacaagtggagagagaggtggcctgacattatggctaagttgatatggaagcattctggtttgttctagaaaaaatgaaagaggtggtgcaggtaatcatcagctcctggttctgtagcaaggcttttgctgcaatcccaggaggtagcaacctaggctttggttctgaaagaagagggtctaccttcctgaatcatttttaggagtctgctgatggccaggcttggtgagttggactctgtaaggaatttttatttaagtgaggtctgggtaggaaaagagaagggaaaaacttgaccctgcctgcaccaaaggattctgggaaggagaataaagagaaaaacccttcttcatgtttctgcttcagagcaggagaaccatcacaagctaagtaaagtcaatgaagggcgagtggccctatggccacctgggcacacacctgccccttggccaccttgcataggcaggctgaggaggtcactaaggcttggttttcctgacctgccctgattccacatgctgtaaggaggacccagaaggctgtgtggctacagaggtgcccagcatggtgggggtcacttcagtgtggacactagactggaccgcgtggaactacaaccagctcagagcgccagccagagtgctgttctggccagaaggaggagccaagacccacacccaggaggacaatgagcccctctctgcagacaggagccagccacacctggggtctggggagactcttcctgattccaaatgggactgaactttaaaccagactgggcatttgagcaattttttaaaagctgtcaaccaaataaaggaatgccattttctttacccagtca

SEQ ID NO: 295312 - DNA, 1000 bp, Homo Sapiens
ggcaaaacacacagtgtggggacacactggggaccaaagtccacccctgcttgtgggattcagctccttggtgcccactgactcctttaatgccctttctttgtgagaaggaagaacatggctgggaacgtgttagccctcaactaaccagttgagtgttgtgcatatctctttagataactttccttcctaaaatgagcacattatattcctgagatctgaaactttacttttccaagactgtgttcaagtttggcaaaatgagcgctgagtccaaaaattaaagcaatttaaaagacccactatttcccgtatcataatttaggctacatatttttagtatggtttcctactcctgtgttttattttacaatataaagaaaaatacctgctgtaaaggaagtaaaattctataaattatacatatgttttgtcttcattgtccagattctccagccagcccattgcttggatataccctttgtttgatccatgtagacagaggagataatcagggttgggattgttttgatggaggtggctttctttttggggattgattcttttaaaaatgcccttgataggcgcttatcttaatgaaaacagtcttctcgtgacagaccggaacctggctttcatagcattaaaaaaagtaatttacattaagaaatgggaaacaatgattgaatcaaagccaccctgagcagcttccccctgctctgctccatctgaaaacagccctgtttccatttcaccgctgagctcagcctgcctgctccagacgtccagacctcgcactctataaattgtctctgcccttgccccggagttgctgactatatgtatttttgggcccggcattaattccctcatccttggctggtgacattaagatttgtaactgatagaatgtgtttttaatgtatttcctgcaggttaccattaaagaaatctaattcttctgaacttgcaaaaggttctgctgccattaaaaaaaaaa

SEQ ID NO: 295313 - DNA, 1000 bp, Homo Sapiens; identical to SEQ ID NO: 119316

SEQ ID NO: 295314 - DNA, 1000 bp, Homo Sapiens; identical to SEQ ID NO: 119317

SEQ ID NO: 295315 - DNA, 1000 bp, Homo Sapiens
agtcataatttgcaaaatatttggcactcttgtttgctttctgcttcactatctttgagtctgtgacaggtagctgatggtaaacctcataggatttggagttatatttgaagacactatccaagatatttatttgaacttacacaaaaaggctattttcacccttaatattaaaaagctgagatgcatcccaggaggcaaatatcactcatgtacctggaagcttttactaaatgggtgacaccaagatgtgctacactgaacccaacttctgcatgtttaagacaagaatgtgcatctttatttttcctgaatatttctattgtctaaataccttaacgcaaggtcaaaaatttacatcaggtatctgaatgtgtagcatatacaactgagtgttgaaagaagacaaaatcgttttcatcacgaagaatatgtgctcagtaagaatcagaatgttcaattgtgtgaaggtgggagatgggaagattggtattatggcctggatccagaaatcagtcttccactataggaaatgggaatttaaagatgatcagaagacagttgggagcagagtgagaataagaaccctcaactgctgtctcacctttcagatcacgaagaagttttttacaatgagcagaacactcaacctgaaagcagaatggattgagtcactgcagcgtggcagtggaatggtgtttgatgttggcaaaggaaacatgtacttctagactggacagttttcccttagtttacagtttccaaatagagacatcactttgaaataacatggagaacatacatggatgtactgaacgaagaataaagtctgtgttgcagtcctgtctccattgacttttacaaatatggctttggatgaatcacctaagttttatttttgagaatttacgcttaccatgtataaaatgatattgctaatatgtttgctgcctaccccattgggttttgtgaggaataaatgataatgctaagaaaaagg

SEQ ID NO: 295316 - DNA, 1000 bp, Homo Sapiens
ctcctgggtgtaatatacatgctaaacaaacaatcattatatgatgctgtgtccccaagaggtaaaatatgtgggagctaaggagtggaagcagcaatagcctcacttaccatcaatacaattgactccttagggaacttgtgcctaggctctgtgggtttagaggtcctggtgcccaaaggagatgtgcttccatcagggaatacaacaagcattcaattgaacatgaggttaaggctgccacttgggagcatcaggctcctcatgccaagagatcaccaagcaaaaagaggaatcaccgtaccatgagcattaatcaatcccattcttcagaaggagatgggactgctgacacaaggccacagagaggcccccagataacttgcctgggtgtcccttagaattcccttgcccattttttaataatagatggataaatgcaacagtctccacctaacaaaggcataatgatgggacttctcaagagtgagaagctaggtcattccaccagccaagtagaccagcagaggtaccaaaaagagacaggaaatctagactgtaaagtaaaacaggaagattccccaggaacagaagccaactgtgatcctagaggagcttctccttaacatgcagaaagaagtggatccatgaagcacaagagctgagctgtcatggaaactgcacatctcaaatttcccatcaggactgaaggacctagtcccccacaggctgaagacagtcaccttacccaacttcatgctctcttccaggggcagcctgcatccaacaacttgtcagcacaggactataaaggccttaccctttgcctctgtgaagcatcccacagagaggtgcatccacctctgaaggtacatcccagcttcaggctcccagtcactttgggcttacccagcctcttcgtctgccctgcttttctccctccccttccttcctgcaggtttggatcctgagagcactccctaataaacctcatgcccac

SEQ ID NO: 295317 - DNA, 1000 bp, Homo Sapiens
gaccttaggtgacaaggaagaagctcccaggcagcatgtgggatggacccaaggagaacgtcagagagaaagagttcagtctggtgtctcctgaagcaggttaaaattaagctcggcaggctcgacgtaaatgtgcagacaaagcaaagcaggaagcctcccacactaaaaagggaagataagaatcacagaagctgggatggtttttattgaagggcatttcaaagcaaatacagacatctacagcatatttgtaaatcctccgtatgtgtatggaaacacacaccttcacacatcaaaactggatttgttcctgagtaacaaaacgtcctaagaacaaaatgaaagaaaaccaaatagcagaaaaatacttccaatgtatataccacaaaggattatttatcaactcaacacaccaagagttaagaaaataatgcaacaggaacaaagggcaaaggatatgtactgggaagaccacagagaaagaaaatgcaaatggctaataatataaaatatttcctaggttcaatagtaatcagggaaagacaaaattacacttttgacctcttagactggcagtgacaaagattatttgagtgaccaagctttagtcaggctcctggatcttctaggcccatctgggcacttcctcgtaaaatacagttttaacaaaagccctgctaaattggtttaccgagaactcccaccctcaatcgagttccttagcccttcacctttcctcaggtgagggctgatcatcctgtcctgtcttcagcaagactgctctaacgctgacgtttccttttagtaattttccatccactgacacccacttgtaatttatagccaaggagcaagatacactgctccttggctataagttattttccctgttacattcagagttgagcccaatcccactccccgactacaaaatcgatagcagtggtccctatacctattgcaatggtcctaaataaaacctgccttaccgtgcttg

SEQ ID NO: 295318 - DNA, 1000 bp, Homo Sapiens; identical to SEQ ID NO: 119318

SEQ ID NO: 295319 - DNA, 1000 bp, Homo Sapiens
cagtgagccaaggttgtgcctgtgcactccagcctgggcaacagcgtgagatcctgtctcaaaaaaaaaaaaaaaaaaaaaaaaagaagagaaagaaaaagaaaacacggtcttcaaatcccataacctgagcacaaaagactcttggctcgctgattcgtctcccacctcctcctccccgcacagggacagatactgaccgggtgtgagagtaaggccccgtgaagacgaaccttggggagctcactggggtccctacttggaattttaaagcaaaaccatgttgctggaagtgaaatcctcttcagatttacgaattatggggctccattggaggaaacaatccctatgggccaatgacctcgtttcatcccaaattatcctctggttttacaactggttagtttcttgtatttccaggatttataaattgcaagtttgcttgtgaagtggtagaatccatttttgaatttgtttcttaactattgatagggctagtaaaattcaaatgattgcataaaccttagaaactaaggtcagttcagtgaacattcttggtgctatttcaacaatccttgaaggtttaacacgtctgtgatattactgtgtgatttcgtgttatcactgtcttatgtgcattctaagcatgaaactgtgtccagtagctgtttttgaggaccctactaattatacagctgatggtagcatcagccgtttgttcaatgttaaattattttgtattttctaaacaactgacattttctcctagcaaactactgataggaaattgtatgtgccatgttttcttccaacagtcttgaatatgccactgcattcctgcctgggtaaaagagtgagaccctctctcaaaaaaaaactaaaatgaaaaggcccaggatgaaatagagtgtttcaaaacccacagctactccccatcctttttctatcccaagagctgtgcctcagggatgtaataaaataaacatacaaactttctaaa

SEQ ID NO: 295320 - DNA, 1000 bp, Homo Sapiens
tacagttcaattattcctatgatgaaaagagctttctccgcatgtgggactctcggcctcattatgagtggcatctttgacaatccagggcccattaaaaacaccttgaagaaagcattcaccatgctgtggagcttcacagtctataccaggctggaatccttgagggtggcattatcaaatgaggaaatggttcctttcatttttcatctgaagactcagacagcaaacatgttatctggccctataagcaccccgatgcttctgtgaaacccaagcaagttctgcatcaccacgacagccgcggatgtcaaatcatcaaaacagcagcagaggaaggggtttattcctcctccaaatcttcagctggttttatagggttaccagtttaaagtttctttgttttcagagcatcagacctcccatttgtagctgatagccatttttcaaaggtttctggctcacccaggaattcattagggtggacgagaaaagaacagtggatagaatagaccagcagggcaatctaagccccattccctgtctctttacattggttcttggtccccgtgactcatccaaactcccttatattcctatctggaatgcgaaagctggaaatacaagtgctctgtaatcacaggcagtggttttcttggagtctggtgtgatttctgtagcttgcagcaatatgtgggacacacttgcactgaagaatttaatgacttgttttactgctgtctgccatcaatatttatctatattaactgaagaaaggcattactcgaaatggcatttcacacctctgagcattatacagtaattctaaagtcatacgttgtaccaaattctctgggcaaacacagagatacagtatgaatggaaagaatccaagttgaagtttttaaaacttgaattgtctgcagtaatctggaaaaccaaagtcaaaatgactcgaattgctatggctgggaatgactggattaaaagcaatggaaac

SEQ ID NO: 295321 - DNA, 1000 bp, Homo Sapiens; identical to SEQ ID NO: 119319

SEQ ID NO: 295322 - DNA, 1000 bp, Homo Sapiens
cattccagccccgtcagctccgccttcccagttccaggccgccctcggctcccttaatcctcacagtgcgcggcttctccgtctaacgtgctcgttgccggcatctccagcgcccggacaagcccttgaaggcctgacgcggagcatttcccggccgcctccctcttcggcggctcccctcgtcccggctctcacttccccgtccaggacgctggctccgaagcaacatttgtggtcgcgcggggcccctcccatgacctctctggaacgcgcctagctgggacgctcggacccagaccacagctcttggccgcgacaggggcgccgggacttgatcccccgtcgccctggggggacagaagcgtcccggagttgggaggggatttgaagcctgtggtcctgacttccaccccgtggctgagggcgaggctgcagggctggggttaggagcagaagtccctacttccgaaccgtctgggaggagagccgagagatgtccatcacggcagtttagggagagagagggagggactctgccgctttggaggctaggtcataggcagctggcggtgtctcagcgcgggtgaccagtccttgcggttgggaaatgtgtcgtgggcgcccgtggactcgttttgcctttgagattaaataggaaattttcccaggacgagtttaccggagcaccttgggagttggtttttggcttggagagctactttccccccctaaacctagaactgctttgtttttctttattatattttttgagatgggatctcacaatgttacccatgcaggtgtcaaactcctggccttaagcgatcctcccgcctcggcctcccagagtgctgggattataggcgtcagctatcgcgcagctttaactgctgttaaagagtccgttccttaaaattgttgtaccaagaaacttgccagagatgcaagaaaatgtgattatattgttaatatttaatgataaataacattttgcttttaa

SEQ ID NO: 295323 - DNA, 1000 bp, Homo Sapiens; identical to SEQ ID NO: 119320

SEQ ID NO: 295324 - DNA, 1000 bp, Homo Sapiens
atggagaaacacttaagggggctggaccttgctgttatggtcaagcaaaaagccactcctgggtattacattccaatctggccagtttcctctgcatctaagagcatggagacatgcttggcattcttcactcttaaagagacttcttctgtggggagctgcagggctttcacagcaagagagctgctatgtgaagattgtgcctgcttcctctttgccttccaccatgattggaagtttcctgagaccttcccagcagcagaagcctatacagtctgcagaactagttccccagctatcccccagtggcttggagattcccatttcaagagtgtagagttctacccagaaggtggctgcgtggacagtgactacattctcagctccatgcctatttgggtgaggccctgtgatgaatggtcatcagtggaatatgagcagaagtgttatgtgtcagaagaagacatgccttctccatcctttcttttcccctaccctctggtttgtgttggtttccagggtgtccttgggaggggtttgggccataatttcaaaagacacagtgctaaataccacaatcccaaatgttgaaatctggaaagatcaaaatctctaaaggaaggcacacatttaagatggcaaagccactgtgcctttgtccctaaataagagtggggcaactgtgcctttcaccactctgctgttaaccagttatacacacaatgaactgttacgttagcaaaaaaaatgtttcttgtaaaggccactgaaattgtggagtttgtctgttacagtaactagcagtactctaactaaaatgagcgtctttcataatagagatgagaattcagatttctactattctctgacaaatctccataacacttatttaccaaaccactgattttaattgtgctgaacggaaatgatcatggagagtcacttttccaatgacctctctgtcccttggttttccattgtttaaggtgaatgataattt

SEQ ID NO: 295325 - DNA, 1000 bp, Homo Sapiens; identical to SEQ ID NO: 119322

SEQ ID NO: 295326 - DNA, 663 bp, Homo Sapiens
atgaagctgcccggcgccattttgcttgtgggctgccgcccgccgttgcctctccgcggaggctcgaagatagcaaactggaggcgcccagtctggcctccagcgctgggtgaacccggttggggtgtcactcgacgcccactaggggctgaggaggctccagtgcgcaggctccgggcaccggataaaagcggagctggcgagtctagtgctgtctcgatggaggagcaagaaacggaagaggtcggggggagaagcagccggaaaaatgcagccaccgtcaacgccgcctccctgccaccgtgcttcgggagagggagaagtgacgatggtgatcgttgctgccgcggccgatatggaacccaagcagtggcgaagggaatcgcaaggctcttccctgaccattttctactgtccctgcgcgaggtggacgcaaaggtgttaaatgaggttgaatatattgaccagaaaagaaaatattatagtcctttgttgaagaagagttttctcatactggaaagaaaaaaaataaaagaaagaaacttcaaaaacttcatgctgctttctgaagtactccagccaaagaaaataattcaggtatcaagttggactagctcagatgactacaaaatggtgagtacattcagatatgggagattatga

SEQ ID NO: 295327 - DNA, 1000 bp, Homo Sapiens; identical to SEQ ID NO: 119323

SEQ ID NO: 295328 - DNA, 1000 bp, Homo Sapiens; identical to SEQ ID NO: 225044

SEQ ID NO: 295329 - DNA, 986 bp, Homo Sapiens
gccgggacatcagtcttctcctgcctttggactctggacttacaccatcagctctactggttctcaggcctttggactcgaactggaactacaccattggctctcctgggtctccagcttggcaactgcaggtcttgggacttgtcagcctccacaatgatgtagtcctggattccagctttgtgtcctccttggcaagctcccctgtcctgaaactgcagaggggccacatgacctccacagtctgaactgctattccctgtccctctgtggtcctttgccaggagaagcccccaccacgaggtcaggggagaccctgagcagaggagtctccccccaccaggccaagcaaggaaagagctcagctggaaggggctggattcattctcgcctctctccagccactcctgcagctcctggcttcctcgcaagcctctccatcagcgccctcacagggcttggacacttcacagctgctgggagaaagaatggaatggacccaaggacatccaggcaggcccaggccctacctgctggcgactcgggtgtgtttcggcagatgagaccacaggcgctggccatgctgtacttccacctgtgccctggctgcaccatgtggcatgatgaggctgcggagggcgttttccggcagctgggtgtgaggccccgatgctggaattctacagccatgatgacccctcaacaatgctgcctggctgcaggagttgctgagtggcttgcagtaggtgaagcctgggagacctcctgacatggggcccacctgcaccagcacacccccaccccacccccagtacctcaacaccctcaaaccttcctggggaggcagggcctggtgccataccccccagcccaactctgatggggctccagccacccaatggacagggcatacagacaggatagtggaggcgttgagacctgcttgatttattccaagtatttaatacacaatgacgcaactgtga

SEQ ID NO: 295330 - DNA, 1000 bp, Homo Sapiens; identical to SEQ ID NO: 225045

SEQ ID NO: 295331 - DNA, 1000 bp, Homo Sapiens
ttgagataaccgcattaacaatctctcatccttaaatgagattttgatgcctatgtagcttctaacaagtgtgtgctagtggtagataggaattttttttcattttttagctctaatgacctgcctgcatggaactgtagcctcccttccaggttcagagctctgtctcctttctattgtgttgagtctgtcattccagggccaaatgcctcctgtgggagcctgtgtctgctacatccctgattctgagactggacctttggaatgcccatcaatgtcacccacccagctgattagacatctgggtacaaagtctgcttcagtgttatctcagtcttctgatgccattagccaactctcatacacagttatgtatccttcttgtctttgcttaagcttcactgctcacttaggagtgatgcctccatttttagttctgttttcccagggacagttgggacttcatgcctgaattagctgaaggtctgatagtcactgtattacccaacatgcatttatgtagtaactaataggataaaggaagacattcaaaaaattaaacatgggtctcccctgtcaattttgacagatgatggatcaaatcactttcctcagaacaaaatttaaatgcagacgaagcatgtaagaaatatttagtgtctatgttatatgttattaattccctgatagcaatatcataaaaaagtttttggtcacaactttaatactaaaaataaatgtacaataagctattcaggatcctaaaataatagtttatgctgggccatttttcatcttgagattgctcacgcattttagattccattattatttacttcatttatttttatgaggtattttagcttgtcagattaatgttgatatttgccctttgaaatttagtgcactactcatgaactttgtgtgcataaagcactgtttgtcacttttcagctttgacgttgagtggagaataaagaaattcgtgaaatgaagttgt

SEQ ID NO: 295332 - DNA, 1000 bp, Homo Sapiens
ataaagttttgagactatcccacttataaaagaattatttttatttcttgaatataagaaagacagggtcttgccatattgcccaggctggtctcgaatgcctgggctctatcaatccaaccatgcccagttaatgtatttatttatatttattttttgtagagataggttcttgctatgatgcccaagctgatcttgaactcctggcctcagttgagccactgtgcccagccttaggagaattattaaatgtataagtaaatgtgattcaatgctcatacctctctaaacttatttcataaacacattcagaatcataaaatgatggttcacttttttaacccacatttgtaaaatatagtaaacatagctataacttaattactatcttagcttgggtgtccctgaaagcagagcttgaggcaaagacttacgtgtgattgttttcctgagatacatgattccaaggagaggatgtgaatgacagtgtcagcaagtgagcaaggaggaagggtccctagaaatgggcattggcaagttggcctccactgtgggtaattggcttctcagtcctgaaggactatttgacaagccatatgaaatatgttttagaactgtgaatagaggaagaaacatttattcaccagtttccaaaacccattgatcaaaggtcatgccccaagtgttaacacccccagtgccttccagcttatgcatatgtgagccctggtgggtttccaggcacctggcacccagactgcaatggcagagaagcccagggtgggatgttagagggcatagtaagggtcagaggcatctgcaggaaggaactgatgatccgcagcatcttgtcatattctgagaacttattaaaagcaagcaaaagaaactgtacttttttcttgatctgtctgtaacccttttaaagctgaaaaggaaataaaagctttttatttcatggcctcctgtgcaaaaaacataggtcagatgaaaaatcaaa

SEQ ID NO: 295333 - DNA, 1000 bp, Homo Sapiens
gggacaaagttttcaacacatgaacttttggggaacacattcaaaccatatcaccactttagctgtcttggctactatctgcaccttttatgttcaacccatgtatatctttgaatctattgtgtgtctcttataaataatatatatagttggatcacatttttcttatcagtctgacaatctctgccttttgattgtattgtttaatccattcacatttaatgttactatgatatgcttggatttacttctattttcctttttatttttaacgtttcatgtattttttaattcttttattccttctttactgctttttcatcaagtgaatatttaaaaagttaacgaaactcaaagattcttgtacttaggagaatggatgtttttatacttttttggtaaacgtacatcacatataatactaccttcctggcctacttcacagaatgatgtggaaatcagtgagacagtatgagacagagactgagaaaccacaaagtattgtttctaattaagtactggagcaatgtttaaaaatcagtgtgagatgggcatggtagcttacgcctgtaatcccagcactttgagaggctgaagagggtggatcatgaggtgaggtcaagagatcgagaccagcctggccaacatagtaaaacctcatctctactaaaaatacaaaaattaggcatggtggtgcacgcctgtagtcccagctacttgggaggctgaggcagaagaatcgcttgaacctgggaggtggaggttgtggtgaggcgagatagtgccactgcacttcagcttgggcaacagagtgatactccatctcaaaaaaaaaattagggtgaaattaagtagtagtgttttacaaaaaatgaattttgaaagggtgtgtgtacgtgtttaggtcatgcttttttgggctagttagtatgaaatctatttacctaaattctgtaagactacttaaaatgtttattaaattttgaaattcatgtaacat

SEQ ID NO: 295334 - DNA, 1000 bp, Homo Sapiens
tgggagaggctaacctaccctcaatctggttgggcaccatctaatcagctgccagtgtggctagaataaaagctggccgaagttggaaaataagataagaacacgtgttgagtctgccggccttcacttttcccctgtgctggatgccttctgcccttgaatatcagactccaagttcttcagcttttggactcttggacttacaccagtgttttgccaggggctcttagatcttcggccacagactgaaggctgcactgtcagcttccctacttttgaggtttttggactcagactggcttccttgctgctcagcttgcagacggcctattgtgggacttcaccttgtgatcatgaagtagaagtgattatccacattccatagaagaagaagcggagctcagaatggtctcatctccaggcagctgtccctcttctggatctctggcaactccagttcacagcaccctttctcctcctagcctaggatccagtgcctttagcagcccagtcatgcgactctctcacaccagcctggcacctgggtgtcgcccgaaagcctcctcagagctgtctttgatgagcaccacctgctgcctgtcagtccaactgcggtggagatggttggggtcaaatccccattgtcaaggtgataggagagacctcagtgtgctttgtggatgcagaggatgaaaatcagcaaaactgaatgagctgtgtgctgttcttagaggaagcactaggtaaactattccagtacaattctgtttattcttttctgtgcaaacccaaatttagtgtacccaatacacatgcatatgaatacataccacatagaaatgcacagacatcacacacacccacaacactcagacacagggatgtgagtgtatgcatgaacacatactcacactcacacaccattgtaaggcttgtcctcatcctaagagtttaacgtaatagcttttttaaaaaaaattgaataaatgaatgaatgaaa

SEQ ID NO: 295335 - DNA, 1000 bp, Homo Sapiens
gttacatggagaagtgactccatgttgaaaaggcaaccacagcttctgaaagtgtccttagggaacctcactattaggagccaggtctatccaagtcagtacaaatgaagcgagggatgctggccaaggcacagggtgggctttttctgttcaggaaaacaaggttgtttttaaaaggagatttgttgaaagggacattagaaggagagtgtgaacactttggaatgtggagatggacggggagtaagacccaagcatctcacaccatttggggcagcatcaaagcttttatgagtgtcctctcccatagcaactcggcacctctgctggttcctgcctcacctgtccttcagcttgtaccaagtcatccactcaggaggcggaattgtgctttgctgtcatgaaatctctattggggaagatcaatggaaaaaggactactcagaagacagggatcagctcaaaccattcattcctggttttcatgggggtatgaggagagcagagcaaagtgtgtgtgtgtgtgtgtgtgtgtgtgtctgtgtgtctgttattgtgtgtgtctgtgtctgttattgtgtgtgtgtgtgtgtgtgtgtgtttgtagatggggtctctggctctattgcccaggctggtcttgaactcctgtactcaagagatcctcctgcctcggcctcccaaaatgctaagattataggcatgccatcacgcctggcccagagcaaagagttttgaccgctgagcatccaaggattaacaggggactgaaagcagggaagaaacgggtctctggtgcatggggtgctggggaacaaggaaagtggtggcctgaccctggtctagtcagatgggcaggtgttgccctggccccagggaattctggcccagcatggtcctgcctgaagtgtgtcctggcttcctgtctttcctggctgtctggcttttatcacacaggaacagaagacataaataaattgggaatatggataccatttaa

SEQ ID NO: 295336 - DNA, 1000 bp, Homo Sapiens; identical to SEQ ID NO: 119325

SEQ ID NO: 295337 - DNA, 1000 bp, Homo Sapiens
acctgctgttccttctgcctggaagttcaccgcagactatcccagggcctccatccttcccattgcatggtccccatcagctgccgccgcctctgagagctcagtctccactggccatcctgtctctcagcccactgcactctccactctgccagaaagtcccccaatcagtgacaacacaggtcacggtccacacctcacctggtttgtccccagtgcccagcatctggcaccgagcaggtgcgtgcaaatcctggacaggtgggcaagctgatggtgtccagaggcccctggtccttaagggcaggggtggggatggctcagaggacataaccttgcagacccgggttcaaatctgggctcctcagctcatttggtcctcacacagcccatgttgggagagctagtgttctccctgttttgctgatgagacacagagaaggtcagcaactcccgaagattgcccagcaagttgggagtaaagctggtgcaattcccacgtttagctgctaaacagggtgtcctgtacttggtgtgttcaagcagaaatccacacatgggaaggtcaaggcaacatccctggtactccagctttgaggtcctaggaaaaagggaacctcccattaaatgcttctattgccgggaagttcagcacctgtaaaagcagccccttcccgtttcactgtggctgcattttaattcttattttttaaatgtttagcttaaggccgggcacagtgactcacactataatcccagcaatttgggaggctgaggcgggaggatcacttgagcctaggaattcaagaccagcctaggtaacatagtgggaccctatctctacaaaaaataaaaaattagccagtcatggtggcatgctcctatagtcccagcttggagattgaggtgggaggatcacctgagcctaagaggacaaggctagagtaagccctgatcccgccagcaccccagcctaagtgaaagagcgagagcctgtctc

SEQ ID NO: 295338 - DNA, 1000 bp, Homo Sapiens
gaagcagatctagaggcttctttgatatgggttcaaatgtttgagggagatgtacttcccaggagatgctggtccactgcctactgcgtcacttccgaaaggacacagtgggtcttttgtccaccaggcaagatcagtaggggtcagtaacgtcagccagacaacccctccattgcaaactccactttccatcttttctctacaacctttcatttgctcactatgttgctggaatcagtaatttcaattaggggttgaaaaatggggattttcctttttttttttttaattttttttttgagaggaagtctccctctgttgcccaggctggagtgcagtggcgcaatctcggctcactgcaacctcccgactcctgggttcaagtgattctcctgcctcagactcccgagtggaattacaggcacgcgccaccacgcccggctcatttgtgtatttttagtagagatggcgtttcgccatgttggccaggctgatcttgaactcctgacctcaggtgatccacctgccttggcctcccaaagtgctgggattataggcgtgagccactgcacccagcggggattttctaattctaccattgcttccacatattagttggagttttttctgtatataaagaaaactagagttattttgtcaccttggaatagtttatatcattgttaaagtggccaatggcttcctcaggtttcttgttttttaagtagtctatccttctccagttgaggaaacaaagaacagcatattatgttcaggccatggaattagcctaggaaagaaatagccttttttttttagctttccttattaccatagaatatttagccccagatgtgtgtgaaatgtcataattactaatcgatcctttctacttgcaggccttaccctttgtccctgcctttggtcttttcctcagggtctgtctcctcgaatcagcaaaagcattgagttgtaataaagcatgtaggctgaaatatca

SEQ ID NO: 295339 - DNA, 1000 bp, Homo Sapiens
cgaaaaatggctggtatagtggctactgctgagaagtatctcttggaaattcccggaaattccatcagtcacattcagacctaactctctgatgatcaatgtttctgaactcaaaccagtgtacataagcagtggactatttaaagtggtattagcctagaatatctaggacccatgttttatgcattcagtaagcgtttgtttaatgtctgttatctaccaggcacattattatgcattgggcatatagagatgaccaaccacacggcctcaatccttgaaaagcttacagtaaccaaatagggttaacggcctaaagagaggtaattacaagtcttacactcagtcttcttagcatagtatggtgctacctctgagttaattaagataacaaaattcctagatatatatctttgatgaaacggtttccatgaaaactttccaagtttggtccctccccggctgagttcattttggaaggtgactttctgctctcatcacctaaggtccttaacacgtatcctgtgttctccggaggcaccccttgcccagagtgtgccctctgcatggttcccccagaacacctatttcaaaggaaaagaagttggatcattcagtgaagatttggggggccacttttctacgtgggaggattatgagtattaccttcctcccctatgtattagtaaatataaagaaaacataaattaaccccctttctggctgggcacggtggctcacgcctgtcatcccgcactatgggaatccgaagtgggcggatcacttgaggtcagcagtttgagaccagcctggccaacatggcaaaaccccgtctctactaaaatataaaaattagccagatgtggttgcacacatctctagtcccagctactcgggaggctgaggcacaagaactgcttgagcctgggagcaagggttgcagtgagctgagattgtgccattgcactccagcctgggtgacagagcaagactctgtctc

SEQ ID NO: 295340 - DNA, 1000 bp, Homo Sapiens
ctctcttcacggggcctgttcgccatgcccagccagtgccaagtgcccaggacttctggaccttcatgtgacgcccgagtccccaggatttgctgtgctgatgggtcagactcacccgctcctcagcaagccttccctggccttcccctcctcccagggccttctccctgtccttcccctccagtaacctgtgaacttcccgtctcctcccattccagccttctgtgccctccagcctcagggatccttgttattgggacagcccagctggggttgacccacaggatggggcttaggagagctctgaggagtgagtgaacagacagcgccggagtgcacggtgggccggctctgctgatctacaccaggaactgaaatatcactggaatttattgtaaacggtgtgcctatgatgctggttctgttgccacctgggcacgcagcaccctcaagtggacatttctagaaaccgcttcttacttgctcctaattgattacttttgcacattgcacagaacccaacctcgaggcctgctccctgccagttgcctgaaatcagccctgaaattctgaaaccaaagagctgcttcctgagaacaagttatttaccttagaattgaaaatgtatatccttttatgggcctttccaaatctgattagaaaaaccacaaaaggaaacagaagagaaaataagagccacagaaagtacaatatgttttattaacaggaaagccagaaataagatattttaaacatatttttaatgagactttattgctatattccaacaggtcactcctattcttagagaatgtgaatgacttgtgtcacttcggagtgacagaaaaatcaggaactgaaagataattccagacaagttaaaatgttatgttacattcaaagctcttgttttcatcacaaataaggggatattcagtttttattaacagaaaacccattctcccatggccatggaataaatgccatgctatatttaagg

SEQ ID NO: 295341 - DNA, 1000 bp, Homo Sapiens
atggttgagatcatttgtctttggtctaatagaatttgagtctagtagaatttgagtctccagggaaagagctacttgaccaaattaaactagtagcaggtagagcatgaatgacagcatattataccatcaagatgttcttagagcagtgtatggatggatcgattgtactgccatcagttgtgactgacgttgtattcaaggagaaagagaaacttgtttagaaagcactttgaaagttttttgagtacgggggtgccctgtatcaccccgttatggttgaactttctccttcaaaattaccagacttggcagcagtggcaaattattgggctaaaagacttaatcagacatattctgggttcaaggctcctaatataatacctggtgcaaacattatacttccactcattcagatggttgcatcctgccaggcatccagtgggactgggaatatggacacttgaacattaaacatcctgaagaattttggaatgacaggttacaagtgaacataatcagttctctatattaaaaaaaaaaaaagatttgggcatagattgggctcacataatctttagagagattttttcatttttgtgaaagtacagaaattcttaactgcttatgaaatgctgattgttaaacagcatccacagctattttgtgttgtttccctgaccccaccctgaagaaaagaaaaattatggcatattgaaaacagcagtatgatgtaagagaaaagatcacaaattccttgagggtgggtcttttccatactcataagcctatttataatattcagagtaatttattgacacatattaatattccctcctatcccattaattgccaaatcatcaaacatttattgagcacctactctgtgtagggtgtaagcagtactggggacttacagtgataaaagacatagttttagccttaagtgatgtactgtttcactgaagagatggaatataagaagccaagtaatttatgg

SEQ ID NO: 295342 - DNA, 1000 bp, Homo Sapiens
cattccaggagaacgatggcacaagcctcttcctggctcgcgacggacggggaattgccagcgacggaaagcagctgaggctccatttggctccgctgctccgagggtgcccggcgccctccaaggtccccgccccaggggctgccgggctgcagggaagccgggcctgcggccccctcccaccgcgggctgagtccccgagctacctgtcttttctgtcgcgggcgtccaagtcccggaacctgcgcgtcaggcagcgctccacctccgcggcgtcgcccttgatggcagccctgtggatcttccgcagttcccagtcccgaatgtcctcagaatccgcgatccagcccggtccaccacagccttcagcagcgacactcgcagactccgacctctcagaccgagtgagcccagctaagccgttaggcgcgcgcctgaacctcagcgctccgaactctcagaccgagacagcgggctgggaagccaggggccgccgggacctggggctggaaaccacatctgcccacagccgcagcctcctgcacctgtcatcctggcggcgccctgacgtcggagaagcagcaggcgcggagctcctgcagcgggcaccgctgcagcaacccgacccggcgcaggcggcagtggaaggcggcctgctagcacggctcccgcggccccaggaccaggggtgcggccagcaccgccctcactccccgcgtctcgtggatattgccctccctggaggcggctggacctaagcgaggctcgcagcgatcggccccgcgaagactcgcatgcagggctcaggatcccgcattctggcgccgcggcaccgcacctttcagcagccctgctcctcttcttgttggtaaacttttgtcactctgccatgaaaagcatccaggcgtccttgatttcgacattgcgtgcacgctcagccgagctcatcagacgggcggttgtccccagagcccgcgggtagcttgttcccgggcggcgg

SEQ ID NO: 295343 - DNA, 1000 bp, Homo Sapiens; identical to SEQ ID NO: 119326

SEQ ID NO: 295344 - DNA, 1000 bp, Homo Sapiens; identical to SEQ ID NO: 225046

SEQ ID NO: 295345 - DNA, 1000 bp, Homo Sapiens; identical to SEQ ID NO: 220462

SEQ ID NO: 295346 - DNA, 1000 bp, Homo Sapiens; identical to SEQ ID NO: 225047

SEQ ID NO: 295347 - DNA, 1000 bp, Homo Sapiens
ccccaccgctgtttctcttgccctgaccccttgttccctggaccagggtggcacagctccaggctcttgggcccttcccgagggcaggcacctgtgactgtgtccccaaagacctgagtggctgagggggccccacagagcttggacttcctggaggacaaggaggggtctgccagccacccccaccacgcccgccccagggctcccctggagcttccatgccagccggactcaggtgggtctggaggagcaccgtgcctccaatcagaccttgagatgtgccccctgcccccactgtgccctcccctgcccaggagtctggttgcaaaccctgattaaggggattttatctccaccagagggccagtaggtgggaagtagcttaaacaatgcaggtttataatctcacagttctggaggtcaagagtctgaaatgggcctcatggggctaaaaccaaggtgtctgcagggctgtgttccttctggaggctccagggcaggaaggggaggatccacttctgtgcctttccagcttctagaggctgcctgcgttccttggctcgtggccccttcctccaccttcaagccagcagcggaggcctgagtccttctcatgccatctctctgttctctctcctgcctcctcctccacactgaaggacccctgtgatcacactggcccccccaccggatgacccaggataatccatctccctgtttgaaggtcggctgattagcaaccttcattccatctgcctccttcattccccctggccatgtaatgggattcacagcttctggggattaggacatggacatcttgtggcgggggcataattctgtcgacgacaccaagaaacacttggatgttaaggattcaccgaacactgttcaggctccaggtgctgggagcagcagtgaacaaagccaacagacactgccaccctcaaggagttcacgttcatgggcgagggaacagatgagaaacccggcaatgaaa

SEQ ID NO: 295348 - DNA, 1000 bp, Homo Sapiens
gcccctgtggatttccataggcaggagagtatccagtgttgagtggagctggtattctcagaaacgaagcccctttcctcattttgcgccaatctcttcagtcatttttaccctagtagtataatgctttgtcaaagtcactgtcatctgatgttaacagttgttttcgccagatgacttttcaaaaggtaacttcaccataataccggttaatgtgataaaaacactgcatgtagccaattttttttttttttgagatggagttattggctcttgttgcccaggctagagtgcagcggcgtgatcttggctcactgcaacctccatctcgtgggttcaggtaattctcctgcctcagcctcccgagtggctgggattacaggcacacgccaccatgcccagctaatttttttgtatttttagtagagtcggggtttcactatatgttggccaggctggtctcgaactcctgacctcaggtgatccgcctgcctcagccttccaaagtgctggggttacaggtgtgagccactgcacccagccaaatattttcttatttatttatttattttagagacaggatgccattatgttgcctagtttggaatgcagtgtctatttagaggcgtgatcatggcatactatagcctcggctcaaaggaccctggtctcaaaggaccctgccaccttagcctcctgagtagctgggacaagtgtgcgccaccacacctggctaattttttaaattttttgtagagatagtgtctcgctatgttgcccacgctggtctggaattcctggactcaaggcctcttcctgccctcagacttccaaagtgttaggattacagggtgagtcaccacgcccagccagtgtgaattttctaatgctgagtaagttgtgatccagaagtaaatgtatctgcaagctgatttaaattgtagattttctcttcattgcatattttctgatgttgaataaagtctgagtattaactaaa

SEQ ID NO: 295349 - DNA, 1000 bp, Homo Sapiens
cactgccaaactcagtatggttaaaagatttttaacacccagctgcagcattcactctggttagaattggccatttaaatttatttcacatatgtaagtatcatatcctttataatgcattcttaattgttgctcagttcttccagattgaattcctttaaaaaattccttatgtaatcttttaattctagttggaaaacatcacttgacagttgctgtttatacaggcatgcctcgttttattgtgcctggctttattgtactttgcagatactgtgtttttcacaaatggaaggtttgtggcaaccctgcgttaagcaagtctgttggcaccattttctcgacagcatgtgctaactttgtctctgtctcacattttggtaattctctcaatgtttcaaactttttcattatgattacatctgttatgtggagctgtgatcagtgatctttgatgttaacattgtaattgttttggggtgccacaactgtgcccagataagacagtgaacttaattggtaaatgttttatgtgttcagactgttccactgactagcccttcttcaaactctctcactctccttgggcctccctattccctgaaatacaacaatattgatattaagccaattaataaccctacaatgatttccaagtgtttaagtgaaaggaaagacatgtatgtttcaccttaaatcaaaagctagaaatggccaggcgtggaggctcacgcctgtaatcccagcactttgggaggccaaggcgggcggatcacaaggtcaggagatcgagaccatcctggctaacacggtgaaaccctgtctctactaaaaaatacaaaaaattagccgggcgtagtggcaggcgcctgtagtcccagctacatgggaggctgaggcaggagaatggcgtgaacctgggaggcggagcttgcagtgagccgagatcgcgccactgcattccagcctgggtgacagagcgagactccatctcaaaaaa

SEQ ID NO: 295350 - DNA, 1000 bp, Homo Sapiens
ggcgccggggctccagagtgccgaggttccggggtcgcgcgattccgcagctcccaggcgccgacccggacccccggccgcggcacctacgccccgccccagtcgctccacgccaaagcccattggtcggcaacctgtccctcctgctcatgtgatgcggcacgtgacgcagccacgggcacacgggggtgggtctcacagggcaggggcttgggcgccagccttgcaggaacccgactggactcgccctcgagacttggggatcgggaaatcgggcagccgggagatttcagtgcctcacagtcaagaacgcaaagtcacagtgtccggaggcctgctaaggaataaggctgtgtgccaggctggggagctggaggccatccgagggctttgcggaaccgtgggaggcgagtgcttctgggtcctgaagtcctcttctttgtttagggagatccaggacgaggagctgaagaagttctgttcccggatctgtaaactgctgcaggcggaggacttggggccggacaccctcgactccctgcagaggctcttcctcatcatctcagccacgaagtacagccggagggtgcccggccaggtgctctggggcaccgggtgctcctgccacggtcgtgacgtgttaccgcccaccacgggcatctcgccttccaggctggagaagacatgcgtagacctgctgcaggccaccctcggcctgcctgcatgccccgagcagctccaggtgctttgcgccgccatcctgcgagagatgtccccctctgacagcctcagcctggcctgggaccacacgcagaacagccggcagctgagcctggtggcctccgttctcttggcccaggtagcgcagcagtcaccaccccagttggcaccggatggctgcttcccaaggaacaggggagacaggaagcaggggcgccagagccggcaggtggctgcttgttgtagacgcatctcggtgctgagtgcctggcacacttga

SEQ ID NO: 295351 - DNA, 1000 bp, Homo Sapiens; identical to SEQ ID NO: 119329

SEQ ID NO: 295352 - DNA, 1000 bp, Homo Sapiens; identical to SEQ ID NO: 225051

SEQ ID NO: 295353 - DNA, 1000 bp, Homo Sapiens
cacacatgcccacatactcatgcactcacattcacacatgcgtgcacacatagacgcatgcactcacacatgcatacacacagacatacacatgcactcacattcgtacttgcatacacaccaacacacatatgcacactcacactgacaagcatacacacacactcatgcactcacacccacgcaggcactcacattcacacacatacacactcattgacatacattcattcacatccatgcactcacattcacacatgcatacacactgacattcacacttgcacatgcctacacactcactgacatacacacacacatgcagtcatacacactccctgacatgctcacacactgtcatactcacacactccctgacatgctcacacactgtcacactcacacactcacatacactccctgacatacacactcagacaagtgcccatgcacccacacctatgctcatgcacatgttcccacactctcttataagcatacacacccatgttcctcactcaggacacacatgaatgttccacagggcatcatgtgacatcgcagaggacagatggtggaaaagacatgagcaacctaatgggaagaggaaaatgggaaacaatgcattggaagaggaagaaaaaaaataaataaccaaaggttttggcaagtgcagtaccaggtggagaagcttgacttttctatccttgatcattttattccctcccaagaagtcagtcacaggacctggaaggccagaaagggtgcatgtgggagacggtctgaggaagtacctcggtcactacaatatttttgcacatataaagggttggggaggaaagagacacaaacgtatttaacacagatttgctggatggaagctgcgtgtgtgaacgtgtgtatgagtgagtgcattttgatttttttttttttttttttgcacagttaagagaaaaaatcaaacaagcagaaaaaaaaaagaaaaaagacttatcacggt

SEQ ID NO: 295354 - DNA, 1000 bp, Homo Sapiens; identical to SEQ ID NO: 225052

SEQ ID NO: 295355 - DNA, 1000 bp, Homo Sapiens; identical to SEQ ID NO: 225053

SEQ ID NO: 295356 - DNA, 1000 bp, Homo Sapiens; identical to SEQ ID NO: 225054

SEQ ID NO: 295357 - DNA, 1000 bp, Homo Sapiens; identical to SEQ ID NO: 119332

SEQ ID NO: 295358 - DNA, 696 bp, Homo Sapiens
atggccttaaatttcacaataagggaaaaagaggaatgccgaattccccaggggattgtcagtgcctgcatgcagtctaatttgcatgatttaaatgttacaaggaaattggacttggaggtcagcgaaccaatagactttggttctggaggtcatcaacatctgattcaggaagcagcagataaaagcatccagtcccaatctggtgagcgctacacaccttcatcttcagctgggccacaagaaactcggaagaagccacggccaaaggacaccgagcagttgaatacctgtgtgatagaaatttcagatgacgtcaccccaggtgataacaatgcaactttaggcaatcctttctcagacgcatctgtccgcagagctttcattatcaaagtgttcttcctcctgtcagttcagttgttgctcactgtggtaattaccagtgtgtttattttctgtttctacaaggccgaggaagtgtcatgggcaacagctgcaaccactctggtgatgctagcactcactttgtttgctctacaaacaaaatacttggtgatcgatgtgcagctcatgctgggagggcaccgccattattccctggaccctgaagggtatgtttttgctatcctgaacatctacttggacatcatcgaccttttcatttttattctgcgtctgattggacggggacggtag

SEQ ID NO: 295359 - DNA, 845 bp, Homo Sapiens
atggatgcatacaagtacatccaggagcaatggaggaagaagcagtctgatgtcatgcgctttcttctgagggtctgctgctggcagtactgccagctatctgctgtccacggggctccctgccccacctggcctgataaagcacgccagctgggctacaaggccaagcaaggttacattatatataggattcatgttcaccatggtggtcaaaaatgcccaattcctaagggtgcaacttatggcaagcctgtccatcatggtgttaaccagctgaagtttgctcgaagccttcagtccattgcagaggagcgagttggacacaactgtggggctctaagagtcctgaattcttactgggttggtgaagattccacatacagattttttgaggttatcctcattgatccattctatgaagttatcagaagaaatcctgacacccagtcgatcaccaaaccagtccacaagcagagggagatgtgtgggctgacatctgcaggcagcttggagaaggcgtgatactctccagctccaccgttaccactaatataagtaaatttgtaaaattcgtacctaataatttaggacagtcatgtctgcttacaggtgttatttgtctgttaaaactagtctgcagattgtttcatgaatgctttgtcaaattatgaaaattaaagtgcaataatttttgaagacaataagggatggtgtatcttgtttctaataagatgaactttttttgtctttgctttatcttattagggagttatatatcttattagggagttagtgtttaaaacatactgtgtggtataataggcttaaaataaattctttaaaag

SEQ ID NO: 295360 - DNA, 1000 bp, Homo Sapiens
gtgcccgcccccccgctccagggctccccacaaagacagaactctagcccgctccaggccccagactcagggggaagattgttccctcccagtgggagaggtgaagataggaaagaggtcctattctccagcccccgggaagcagaaaaagcctaatgccatgggtctggccccaacatcatctccgggtgcccctaactcagcccgtgccacacacaacccagtgccctgtgggtcaggccgggggccctgccacctggccaatctcctcagtacattggcgcagagcaaccaaaacagagaccacaagcaggggcccccggaagtgacctgccaaattaggaaaaagacacgaaccctataccgctcagatcagctggaggagctagagaagatattccaagaagaccactatcctgacagtgataaacgccgagagattgcccagacggtgggggtgaccccccagcgcatcatggtaaagggggccggctcactggtggcagggtggagtggcggagggcccaccattgaaacactcgaattgcagagtgagcgctcagcggtagcctgggtgtggttccagaatcgccgggccaagtggcgaaaaatggagaaactgaatgggaaagaaagcaaggacaatcctgcagcccctggccctgccagcagtcaatgcagctctgcagctgagatcctacctgctgtgcccatggagccaaagcctgaccctttccctcaggagtcccctctggatacctttccagagccccccatgctgctgacttctgaccagactttggcccccacccaacccagtgagggtgctcagagggtggtgacccccccactcttcagccccccacctgtgcgaagggccgatcttcctttcccccttggccctgtccacaccccccaactgatgccactgctgatggatgttgctggcagtgacagcagccacaaggacggcccctgtgggtcctgggggacaaggtaa

SEQ ID NO: 295361 - DNA, 1000 bp, Homo Sapiens; identical to SEQ ID NO: 119333

SEQ ID NO: 295362 - DNA, 1000 bp, Homo Sapiens
ctaaaaggaaagagtgagatctttcaaagaatggagattaaaatcaaacacaacgaaggagctacttttgaatgtaataatgtggaacactttaaagtcgaattaattaaaggaaacataaaccaatgcattcctggctccatgttaactgcggctgtctaaaagaccttgagatgttcaagagaccagtgtaaataagttattttggttagcacaagctcaggggcctgccactttcctctcgctggtgctgtctttggtagagccatagatagaaccagccacaaacttgattcgggcataagcaggagacacacacatcagcataaagggggctccaaaaaaggccctcttgcttggagacacaggaaccagactccccaaatgtctctcacttacacagcaatcctcctcagacttaggaggctctgtcaaacattttcaaaattacagggaacctggaaagaaaatacaataaagagatcagagacctaaagtgccagaccaaagagaagaaccagaaaaagcaagacgtgttcattgtaaatattttgaaactgtattcttatctcagttcagtgctgtgtactgccttttctctggtaattgtaaatatttaatgtgttatagctccatctccttactgatacgggaaacatgaataaatccacatggacaggatgtgtgttttccacttgcagactgtctgagagagtgagcatcaggaggggctgctgtggacagttgcacaggctgtggcctgtaccagagtgcctggtggaggggcctggaaaagacaccccagccacctggctcagagagggacagaagaaggagtcactgttcattctgagcaaaaagcccttttgtatatttagttaggctaggggctatgtgtgtgtgctttttagagatttacattttactagtgtgaggggaactgagcagagctcatggaaaaactgttcctgtttattgaaataaaaattccagaattttt

SEQ ID NO: 295363 - DNA, 1000 bp, Homo Sapiens
ctgtggctctgtgtacttggagctcttaccaagttttgtcatctcccagcagcagacacaaggtctccttaagccctgtgagtgtagagggagggtctttgaaaatcatcgagtatacactgtatttcaagactcaccgtcaaatgggggaagattccaagccctcaaggaaaaggagaaagagaagcacagaacggcagactctgggatcctgccagagcctatttcagggccgccaggaggtcctcctcctgctgcagctctggtccccaccttggagcctccttcgaaggaggaagatgtagaaagaacaggggtttggaatccctgctcaaagctgcattgtggacaccatgagccccggatgtccaggtccatggggagtttgggagagaattccaacacagaaatcgccaaaaatcccatggtctatcctgagataggaacaggcttgccacatcttgagccgctgggcccccagagagtggcctgttgccctgggctccgtggaattcttcttgtgctgctgggacttggcctcagatgccccatccctgcggattgcccacctcccctggcaccctccatgccccacacgccttacttgatgctgcagcgctctctgaacatggcatggcttgtgaagatcaaaagcaactactatccaaaatatcagggtttgctgccaatgaacggaatgacttggaggaagaacaactcattactgctgggcctgaggaacaggctggaagggagcggacttcaccagggactttccacagttcttgtccttcttcttgtaagttttttgaacatgccagtgaaaaagcagttcagccatttggtgaaagaaatttccatttaccaacataggaagagttcatattcacagactccaaacatagatagagtcagccctcctcattcacggtttctgcaatcctggattcaaaagatgtaaatcaaaaatatttcttataaagcatctctactaaacatg

SEQ ID NO: 295364 - DNA, 925 bp, Homo Sapiens
atgccgggggccactcctgcgtggtgcgagtgggaacgcgcgcgcgcgcctggtgaaggcagagagagaggcaggctgggtccgcctggcagcctacgggaggaggcgggagccgggaaggaggggagcctaggcccggcgtggggaggccggcaggaagggcctcgagcccagtgcggacctttcttcagcctctgtgcgaccgagccgcgcgccaggctcctgtgcgaggaggacgcgctgactccctccgacctgggctccgatggagcagaaatagcgggacctggacttgtggcgcgcctggtgccacatctcgggctctgcgagcgtcctggcgcgggatcctgccgtttgcatccaagagaggggaggacaggggcaaaaggatgcagggaggctgctgatttccactgaagagctaatttcctgtgagacattaacagtgatttaagaaaaagattcctgtaactgtaatgtcttacaataacagaatgcaggagagcacatatcaatgaagaaaagacaaaatgtacttatccatgaagctgaggttaagaaaccagtgtcttcaagagccagggacagcactgggtctgtgcagagttgagagatggtgatgacatgtggtttccagcattcctcacccagtccagggacactgtgggtgtgcccagcttaagtccagtaactggaaatacaagcccaagttctggagagtttgagctgcagagatatatatgggaacactttgaatcttgactcattggccataaccagcagagtggaaaatacaagaagagaaaaaaacattgaactgcgattttataacatcctttactaggcagagagaagaggaaacaccaggaaagaaaactgtattacgatgtgaaaacttaatgttgagaaattcaggcatcttggg

SEQ ID NO: 295365 - DNA, 1000 bp, Homo Sapiens
gtgtgtggggtgggcattgctattcggagaaaaatcaagacgttcccttcagtcctccctcggtgttaacgtctgctccagctcgcagcccgctgctgggaggaaaatggaagaaacggagatacttttagtgaagcagaataaaccactgaacaggaaaaatgaggaagctgtgagtaccagtggaaggaacgagccaggaagagggactggaaccatctcagaagccatgcccctcaggctggaacttgccctgtctcctcgcagatgagctacctcttgtgtttaagaattaaaggaagatgagctaggaatcaagaaatacgcagaactgattcctgtcactggcgccaccctgccacttgcccagagctgtggtataaatttttttaataggctgaaataaaaatatgaatagcattttggtattaagcattaaattgataaaggctatgagatacacctgctctcaaccatgttaattttttattattggtattaataaattattacttactaacatattaacaagaattgcattgagaaacaaagcatccacaggccaaatcttctgaatttcaaatgtttatattaatgcgttgtattctagaaaagtagaattgtcttaagtagctttgtaatataaagtcatctatcagcccattacacctattagaatgttttaacctttatttcccacttttttgtttctagactgagtgtacttggtctggtatttgtggcataacttacggaacacataagaatgatacagatactatttaatgatgacctaatacaagcttagatagctaaggtgaaagcttctatggccttaacattttcctcttgaagaatgtattttctgtaataaaatacagtggctacttgaaatctataaacttatgtgaggtctggataaatctgagcaactttcttctttgtgctccaggaacctacgcactatatatataaataaagcttaagtaaacatcactgc

SEQ ID NO: 295366 - DNA, 1000 bp, Homo Sapiens
cacagatgtgccagccgaggcttggacaaatgcagtaatttgcctgtgatcttgtagctagcaagggctgaaaccagaactagggcctctgctccaaactgagcgctgttttgactgttccacagctacttcccaggaccccacagaacagccaatgcagggaactgtgcccccatccgcttcctttgggactgccttcctctgtccccttggtgctcagggccctacgttttgcctctgttggggccggctgctgactggcactgcctggtgccctcctggctcctcccacagtttcccagacccccgaggtcccagcactcacactgcggggccgacaaacagcaggtgtccttgcgtctgactaaaatgacatccacttagtgtggtgacattggttattctgggttgcccagatgcttaactcgttgttgaatgtgagaactggggagaactaatttcttcttaattcatgtcctctttgttagtggaacaatttcatttcaaaatgaaaacacacttgggagaaatttttaaaaagggattctagtagtgaagagatggagaacagctgttcaggaatctttattcctttccactctgccccagctccctggatcctaccccagcaccccaggccatttaatcactctgttccctgccctttctgagctcttccttccttaattgctcataactagcatctcaacacttcatgattgtctcccagatacgggttggggttgtcatccagtgggaacctgggttttctagctggtgaagacactcctgcaggcatgaaccttgttttggtttggttgttactctctgtttccgcataccctccacagtgcttgagacataatagtagctcaacagagagggtgccgtggctcacacctgtaatcccagtaccttgggaggccaaggtgggcagatcgcttgagtgcaagagttcaagatcagactggacaacatattgaaacctcatgtctaccac

SEQ ID NO: 295367 - DNA, 1000 bp, Homo Sapiens
tttggcaaaatgaagaatacaagcgtgtttcttcttcatatgctttgttttaggaacattaaaaaatatagttactacaatcagaaagcagttatatttgtatgttttgtaacaaatactgtggcctgatagaatgagcttctgacaaaggcatgtgctttccaagtgggccaagttcaaaagttgtccgctgagttgtctcactggctcatccagccaatcattcaaatatttaaaggccccactaagggccatgttactcattgtacatctttaaggatgggtgtaacttacttatctgtttattttcaatttcagaatactttatattgactcctaaaagtatggtgtagtgtatgtttgttttgggagtttcagtacaatccctaaatttatgtatctcaaatgtacagggactgatcaaattagtgctaattttcctaaaacagtgtcaaaaacaagggaatcaatcatgaacacactaagcatgagcatcgactgtcacaagacatggctcagtttattttttcttccttcttactacaccgtagaacagagctcttttgtttgcttatgacctgggcaaatttgctgtatgataaaaaaaaatcatgcatgcatttgattctcatccagatgcccttaggataagaggttcattttcatcttctgttttccaaatgaagctttaaatctaattagatcttgaaagaaaataactgcaatagggtttctgtaagtaaagggccctcatttaaataatgctgttatttgtttatgtgatttacagtaagtgatgaaactcttcgtggccagcacgccgctcacttcggggatcctttgcacagagcactttgagttagttataaaccattctacacacagaagcatttaattgttagaacatttcatagtgtaacagcatttctcattgcctagcatgggccttctccatatcgaaggcccaataaatatttgtagaataaaggaattcacaccc

SEQ ID NO: 295368 - DNA, 1000 bp, Homo Sapiens; identical to SEQ ID NO: 225056

SEQ ID NO: 295369 - DNA, 1000 bp, Homo Sapiens
atctactcatactccaaatgtatttatccagatctttcttccaagccccttgggtgccccaaatcttataggtctcaaactgaaagcatcatttttattctgttcctgttttctgactcttcgtaatctactctgtcatctggtttccccatcctaggaaataacacctaggaagtagcggtgaaacactcaagcacttaaacctgcacttcaaccctcccccacatcctaaacttcaacccttttccatgtcacccatccagtcacacacctaattttgtattttctaccttcttataattttccatatcttattaccataattaactctctacctataattttgaagtactcctttctagttttgccccatctccccatgttcatctatctttacatcgctggaagggtcacctttctaaaatgtatttgtaatgatgtaactcatctgcatattgagtgaatacccattacacgaaggggtaagttcacattctagcgtgacacatatcttatatggtttggccccattttatctcttcatctctttcctctgtgttccagttttacgacatcaccttggcacccctcaattgccatgttgtttcatgccttattattttacacatgctattgcacctagagtctttgtatcctgactctgcactttgtctgtccttcccaatatggccccattatggcagcattttctatgcttttcagataaaactgattgttctctcctttgtgcccttatgtattatattgacttaaattgtagaactggtgaattatacttttctgttcttatttgttttcacgtctctaacatttcttgaatataggccagaatctatcttctgtgtatatttcctgcttctcccaggatagtgcctgtgattcgatagatacaatgtatgggtttttttgtttgtgttttgttttgtcttactgacaaattgagtgaatgagtgaataaataaagttttttctgaagttg

SEQ ID NO: 295370 - DNA, 1000 bp, Homo Sapiens
gcctcaacagagtgatagttccttcctcagagatcacctatgggatggttgtggcagacctgttccactccttgttggcagtcagcgcagaaccttgtgtattgaagattcagagcctttttgtgttagatgaaaacagctatccattacaacaagatttctccctcctggatttttatcctgacatggtaaagcatggagccaatgcccgtctctgaggccagaggaagaaattgcaggcatttcaaggaagaagtactgaaatgatttgtcttttgaaataaatgaatgacagggcttttgctttggattttttatgaaatatattttacaaagagaattgcactagatatataaattaaaacttttttctaagaaaatcctgtgaggtttaaaaagattgtttttgtcttttggtttcttcctttcttctggagaaatgatctaccagtcaaggcaatatgtagcagatccctgggaattaaaggtttgcccatttgttcactgtatttagtccctgctacattccaggcatcgtactaagtatggggaaccacagagaagacactccttcagaaactgctgcagtgctttcgcttatccctacctaaaaaaccgtcaatgtgaaatcatttccttgattataactataatgataatggattagtttatataaacctatgtttagacaagttcaagacaagcgtgtctttctataaaaagtattgaaagtgaaggaaatgagatcatgtttcaatttattaaagcagggaagagcgttctgtggttagttcgtgtctaggatttgagtgccttactgaatgtatttaccagcaaacatgtagcaatctgttctctcattgtgattgtggaagaagctcatgtaaaatgatagtcattaatgaggaagtatggcgtggtacttattctgtaagttcagagtatgctgagtgttaatagattgtcatattgcctgaaaataaattcatgatgacatgaa

SEQ ID NO: 295371 - DNA, 1000 bp, Homo Sapiens; identical to SEQ ID NO: 119334

SEQ ID NO: 295372 - DNA, 475 bp, Homo Sapiens
atgtttccatataagagaaaaattcatccctggttcagttcatcttggcatcagtacacggatgggattcagagacattccctttcttcccttacaggctcatatgacattaacagacaagacacttttcagaaagacaggcaacgtgttggaccttccggagcttctcagaagacagagggttttcttttgaggctgttgtacagtggcctgattatagctcactgtagcctcgaaattctgggccgaaatgatccgcctgcctcagcctccaaagtagctgagactacagacaaatcaactcaatcaaagaaaccaactcaaagaaagatgggtctacatacaacaaaactgaacaaaatctgcaagaagagtgattcatacatgggctattgaggcaacatgagatggacattaatcgactaagtaaaaaacagatttcttgaagaattaataaagaacttttgttttggaa

SEQ ID NO: 295373 - DNA, 1000 bp, Homo Sapiens
agtcgtggcacagcccggttggactcaagttcttctaagtttgcagctggccaaggagcagagagagacgtccctgacccccaacaaggggttggcatggaaacctgcccaccccagacgactgcccgggactctcagggacgaggcagagcacacactggcatggccaggtccaaagactctgttgtgcttttgggatgtcaggattcccctgggctgagggctgcccggccaacctctcctccccaggaccacagacccacctgccctggcgtgggtaccaaggatgccttggatctccctggagggtctcctgtcagggagtcacatgggctggctcaggggtcaagtgaggaggaggaactccccagcctggccttcctcttgggttcccagcacaagcttctgccctggtggctaccccagagccctgtccctgcctcgggccttctcagcccagaaaagtggggaccccagggaactcatcagtccccatctgctgagagaagaggcctcaacctagcaccttctcctgccaacaaggccaagaagcgacctctctttggaagcctgtcccctgctgaaaagacaccccacccagggcctgggctcagggtctctggggagcaatccctgacttgggggctgggtggcccctcacagtctcaaaagagaaagggtgaccccttggtctccaggaaggagaagaagcagcgttgtagccagtaggggcttctgagcaggctctctggggccgatccccaaggatggggctctggcatccgatgccccaaagcggtcaaaagcttcttctcccccagtgctgatcttgctgggccttagctttggagggtaggggagggaggggagggagagggtggcctgaatggggagggcaggaagggagggtctggggggaaggggctggggagtgggggtgggaagcagtgtgttgggggcctcgtgtgtaagtgtgaataaatgtagttgtcttggaaaa

SEQ ID NO: 295374 - DNA, 1000 bp, Homo Sapiens
aataaattgtaatattatttatggttttgtttcacttagtgtgaattttcacacatttattcgcagaaatagtaagattaatgtgtttcattacatagtactgtcctgtacccatttggaatgttacaaaatgtatgcaatttatgtagtatattccaaaggattccaatttcatcctgaattccaaaaaattctcatttccaaaacacatttggtccccagagtttttaagagattatagacctgtgattcttttttgttgtgaatgatccagtgaaatgatcaatgtaaaatgtctcacacaaagtaaatgcccattaagtgtagttgctattattaatattgcgttactctactttaaaaatgtaagacaagctttttctgacattgaagttagcaatagcataggtaatgatatgcattcttcaagttttattactctaggagatgctttggcaatgtgctgctgataaagtgtattagagtatctcctaaatcttcatccaagaatggaaacattttgcaaatcagaggatagaaaatgttatgctacatcaaattaaattgcatgttcataaaatatgaacacatctagttagcccttattaatcaaagaaatataatatttttatctgctgctaactatcccctcagctccgtgtgccataagcaccacacaaacaataatttaatctcccttgtgagcaaagattgatttttaaccctcttcatataatttcagctactattataagaccttgaacatagctgaatacataaaattggtattctgttttgtaaagaaagctgttattagcctgatgaatgtgaattgattcctgtggccttgtcttctttgttttgtttttttgtaatgtttgttcatttaaaatataagatgtgttgcttttctctcattataaaaggcatacatcgttcttgtagaaaacatggaaaatacaatttataaagaagaaaataaactcatctctaatgtgac

SEQ ID NO: 295375 - DNA, 1000 bp, Homo Sapiens
ggcctctagggctgaggacgacctggcgctccgtgctgcgctctacggcctgctcttccacagccatgccgaccaggacgactgggagggcggcctcaaggtgctggacgaggctgtgcaggtgctgccaaggacggcccaccgcctcttgatcttcaagcacatggtcatcgtgaaggccaagctcgggcagaatttttcgatggaaatacagaaattcaaggccgagagtgaggactacttggcgcgcatgtggcaccgcctggccctgaactcgccgagcgtgtctggagagctggcctgctacaacaacgccatccaggccttgcagaagcctgagatggagtggcagaaggtggagtacctcatggagttcggccagtggctccatcacagacactttcctctcgaggacgtggtcttccacctccgctgggctgtcgagatcctgctggccatgaagccgcccggcgatgtccctgagccacagcccacgccggatggggagtacgtggctgtggagatgcccccacggagccccgtgtccgaggccgaggaggcggtgtccttggagcagctgcgtagcgtgcggcagctggaggcgctggcccgcgtgcacatcctgctggccctggtgctgtcgccgggcgccgagggctacgaggactgctgccttgcagcctacgccttcttcaggcacatctggcagaccaccacccaaaactgcctctgcctggctcgccacaccaaggcagcggcaggcgcctctgttagctggggcccgacagctcctgaaccgcccgctgacggggcttccagagccttcttcccactcccacccccctccttgtcctgctcctcctaccacctctcccttggagtgagactgagggacacccgcggagccagcaggctcacgggcatgtccctgcagcccccggtgcccacaccccgggccagcccagctccgtgctctaggggctcccctgatggcagctga

SEQ ID NO: 295376 - DNA, 839 bp, Homo Sapiens; identical to SEQ ID NO: 119336

SEQ ID NO: 295377 - DNA, 990 bp, Homo Sapiens
tgtgggaactttgttctttcgctttttgcagtatagcttgctgctgctcactctttgggtccacgccgcctttaagagctgtaacactcactgcgaaggtctgcagcttcacttctgaggccagccagaccatgaacccactgggaggaatgagcaactctggacacacaatctttaagaactgttaacactcaccaggagggtctgcggcttcattcttaaactcagcgagaccaagaacccaccaattccggacactgtggagagagaccagtggtgggcagggctccagaactccaaagatcattttctcaagcaatttttaaatttcattcatttaccttattgagcttttcttagtgcctaaagtgtctgcaagtggaaatccagaggaagacagagagaaactgagttcctgacaatgcattcactaaagaaagtgacttttgaagatgtagctattgacttcacccaggaagagtgggccatgatggacacatccaagagaaagctgtacagagatgtgatgctggaaaatatcagtcacctggtgtccctcgggtaccagataagcaaatcctatataattttgcagctggagcaaggaaaagagctgtggcaggaaggaagagaatttcttcaagaccagaatccagacagggaaagtgcccttaagaaaacacacatgatatccatgcatcctatcatcagaaaagatgcacccaccagtatgacaatggagaactctctcattctggaggatccttttgaatgtaatgattcgggagaagattgcactcacagttccacaataattcagtgtttgttaactcatagtggaaagaaaccctatgtcagcaaacagtgtggaaaatcccttagtaatcttttgtcccctaaaccacataaacaaattcatactaaaggaaatcccacttccaactggatgtctggatgaactactgaaagctgctgagtgtcctgcagcag

SEQ ID NO: 295378 - DNA, 827 bp, Homo Sapiens
gcggtgtaagtcggtggcggcgccggtacgcctggtccccgcgtggagtctttactcaaaacagctcccgcctcaggccgagatgaggagcccttcagaatagctgctgtctctgggaggacccgggcgtccttggcagcccagctgctctggacaaagccctgccagtcaggcctccgctggcaggaaccatggcagaggctggggatgctgcgctatcggtggccgagtggctgcgggcattgcacctggagcagtacacggggctctttgagcagcatggcctggtgtgggccactgagtgccaaggcctcagcgacacccgcctgatggacatgggcatgctactccctggtcaccgccgccgcatcctggctggcctgctccgtgcccatacctcaccggcccctgcaccccgccccaccccacggcctgtgcccatgaagcgccacatcttccgctcaccacctgtgcctgccactccacccgagccgctgcccaccactacagaggatgaggggctccccgctgccccacccatcccgccccggaggagctgccttccgcccacctgcttcaccaccccatccacagctgccccagaccctgtgctgcccccgctgcctgctaagcggcatttggcagagctgagcgttccacccgtgccgccccgcaccggacccccccgcctgctgacgccctcccttcctgccatctgctgggatgcccggctgtcagggagcatccccagacagggtagatatgtgtttggggtgccctctgtggtcctccatagacttctgggccctcctggcactgacatctga

SEQ ID NO: 295379 - DNA, 1000 bp, Homo Sapiens
tctgaagaagattgtagaaaagagactaagatatatgcaagggtcaccagtttagagatcagtcaaattggaaaaagtgccaagactggatgtgcagattgttctatgtattatcagtatttttttcctcttaagaaaaaaatttactctctctcctttgtgagtaaatgcctccttaatgccttttaagtaaggtggcaacttttaactgtcatcttgtgagaggcaacctcaaactctaagcagactccctctctccctttctggtgtcttaaatcaagaactagtttgaagccaaggcaaagcaaggtttgttcatcttcctttcctgtcatttaaggtaaaacaggcaatgaactcgctcttcaaataccatagttcaagagtagctgttggccctggttccagattaatatagcagcaggcagattgccccttcttggggccaccaccctccaaagctgtgccaccaatgagagcattgggttcaagtttgcatcaaacatggtattaccaacgctgagcctccagcagagcacttaaaagtcctagtgagagaatagatactatgcaagggaaaaaaatttaaatgccaacgaatagtttttttttttttgaacctgatacactgtttgtttactctcaactctttgtacaaatattattgtcctaagggccttttcccctcctgcctagaaaataggttgtgtattggttttattcaacctgctgtctgctttaggattggagaaggtacctggatccttgtggactgccactgctggctgcctcctctccaactcatcagaagagcattttgacaaagacagaggacttggaccagggcatgccctgttggggatgtttctgtcagcaaggacatggcatggaatcaagtgggctgatgtgttgttatttaaacagtaccaaagtgcattcttcaatgtatgtttgcctgcttgaagcaaggcccaagttgagaatacagtaaaggaaactc

SEQ ID NO: 295380 - DNA, 451 bp, Homo Sapiens
atggatgacttggcatttttgttccattttcagttcaaaagcatcaaccaaggcaagaggaccagtgttgctgactccatgctgtggttgctggagaaatattcccagaacctggaggacctgattcaggagcagactgaggaactggagctgaagagagagaagacagaaaggctgctctgtcagatgattcccccgtctgtggctgaagctcggaaaatgggggcaactgtggaaccagggtattttgaccaggttaccatatacttcagtgacattgtgggtttcaccatcatctcagccctgagtgaacccattgaggcggtgggcttgctcaacgatctctacatgctgtttgatgctgttctgggcagccatgacctgtataaggtgagaataccaggaggctggcattccattcctccctttactactgtgccttgatggtaca

SEQ ID NO: 295381 - DNA, 1000 bp, Homo Sapiens
gtagtggcaggcacctgtaatcccagctactcaggaggctgaggcaggagaattgcttaaacccaggaggcggtggttgtaggaagctgtgattgcaccaccacactccagcctgggtgacaagagcaaaactctgtctcaaaaaaaatgtatttaataaatgttcctattgttctttctatgtgccaggtactgttctgagcactttacaaacactgtctttaaacctctaccctctacggtagatactgttgttatcctcacccatcttattgatgcgggaactgaggcacagaggggttaagtaacttaacccaggatcctaacccagtaaattgactctaatctggattgtcttttcgtgatctctgcactaggcagaataatggctcatccaatggaatgttcacattccaatccctgggaactatgaatatgttaccttccatgacaaaaggactctgcagatgtgagtaaattgaggatttggggaaagggactctccagcttttgggagcagactggaaaatggaaaaggcaagaaaatggatcctcccttggagcctctggaaaggaagagatggtatcctgatgataccttaattttagcccactgacatccatttaggacttctgaactacagaactgtgaaataataaatgtgtattgttggccaggcacagtggctcacatctgtaatcccagcactttgggaggccgaggcgggtgtatcacctgaggtcaggagttcaagagcagcctggccaacatggtgaaaccccatctctactaaaaatacaaaattagctgggcgtggtggcacatgcttgtaatcccagctactcgggagctgaggcaggagaatcggttgaatccaggaggtaaagatgctgtgagccgagattgcgccattgcacttaagcctagagacaagagtgaaactccatctcaaaaaataaaataaaaaaataaaaataaatgtgtattgttttaagccca

SEQ ID NO: 295382 - DNA, 1000 bp, Homo Sapiens
ggggggcctttatgttcaggttttgcccaagagtcagcttatttgcttctagtactagcagggtagatgctgccaaggccctcaaacaggggggccatcccttagaaaccctgtctagttgtttagagacgtaggccaccggcctcagccaggtccccacagtttgggttaaaagtccagctgccatcttttctccctctgacacatacaatgggaaaggctttgtcagttcgggtagccccagggctggggctgccagaagtttttcctttaactcatgaaagccttgctgttgttggcatcccctttccaaagcttcccggtccctgccccttttgtgacctcatacaaaggcttggctaatactgcaaagtttggaatccacagtctccaaaaccccacagctcctaagaattctgtcacctgccttctgcccttaggctcccgtagattgcaaaggacatgctttctttgtgatcccgggctgcattcggacccctgtcggatagtgaattccaaataatgtacctaccgtcggcagatctgagctttcttcttggacacctaatacccacagtcctccagtgaaggatccagtgagattttccaggttaacggtcataaccgcctactggtccaacgttcagaagtaacacaggcacctggagaatacacagtagatgtggaaggacacggttgtacatttatccaggccacccttaagtacaatgttctcctacctaagaaggcatctggattttctctttccttggaaatagtaaagaactactcttcgactgcttttgacctcacagtgaccctcaaatacactggaattcgcaataaatccagtatggtggttatagatgtaaaaatgctatcaggatttactccaaccatgtcatccattgaagaggtaaataatagaagcctaatctttcagcacaaagacagctacatagagtataaagataaaataaatacttgttcagccatagtt

SEQ ID NO: 295383 - DNA, 553 bp, Homo Sapiens
cccactggctgctctgaaaagccatctttgcattgtgcctcgtcagcctccttgctcgccgcagccgcctccgccgcgcgcctcctccgccgccgcggactccggcagctttatcgccagagtccctgaactctcgctttcttttttatcccctgcatcgcgtcaccggcgtgccccaccatgtcagacgcagccgtagacaccagctccgaaatcaccaccgaggacttaaaggagaagaaggaagttgtggaagaggcggaaaatggaagagacgcccctgctaacaggaatgctaatgaggaaaatggggagccggaggctgacaacgaggtagatgaagaagaggaagaaggtggggaggaagaggaggaggaagaaggtgatggtgaggaagaggacggagatgaagatgagggagctgagtcagctacgggcaagcgggcagctgaagatgatgaggatgacgatgtcgatacccagaagcagaagaccgacgaggatgaccagacagcaaaaaaggaaaagttaaactaaaaaaaaaagaaaaacc

SEQ ID NO: 295384 - DNA, 1000 bp, Homo Sapiens; identical to SEQ ID NO: 225060

SEQ ID NO: 295385 - DNA, 1000 bp, Homo Sapiens
tgggggaccagtccgctgtccttgccctcactctgtgaggagacccacctacgacctcgggtcctcagaccaaccagctcaaggaacatctcaccaatttcaaatcgggaccccactggaaaatggactgtccaactcacccggcagccactcccagagcccctggaactctggcccaaggctctctgactgactccttcccagatcttctcggctcagcagctgaagactgacactgcttgattgcctgggaagcctataggaccatcacagacactttggataactcttacagtgaaggtgtctggagtttcccctatggacgctctctcctgccaccatacaaaaaagcgccactgcagggaggaatgccagggtcccatagagggagaccgacagtgaagtggagcctgccatgaattcaccaaaggccattctccctttcttccagaagaacagcatttagctgggcctatggctacctacctaaagactgcacctcttagtcacccttgtggccaggtgtggccacgtgacagtggaatgtaagtggaagtgatgtatgcacttgggttcattggtttaaaaaaaaatatgaccgccctccatttccactctttgtcttatctgtgaatgggaacatggctgtgtctgcagcccgactttgtgcagcaaaggacaaggccctaggggaaggtggagaaacaagatggaacaacttggacccaacaacttggatccctatgtggccatgtggagtcatctcacccacctgggccactcaccccgaagactgttgtgtgagggtgaaataaacttctgtatcactagcccctgcatttcagaaattctttgttatggcagttttgcctttatcctaacacagacagcaaagtatcttctgtggccccatgactaatttcgttgtttaaactcattataaaaactatataaataaaatattaaaaatcaaataaaatagcaagataacactgtgtaa

SEQ ID NO: 295386 - DNA, 1000 bp, Homo Sapiens
ccttacttctctgaaacagtctgaattccaaaccctgtgtggccctaaggattttggataagggactatgtacctataatataaataagccatattatttacaatcatgagtttctgaatgttcactttttttatttttggagacagagtcttgttctgtcacccaggctttagagtaccacagtgtgatctcggctcaccgcagcctccgcctcctgggttcaagcgattctcctgccttagcctcctcggtagctgggactacgggcatgagccaccagatccaactaattttttgtatttttagtagagacggggtttcaccatgttggccaggctggtcttgagctcctgatctcaggtgatctgcccgtctcaccctcccaaagggctgggattacaggtgtgagccactgtgcccagccagaatattcacttctaaatgtgggtgtgtattcaggtgacttgggattaaaaaaaaaagaaaaaacccttatgggattttatatttagaagttctgttgttgaaatatgaacctgtatctgttgttgcagtggcagaaggctgcagcacaatgaatgattattgtgaaagctggtaattttgtgcccacaaataattgtcaagaactttctaataataaaatacagaaatagattaatagttgctacaaacataaagagagactccatggtagaacactttaggaagcacattttatcttttttgaaccaacatgtatttccaaacatgtaagtaataatatcaagcgtggtgggaagattggattggaggctgattctgatctgtgtgttgggatgaactgtggcattcacagcattgagcaaaatcatcttcaaggacagcgtttaattctgttgttgacaagtcttttaagaaaaagtactagtttgggaatttttcacagatacaaataagcttgacccctaaatttaaaatattatttaaaaaataaaatgtcagatttattcatctgtc

SEQ ID NO: 295387 - DNA, 1000 bp, Homo Sapiens; identical to SEQ ID NO: 119338

SEQ ID NO: 295388 - DNA, 1000 bp, Homo Sapiens
gttaacagagatgaccagtttcacatttcatttaatgagcaaaccaacacctgagaagcctgagacagaagaaatccaaaagcctcaacgtgttgttcatcataggaagaaattagaacgagataaggaatggatacagaagaagacagtggtgcatcaaggtgatggaaaattaattctctaccccaacaagaatgtctatcaaattctctttcctgatgggacaggccagatacattatccatcaggaaacctggctatgctcatcttatatgcgaaaatgaaaaagttcacatacatcattctggaagacagtctagaagggaggatccgggcccttatcaacaactcaggcaatgctaccttctatgatgaaaatagtgatatctggttgaacctgagctccaacctgggctactacttccccaaagacaaacgccagaaggcctggaactggtggaatctgaacatccatgtccacgcaccccctgtccagcccatctccttgaaaatcaatgagtacatccaggtacaaataaggagccaggataagatcatcttctgcttcacctatgaacagaagcagatttgtttaaacctgggcaccaggtacaagtttgtgatcccagaggtgctgagcgaaatgaagaagaaaaccatcctggaggcagaacccggcccaacagcccagaagatccgggtccttctggggaaaatgaataggctcctgaattacgcgaccacccctgatctggaaaacttcatagaggccgtcagtatatcactgatggacaacaagtacctgaagaagatgctctctaaactctggttttaaggcggggcttatctggcatccaccaaatgccttaggaagttggagaccttgggagctccagggaaaaaaaacccaaagacctgttgaccttttatgagagttggtttgtaatttgggacctgtcgtggctccttgatttgaagtaaacatttttggcagaagggc

SEQ ID NO: 295389 - DNA, 1000 bp, Homo Sapiens; identical to SEQ ID NO: 119339

SEQ ID NO: 295390 - DNA, 1000 bp, Homo Sapiens
tgttcggcggtctcggcggtctggaatcctcctaggccagcgaaccttactgaacactggcgaggactccgcctctaggaatagaatcgcgggagtctcggcgtttctacctcttcgcaccctttcctgccaccctttgtcccctggaagcccggagacatcagcggctgcaattttgctactcgctgctcggcgtggaactgtcaggtaccgcagttcagcacttttggctccgcaggtcctcgggcatccctgtgccccgtgctttcattattggaaaactttacagcgtgccagtactggtcataaaccccaagagacttcagacaaccaagacagtgtaaaggaaaacagagaaaaagacttgttagacattattaagggcacgaaagttgaattgagcacagtaaatgtacaaacaacaaagccacccaacagaagttcacttaaaagctacaactggcgggcctcaaagagctttaggacatgctccaaagaagaggatgggtgtgatgtatgtaaaatatatgccttagaaccttttatcagtggtcctgtgtttaaaaaagaggctttggtcctacatcaaaagactggtgaacaagcaaacaagccagaactgctcaggcagctccgtagcatgaggaagagtcaggggcacagagagatggagagagacctagttagtttcaataacaaaatatcagatatgaaaattgccagatgtgctacagctagaattaatataaggccagagcatcagattcagtttgaccaaggctatgacaattatcctggcctggagaagactgctgatcttagaaacagtaaaataaatgaagaaactcagtacaaatggtctccagagtacacatcaccttcactttgggatatggaatttgataagcagttagccacagaatatgaacaaccccttgagaatgagattgaagaactgatccaggggacaaaagaggggaaactgagagttcccaattaa

SEQ ID NO: 295391 - DNA, 1000 bp, Homo Sapiens; identical to SEQ ID NO: 225063

SEQ ID NO: 295392 - DNA, 413 bp, Homo Sapiens
ccctgcttcggctcgcgcacgatgcacgcacccactgacctgcgcccactgtctggcactccctagtgagatgaacctggtacctcagatggaaatgcagaaatcacccgtcttctgcgttgctcacgctgggagctgtagaccagagctgttcctattcggccttcttggctccttccctgggctcttttatattgctggcaaaatagtgactccccgtggaacagagttgttgttcagcagaaataatcaagagttgacatcataccagacctcgggactcaacaataaaccagaccagtatggctctatcttcatgaagaacatacacaataattcaggactcacagaagtcgatgagcagaacacagaagactcaacctgaagaaattccatatacgtgctactcctgt

SEQ ID NO: 295393 - DNA, 481 bp, Homo Sapiens
atggattgcttgtcggcgccattttgtctcggcagcggtggccgtagctccatcgcattttatgtttctggcgagaagggaacggagttttcatcaggtagattggtttttgtgcggccgtcctccaccgtttcctccaggacagcacctagtcgtggccggaggagtctcagagctgtcagaaagaataagactgattttatgggaaaattaagcagatgctccagtttgagaaacctggatctgcgatctgtttgtgaggtgaagaagaaagaaaatgaaacatactcaagatttaagaaagagggaacgagcagtaccattcactgatttggcaagtcaagaaaagccactgagtggtattcagttaagagaacaattatttcgtataagccacatcagagacgactgaagatgaaaaaactaccatccccgtatataactaatttgtgctgtgcaccaacaagaacctgctttaaat

SEQ ID NO: 295394 - DNA, 1000 bp, Homo Sapiens
acaagaacactggagtctgggagtctgcagcttcctgttgcatggctggctgtggaggtcctgcagatggtatctgttcagagccacttgggcacgaccaagatggcaggaaggacagattcagcagccaaccaaggagcataccttcatttgatttccttaaggcaaaagcactggctaaacaaagggagactatctgggagaaggtgttttcaccctttcaagctggggtgctttcaccaccgggaagtgccacgctgctttccacgctggaacaaggactcacttcctaaggccttggttccccaggagctgttggccagaagcctccctcggtgccctgcctcatgggcctcttcgttgagcatctcacaacgtggcagcttacttcatcagtgcaagcaagcaagagcaagagagaggactcaccagagacagtaatagcaaaacagaaggcacagtctttcgtaatccaatcacagatgtgacatcccatcactgttgccacatcctgtgagttagaagtaagtcattaggtccagcccacactcaaggagattacacaaggatgtaaagaccagcaagaggatcattgggagctattttagaagcagcctactctaagataataataacatctagggtttgtttaaaatttaaattagagactgcatggtggcagctacttgggaggctgaggtgggaggctcacttgaggccaggggtttgaggccagcttgggcaacatggtgagactcctccatctcttaaaaaaaaaaaacaaatatatgtgtatatttttaaatattcaaaaatcaaattagagaatatgttcaattcgggccagcatatgttatgtaatatataactgttatatataataactattattaccattaatattattattgactatataatggctggttttctcccctagctcctagaaggaacccttttatgaggagtaaatgaaataatatacataattcaggacctg

SEQ ID NO: 295395 - DNA, 1000 bp, Homo Sapiens
cagaggcttggcactgggagtgcgaccagggccacccagcatggccatacccttccccatgtgggactccatttctcgaatgctcagcgaaggctgggtggtctggagaaagctgggagatgcagccagctccaagccctccatacggcagcacctgtctgggaaccagttcaaggggcctttgacgctgcccgccctggcccagctgccatgggtccgatgcactggcccaagccgccatctcccgcctcatacaccagcaacctgggaagacgagacgctgcgactgttcctgcagcagagcggcccggacgcctcattccccctctgggccctgggctccatgagcaagaggctgcaggctgcttctgagatccagcctgggaactgtccaggctcctctgtcctgcctgggatggaggggccactcatcaaaccctctactccccggctgccacccacactggacagagaccaccactacctgggtcttgacgcaggtggcaccacttcttgcccaaatgccgtggcctggccccaggccccccaagcactgggtccccggcatgtggacaaggccactcaccacatctgtggctggctggaggctgccctgggcccttcctgggctgctcagccccacctgaagagcccagagaggctgtcttcctacccagcaggtctcatgcaggcccagggctggggatgcaggcaagaggagggagatggccgccctgtccctctccctagctggcggctctattctgagcagttcttgctgcccgttggcgtggccaccactgaaataagcaataagtacgggctcctggtacctgcggatctcctgcaaacaggcccagagaacagccttgaagccacctttcccctcaaggggactgaccctgtctttaatgctgcagtggcatccagggatcagtggaacattgctttgagaaccctcctgctgttacggaggcagcacaaagctggtgacccctga

SEQ ID NO: 295396 - DNA, 631 bp, Homo Sapiens; identical to SEQ ID NO: 119340

SEQ ID NO: 295397 - DNA, 1000 bp, Homo Sapiens
ctaaaaacagtagaaattttgcacacctgggttagaaaaaaaaaaaatagccattaaacccacccctgttacaggtcactattggtattttgattttgccttcaatccatctgttattgtttacttttaagagtccttgatagttgctttttatgtccagagttttaatttcagtcagaaagagaaataggccttggtgagcatgctttgtcttggctggtgccagaagtcagtactcaaatatttttaaaataatttttagttgaataacaagttagacctgtgtttagctttctcattgttttcctaaaaatagaagaaaaggttttaaatactttaaccacgaaataatttaaagcaggtttaaaataaactccttcattttgcctgttctattactctgttctcacactgctaataaagacatacccaagactggtaatttataaagtaaagaggtttaattgactcacagttccacatggctggggaggcctcccaatcatggcagaaggtgaatgaggagcaaagtcacatcttacatggtggcaggcaagagagagagcatgtgtgcaggggaattcccctttataaaaccatccaatctcatgagacttatgcagtctcatgggagcagcatgagaaagactcacctccgtgattcagttacctcccactgtgtccctgccacaacatgtgggaattgtgggaactaaaaatcaagatgagatttgggtaggaacacagtcaaaccatatctcctatatacattcacactagcattttagttttagaactagttctatgttactatctgaattaatttttccacaattttgtaaggaaaaataatgcgttctttgaatttcatgtgtaaatgatatttttagttttgtgtcattttgtcaaataaattctgaaaatctttgtattgacagtgtgttatctctgcataaccatatatgtataagagtgctcaataaaaagaataaagaggaaa

SEQ ID NO: 295398 - DNA, 1000 bp, Homo Sapiens
tgccaaaatgtaaagaccatccagactaggaagaaactgcatcaactaacgagcaaaataaccagctaacatcataatgagaggatcaaattcacacataacaatattaactttaaatgtaaatggactaaatgctccaattaaaagacacagactggcaaattggataaagagtcaagatccatcagtgtgttgtattcaggaaacccacctcacatgcagagacacacataggctcaaaataaaaggatggaggaagatctaccaagcaagtggaaaacaaaaaaaggcaggggttgcaatcctagtctctgataaaacagactttaaaccaacaaagatcaaaagagacaaagaaggccattacacaatggtaaagggatcaattcaacaagaagagctaactatcctaaatatatatgcacccaatacaggagcacccagattcataaagcaagtcctgagtgacgtacaaagagacttagactcccacacattaataatgggagactttaacaccccactgtcaacattagacagatcaacgagacagaaagtcaacaaggatacccaggaattgaactcagctctccaccaagcagacctaatagacatctacaaaactctccaccccaaatcaacagaatatacatttttttcagcaccacaccacacctattccaaaattgaccacatatttggaagtaaagctctcttcagcaaatgtaaaagaacagaaattataacaaactgtctctcagaccacagtgcaatcaaactagaactcaggattaagaatctcactcaaaaccgctcaactacatggaaactgaacaacctgctcctgaatgactactgggtacataacgaaatgaaggcagaaataaagatgttctttgaaaccaacgagaacaaagacacaacataccagaatctctgggatgcattcaaagcagtatgtacagggaaatttatagcactaaatgcccacaagagaaag

SEQ ID NO: 295399 - DNA, 1000 bp, Homo Sapiens
gctgaagagccaagaggctcagagtctgcagcagcagccagaccattacctgggtcacctgcagcagtacgtggccacctatcagcagcaggtggccgcctatcagcagctgacctgtgagaaggaggagcacctggaagcggccagccagcagaaccagcagctaacggcccagctgagcctcatggctctccctggggaaggacacggaggagaacatctggacagtgagggggaggaggcacctcggcccatgccgagtgtcccagaggacccggagagcagggaggccatggtggcatttttcaagtccgctggagctagtgtccaggagaagcaggcacagttacaagagcaggtgaaagagcagagggtgtgctgccagcgcctggctcacccggtggcctcggcccagaaggagccagaggcagccagaggccctggagccccagggcctgggggcgagtctagcagctttatggaccacctgaaggagaaggcagacctgagtgagctggtgaaaaaacaagaacttcgcttcattcaatactggcaagagagatgccatcagaaaatccatcaccttttatcagaaccagggggccgtgccaaagatgcagcactgggaggaggacaccatcaggctggagctcagggaggagatgaaggtgaagctgctggagctgcagcagatggtattgcggcttacagcaactacaacaatgggcacagaaaattcctggccgctgcccacaactctgctgatgagcccggtccaggagccccagccccccaggagcttggggctgcagacaagcatggtgatcttcgtgaggtgaccctcacctcctctgcccaaggagaggccagggaggatcctctccttgacaagcctactgcacagccgatcgtgcaggaccaccaggagcacccaggcttgggcagcaactgctgtgtgccattattttgttgggcttggctgccaagaagaaggagataa

SEQ ID NO: 295400 - DNA, 1000 bp, Homo Sapiens
tgcggtgagaaacgtgtacaccactcgggacagcagccacataacttcagaggttcgtccgctcacaggcccctgcggtctgggctgtgccggtggtctgcctaggaaactgccttcagtacgcaggggactggacgctatgatggaagacgttggacagaatccactggatgatgtcctggaaagaaagctggccttgtcactagaagaagccaaagaggaggaggagttgaactatgtcatagatgaacaggaggaatccctgagggagctggaattagagacagcaaagctggagaaaagtaacgcaatcctaagcaggaatgtggtggaggttcagaaaaagatttcagggttatttacaaatattggccttgaagaagaaaccacaaagcagatcctggaggaaatgaaggcaagactacagaagtcaacagagtcctgtgcaaagcaagaggaggaactggccaaggcagaggcaatgtctcttccactgagggtgcttctgaggctgcggtttcaagaagtcagtagtgtgaaaactggatccctatatgacaattttcagcacttacgatcaagaacggctaggctgagggggcaggggggccaggccactggagcgaaacggcctctccggatctggaggcgtgggaacctcgggaatagtggggagttccagaccagttcccttcccccatctgaacaagtccagagcgtgcgccttgagaggcgctcggaaacagggaagctggggacacgtagcgagagactggttgtcgccctggctctcgtcaggccggcgcgtgctaggaaggcggggcctgtggcctgtggggcggagcctcggtggaggtcggcgcagctgcccctttgggctttggctctggactggagcgcagcatccttcgaggctgcagccgccacggctgttgccgtgtcagagctgatgcaaatggggtatggtagtcttcaggttccttatagcactacatcttag

SEQ ID NO: 295401 - DNA, 1000 bp, Homo Sapiens
atttttgcatacacattaaaatagaaaaggtgggaaatattttctgctgaccagtttccaacctttctgaaatatcactgtgaagaaatgctgttaaagcaaacttacataaagcaatgctagagtttgttaacaatgtttgatatatattgacaaaactttgttctctaaaactgccaagatcacatcacatttgtaaaaatggtaagttaatgcatttgtcatatagtgttatgtcttggctttaccatatttcattctttaaaaagtcattaatggtttagaaatgggatggaaagtttactgaaaatacctgtaagtaactatattgttaatatcttccctctgacagttatgactctataatcagttcaatgctttatttttaaaaatattcaatgattagtattgaatgcagcattactatatattgtactgatgccaaaagtcatgttttcatccacttagtgaaaaaatagtaaaattaagtcggaagaaattgcttaaaattttgtaatttgtatttataagccccaaatgcatcaaatgcagtaggagaacaatgtaatacagcttggtacctaaaaatatagctaagttggtttttgaatataaaacagtttatgaatatgtgcattttctgtattgttatgatttgactttttagagtctatgccaaaatatatggctgtaaaacagtactttgtaattataacttatggtcataactgttagtggactacttacagaagcagaaacaagagcctgttatgattgtgctttgtgaacaagctgatctaatacgttaagtacagaagtgcttagtatcatgactgtcagaaccattctgcaactgagtatgaaatcacagaccagtgaggtgagctaattcatgttaaactgttaggccactgctttgttaatgactcctctaaatgcatagtgtgatgcgatcctctggcatatgctttaataaatggatgtatattgagcacatgca

SEQ ID NO: 295402 - DNA, 1000 bp, Homo Sapiens
cataccaggaaccagacgatgaccccctccaaaagttgggtctttgaggagagctactaacttgggttcctggtacaccctctacatgcagtggtgaagcttatctaacagtcattcatagaatcagtttgggaaggggaattttcactgaactctcatagagaaactgtgttttagataacagaaagttctgcacggttaaaatggaacagaaatttttttgcacagaaattaggattaccgaaaatactgaagaaagactacctctgattggactcttctcaaggaattaataattcaagaactaaggaaagaaaaaagtgattatatgaaaatactgaagttgatcgtagcagctgaaggctgatcctgtgtgggtaaatgtaaacgctgaattcccacattccaatgtgcgacctgggattaaggcagcaattgagcagggctgaagtacattggtgcaatcttggctcactgcatctccaccccaggttcaagcgattctcctgcctcagcctcccaagcagctgggattacagaatgtcacataaatggaatcatactgtgtccggaattggtgggttcttggtctcactgacttcaagaatgacgccatgggccctcgcggtgagtgttacagctcttaaggtggcgcgtctggagtttgttccttctgatgttcggatgtgttcggagtttcttccttctggtgggttcgtggtctcgctggctcaggagtgaagctgcagactttcgcgatttcatctctctctctgctatggacacagatggcttcactccatcctgtattcttcggaccatgataaaattccagactctcggtagtttttgcgttccaagaagtagagcctagagtggtggcctataattacagttactcaggaggctgaggcaggaggatcctttgagtccagcagtttgaggccagcctggacaccacagcaagaccaccaataaataaataaataaatggaacatg

SEQ ID NO: 295403 - DNA, 1000 bp, Homo Sapiens; identical to SEQ ID NO: 225064

SEQ ID NO: 295404 - DNA, 1000 bp, Homo Sapiens
ttctgaaactgagcttatctaatacattgataaattatttcaaaggtatttttatagttcaaatcgcttcacttttaccctgacacgtataaatgaataggaatgaccttcagatagcgtttagcaactgtaaccaatctgacaataatgtgttcatcaggtacctgtggattaaatcacatactggcatatttaagatgaatgtcagtctgaaaaataaatatactatattaattcaaatacgactctttgtgtaggtattttgtcatatgtttaagaaaaagctaaagagaatggaaatcctatgacaataactcaagtctttcttcaaagtgcatgcagtcttttgcagtacctcattcagccaagtatttgttctctacctcattcagtataaggcagcctttaatttgcttagaaggcaacattagaaggttagagttcagcaggaacatagaattttaaaatgtgacttcaactgaataaatttgaatttctctagggagtaaagaatcaaaacacctatttaaagactgcaaaatatgataattatttttaaagtaattgattaaacctggtaggttttcccaaaatgaaaaacaatcagttctaaaaccaaagctgatttttagaaaatgtgaaaatgtaaatcaaccctatccataatagattctctaaaactttatcttacagtcactttcaaataactattcaaaaatgtaactgctatattaacgtcttaaaataatttaaaacattttaaaatatgaatactgtagtttaaaacaaagaatctaggggaaggaaaagtagacaaagaaatgccaattccagtccaaagctgtatttgccaagttttcttagaatgacttttaccgatttatgaattcttatacacagaatgcataatggaaatactgatttttgtctaaagtggcattattgactgcttctgtgatgctactgtaatgtaatacattattaaattgtttcaaggtgc

SEQ ID NO: 295405 - DNA, 1000 bp, Homo Sapiens
gcagcaaacaaaagaattccagggcagaaggagtcaacgcaagcctcagatgtgcggaaggatgaggcttcaacctgtgttaacaatggtgcgggctggtccagatggagctggggcaagcccttcctcgcggttcaaggagccgtttgatctgtacgtggccttcgccttgatgctggcttcggggcggcctcctgggactgggaccagatcaccccccgccgccccatctgcctgctcagaaacttcacaaggccacggttctgagagctctgacgccccatcctcttcctccgcgcggctccacagccagaggaaacctggggaggggttgttttcccagccagcctccaccttccacaccaggtggtcccacctcttggtgggaaagaaaagagctggctgtgaaggaccctttacccaagggctgttttcctcctggggaaggttctggagcatttcttccccatgggagggtccccaccctccatgcctggacaagctgcaagctcctcaggctgctggggccccccctcctccctgccttcgcaagagtcagggctaccggggaattggctgccttgtggagctggaaacagcccaccaggtccaggggatccagggaatggctctatgccctgtgggggctcttctagctttggcagcagcagcggcagcacctaccgagccccacgcccatgacgcgcaggcggccatgcgccccttcgacccctccgctctgctgcccacctgctgggattactggacctatgtgggctcgctcaccaccccgccgctgaccgagtcggtcacctggatcatccagaaggagcccgttgaagtggccccaagccaactctctgcatttcgtactctcctgttttctgcacttggtgaagagaagaagatgatggtgaacaactatcgcccacttcaacccctgatgaactggaaggtctgggcgtccttccaggccactaatgagggcacaagatcctag

SEQ ID NO: 295406 - DNA, 1000 bp, Homo Sapiens; identical to SEQ ID NO: 119341

SEQ ID NO: 295407 - DNA, 1000 bp, Homo Sapiens
aataaaataaaaggaagagacagcctgagcattagagcgagactccatctcaaataaataaattaattaacatttcagcaaaatacacacatgcacacagacaaagaaaatatgacaaaatggtaattattgaatttcaggataggtgtatgagtgacaattataccactttttcaactcttctatgtttagatgctttaaatatttaaagctaggggctgggtgcagtagctcatgcttgtaatcatcatattttgaggggctgaggtgggagcatagcttgagcccagcagttcgaggctgcagtgagctatgatcacaccactgccctccgggctgggcagcagagcaagaccctgtctcaaaaaaatataaaataaaatgaaataaatctggggagcacgtgggggagggactagtgcatcacagcctaattgaacgagcaggagactgccatgggatgaggccaggcccaactgtgtcagtccctctgggtcattctaaggacttcggattctatcctgaatgcatgaggaaacccttgaaggccttaagcagagagtgacatggtctgattttcttttaagctgtagctttgtttttgagatggggtcttgctaaattgcccaggctagtctcgaactcctgggctcaagtgattctcctgccccagcctcccaagtagctgagattacagataagtgccaccacgcccagctaatttttgtatttttagtagagacggggtttcaccatgttggccagactggtctcaaactcctgacctcaagtgattcgcttgcctcagcttcccaaagtgctgggatgacaggtgagagccactgtgcccagccaattgtacatttttaaataactcaaagagtgtaattgaattgtttgtaacacaaaggataaatgcttgatgtaatggatccccatttaccctgatgtgattattatgcattgcatgcctgtattaaaacatctcatgcaccccata

SEQ ID NO: 295408 - DNA, 1000 bp, Homo Sapiens
taacggtgagaaaatccttagtaaattgtcaagtctaagaaaacataaaataatccataatgaagagaaaccttacaaatgtaaagaatatgaaaaagcctttaaccatcgttcacaccttactcaacatcaaataattcatactggagagaaaccatacaaatgtaaagaatgtggcaaagccttcaattctagttcatattttactagacatcagagaattcacactggagaaaaactttacaaatgtaaagtgggtagcaaatgttttacttattcttcaaatcttcttgtgcatcagagaattcatactggagagaaaccttacaaatgtaaagaatgtggtaaatcatttaaaatgtcttcagcccttactcagcacgagagaattcatgctggagagaaaccctacaaatgtaaggaatgcagcaaagcctttaactgtaggtcatacctaactaaacatcggagaattcataccggagaaaaactttacaaatgtaaatcacatagcaaatctttttctcattcctcaagtcttattgtccaccagagaattcatactggagaaaaaccctataaatgcaaagaatgtggcaaagccttttatcgtaattcacgccttactcgacatcgaagtagtcataccggagagaaaccctacaaacgtaaggaatgcagcaaagcctttaactgtaggtcatacctaactaaacatcagagaattcatactagagaaaaactttacaaatgtaaatcatgtggtaaatctttttcctgttcctcaagtctttttgtccaccagagaattcatactggagaaaaaccctataaatgcaaagaatgtggcaaagcctttatttatagttcatgccttactcgacattgaataattcatactggagagaaaccctacaaatgtaaagaatgtggcaagttatttaatcgatgctcgaccctttctcaacgtaagagaattcatactagagaatctctatag

SEQ ID NO: 295409 - DNA, 1000 bp, Homo Sapiens
cattcaccccactacaatgatgtttaccagcactattaacttactgcagactctttgtctgcctgccagagttcatgctgagatcatgcagagcgaagccaccaagactttatgcggactgctgcaaatattagtggaaagcggaacgacggacaagacaccttctccaaacaggctggtgtacagggagcaacaccggagctggtgcatgctggggtttgtgcggagcatcgctctcacgccgcaggtgtgcagcgccctcagctccccgcagtggatcacgctgctcatgaaggtcatgaaagggcacacacccttcactgccgcctcgctgcagaggcagatcttagctgtgcatttgttgcaagcagtccttccgtcatgggacaagaccaaaagggcgagggacatgaaatgcccggtggagaagctgtttgacttcttggggagcttgctcagtacctgctcctctgacgtgccattactcagagagtccatgccgaggtggcgcagggtgcgcccgcaggccttgctgactgccacccatagcagcacactggtggaggtggtggtggcactgctgtgcacgctgcactccctgactcagtggaatgggctcatcaacaagtacatcaactcccagctccgctccatcacccacagctttgtgggaaggccttctgaaggggcccagttagaggactacttccccgactccgagaaccctgaagtggggggcctcatggcggtcctggctgtgattggaggcatcgatggtcgcctgtgcctgggcggccaaattgtgcacgatgagtttggagaagacaccgtgactggcatcaccccgaagggcaaaatcaccgtgcagttctctgacatgcggacgtgtcacatttgcccattgaatcagctgaaaccagtaggtgaacttgtgctcagttactgtatgataagggaaattggctttacactaggacccagcaccaacattagcacttga

SEQ ID NO: 295410 - DNA, 1000 bp, Homo Sapiens
acacctgaccagtggccagcaccacactggggttgactgccttcaccgtgtccatgcctgctccggcagtgggagctcagtgccaggctgtggggggcatcttggaaagcagaggtgtccctgcaggatctctatgagactgtgttgtcggtggccgcgctggtttccccggagtagcgcccgatgtcactgccgagaccttaacggaaggtgcgcgtccagtcctcgcactgctgtgtgttctggtcagaatggaagtggtggcctccactaggagcttctgtgctttgggagaatttgtccaaaccgtggtcccgtttgttctccaatcctgtgtagacaccatgacccagttgtgtaaacacaggccccttgcagctcagaggctgccctctgagagtcaccgtcgtgtcgctttggggaaaagatgagcccgcccggttcctctctgtgcacctcatgcctggggctccgtcccgtcctgggtgggttttcacctgcaccgctggcccctcccccgggagcgttggtggagccggctttctcagccaggagcctgttgcggggtcagcggctggagctcaaggtcggctcaggggactttctcgtgctggaggttggctgcggagcagcctgcatttctcggaaaacagggcccagggcctgctccacgccgctgtccacgtcttcaccatcccctcgttgcaggttcgaggccgagctcagacctgtggagcagaagctgagtgcgctgcagtccccgctggcccagaggcccttcttcgaggtgccctcacccctgggcgccgtggacctgtacgagtatgcatgcggggatgaggacctggagccactgtgacgccacccatgagaacgccgctgcggggccgctccacacgtgccacggccaccactgggacaccgccgcttgtgtaaaaactgttgtcttttgtggaaaatgagtgtgtttgcatggaatgataaatttttatttattcac

SEQ ID NO: 295411 - DNA, 1000 bp, Homo Sapiens
taaactcacatttgatgtgtttttatgaaggaaagtaaccaagaaacctctaggaattagtgaaaaaagaacgtttttgaggcctgttactatattgctataagttatttattatataaagtattgtaaatagaatagtgttgaagatatgaaatacgtctatttttaatggtgacaattatgacttttagtcactattaaattggggttacctataatagtacaatttgtagttgtttccaggtttggctaataatcattccttaacctagaattcagatgatcctggaattaaggcaggtcagaggactataatgatagaattaaattggtgtcactaaaaactgtcccaaagtgctgcttcctaataggaattcattaacctaaaacaagatgttactattatatcgatatactatgagtgctatttctagaaaaagtctagtgccaaatttgtcttattaaataaaaacaatgtaggagcagcttttcttctagtttgatgtcatttaagaattgctaacacagtggcagtgttagatgaagatgctgtctacaaggtagataatatactgtttgatactcaaaacatttttcattttgtttaaagtagaagttacataattctatattttaagtcttgggtaaaaaagtagttttacattttataaagtaaagatgtaaatgattcaggtttaaagctctatttgacttttttgttgttgtttgagatagaggtcttgctctgttgcccaggctggagtgcagtggtgtgatctcggctcactgcaacatccacctcccgggttcaagcgattctcctgcctcagcctcccaagtagctgggactacaggcatgtgcccccatgccaggctaatttttgtatttttagtagagatggggtttctccatgttggccaggctgggctcaaactcctggtctcaagtgatccacccaactcagcctctcaaagtgctgggattacaggtgtgagccac

SEQ ID NO: 295412 - DNA, 998 bp, Homo Sapiens
ggccgctcccaagcccagagctgctctgcgcaagcgcgaccgaccgagcagctccgaggagtccgcccggaaacaaacattccccagggcaatgtcacgacttggtcttcccgaggagccagtcagaaacagtttgctagatgatgctaaggcccgcttaagaaagtatgatattggaggcaaatattctcacttgccatataacaaatactccgtccttttgccattggtggctaaagaaggaaaactccatttgttgttcaccgtccggtcagagaagctaagaagggcccctggagaagtttgcttccctggaggtaagcgtgaccctacagacatggatgatgcagccacagctctccgggaagcccaggaggaagtgggtctccgtcctcaccaagtggaagttgtctgctgcctggtgccatgtcttattgatagatgggggtctcgctatgttgatgaggctggtctcgagctcctggcctcaagtgatcctcccacctcagcctcccaaagtgctgggattacaggtacagatacattgataactccatttgtgggtttaatagaccacaacttccaggcccagccgaatcctgctgaagttaaggatgtattcctggtgcctctggcctatttcctgcatccacaggtccatgaccagcattacgtcacacgtcttggtcaccgttttattaatcatatctttgagtacacaaaccctgaagacggtgtcacttaccagatcaagggaatgacggcaaaccttgcagtgttggtggcctttatcattttggaaaaaaaacccacctttgaggttcaatttaatcttaatgatgtattagcatcctctgaagagttattcctgaaggttcataaaaaagctacaagcaggttatgatttactagagcaagagacaaagaactattcacgaggattctgtgtgtgcttattcgtagaacaacaacaatgccagctgttggaatttgacagg

SEQ ID NO: 295413 - DNA, 1000 bp, Homo Sapiens
ctgttgcacacttatctactctcttgcttcccactggtcaggaagtctggcaaacttaaaaggcctctttttgttgctctctcctgtatggatctctcatcatagaggtgtgtgcatttctgactttgtgatttcaatactaaggaagctgtcggcacattatcaaggaaaacggggatcgctgctccccaacgtacacattctggtgtgccccagtaaaattctatattcagcctccaaactagctgggaaaaatgtggcaaatcatctacttgctccaattcaatagtgtttagaagtaagaagtcactgtgagcaatgccaccaagtggtggagagactccatgcagaatcgccaccttcagccagagaggctgggaggccgaagacctctctcaatgcacagggccattcagaaactagaaacaaaatgcttgctcatctccctaggccactccttccgaggctttttgagacaaagtctcactgtcacccaggccggagtgcagtggcacaatcaaggctcactgcaacctcaaccttctgggttcaagcgatcctcccacttcagcctttcgagtagctgggatgactacaggcatgggccaccacacccagctgattttttttttttctttttagtagaaatgaggtctcgccatattgctcagactggtcttgaaccaacacatctttagctttttaaaagacagccttggccagccatggcagctcacacttgtaatcactgcactttgggaagctgaggtgggcagatagcttgagccgaggagttcaagaccagcctgggcaacatggtgaaaccccatctctacaaaaaatacaaaaattagctgagtgtgatggtgcacatctgtggtcccagctactggggaggctgaggtgggaggattgcttgagcctgggaggtcgaggctgcagtgagctgtgattacctcactgcattccggcctgggcaacagagaccctgtctctattt

SEQ ID NO: 295414 - DNA, 1000 bp, Homo Sapiens
ccagatggcagcatctccccatcccgtgtcccctggcccggccccacttccaggagacgaccacgaagcccagcacccaccctattctggccaccccctgtcgtggcctcaaagattccacagcccaaatggcgggacagttcaggggctccaagaccatcaggagcatgtgatctctctcgggctcaccccgtgcctgtgggacatatatttgctggaaggggaacagatgttgatgctgataacaagcactgcctttaaggttcagaggagcaagtccacgtgtgcccagtggggcctggggagcactggggtcagaccccaactagcccaagggcagcttcctcacactgttctcatgattctctgttctggcccagagggagggaactctcctggcctgatacccaccttgtccctagagcgccacatgaagatgtccaggtctggcctgtgggcacgttttcgagaccagttcttccatatctgggccctggatgatgacgctaaactaacaaggaagcatggggacctgccacccccagcaaaacccgagaaagggtcctcaggacccaggtctgtgctggcatcacatggcgggaagaccctctgcaagggggacaggaaggcccttcccggcccaccagcccggttccagcggcccatttggtccgcttctccacctcgtcctacaccctgtcctggtggggctgtccatgaggccaaggcccaggaacatgtgggggcttctggggagcccagggcagcagaccactctctgggggcacctgggactcagggcatgcccagcctggccccggctcagggaggacctcggcgttcctggagattcctgcagtggaactctatgctccagctcccgacggacctggatgtggggggcccttggttcccccatgacgatttcaaacagagctgctgggtccatgtcccttctaaatgtgtcctggacagccccgggaccatgggacaggcctag

SEQ ID NO: 295415 - DNA, 1000 bp, Homo Sapiens
aagaagtaattggctttaaagcagagaagagttatcttactaagttagaagaagtaacaaaaaattccattgggaaactgcctgtgcatcacttctgtgtggagaaggggacgataaattacttatgcaaattccttggagtatatgataaaggaaggctttgtggatatgtgtatgcactcagagtggaacgcttctgctgtgcagtgtttgctaaaaagcctgattcctggcacgtgaaagataacagagttaagcagttgaccgagaaggaatggatccagttcatggtggattcagaaccagtatgtgaggaactgccctctccagcaagtacatcatcacctgtctcccagagttatcctcttcgtgaatatattaacttcaaaattcagccactgagatatcaccttccagggctatcagaaaagataacttgtgctccaaaaaccttctgcagaaatctgttctcacaacatgaaggacttaagcaattaatatgtgaagaaatgggctctgtcaataagggctcactgatcttctctaggagctggtctttggatctgggcttgcaagagaaccacaaagtcctctgtgatgctcttctgatttcccaggacaagcctccagtcctatacaccttccacatggtacaggatgaggagtttaaagactattctacacaaactgcccaaactttaaaacagaagctggcaaaaattggtggttacactaaaaaagtgtgtgtcatgacaaagatcttctacttgagccctgaaggcaagacaagctgccagtatgatttaaactcgcaagtaatttaccctgaatcctactattggacaacagctcaaacaatgaaagacttggaaaaggccctttcaaatatcttacctaaggagaatcaaatctttttgtttgtttgtttgtttcgtttttgtttgtttgtttgttggtttgtttgttttttcttgagatgagtctcactctgtcacccaga

SEQ ID NO: 295416 - DNA, 1000 bp, Homo Sapiens
aaagggacataaaaggaaatccccatttggaagtacagaaagaaagactcctgttaaaaagctggctcctgaattttcaaaagtcaaaacaaaaactcctaagcactctcctattaaagaggaaccctgtggttccttatctgaaactgtttgtaaacgtgaattgaggagccaagaaaccccagaaaagccccggtcttcagtggacaccccaccaagactctccactccccaaaagggacccagcacccatcccaaggagaaagccttctcaagtgagatagaagatttgccgtacctttccaccacagaaatgtatttgtgtcgttggcaccagcctcccccatcaccgttaccattacgggaatcctctccaaagaaggaggagactgtagcaaggtgtctgatgccatcaagtgttgcaggagaaacttcagtcttggctgttccttcttggagggaccactcagtagagcctctaagggacccaaatccttcagaccttttggagaacctggatgacagtgtgttttcgaagcggcatgcaaaactggagctggatgagaagagaaggaaaagatgggatattcagaggatcagggaacaaagaattttacagcgactgcagctcagaatgtataaaaagaaaggaattcaggaatctgagcctgaggttacctcatttttccctgagccagatgatgttgaaagtttgatgattacccccttcttgcctgttgtagcatttggacgaccattaccaaaattaactccacagaattttgagctaccctggttggatgagcgtagccgatgcagattggagatccagaagaagcaaacacctcaccggacgtgtaggaaatagctgtgctggcaagaaccctgtcttcagatagttgtagcatgccattcccgagagtggcagagacctgtatatgtgacctttgtcctcacatatgttatcactcgctgataataccctttcatacttccttga

SEQ ID NO: 295417 - DNA, 1000 bp, Homo Sapiens; identical to SEQ ID NO: 225066

SEQ ID NO: 295418 - DNA, 1000 bp, Homo Sapiens
cagccacggcgtggagaccatccgggacatcctgccagacaccagccttgggggcccatccttcttcaaaatcatcacggccaaggctgtcctgaagctgcaggccggaaacgccgaggaagccgccctgtggagggatctggtccgcaaagtcctggcatcctacttggagacagccgaggaggcggtgaccctgggcgggagcctggatgaaaactgtcaggaggtgctgaaatttgccacccgggagaatggcttcctgctgcagtacctggtggccatccccatggagaaaggccttgactcccaaggctgcttctgcgcaggctgctcccggcagatcggcttctcctttgtacgacccaagctctgtgccttctctggcctctattactgtgacatctgccaccaagacgatgcctcagtgattccggccaggatcatccacaactgggacctcaccaagcgcccgatctgcaggcaggccctgaagtttctgacgcagatccgggcccagcccctcatcaacctgcagatggtgaacgcgtctctgtacgagcatgtggagcggatgcacctcattgggaggagccgggagcagctgaagctcctgggggattacctgggcctgtgccggagtggcgccctgaaggagctcagcaagaggctcaaccaccggaattatctcttggagtctccgcataggttccgtgttgctgacctccggcagatcgcagatgaggtatatgaaggattcctcaaggccctgattgaatttgcctcccagcatgtctaccactgcgacctgtgcacccagcgcagcttcatctgccagatctgccagcaccacgacatcatcttcccctctgagtttgacaccacaatcaggtgtgccaagtgcaagaccgtcttccaccagagctgccaggctgtggtgaagaagggctgcccccgctgtgctcgctgacgcaagtaccagcaacagaacgttttcgcctga

SEQ ID NO: 295419 - DNA, 1000 bp, Homo Sapiens; identical to SEQ ID NO: 225067

SEQ ID NO: 295420 - DNA, 1000 bp, Homo Sapiens; identical to SEQ ID NO: 225068

SEQ ID NO: 295421 - DNA, 982 bp, Homo Sapiens
attaaccttcaagtattctacacatcaaggaaaaatttagtggcatacaaatgtcacctaataagtgggtgaaacctgggcatgctggctcatgcctataattctagaaatttaggaggccaagtcagaacgatcatttgaggccaaaagtttgagactagccatgaaaatatatcaagaccctgtcttgtatagggtaatatatgtgcatacatacatacatataacaaaaaagtgtaaaaatattttctaatcacatatttcgtaggtgttaatttccaaaagatataaacttctaaaattcaacaacaacaaaatgttaataacttgatttagaatggtaaatgtttgaaatgacctttctccaaagaagacatagaaatgactaggtatttaaaaggatactcgtccgagggcaggactatgggaggctgccctgtacggaaaataagaagaaatggcagtaaagagggcaaccatcattccacccagcccaaaaggaataagagaaaccctatctttcaggattctcaagacacagttttcatggagtgataatgaaaggagcagcagccgccttaatatcccagagagagcaggtggaccagaaagcaacttaaaccagattgttactgaacccaatgcaaactttccccagttcttgcatgaggggtatgtaccatgccaaggtctttactcccatatcaaccagaccttgaaggaggctcacttcaacagcctgcagcagtgagggcaagctccaacatgatgaattaggacttccttattccaacctaaactgtgtttataaaagtaattgcatacaaactaaaaaaaaagtctattggtttttaagtctaaattttaagtaacaagttaatgggcagtagtttaattggggttttacttcactgctatacttttaaaggggctgtgaataaatgtttatgaaattaaaaaaataaaaaataaaaaaaaaaaa

SEQ ID NO: 295422 - DNA, 1000 bp, Homo Sapiens
ttaaaatgaattttacttttttttaagacaaagtttctctctgtcacccaagctggaatgcaatggcacaatttcagctcactgcaacctctgcctcctgggttcaagcaattctcctgcctcagcctcctgagtagctgggattataggcacacaccaccatgcccagctaatttttgtatttttagtagaggcggggtttcaccatgctggtcaggatggtctcgaactcctgacttcatgatccacccacctcggcctcccaaagtgctgagattacagatgtgagccactgcatcctgcctaaaatgaattttctagacaattgaataacagtagtcctttgacaggagataatgacttggtttatggccttaatatactacttaattacttaagatgtttattaatagaatgataaatgtacagagtaacctataagcatgacatactttcgctttcagtagtttcatgtaaagaaaaaaacttgaaaacagtaatacctgaggacccatgggaataacagacactggggaggtaggtggggagcgggaacaagagctgaaaaactacctactggggactctgctcactacctgggtgacaggatcatccataccctaaacctcaacatcacacagtacacccagctgacaaacctgcccatgtgttccctgaatctaaaaaaaaaatcgaaataattgttttaaaaaagaaaaagacaatagtattgcccatgggacaaaatttgtactattagcaagaatcatttgtgtctcatttagaaagaatttgacttttgttccagtgcttaaactttgacaaaaatggttttgagtagatctttataacctgatgccataaatacaagattctctgataccttcatttaatatatcaatattgggcctaaaagagtattctataaagcttaaattggtattaactatgatcatcttgatgtctgtgatagataataaacaaggtcatacatacctta

SEQ ID NO: 295423 - DNA, 1000 bp, Homo Sapiens
gccccccaactggcaccactgctgcccctgcccctactctcagcctcacgtgactctcgggcagaagcagtggtggggcagccagggcagcgtcaagagtctgagccagctgcaggacaagttcgagcatcttaaaatgattcaacaggaggagataaggaagctcgaggaagagaaaaaacaactggaaggagaaatcatagatttttataaaatgaaagctgcctctgaagcactgcagactcagctgagcaccgatacaaagaaagacaaacatcctgatccatatgaattcctcttattaagaaaaataaaacatccaggattcaatgaagaactgactatcaccttgttaatcattcagaaacatgttgcaggcttaagccatttttgatatagatactgaaacaattacttgctaagagcaaacttcaaggtatggataaggccctgagtcatcttcctgagctgaatgatagttaagctgaattaacaatttggacaagacagcaaatgctattgtccaagttttctaaagaagaatctgaagtgaaatgacatcaagagacctatcaagacctgtatccaggaaaagagtcttgctcttgttgcccaggctggagtgcaatggcgtgattttggctcactgtaaactccacctcctgggttcaagcgattctcctgcctcagcctccctagtagctggtattacaggtgcctgccaccacacccagctaatttttgtatttttagtagagatgggggtttcaccatgttggccagcctggtcccgaactcctgaccttaggtgttccaccagcatcggcctcccaaagtgctgggattacaggtgtgagccactgcgtccagccagtcgtgggtctcatatctcaatgtggacttttactaactcccgatgcctcattttcctcatcagttgaaaggaatgaatgaaagatttgtgtttttcatattaccaggtagatgataaggagatttt

SEQ ID NO: 295424 - DNA, 848 bp, Homo Sapiens
atgctggacctcagccacaatgagctgtcctttgtgcccccggacctgcctgaggccctagaggagctgcacctcgagggcaaccgcatcggccacgtgggccccgaggccttcctcagcacaccccgcctgcgtgccctcttcctcagggccaacaggcttcacatgacgagcatcgcggctgaggccttcctggggctcccaaacctgcgtgtggtggacacggcagggaatccggagcaggtcctgatccggctgcctcccaccaccccacgtgggccacgggcagggggcccctgatcctagagaggcccagcagagcagctcagactcctgggactccgctgggccgtggactgaggagacaacgcccaccaggggcccttggtctggctctcctgggcctccagggctgggcctgctctgcctgccactggccgagacacagaggcacacagctggcatactccaggctcacagaccacgccggcctggcgggacacaccctaccccaaactcccaacacagatggaggcagcaacaataaagccaaacccttccagcactcagcacggaccaggcaccctttgggggctctgtccacggactcctccccacaaccagtccagctggggaaactgaggctctgggatgctaagtgggtcaggactgaattttgaggtcttgaggcacacactggggtcaccaaacagcaccctgtgcgacctagccacgtgtgattgcagggacgcccaaggccacccactgaaaaaacactgggtgacagatatagggaccctcacatgtatccccccccacagcaagcatgggaatgaaatgcatccttc

SEQ ID NO: 295425 - DNA, 1000 bp, Homo Sapiens
cccaactcccctgccctctaaaaccacttcaattcctcaactcttcccccggcccgcaggaacccccgccatggcccgttcttacggcggccgggtgctggctgcaatgaccctgctgggcatcgcggcggccgtgctggcggcgctgggcgcgcagctgctgtttcagctgcaggcgggccgcgccgagctgcgggggctgcgcgccgaggggctgggccaggagctgggcgccggccccgggctgccagaggacgcggccgggacgctgctgccgctggccgccgcgctggccgcgctggtgctcgtgctggggttcacctgcttgctgctcgccgcgctctgtggccacctgggcgccgagctggcgcgggggcctggccccaggaggtctgactggtttctctacgactgccgcctcctcagacatgtggcccttggccttttctgctgtgggatctccgtctatttagcagcactgtccatctatgccttgctacttttcgagatcgagacaggcgcagcagctgcttccatcctcggctcgggcaccctggttctggtggctgtgctgacccacactctcctccgggctgcccgggctgcccgccgtgggctccatgagttgtccccgccatcctttgaagacgacctcgcccgccctgccgaagtctccaaggccagccccagagctcagcctcagcagggtatccatcgtcggaccccctattcaacctgtccagagcctggggacccctttgggtccatggccactgccacagcacctgcagccctggagggaggctgggagagcagcctgcctgcatccagaatgcaccggacactgtcggctggcctggggcactgggacggggttacgcacgagatgcgtcgaatgctgggccacagaccagggagcatggggaaggactccacactggtgtgagcccagggatgaggaatagagacctggtgtaagaaaaggataccatagagatag

SEQ ID NO: 295426 - DNA, 1000 bp, Homo Sapiens
tcataaaaaaattcatactggagagaaaccctataagtgtgaagaatgtggcaaaagctttattctgtcctctcatcttactacacataagataattcatactggagagaaaccctacaaatgtaaagaatgtggcaaagcttttaaccagtcctcaacccttatgaaacataagataattcatactggagagaaaccctacaaatgtgaagaatgtggcaaagcctttaaccagtccccaaaccttactaaacataagagaattcataccaaagagaaaccctacaaatcctttaactggctcttaatccttatgaaacaaaagataattcatactagagagaaaccctacaaatgtgaaagtattcacattgttttaattgtgtctcatgtgactctaagggatgtggccatcaaattctctctggaggagtggcaatgcctggacactgctcaacaggatttgtataggaaagtgattttagagaactacagaaacctggtcttcttgggtattggtttctctaggccagatctgatcaactgtcaggagcaaggaaaagatccctggaatatgaagagacacggtatggtagccacaccccagttgaaaaaaggcaattcagactgtacagccctcaactgccagctggtggtccagctgatcttacagatacataaggtcattcatattggaattcatactgaggagaaattctacaaatgtgaagaatgtggcaaagggctttactggtcctcttcccttactaaagaatgtggaaaagcttttaaacggtacttaaaccttactacacataagataattcctgctggagagaaaccctacaaatgtgaagaatgtggcaaaggagagaaaccctacaaatgtgaagaatgtgacaaagcctttaaccagtcctcaattcttaataaacataagaaaattcatattggagagaaaccccatgagtgtgaaaaatatggcaaaggctttagctag

SEQ ID NO: 295427 - DNA, 1000 bp, Homo Sapiens
tggcaaagcttttaaccaatcatcaacccttactagacataagataattcatgctggagagaagccctacatatgtgaacattgtggcagagcttttaaccaatcctcgaaccttactaaacataagagaattcatactggtgataaaccttataaatgtgaagaatgtggcaaagcctttaatgtgtcctcaacccttactcaacataagagaattcatactggagagaaaccttacaaatgtgaagagtgtggcaaagcctttaacgtgtcctcaactcttactcaacataagagaattcatactggagaaaaaccatacaaatgtgaagaatgtggcaaagcctttaacacatcctcacacctcaccacacataaaagaattcataccggagagaaaccctacaaatgtgaagaatgtggcaaagcctttaaccagttctcacaacttactacacataagataattcatactggagagaaaccctacaaatgtaaagaatgtggcaaagcttttaagcggtcctcaaaccttactgaacataggataattcatactggagagaaaccctacaaatgtgaagaatgtggcaaagcttttaacctatcctcacaccttacaacacataagaaaattcatactggagagaaaccctacaaatgtaaagaatgtggcaaagcttttaaccaatcctcgacacttgctagacataagataattcatgctggagagaaaccctacaaatgtgaagaatgtggcaaagctttttaccaatactcaaaccttactcaacataagataattcatactggagagaaaccctacaaatgtgaagaatgtggcaaagcctttaattggtcctcaactctgactaaacataaggtaattcatactggagagaaaccctacaaatgtaaagaatgtggcaaagcttttaaccaatgctcaaaccttactacacacaagaaaattcatgctgtagaaaaatctgacaaataa

SEQ ID NO: 295428 - DNA, 1000 bp, Homo Sapiens; identical to SEQ ID NO: 225072

SEQ ID NO: 295429 - DNA, 1000 bp, Homo Sapiens; identical to SEQ ID NO: 225073

SEQ ID NO: 295430 - DNA, 1000 bp, Homo Sapiens
tggccttcctggtggccagacttctagcaactttagccacccaccaaatgacatcacatacagaaggcctcagaaagggaggaggtcgtaaggacacacagctgatgaagggtcagtgctcagctatcaaggtcatcttctggcctggttgcctcccacagcccaggatgcattcaaggctgcacatcaggagcataaataagggtggtcagctcaggcccactggctgcaacaagtagccactgacagggagtctggggccatttggtgcagaacaacccccaacccagtggccatcttcacaactgcagcacagtgctggccctaatgccaggtgagcgtgcaaagtcctgtttctttgtctttacatagggaccgggcgatgcgctttagagaaattccctattatttcacaggaaaggaggctgtgaaaaggagagggcaggttttggagccaagtcgacctggcatcaggtcctggctgcctttttttttttttttttaaagacatacatggtcttgctttgtcgcccaggctggagtgcagtggcagtgtcatggctcactgcagcctcaacctgctgggctcaagcaatcctcccacctgtgccctcatgggcagctgaagggggagctttctaccccaggttcctttccttactgaaaagtcttgagcaaacagttgccgctctccaccccctgctttttaaaaaaaattttttctcacgtaagaaaatgttatctgtgtgctggggaaaattttgaaaataacaaaaaccagaatacaaacacccataatcaatcacagagataaccactgttcataattccttccagtcttcttacttggcacatatacatttgtctttctttatatatgacatatggatattttacaaagttaggatcctactctatgcactgcttggtgatcggatctattcaatgtacaaaatattttgaaagtttctgtgattaaatgttctttgaaaacataact

SEQ ID NO: 295431 - DNA, 1000 bp, Homo Sapiens
ttctaaagtggccccagagggtcgagattcacttatacaacttcagaaagcaggtgaggaaggtgcttctctggggaaccctgcctcagatggaagctgaactggagaatttccataagcagaacactcaactggagctgaacatcacagaattgtggcagaaactgagagccaccgatcaggagatgcgcagagagagacagaaggagcgagacttggaagcgctggtcaaaaggtttaaaacagacctccacaactgcgtagcctatattcaggaaccgcggctgctgaaggagaaggttcgaggtctctttgagaagtacgtgcagcgagcagacatggtggagatcgcagggctgaacacagacctgcagcaggagtacacccggcagcgggagcacctggagaggaacctggccactctcaagaagaaggtggtcaaggagggcgagctgcaccgcacagactacgtccgcatcatgcaggaaaatgtctctctgatcaaggaaattaatgagctccgcagggagctgaagttcactcggtcccaagtctatgaccttgaagcagctctgaaactgaccaagaaagtccgaccacaagaagtttcagagacagaacccagcagggacatgctcagcacagctcccaccgcaaggttgaatgagcaagaagaaactgggaggatcattgaaatgcagcgcctagaaatccagcgcctcagagaccagatccaagagcaagagcaggtcacagggttccacaccctcgctggagttcggcttccttccctctccaactccgaggtagacttagaggtgaagaccaactgaccccctctggtgagccatctccagccacagccagaagaaacacagcatgtctgtccccaagccagacttgcggttggagtctgtatggtccctgcagcactgaccccagcaacctctttctcttgccctggggaatttgggacacagaataaaggtgtttgcccaca

SEQ ID NO: 295432 - DNA, 1000 bp, Homo Sapiens
gtttgggaacctccacctagatttcagaagatatatggaaacgcctggatgcccaggcataagtttgttgcaggggcagggtgcttgtggagaacctctgctagcacagaagggaaatgtgggtcagagcccccacacacagtgcctactggggcactgcctagtgaagctgtgagaagagggccactgtccttcagaccccagaatggtagatccactgacaatttgcacacttcacctggaaaaggtggctgtactctgcaaagctacagagatggagctgcccaagaccatgggaacccacctcttgcatcagcatgacctggatatgagacatggagtcaaaggagatcattttggagctttaagatttgactgccctgctggagtttggacttgcatggggcctgtaactcctttgctttggccaatttctcccacttggaatggctgtatttacccaatgcctataccccctttgtatctaggaagtaattaacttgcttttgattttacaggtttataggtggaagggacttgccttgtctcagacaagactttggactgttgacttttcagttaatattgaaataagttaagcctttgggggactactgggaaggcatgattggttctgaaatgtgaggacatgagatttgggaggggtcaggggcagaatgatatggtttggctctatgtctccacctaaatctcatcttaaattgtactccaataattcccacttgttgtgggaagaacctggtgggagataattgaatcatgggggcagtttgccccatactgttctcatggcagtgaataagtctcatgagatctgatggtttgataaggggaaactcatttcacttggctctcattctctctttttgcctgttgccattcatgtaagaagtgacttgctcctccttgtcttccaccatcattatgaggcttctgcagccacgtggaactgtgagtccattaaacctttttcttttgt

SEQ ID NO: 295433 - DNA, 1000 bp, Homo Sapiens
tgaatggaagtactactttttactgcatcctgcaacaaatatcactgaaatgattcatttctggaagcattctactttaattgatataggagagagtatagctattccagatgaatttaccgaacaagaaaagcagtctggagattggtggaagcgtttggtgtcagcaggaatagctagtgcggttgcacggacatgcacggcacctttagaccgcttgaaagtcatgatgcaggttcatagtttaaagtcaaggaaaatgagattgattagtggccttgagcagttggtgaaagaaggagggattttttccctttggtgaggaaatggtgtaaatgttttaaaaattgcaccagagacagcactcaaggttggggcctatgaacagtataagaaattgcttagttttgatggtgttcatttaggaattcttgaaagatttatatttggctcattggctggtgtaactgcccagacctgtatttaccccatggaggtactaaagaccagactggctataggtaaaactggagagtattcagggattattgattgtggcaagaagcttctaaaacaagaaggtgtcagatcctttttcaaaggttatactcctaacttgctaggcattgtaccttatgccggcatagatcttgctgtttatgagattttgaagaatttttggctagaaaattatgcaggaaactctgtgaatcctgggataatgattttggtgggatgtagtacattgtctaatacttgtggtcagttagccagtttctctgtgaaccttattagaactcgcatgcaggcttcagccccagtggaaaaaggaaaaacaacttctatgattcagctcattcaagaaatatataccaaagaaggaaaattgggattttacaggggtttcacctcaaacatcataaaggtgcttcctgcagtaggcgttggctgtgtggcctatgagaaagtgaagccactttttggattaacctggaagtga

SEQ ID NO: 295434 - DNA, 1000 bp, Homo Sapiens
gcaatcatcacaaacttttcggaagattatcccttttccatcgaaatcttcaaagaggtccaaatatccgcctgcagattccaccgaaagagtgtttccaaactgctgtatcaaaaggaatcttcaactcccttttatgggaagattatcccttttccatcgaaatcttcaaagaggtccaaatatcagcttgcagattccaccgaaagagtgattccaaactgctgtatcaaaacgaatgttcaactcagcctgaaagcgctcaaaatgtccacttgcagaccctacgaaaggaatgtttcaaaactgctctatgaaaagcaatgttctactctgggagttgaacacaagcctcacaaaggagtttctgaaaatgcttctgtttactttttacgtgaagatattcccgcctcacagcggtccaaatctcccctttcagattctaccaaaagtgtgtttccaaatggctctatcaaagggaatgttcaactctgtgacttgaatgcaatcatcacaaagcagtttctgagaatgcttccatgtagcttttatgagaagatatttccttttccaccccaggcctcgaagccctccaaatgtccccttgcagatgccagaaagagagggtttcaaagctgctctatcaaaaggaaagtacaactctgtgagttgaatgcaaacatcaaaaagaagttcctgagcatgcttccgtttagcttttatggaaagattatcccttttccatcgaaatgttcaaagaggtccgcatatccgcttgcagattccaccgaaagtgtgtttccaaactgctgtatcaaaaggaatcctcaactccgtgagttccatgcaatcatcacaaagaagtttctgacaatgcttctctctagtttttatgtgaagatatttccttttccaccacaggcctgaaagcgctccaaatgtccacttggagaatctacgaaaagaatgtttcaaaactgctctatgaaaagcaatgtta

SEQ ID NO: 295435 - DNA, 1000 bp, Homo Sapiens
tcctatgatgtaatatttttgaaacctagtgtatgtcttgtcactgttgtgatatttaatcgattaagaataccttgtaaaaaggagcaaaagcttcaatgtgaaacaattttctctctttatactaaacaactgaagatagatagtttagaaagataaggacctttgaaagaagacaactctgtcaaagttcataaggaatataaaaattcttcaggaaaagagaattcaatctatatgtcctcccgtttaatatcaagaatagaagaaattaagaggaaaactccacagaagagcataggccacttttagccatgtaaaaataagattaagtcacaaatacaacttttgaatttacctgtcaatatctctttaggacacaaaacaatgctgaagttaatataatttctaattttaaatgtcatttaagtgtagattatgccatctaggaaggtaagtaggaaaggtaaattaaatctatttttaaaattcaaaatattagagtatttttcccctctaaagccttttttggtgattattctgtatctgacataattgagaaactggtaagctgtaaagattccagtgtagcttctctgagaagttgtgagccagtccataactgcttcctcacatccatctgattgcaccatttctgcagcaaaccccaaagcagggtgccaatatgcagatggcatagggagtatcatccctcagccaaatcacttttccatctctaaagtttcatctattttggaagtcatctccaactaattgtgtctggatttagttgctaaaattgtcttatttatgaagcagcaatattcagcctgaaagcatttctgccatagttgttgtagttatatcgccaatggctgatttttttcattggaaagtaaatttaagtaattcgtgggatgtggtatattctgtgtcaacttcaagataatcactcattttctcgttatattcaggtctgaattaaagttaagttaatcac

SEQ ID NO: 295436 - DNA, 1000 bp, Homo Sapiens; identical to SEQ ID NO: 225074

SEQ ID NO: 295437 - DNA, 1000 bp, Homo Sapiens
tttgctttgtaaactgaaaaatccaaacatcgttcattactatgatcgtattattgaccggaccaacacaacactacgaagtggtggtgatcatactgtagtgcgtcggggtctgaaaccagccagtgttttcctggatggcaagcaaaacgtcaagcttggagatttggggctagccagaatattaaaccacgacacgagttttgcaaaaacatttgttggcataccttattacatgtctcctgaacaaacgaatcacatgtcctacaatgagaaaccagatatctggtcattgggctgcttgccgtatgagtcgcgtgcattaatgcctccatttacagcttttagccagaaagaactcgctgggaaaatcagagaaggcaaattcaggcgaattctataccattactctgatgaattgaatgaaattattatgaggatgttaaaggattaccatcgaccttctgttgaagaaattctcgagaaccctttaatagcagatttggttgcagaagagcaaagaagaaatcttgagagaagagggcgacaattaggagagccagaaaaattgccggattccagccttgtattgagtgagctgaaactaaaggaaattcagttagaggagcaagagcgagctctcaaagcaggagaagaaaggttggagcagaaagaacaggagctttgtgtttgtgagagactagcagaggacagactggctataccagaaaatctgttgaagaattacagcttgctaaaggaacagaagttcctgtctctggcaagtagtccagaacttcttaatcttccatcctcagtaattaagaagaaagttcatttcagtggggaaagtaaagagaatgtcatgaggagtgagaattctgagagtcagctcacatctaagtccaagtgcaaggacctgaaggtccttgcttcatgcttcatgctgcccagctgcgggctcaagccctgtcagattttgagaaaaattatcaactaa

SEQ ID NO: 295438 - DNA, 282 bp, Homo Sapiens
atgaattggccagcaccggggagtgtcgtggatgcctacgagcaggtacaaaaaggacttctaaagctgaaaggcgtcgcagagctcagagtgaccaagcggaagaagaaaaagaaggacaaagacaaagctaaactcccggaatcaatgggaatgaacaaaaagaatgaggaggagaagcagcacggcctggacaagtggaccccgagagtggaggacttcaacagacacctggacacactcacggagcattacattcccagagtcagctggacgaaatag

SEQ ID NO: 295439 - DNA, 1000 bp, Homo Sapiens
aggcttaaataaacagaatataataaatcaagctattaacagcaaaaaataaaaagccatctggcctgtgtccaaaatgtggaaaagcaaaacattgggccaatcaatgtcattctaaatttgataaagatgggcaaccattgtctggaaacaggaagaggggccagcctcaggccccccaacaaactggggcattcccagttaaactgtttgttcctcagggttttcaaggacaacaacccctacagaaaataccaccacttcagggagtcagccaattacaacaatccaacagctgtcccgcgccacagcaggcagcaccgcagtagatttatgttccacccaaatggtctttttactccctggaaagcccccacaaaagattcctagaggggtatatggcccgctgccagaagggagggtaggcctttgagggagatcaagtctaaatttgaagggagtccaaattcatactggggtaatttattcagattataaagggggaattcagttagtgatcagctccactgttccccggagtgccaatccaggtgatagaattgctcaattactgcttttgccttatgttaaaattggggaaaacaaaaaggaaagaacaggagggtttggaagtaccaaccctgcaggaaaagctgcttattgggctaatcaggtctcagaggatagacccgtgtgtacagtcactattcagggaaagagtttgaaggattagtggatacccaggctgatgtttctgtcatcggcataggtactgcctcagaagtgtatcaaagtgccatgattttacattgtccaggatctgataatcaagaaagtacggttcagcctgtgatcacttcattccaatcaatttatggggccgagacttgttacaacaatggcatgcagagattactatcccagcctccctatacagccccaggaataaaaaaatcatgactaaaatgggatagctccctaaaaagggactaggaaagaa

SEQ ID NO: 295440 - DNA, 1000 bp, Homo Sapiens
gtacaacgctaacggcatatgcggccacgacggtgagggcagccctgtctggtaccacattgtgggaagcctggaccccaaaggcctcttgctctcagcctccaaacaggagttgctcagggacagcttccggagctgcgagctgctcctgcgggagtgtgagctgcagagtcagaagctggggaagagggtggagaaaatcatagctatttttggtctcgaagggctgggcctgagggatctgtggaagccaggaatagagcttctccaggagtttttctcagcacttgaagcaaattaccctgagatcttgaagagtttaattgttgtgagagcccccaagctattcgccgtagccttcaacctggtcaagtcttacatgagtgaagagacacgcaggaaggtggtgattctcggaggtgtagggcacccaactggtgttgagggcccactgcctggtgggctgccagacaactggaagcaggagctgacaaaattcatcagccccgaccagctgcccgtggagtttggggggaccatgactgaccccgatggcaaccccaagtgcctgaccaagatcaactacgggggtgaggtgcccaagagctactacctgtgcaagcaggtgaggctgcagtatgagcacacgaggtccgtgggccgcggctcctccctgcaggtggagaacgagatcctgttcccgggctgtgtgctcaggtggcagtttgcttcagatggtggggacattggctttggggttttcctgaagaccaagatgggggagcggcagagggctagggagatgacagaggtgctgcccagccagcgctacaatgcccacatggtgcctgaagatgggattctcacctgcctccaggccggcagctatgtcctgaggttttacaacacctacagcctggttcattctaaacgcatcagctacaccgtggaggtactgctcccagaccaaaccttcatggagaagatggagaaattctag

SEQ ID NO: 295441 - DNA, 940 bp, Homo Sapiens
cccggtcactctggctccccagctcaaggttcaggccttgccccaggccgggcctctgggtcccccacggcccttcaggatgaaagctgcggtgctgaccttggccgtgctcttcctgacggggagccaggctcggcatttctggcagcaagatgaacccccccagagcccctgggatcgagtgaaggacctggccactgtgtacgtggatgtgctcaaagacagcggcagagactatgtgtcccagtttgaaggctccgccttgggaaaacagctaaacctaaagctccttgacaactgggacagcgtgacctccaccttcagcaagctgcgcgaacagctcggccctgtgacccaggagttctgggataacctggaaaaggagacagagggcctgaggcaggagatgagcaaggatctggaggaggtgaaggccaaggtgcagccctacctggacgacttccagaagaagtggcaggaggagatggagctctaccgccagaaggtggagccgctgcgcgcagagctccaagagggcgcgcgccagaagctgcacgagctgcaagagaagctgagcccactgggcgaggagatgcgcgaccgcgcgcgcgcccatgtggacgcgctgcgcacgcatctggccccctacagcgacgagctgcgccagcgcttggccgcgcgccttgaggctctcaaggagaacggcggcgccagactggccgagtaccacgccaaggccaccgagcatctgagcacgctcagcgagaaggccaagcccgcgctcgaggacctccgccaaggcctgctgcccgtgctggagagcttcaaggtcagcttcctgagcgctctcgaggagtacactaagaagctcaacacccagtgaggcgcccgccgccgccccccttcccggtgctcagaataaacgtttccaaagtgggaa

SEQ ID NO: 295442 - DNA, 1000 bp, Homo Sapiens
agcttaattgataaagcagggtttgagaggactgactccaattttgaaagaagtcatactgtgagtaaaatgctatcaaatagcatcatgtgctatagagacatcttttatgaaagggagagtcaactaatgcagcaaacttcattattatcttatgaaattgcgatagccaccccaaccttcagtaactactaccctgattggtcagcacccatcaacattgtggcaagaccctctaccagcaaaaagattacgacttgctgaaagctgagatgatcgttagcatttttagcaataaataattttaattaaggtatgtatgttttttagacaattctattacacattttatagactacagtatagtataaacacagcttttttttttttttttttttttttaagaaatggggtctcatgctgtcatccaggctggagtgcaatcatgactcactgcagcctcaaactcctgagctcaagtgatcctcccaagtagctgggactacaggcctgtcacatcacacccggccaaaacgcataacttttatatgcaatgggaaacaaaaaaatgtgtgtgactcactctattgtgatattcagtttactgcagtgatatggaactaagcccacaatatccctgcggtatggctgtacagtataagaatcacctgaagggcttattaaaaacagcttgcttgaccccctcccttagagattctgattcagtagatctgggttggtcaagaatttgcatttctaacaagctcccagctgaggctgaggctgccattcaacatactaccaagtagcactggcatagagagatccctggaataaaatttacctacttgtgtgtgtgcgtgtgtgtgtgtgcgtgtgcatgtgcgtgtgtgtgtgtatacagtcttgctctgttgcctgggctggagtgcagtggtgtgatctcggctcaccgcaacctccgcctcccagctttcaagcgattctcatgccttagcct

SEQ ID NO: 295443 - DNA, 1000 bp, Homo Sapiens
ctttagagagaacgcaagatgtttccgtacaagtaaaaatgagttctgatatttccgaagtagaagataagaatgagtttcttactgaacaactttctaaaacacaaaataaattcaataccttaaaagataagttccgtaagacaagagatactctcagaaaaaagtcattggcttcagaaactgtacaaaacgacctaagccaaacacagcagcaaataaaggaaatgaaagagatgtatcaaaatgcagaagctaaagtgggtaattccactggaaagtggagctgtgtagaagagaggatatgtcaattccaacatgaaaatccgtgcattgaacagcaactagatgatgttcatcagaaagagtatcataaagagatagtaactaatatccaaagaggctttattgagagtggaaagacctcgtgctagaagagaaaaataagaagctaatgaatgaatgtgatcatttaaaagaaagtctctttcaatatgagagagagaaagcagaaagagtagtaattgtgagacaacttcaacaagaagcagctgacagcctaaaaaaattaactatgttagagtctccactggaaggtatatcacattatcacattaatttggatgagacacaggccccaaagaagaaattatttcaagtgaaaagtcaatttgatgatcttatggcagaggaggaagctgtatcttcaaaatgtgtcaatttgtctaaagacaatcaagttatccaacaggagttattatctatgaaaaaagtacaacaagaatgtgaaaaacttgaggagaatcaaaagatgttggaagaagaaatattaaatcttaagacacatatggaaaacagtatggtagaacttagtaaactacaagaatataaatcagagctagatgaaagggcaatgcaggcagtagaaaaattaaaagaaatccatttacaggttacttgtttaaatcagagtaatgattctcattatggagtcatttga

SEQ ID NO: 295444 - DNA, 1000 bp, Homo Sapiens
aatatgagagtattttgccagaaagggagatagctaattcaaaggattttcacagaaagaatgactctgcattatatattaatcatcaatttgaaactggtctgagtgaagggaatgatgaatgttttcaggacttagctgctaaatatttatcaacagaagctctgacaatagtaaaagattttgagatgaagagaaaatttgacttagtacttgaagaacttcgtatgtttcatgaaattagtagggaaaatgaacttctaagcactgtggaaacaaacaatgggcaagaaaattactttggagaaaatgatgctgagaaggtaaaaatggagatagaaaaagatttgaaaatggttgtggtcaacaaaatacgtgcatcttcctcgttccatgatactatagcaggtcctaatatgggcaaaagtcaccaaagtttatttaaatggaaaactgtacccaataatggagaacaggaagttcctaatgagagttgttatccaagtagatcagaggaagaattactttactctacttctgagaaagattgtgaaacacctttacctaaaagacctgcttttctccctgatgaatgtaaagaagaatttaattatttattgagaggaggtagtcactttccacatggcatttcaagagtacgaccgcttaagacatgcagtaggccaatcaggattggtttgtcaagaaaagcaaggattaaacaacttcatccttatctgaaacaaatgtgttacggaaacttaaaagaaaatttttgactttcatatttcaaaacattttacaacatctagaaatgttttgttttctttggatatatgttcttccagcttgggggtttggggcttgctttattataaagtggagaagtttttttttttgagtgtataaattatggtattacctttcaaagttataaaatattttatggatttttatatgatataaaaatgtacacattaaagccgtttcattattggat

SEQ ID NO: 295445 - DNA, 1000 bp, Homo Sapiens; identical to SEQ ID NO: 225077

SEQ ID NO: 295446 - DNA, 1000 bp, Homo Sapiens; identical to SEQ ID NO: 225078

SEQ ID NO: 295447 - DNA, 1000 bp, Homo Sapiens
tactatgagcatccaggaattcagggacctgtggaagcagctgaagctctctcagaaggttttccacaagcaagaccgtgggtcaggatacctgaactgggagcagctgcacgctgccatgagggaggcaggaatcatgctcagtgatgacgtctgtcagctgatgctcatccgctacggcggcccccgcctccagatggactttgtcagtttcatccacttgatgctgcgtgtagagaacatggaggatgtcttccaaaacttaacccaagatggcaaagggatatacctccagaagccagagtgtcctgaggacagagaggctaccaaatccaacagaaatgaaagagaagagagctatcgagaccccttgggtcattggcagcaacagcaagaggcagctctgcagaagctgtgcagccagcagcagcagcagcacacacacaagcagccctggtggcccaggctgcgggaccccaggccagccccctccactccttcacccttagtatcacacaccgttggagaagtgggcccactgtcagccaccagctctaaacgccttccgatgttcaaggctgcagactcagcacccacatcactggcctacatgttgctcagcaagtgtttcctgagcatcccctgggagcccatttctgtagcagtacccaatttgctctctaatgtcttcggctgtgaggagagaacagcttacacagaactcgccaacaacaggagtgcttctgcctggagccaacagcagctcagcagcttgcctgggggtcccctgcagagcctgcagcagaacgctttgcaggcccgaaactgcaggtcccgggtgaggctcctgaaagaggtccaaggtgcttgggatgctgcagaggtgagttctcttgctgctccccctacccctcccatgatgatcatctacctgggcctttgctgggacaaagcattggctggggagcctactcccacctttcagtgttcagagttctga

SEQ ID NO: 295448 - DNA, 1000 bp, Homo Sapiens
ttttctgtctctctctgtgtgtctttctgccatacacacacacacacacacacacacacacacacacacacatgcacgcacataaacacaatataggagtgttaacccagaaaattaggtaaggtcaaatggaaccagttggcaactccactcctaggtatatacccaagaagataaacaaaaatgtaccttcacaaaaacttgtacatgaatattcatagcagcaccattcataatagccaaaaagtagaaagtgatcaatctgtaagtccattaattgattaataataaataaaatgtagtatatacaatgacatatttggcaataagaaggaatgaagtactaatatatactacaatgtgcataaatcttgaaaacatactaaatgaaagaagccagtcacaaaggaccacatactgtatgattccgtttgtataaaatatccagaatagacaaatctataaagacaaaacacttagtggttgcttaggggtgggggttcaggagaatggtagtgtctgctaatggggatggggtttcttttggaagtgataaaaatgttctaaagttgattgtggtgatgattgcacagctctgtaaatatactaaaaagcattgaattgtacactttaaatgaatgaagtgtatggtatgtgagttacatctcagtaaagctgttaaaaaacaaatacaatggaccaggcatggtggctcatgcctccaatcccagcactttgggaggctgaggcgggtggatcacgaggtcaggagatcgagaccatcctggctaatacagtgaaaccctgtctctactaaaaatacaaaaaaattagctggacttggtggcaggcacctgtaatcccagctactcaggagactgaggcagaggaattgcttgaacctgggagtcaaaggttgcagtgagccgagatcgcaccactgcaccactgtactccagcctgggtgacggagaaagactctgtctcaaaaaaaaaaaaa

SEQ ID NO: 295449 - DNA, 1000 bp, Homo Sapiens
ggccgcggagcccaggcttctagtgcctgtggatgtggacacaaacacgccctgctatgccctcttagaagttacctacaagggcactcagtggtatgaacaaaccaaagaagaattgatggctcctacccttcttccagaactccatcttttaaagcagattaaagtaaaaggcccaagatactgggaactgctcatagatttaagcaaaggaacacaacacttgaagtccatcctttccaaggatggggttttatatgttaaactccgggcgggtcagctctcctacaaagaagatccaatgggatggcaaagtttgttggctcagactgttgctaacaggaactctgaagcccgggctttcaagccagaaacaatctcagcattcacttctgatccagcacttctgtcatttgctgaatatttctgcaagccaactgtgaacatgggtcagaaacaggaaattctggatctcttttcttcagtactctatgaatgtgttacccaggagacctcagagatgttgcctgcatacatagcaatggatcaggctataagaagacttgggagaagagaaatgtctgagacttctgaactttggcagataaagttggtgttagagtttttcagctcccgaagccatcaggagcggctgcagaaccaccctaagcgggggctctttatgaactcggaattcctccctgttgtgaagtgcaccattgataataccctggaccagtggctacaagtcgggggtgatatgtgtgtgcacgcctacctcagcgggcagcccttggaggaatcacagctgagcatgctggcctgcttcctcgtctaccactctgtgccagctccacagcacctgccacctataggactagaagggagcacaagctttgctgaactgctcttcaaatttaagcagctaaaaatgccagtgcgagctttgctgagattggctcctttgcttcttggaaatccacagccaatggtgatgtga

SEQ ID NO: 295450 - DNA, 553 bp, Homo Sapiens
gcatgtccctcccagctgccctaccttccagggcccatatcaatgcctgggtcagagccctggggaggaactgctcagttaggacccagacggaaccatggaagccccagcacagcttctcttcctcctgctactctggctcccagataccaccggagaaattgtaatgacacagtctccagccaccctgtctttgtctccaggggaaagagccaccctctcctgcagggccagtcagagtgttagcagcagctacttatcctggtaccagcagaaacctgggcaggctcccaggctcctcatctatggtgcatccaccagggccactggcatcccagccaggttcagtggcagtgggtctgggacagacttcactctcaccatcagcagcctgcagcctgaagattttgcagtttattactgtcagcaggattataacttacctcccacagtgattcaacatgaaacaaaaacctcaacaagaccatcagtgtttactagattttaccagctgcttcctttacagacagctaatgtggccactcagttttag

SEQ ID NO: 295451 - DNA, 1000 bp, Homo Sapiens
ctcagtgcatttggaacttgcttatgcattggaataacttgagtcagctgctcgtttctgtgcctctgcactcacaggttccttcattaacattttaaataagtggttaaaaactcctctggaggttgtttttgaaagaaacagggaaaagaaaaacacacactacctgaattgatttgagtaattttccagtgactcagttgaaactcagtgttgcatacataatttcctcatgctgagccagcctgaaataagacttgataagaggcacagccctaagtagcaggcagtgccactgtggacagtgtacactatggtgtgagtgtgtgcacaggcgagcctaagtgtgtgtactcatacacacagataaaccgaaaggacactgggctttgtgctggcaaaggctgtgatgctgctgtggctttctatgggccctggggagtgtcagatgggaagtgctttgatggcatgttgttcagtgtatttaatggggtctcccatggcccgaggacccactgtgagcactccacccactgtggcgcagaacacggctggagtcatcatagcccaggtctttattgaaagggagtgttgacccagaagcctcatatagaaaccatttggcaaggtctggaccatctctctgcaactgacctgccttggccgcacagagggacccaaacccaaaaggcccagacccaagggagactgaatcacatttaccattacaccagctttcatttatttgtttccatatgatcatagggactgtattactaagtatgcttataaatgctatttacagactgttcccttttataaggtgaaagattaataaagaacaaaaaattgcctgtagaaaaccatgcctgaggccaggagcagtggctcatgcctgtaatcccagcactttgggagaccaagacaagcagatcacccaaggtcaggagttcaagaccagcctggccaacttggagaaaccccagctctacaaaaatac

SEQ ID NO: 295452 - DNA, 1000 bp, Homo Sapiens; identical to SEQ ID NO: 225079

SEQ ID NO: 295453 - DNA, 726 bp, Homo Sapiens
atggagggtgtagggggtctctggccttgggtgctgggtctgctctccttgccagggactgagtcttaccgtctgatcccccacacccaccccatgtcctgctgtctggtctcaccggtgggtgctccaggcatctgtgtatgcccctgtctgtctggaccaggtgtgatcctaggagcgcccctggcctccagctgcgcaggagcctgtggtaccagcttcccagatggcctcacccctgagggaacccaggcctccggggacaaggacattcctgcaattaaccaagggctcatcctggaagaaaccccagagagcagcttcctcatcgagggggacatcatccggccgagtcccttccgactgctgtcagcaaccagcaacaaatggcccatgggtggtagtggtgtcgtggaggtccccttcctgctctccagcaagtacggtgagtgagcatggcgcgctccctccctgcctcagccccttcttcctaatgcggcaggtgttcctctcttcccttttcctcttacaccatcacatcccttccacctccccacccgaagaacctgtccacagatgcccttctgttgctgaaggtctcctgagtagggagggttaaaatctgatgggaaggtatgtcgagtggggatctggttccccttgagaccatgcggtgcagaggacagtgacctacccaaggccacacagccagggtctgtctggggc

SEQ ID NO: 295454 - DNA, 1000 bp, Homo Sapiens
aaccaccacacctggcctgtcacttctttatcatgttaattttcatctaaaaaaactatcactgaaaactttttcctttcaaagtactgaacagttttcttctcttgctaatttcttttttgctactaaagacttgtgtttctagagatatgaccgtaattattccaacctctccaatttataatttagtgttcaagcttttaaattaaggaacactatgtttgacagctgctgattaagaaatcacacttctgtaattatcaaaaacaatttaccttggtctgtcacagtattttttttttttttttaagagaaacacccgtcaaatttattgcagttgtccagtcagcaatggtgatcttcttgctgattgctgatcttgccattcttggaccccaagtgctccatgacctccacaatattcatgccatctttcaccttgccaaagaccacatgcttgcaatccaaccactctgtcttggcatcttggcagggcagataaaaaactgggaaacgttcacgctgggtccagcatttgccatggacaagatgccaggacccgtatgcttcaggatgaagttcttgtcatcaaatttctccctgcagatggacttgccaccaatgctgtatggcgtgtgaagtcaccactctgacactctccagtgctcagagcatggaaattttctgctgtctttggaaccttgtctgcaaacagctccaatctgttaacatagttttatggattagatgagcagtcacttcttgctttccaggccccttacctcgaaggagacacagcccaagggctcgccatcgacagcaatgtggaaaaacatggtggggttgaccatggctggaagcagggggccctgggcggcagcagcatctgcaaagctcacagccttctttttaaaagtcagcttcattagctactgggaagaatgactagttaaaacattttcccctagcatttctttctttcttttttctttttgagatg

SEQ ID NO: 295455 - DNA, 1000 bp, Homo Sapiens
taaagtatactatctcaaaactcattatgttgtcagagccctagagctggctaatgtaacactgactatgagtaggtgggcccaccacttgagttgaggtgatttcatggtgtctttccaggctcttgatagggtgtcactgcatgcaagccatgaatctgttttgagaatcctctccattttcccaaataaaaacctatcccaacagtgactatatcactcagcattggatctaaatataaaagtggtgctttcagtgtttttggcagatagtgttccataagctttccatcagaagggattttagacaccttagaggtccgtgctacatcttcacagttcctctgaataaccttaggtggtagtgttacttgcctttgacacctctgcatatgttttaatgactagatccaaactgtgttgttcttaaatcaaaaattggataatttttaatatttatgtattaatcacatagtatgctctctgaagttctcttaagccttcagtttatactcttaattttctttctgagctggggaactgactttgcactttggttacacagaacattggtttccaatttagtttaactgaaatttgctgctgatatgttgagtttgttctttaaaaaatatctcatatgtctcgtctttcctccttagaagaacagacctaactagcgaatgtatgaatgaaaatgcatctatttcagagccgacatgaagagtttagtttttttactttataaactgtgaatatgagtatgccagctgcattagatgtaactaatcatatttaaatatatttcactttctctttgacttgagaccttttgaagtctgtataaacttgttttgaaatatagtctccacttacaaatgtcataacaaaatacttttttgcatgataaaaaattgattacaaaaggcatattctttcatggtttctgcaatgagaggaagtgtaatgattattttaatatttctattaaatatgttta

SEQ ID NO: 295456 - DNA, 1000 bp, Homo Sapiens
ttctattgcctatcaatcccatttaaagatagtgcatagggtattctaaaatagctgttaagcaaagagaaaattgggcctgatagggtgagaatcacagctctaatacctagagtgaccttataatgtattgtccaaaggagatatttttgacagtgaaagagggtgttgttagtaattatatcaggaccatggcctaaaccaggactatcccaggcagcctgggacatatttgtaccccatctctatttaatgcctttatacaattctttacttaattctaccagcctttattgagcctgctttctttgtctagctgagtgccacgtgctgacgtcactaagatcaatacagcaaactctgaaagatggacagagagacaggagatggtcctttataatgcagtgtgatctgtgctgcaatagagatggaagagtgttctgatcagctggaaaacaacgcacatgggaagctgtacagaaatgagtggggaaagttttggaagctagaagttcaaaacgaggtgttggcagcaccatgctctctctgaagatgctaggaagaatctgctccatgcctttccattcgctcctggggtttcctgcaagccctgacattccttggcttgtagatacaccaccccagtttccgcccccatcatcacatggcctcctctctgtgggtgcctctgcgttccctctattcttcttctaaggacaccgacaccagtcatagtggattaagggtccactcctaactaattacatctgcaaccaccctatttccaaataaagtcacattctaagattcctagggagaacatgaagttttgggggtgtgtggatactgttcaacctgggacatggagtaaataaatggcaagaaagattacagatgactttaagctaaagagggagatagggttaaatgtaggacttttttttttttccaggacgggagaggtttaaacatgttactacattgaataaatgaaataacc

SEQ ID NO: 295457 - DNA, 1000 bp, Homo Sapiens
cagagaaggcaaattcaggcaaattctataccgtgactctgacgaattgaatgaaattattatgaggatgttaaaggattaccatcgaccttctgttgaagaaattctcgagaaccctttaatagcagatttggttgcagaagaacgaagaagaaatcttgagagaagagggcgacaattaggagagccagaaaaattgcaggattccagccctgtattgagtgagctgaaactaaaggaaattcagttagaggagcgagagcgagctctcaaagcaagagaagaaagattggagcagaaagaacaggagttttgtgtccgtgagagactagcagaggacagactggctagagcagaaaatctgttgaagaattacagcttgctaaagaagttcctgtctctggcaagtagtccagaacttcttagtcttccatcctcagtaattaagaagaaaggtcatttcagtggggaaagtaaagagaatgtcatgaggagtgagaattctgagagtcagctcacatctaagtccaagtgcaaggacctgaaggtccttgcttcatgcttcatgctgcccagctgcgggctcaagccctcatcacctacgagcacccccgcacaaggcccaggagctctgccagaaatcacttccccccacccgatagccgccctgcagccagccatctcaagggctcccgcggtgtggccacacagctgccatccccaaatcgctttccaaagttctctgccctcgcagcccacggcccatagccactcccgcctgagcccgcctgcgggcctcgcacagcagctcctcgcctggaatccagcgcacgcccttccgcgacccgggcagtcctcccgatgctctgcccagccccgctgggaggatagcggctgggttggtgtggctgcaggcagagaccttgcctgccctactcagcctcctccaccggcgcccgggagggtgtccagtgcgtccgggggtgtgggctggccttga

SEQ ID NO: 295458 - DNA, 1000 bp, Homo Sapiens
ttacgtgataatctgacactatggacttcagatatgcagggtgatggtgaagagcagaataaagaagtgctgcaggacgtggaagacaaaaatcagggagacataagccaacaagagaaaccatctctgaccaccccctcctccccatcccaccccttggaaactccccattgtcactgagaaccaccaaatctgacttttacatttggtctcagaatttaggttccttccctgtttttttttttttttaaaaaaacagttttcaaaagttcttaaaggcaagagtgaatttctgtggattttactggtcccagcttttaggttctttaagacactaacaggactgcatggaggctttttcagcattactgtgttgtctctgtgccagatgtggcaagatcaccattagaaatggaaattacatttgaaagccattagacttctaggtaatgcaagcatctaagagaggttaatcacactatagaggcataagtggtatcagttttcatttttctaattgtttaaactgtattttataccaatgtttgaaagtaattgggtgttagcctgagatggttacaggtcgtttggggagggagttgtaatggttttgctgtaaaaaatgtttcaaactgtgctgaaatgttgctgaaaagcatggtgccgataacagttcaaccatccatggctgctcattcttgcctactttactctcccactgaagcaggttagcgttgaaggtggtatggaaaagcctgcatgcctgttcaattctttgtttcttctccttccccctcccactacctccttcccctcattcctcccctccttcgctcgctcaatctcttttattcagtatgtgtaacttgaagctaatttgtactcctggatatctgactggaaccacagatacagaatctttattgttcttactgaaacacagcatggaattagcattaaacttaaataaaacaaacctaaattaaaaatgaaatgacga

SEQ ID NO: 295459 - DNA, 1000 bp, Homo Sapiens; identical to SEQ ID NO: 225080

SEQ ID NO: 295460 - DNA, 651 bp, Homo Sapiens
atgcagcagggatcagcctccaccacacctgaccaggagctccagaactgtaaaatcctggacaccattggccgtggcacgttcagtgaggtccaggatcacatgctgattgggacccaaatggccatcaaaatcatccccaaggctggctcccttggcatcactctccagagatgccatagcaaattgcgcagagacctgaacccagaaaacatcatccttgatgaggacggtaacgttaagatcgcagacttcggctttggccagggctaccaatgtgccaccatggatattcagagcctcagagtaattttataccacatggtggctggggttctgcccttctgctcatgcagcattagggtcctctcagcaaaaatttaaaccatggtgcccagtctggccccaccaggagacaccagaacgactgtccatgtgtctactccttggcaccttccccgcatgatataccactatggccacatcgaggaggaagaggaggcccggaccatgttcaggcagattctgtcagccctgcaagcaccagcaactggtgaagtcttagaaacgtccctgatacaccaaaaaccatcccaggaagccagcatcgtccaagctgagaagtccaagctgagaagcctgaggctgtga

SEQ ID NO: 295461 - DNA, 1000 bp, Homo Sapiens
atggttattgtagctttaatagacagaatgggagatgccaaagacaaggttcgagatgaagctcagactctgatattgaagttaatggatcaagtagcaccacctatgtacatttgggagcagttggcttctggttttaaacacaagaattttcgatctcgagaaggcgtgtgtctgtgtcttattgaaaccttaaacatttttggggctcagccactagtcatcagcaaattgataccacatttgtgtatcctgtttggagactccaacagtcaggtgagagatgctgcaatattggctatagtggagatttatagacatgtgggagaaaaagtgaggatggatctttataagagaggaattccccctgctagacagggtctggctctgttgcctaggctgcagtgcagtgttacgatctcggcttactgcaacctccacctcccgggctgaagccatcctctcacctcagcctcccaagtagctgggacaacagacgtgtgccaccacgcttggctactttttgtattttttgtagagatagggtttcaccatgttgcccaggctggtcttgaactccggagctcaagcagtcctcccgcctcagtctccctggaattatgggcgtgaaccactgcagtcagctgaaatgttttaaaattcaaaagatacaaaaggatatatatgttatcaccatttaaaaagttcttaaggtcctgtaatattttttgtcattgtttcattatatattcatttattatttagtatgtaattatgtaccattatcaagtaatcatcctttgataccaggtggtaatagtcattatttgggagatgcttgagcaaggatttactaaaaatattaattcattcatcaagtaaatcctttaaaagtatgtactgttgaaaggtaccatacaatttattgggtaacagaaactgtatgagaatcagttttttaaaagcttaataagtaaccaattgtagggttcttacaatt

SEQ ID NO: 295462 - DNA, 1000 bp, Homo Sapiens
gagaactcatgctggcaaaaaaccctatgaatgtaatgaatgtgagaaaacctttatcaataagttaaaccttgggatacacaagagaactcacacaggggaaagaccctatgaatgtaatgaatgtggaaaaacctttcgtcagaagtcaaatctcagcacccatcagggaactcacacaggagagaaaccttacgtatgtaatgaatgtggaaaaacctttcatcgcaagtcattcctcaccatacaccagagaactcacacggggaaaaaccgtatggatgtaatgaatgtggaaaaactttttgtcagaaatcataccttattatacatcagagaactcacaccggggaaaagccctatgaatgtaatgaatgtggaaaatcctttcatcagaaggcaaatcttcagaagcatcaaggtattcacacgggggagaaaccctatgaatgtagcaaatgtggaaaaaccttgtcagaagtcagtcctcactgtacatcatagaacccataccggagaaaaaccttatgaatgtaatgagtgtgggaaaaccttttgtcacaagtcaaacctcagtacgcatcaggggactcactcaggagagaaaccctatgaatgtgatgaatgtaggaaaactttttacgataagacagttctcaccatacatcagagaactcacacaggtgagaagccatttgaatgtaaagaatgtaggaaaaccttctcccagaagtcaaaactctttgtacatcacagaactcacacaggggaaaaaccctttagatgtaatgaatgtaggaaaactttctcccagaagtcaggcctcagtatacatcagagaacacacacaggagaaaaaccttatgaatgtaaggaatgtgggaaaaccttttgccagaagtcacacctcagcaggcatcaacaaacccatataggagagaaatctgacgtagctgaggcaggctatgtgttccctcaaaatcactcttttttcccttga

SEQ ID NO: 295463 - DNA, 1000 bp, Homo Sapiens
gcacttttttggatcttttttttaaggatgttactatcaatcttttgcctacatctaaatgacttacctatgaagaagatcccatttttagccttaatatttgcaaattacttgagagatggagtctcactctatcacccaggctggaggacagtggcacgacctcagctccctgcaacctccacctcccaggttactgatggatccgtcctaaatgccatccatctcaagacagaggcccacagaagtcaatgtatcttcaagatgggagtacctggagatggctgtagagaccatgtagcaggaaatggtgacagagaagagctgggcctctggtaccaacatgcttcccccccgttacagctatgcgggctgatagtgacgcaatgtgtggtttcaatacttcatagtgtcttacttcacctcagtataaagtactttgaaagcatcaaggaaatggtcctcaaaaaaggcttatccagtcaggacatctggtgctggctctggaatgagtggatgaagataaggccttccagtatggaggtgataaaaatcagggaagacaggtaatcacaatggatgacagaccaggattcccagatatcttggcatggctggaacaatgtacagatcaaaccatgtaaaacttaatgggtataaaccaactcttcactttggtctaaaaaagtccatttgcatggcttctagttaaaggtggacaggctcactttagaatcctattatatacaaaggatttagggggtttagttcacaatgtgctaaagccatctcacagtgaccatggtatgagctgtgtgatttggtttaaatataatagagaatgaaggacaaggttgagggtggtggttacagtcctgcctgattctgtagtgctcaggtgacctttgaagaatgaagaaagaagtcaaaaccccacactattaagacattggaagactgggaatgtttattttctgaagaataaaagatgtaggaaaca

SEQ ID NO: 295464 - DNA, 1000 bp, Homo Sapiens
aagaagagattttctaagagaagctagtatcatgggccagtttgaccatccaaacatcattcgcctagaaggggttgtcaccaaaagatccttcccggccattggggtggaggcgttttgccccagcttcctgagggcagggtttttaaatagcatccaggccccgcatccagtgccagggggaggatctttgccccccaggattcctgctggcagaccagtaatgattgtggtggaatatatggagaatggatccctagactcctttttgcggaagcatgatggccacttcacagtcatccagttggtcggaatgctccgaggcattgcatcaggcatgaagtatctttctgatatgggttatgttcatcgagacctagcggctcggaatatactggtcaatagcaacttagtatgcaaagtttctgattttggtctctccagagtgctggaagatgatccagaagctgcttatacaacaactggtggaaaaatccccataaggtggacagccccagaagccatcgcctacagaaaattctcctcagcaagcgatgcatggagctatggcattgtcatgtgggaggtcatgtcctatggagagagaccttattgggaaatgtctaaccaagatgtcattctgtccattgaagaagggtacagacttccagctcccatgggctgtccagcatctctacaccagctgatgctccactgctggcagaaggagagaaatcacagaccaaaatttactgacattgtcagcttccttgacaaactgatccgaaatcccagtgcccttcacaccctggtggaggacatccttgtgtaagaggcataatgttgagtttttttcttcttgacaattatggtttctttcaggctatagataataataacaggtagaaaggaaaaaaatgccttgataaccatctagttgttgactttgtggaaaccatatttcatttatcagctgaaaaaaagaattattaacattaaa

SEQ ID NO: 295465 - DNA, 1000 bp, Homo Sapiens
cgctgtgttaggctgaaggcaaaaggaaaccaaggcctgggagttttccaggaaacgaaagcgaaagagtcaaagttagcggcccggagttggcgcggcccctgcagtccggcggagagcggagctgaggatggctgtgcccggctccttcccgctgctggtcgagggctcctggggccccgaccccccgaagaacttgaacaccaagttgcagatgtacttccagagcccgaagaggtcgggaggcggcgagtgtgaggtccgccaggatcccaggagcccatcccgcttcctggtgttcttctacccggaggacgttcggcagaaggttctggagagaaaaaatcatgagttggtatggcaaggaaaaggaacattcaagttaactgtccagttacctgcaaccccagatgaaatcgatcatgtctttgaagaggaacttctaacaaaagaatccaagaccaaagaagatgttaaagaaccagatgtgtcagaagaattggatacaaaactccctcttgatggtggattagacaaaatggaagatatcccagaggaatgtgaaaatatttcctctttggtggcatttgaaaacctcaaggcaaatgtgactgacataatgctaatcttgttagtggagaacataagtggcctgtctaatgatgactttcaagtggaaataataagagattttgatgttgctgttgttacctttcaaaagcacatagatactataagatttgttgatgattgtaccaagcaccattcaattaaacaacttcagctttctccaagacttctggaagtgacaaacacaatcagggttgaaaacctgccacctggtgctgatgactacagtttaaaacttttctttgaaaatccctataatggagggggaagagttgccaatgttgaatattttcctgaagagagttcagctctgattgaattttttgacagaaaagtatctcacaatcccattaataatctgcacagttag

SEQ ID NO: 295466 - DNA, 1000 bp, Homo Sapiens
tctccttcagtttcctctcattgcctgaggttgggcccgaacacggcggtacatttccttgagagtcttctacattcatgctgtagaagctatgaaagtcgtgggaaactatagagtcaacactgcaaactcaagcactgatacgtccggagagcacttgacctgccttagaagtcagctctttgtagcctacagaaatggaagagtggatgaagcagtctctctgggttttctggattgctggataggtggagacctgacaaatttcaaaggctgctacctgactaaccaactgcctattcagatttttacagccatcttcgacatgaacacggatgtaatcatactctcacaattcatgtactacaggttaaagaatcagaagaaaaaaatttctgaagaagatctacggaaggaacttcatttctgctgtttgcattggccatgattgggaacttcacgtatggacttggtgtggttttaaaggcaccagctgctacgtgtcacaagaatacttactttgtgcatcatcttccttggcttattgcaagttttggaatcttattccttaactcttttgtgtcttttgccatcagattgccattagagaataaacatgtatagctacttaatatatcacccaaaaagtacatatatatatatatatatatattctaagaagtgtaaatagctaatgctatagtcatttcattattatatttgaaatgttcatttataaggaaagtcttctctctcccaaagtctcctaattattattattctagcaaacgatcaaattcagatgaagatttcttggtttctttggttcttctgataaaaaaaaaaaagtggggccaagtttagaagcattgaaattaacacatcttagatattaaattttattaaaattataatagcagatattaagaaaaaaccataccatctctgaaaatctctacagagaacactttgaattaataaatgataactgatgccttgc

SEQ ID NO: 295467 - DNA, 1000 bp, Homo Sapiens
cctctaccttgcagaatgggccgagaacccagcagccttcactcacaggactgtcctaaagcttggcagtggcgccggcctcacaggcctggccatctgcaagatgtgccgcccccgggcgtacatcttcagcgactgtcacagccgggtcctcgagcagctccgagggaatgtccttctcaatggcctctcattagaggcagacatcactgccaacttagacggccccagggtgacagtggcccagctggactgggacgtcgcgacggtctgtcagctctctgccgtccagccagatgttgtcattgcagcagatttcaccgtagacgtgctgtattgcccagaagccatcgtgtcgctagtcggggtcctgcggaggctggctgcctgccgggagcaccagcgggctcctgaggtctacgtggcctttaccgtccacaacccacagacgtgccagctgttcaccactgagctagttgagtccccacgcccacccgggcctgcatggtccccgagctgtccctgcaggactccagtggaagtgaaagaactgggcgccggcgtaaagctagcatgccccacactcccacaccatgcggggaactcgggcagaggccgtgacaaatacactaggacacacggaggccaagtgacccccgagctcccgcacactgcagcccggccacctggctcgcaggtctccacactacatccaagccccccattgccaccagcctttgccccagctccccctgagcacagcccctcctggcagccatgtgcacagatgcacgcacagcagcctctgcctgcacacagagacacggacgacccagtgactgtccacgtggggcagcccgttaactacagagtaaacaaacaagccggcacacgaaggcgccaggccaggatcagatgggaagtggaagcttgtcatgaccagaaactgtttccctacaaagagcacttggagatggcaatgctgaacctaatactgtag

SEQ ID NO: 295468 - DNA, 1000 bp, Homo Sapiens; identical to SEQ ID NO: 225081

SEQ ID NO: 295469 - DNA, 1000 bp, Homo Sapiens; identical to SEQ ID NO: 119348

SEQ ID NO: 295470 - DNA, 549 bp, Homo Sapiens
ataacatctggtgtaaacacttgtggggctggttggagattctccggggacccttccgtatctgcctaggcattttgctgtctcctcctaatacgtttgatgatcttatggcggagaaggaagcagtatcttcaaaatgtgtcaatttgcctaaagagaatcaagtttttcaacaggagttattatctatgaaaaaagtacaacaggaatgtgaaaaacttgaggaggataaaaatatgttggaagaagaaatattaaatcttaagacacatatggaaaacagtatggtagaacttagtaaactacaagaatataaatcagagctagatgaaagggcaatgctggcagtagaaaaattagaagaaatccatttacagatcgaataagaaaatagcaatgatcagtatcagctctttatggagaaagagcaggtgaaatattttctcagcactcttcctacaaggcgaggtcgagagtcaccttgtgttgaaaatcttactagtataggactcaacagaaaatatattccccaaatgcccgtaagaattc

SEQ ID NO: 295471 - DNA, 1000 bp, Homo Sapiens; identical to SEQ ID NO: 220464

SEQ ID NO: 295472 - DNA, 911 bp, Homo Sapiens
atgcagacctttgagagagacttaaaggatatgcttctgccctcagggagtccccattccagaggtatctgcatctgggacccaccccctgggctggctaatcaaggaggaagcagcagcagtgtctgctgtgggggccacagctctgtattgcatcatcctggtggtagtcacagtggccgagtgagtttcttgggggcccagcttcctccagaggtggcagcaatggaccagctactaggggacctaaacaggagcatgtttagaaagttgctgaagtttgtggtcagcagcctgcaaggggaggactgccgagaggctgtgcagtgtcttggggtcagcaccaacctgccgcaggagtggctgggtgccctactggcaggcatgcacacgctgctccagcaggccctccatcttccccccaccagcctgaagcccaacaccttcagggaccagctccaggaactctgcatcccccaagacctggtcggggacttggccagcgtggtatttgggagccagcggcccctccttgattctgtggcccagcagcagggggcctggctgccccatgttgctgactttcagtggtgggtggatgtgacaatctccaccagtgccctggctcgcttcctgcagccgagggtcctgatgcagctgaagctttcagatgggttagcataccgcttcgaggtccccatagccaagttccaggagctgcggtacagcgtggccctggtcctaaaggagatggcagatctggagaagaggtgtgagggcagcctgcaggactgacccctcacatgaccagtcctattcaggtcaggcttggacaggcacctcagatggtgccaaagtgcagctgactcttcccaggacagccctgcccttcccatgaggcaggctcttca

SEQ ID NO: 295473 - DNA, 679 bp, Homo Sapiens
atgcaaaccaagatttcactttctaccctgagtgcgattgcaactccaagaattatagagcttgcccacccaaggatcaagttagagggtctgtgctatgaaagacaaagaagtgaactgcccatccgtcctgtacctcctgctgccatgatagctaaacctagcccccgaacaatagctctagcgaagtccaagtctgttcatcaagattatctacctgaccgtgatgcccattggccagtatcttatgctactactcattccaaagcatcacctaggattcaggaactagctaatccaaataagagaggggtaataccacatagcagttttgaacttgagttttggaatcagatagaacctgaagttgtctctgtcatggattatttaccaggtatgtgatcttaaacaaatttcctaactccctgtgctgcagtttctttatgtagaaaatgggttcctgcagcattcttgtaaagattagatgataaaatgtatataataaagtatatatttgaaacaaaaatttttatttagaaatttagctgtggctaggcacagtggctcatgcctgtaatcctagcactttgggaggccgaggcagatggatcacgaggtcaggggttcaagaccagcctgaccaacatggtgaaaccccgtctctactaaaaatacaaaa

SEQ ID NO: 295474 - DNA, 866 bp, Homo Sapiens
tggcgtgtgcctgtaatcccagctactctggaggctgaggcacaagaatcacttgaatccaagtggatcacttaaggtgaagagttcgagaccagcctggccaacatggtgaaacctcgtctctagtaaaaatacaaaaataagccaggcacggtgatgcacgcctataatcccagctactcaggaggctgagacacaagaatcgcttgaacccgggaggcagaggctgcagtgagacgagatggcaccagtgcactccagcctgggcgacagagcgagactctgtctccaaaaagaaagaaaaatattgtggcactggggcatcaacttgattgaacgtccagaggattatagtctgctgtatatggccatccttggttttaccagtttttcagagctcagtctggggaaaagaaaaaaaaaattatacttcccctaagaagtaactgatatctggagccaactttgcaagatgggaagcacaaaatgcaagaggaaaatgttaaactaaaaaagcccctggaagaaagccacaggctgcaaccccaccctatggatgaacaggatcagctgctgctctctgaaaagccacagttgtgtcagctatgccaggaagacggcagcctaacaaagaatgtgtgtaagaactgcagcggaaccttctgtgatgcctgttcaacaaatgaactgcctcttccttcaagtatcaagcttgagcgagtttgcaatccctgtcacaagcatctgatgaagcaatattctaccagcccatcataagactggaggccaagacctggaccaaaacgtttatgcaggctcctctgtacctgtgttttagctgtcaggatctcatagagcccagttct

SEQ ID NO: 295475 - DNA, 1000 bp, Homo Sapiens
actaccagaccacgttgatgagcgaacaatatgcaatggaattgccccagaaaaagatgtagatggatttcatattatcaatattggaagattgtgccttgatcagcattctctcatacctgccactgccagtgctgtttgggaaataataaaaagaacaggaattcaaacatttggaaaaaatgtggttgtggctggaagatccaagaacgtagggatgcctattgccatgcttttacacactgatggagagcatgaacggccaggaggtgatgcaactgtgacaatagctcacagatacacccccaaagagcaactgaagattcatacgcagctggcagatattatcatagttgctgcagagagatttcaccattttgcccaggacctctccaactcctgaactcaagcgatccacctgcctcagcttcccaaagtgctgagattacaggcatgagccaccacacccggcactatataagtattttagaccttagaaaaacctatctagttttaaatttgtcttattaattttcttgacattgctaaaaaaagaagcatgtatatccattcatgcaatattcctcagcagtgaaaaggaatgaactattgatacagcaacctgaatgaatttccagcaaattatgaagtaaaaaaggcaatctcacatgttctttgttcaatcatagaatatatgattccatttatatagcattcttgaaagtgacaaaattagcggtttccgggagtcaaggacaggttgatgtgggagggaactgggtgtggctgtaataaggcaacatgagggacccttttgatgatggaaatgttctatatcttaactgtatcaatgtcaatatcctgggtataatattgtcctgtagtttggcaagatattatcattgtatagtatcttgtattatttcttacaatggatgtgaatctataattatcaaaaaatgacaatttaattaaagcatatagtaaataagtaaaaaaa

SEQ ID NO: 295476 - DNA, 960 bp, Homo Sapiens
ccaccgcagcaggtcacagcccctcgaggcgacagcggccccgccgcaccagagcagtggtacaggcatggatgggaagaaatgcagcgtatggatgttcctacctcttgtatttactttgtttacttcagctggattgtggatagtatacttcatagctgtggaagatgacaaaattttaccattaaattcagctgaaaggaaacctggtgtgaagcatgcaccatatataagcattgcaggtgatgatcctcctgcaagctgtgtgtttagtcaagttatgaacatggcagccttcctagcccttgtggtagctgttctgcgcttcatacaactgaaaccgaaggttttaaacccgtggctgaatattagtggattggtggctctgtgtctggcttccttcggaatgaccttacttggtaattttcagctcacaaatgatgaagaaatccataacgtcggaacttccttgacctttggatttggcacattgacctgctggatccaggctgcgctgacactcaaggtcaacatcaagaatgaaggacggagagttggaattccacgggttattctgtcggcatctatcactctctgtgtggtcctctacttcatcctcatggcccaaagcatccacatgtatgcagccagggtccagtggggcctggtcatgtgcttcctgtcttattttggcacctttgccgtggagttccggcattaccgctatgagattgtttgctctgagtaccaggagaatttcctaagcttctcagaaagcctgtcagaagcttctgaatatcagactgaccaggtgtaaaccatcagtttttccttgctggtgaggtgggtgtgacagtgggggaggggccagtaggacacactcacaggacttgacatagaacctcatttcacacacacacacacacacacattcatggccacatttgccaaatgagcttt

SEQ ID NO: 295477 - DNA, 1000 bp, Homo Sapiens
agtatgacctcagctcatggctctgcttcagccctgaaaaccactcgcttgcagagcgctggatcagcaatgcctactagttcttcattcaaacaccggattaaagagcaggaagactacatccgagattggactgctcatcgagaagagatagccaggatcagccaagatcttgctctcattgctcgggagatcaacgatgtagcaggagagatagattcagtgacttcatcaggcactgcccctagtaccacattggttgatcgtgtttttgatgaaagcctcaacttccaaaagattcctccattagttcattccaaaacaccagaaggaaacaacggtcgatctggtgatccaagacctcaagcagcagagcctcccgatcacttaacaattacaaggcggagaacctggagcagggatgaagtcatgggagataatctgctgctgtcatccgtctttcagttctctaagaagataagacaatctatagataagacagctggaaagatcagaatattatttaaagacaaagatcggaattgggatgacatagaaagcaaattaagagccgaaagtgaagtccctattgtgaaaacctcgagcatggagatttcttctatcttacaggaactgaaaagagtagaaaagcagctacaagcaatcaatgctatgattgatcctgatggaactttggaggctctgaacaacatgggatttcccagtgctatgttgccatctccaccgaaacagaagtccagccctgtgaataaccaccacagcccggccatgctgtgacctacaagcaaactaaatagccaacatttctgaacccctatgtctcctgtgccaagctgctccctgaaatggacttcttcatctgtacagatttgttaaaccattctatttgcttcttaataataggatttatattagtactcattaccattggacacaatgacataagtactctccacagtaaagcagacctttcacaaca

SEQ ID NO: 295478 - DNA, 1000 bp, Homo Sapiens
ccgccgtcgcctgaggggagcgagaagaggcagcggcgaccagggagaaaacgcggagtccccaccggagagcagccgccgccagacagccgcccgcccacccgttcgcccgtccccctgccgcattcacaatgcagcctgcttttgcaaagtggtacgatcgaagggactgtgtcttcactgaatcttgtgttgaagacaataaggatgttaatgtaaattttgaaaaatccaaacttacattcagttgtcttggaggaagtgataattttaagcatttaaatgaaattggtcttttttactctattgatccaaatgattccaagcataaaagaacggacagatcaattttatgttgtttacgaaaaggagaatctggccagtcatggccaaggttaacaaaagaaagggcaaagcttaactggcttagtatggacttcaatcattggaaagactgggaagatggttcagatgaagacaggtctaattttgatcgtttctccgagatgatgaacaacatgggtggggatgaggatgtagatttaccagaagtagatgaagcaggtgatgattcacaagacagtgatgatgaaaaaatgccagatctggagtaagaaatatttcatcacctggattttgagaaagaaaataacttctctgcaagatttcataattgagagaattcctcagttgatagccctaaaggcagatgctgtatttgcctactttaacccatttttcaacctgtttgttttttaaaaggcttcactaagggtttatatgtaccattgtatggagcaatttgaagtcagctaaggcaataaccttatgcatgaacatttcccagactttcatgaagctgttgaggtcctaggcaattgatgcagcagttgtgataaataaaaacatctcacctaagtctccttttcttcataacatagatactgacgtgataggaagctctgggcttaggtaaagagaacaaaattttagtttatag

SEQ ID NO: 295479 - DNA, 1000 bp, Homo Sapiens
gcagattgggtggtttaatatatcagcaaaagagtgtttttaaaaaatatcaaagttctgttaatcaaaacgtttattgtaggacagttagtaatgttttgtttgccaacttatattacaaagtctctgtcttaagtgtttccttgcaaataaaatgacaatactgccttacattttattactttagagtttgcaaaatatcttcattataatatttcatttagtagacatgcctatgggaacattacttccagaattaaaaacattatttttgttttggtatatttttaaactacaaatgatagaaaggcaagtaaatgtaagtttttctctagttatttgttcaaatgctaatttaaaacatttgtacatttctaatacaaacattccttatttgagaaaaaatggatttcttaaaaacaaaatgcattttaaagcagagagacagggcattgagctgaaaatggtggctggaagttgggatctgtaagagaagttgaatgtgccccgaggcataaagctgctaattttgttttattggattttactgtagctattaatatattttgctggagatttatgtgatcaatttatcttatggccagaactaattcccttagtatattttattagaatatgtgactttttctaaatttagctttatttttcatattttccataaatggcaaagattctatgtttccagacatgttaagtattgcaagaattattggagcacctaaagataaataatatcaaaatagtgtcattgtttcccttagtttctccttctcccccacaaataaaccaagaggtatttagttatactattgcatgtctctagctttattggattcttccatgaaagaaaaatggattacatttttggttgtgtggccctcgttgccctattgcacttttgataatatttgcctgtgacaagtagttatttttcattaccacattcaatcatgggtaataaaatattttaataatggtg

SEQ ID NO: 295480 - DNA, 1000 bp, Homo Sapiens; identical to SEQ ID NO: 225083

SEQ ID NO: 295481 - DNA, 683 bp, Homo Sapiens
ctgttgattcatcagcttctgatagtgaccctatgagacagagattttctataaaagcacactcacggttaccctacctcgttatatctgatggatatatggtcacaacccttcgatttcttgatagcctatctccatcagtacacatgagatcacttctacttgattcaacccagaggcttgagaaaatatatcaaagtgtgatattgtctaagccaaaaggcaaaggactgaacttgcgatcactgaattccctaaggtctagcctgttagaacaccaaggaaatgaaagttcagccgatttcactgtccccaaattcttgcaggcagaagaaacaataaatgaaaatgcagcagattttcaggattttgaagcagaagaaactaacgaaggcagacactttccagacaacttatgtcctttttggaacaaaagagatgatgtgctgtgtagtagtatgaaggaaggaagattggaatttgcatctatgtttgatacgatacatgcaaaggatgatagggaagaatgttttttattaggatcatatgaaaagtctgttcagctgtggaaaaaagctctacaagaaatcgaagagaaagttaaacgtatcattgcattaagtatgggcttcgaggagtttttgataaggatatggggtgtggatgttagaaacaagttatag

SEQ ID NO: 295482 - DNA, 947 bp, Homo Sapiens
ttccggggagcgagactccaaatgggtggcagtcgcagcggctccccacggaggaaaggtaggcgttcccggtccacatcccgtgagagagaacgcaggctccaagaaaggtccaggtctcgggagagagatgggagaaggaaccgctcgccaaccccgcacctaggacgctcccgatctccaagacgacataaatccacatctccttccccttctcagccgaacgaaagaagagatgaggaaaagaaagaaacaaagagcaaagaatggcaaattactgaggaagacttagagggcaaaacagaggaagaaatagaaatgatgaagttaatggaatttgtctcctttgactccacaaaaggtgagaaggtggattgctctgtaaatgcctatgccataattgtctctcagaagaggaagtacgggcagtagatgaatcgaaaaggtggattccacagacctttggatttcattgcatgagaattgaaatgttgaagaatgattttttcccctcatcttggtcagagagtggattttgtatttaacttgcattcaaaaaacaggatctcagttcttccttcttgtaaaccaagaaaatcttatttatgatgtatgcagttcacttaccttgcctcaacagaagaaaagttaaatattacgtttttttcttttaggaaatatcatttgtggtaagcgtcaacctcattttatttgtccttattcctgtggaagcagtacatgttttcttcttgaatgctcattaggacttcttaaaaaacatgaaagtaatttggaagtaagtttatccaataaagcagtatttctacacttttagatttgataaatatttttattactaaagaatcccctagacattttctttttttatttcatgcatagatttaagcatcttgattcttagtaatttaaaaatgggaagaatgaaa

SEQ ID NO: 295483 - DNA, 1000 bp, Homo Sapiens
cggggtttcaccatgttggccaggctgatcttgatcctgacctcaggtgatccacccacctcggcctcctaaagtgttgggattacaggcatgagccacctcacccagcccaattcctcaaaattttaaaatagagttactttattaatcagcaatttcactcttaggtatctgcccaagagaaatgaaacaattcatccacacaaacacttttacatgaatgttaacagcagcattattcacaatagccaaaaggtggaaacagctcaaatatccatcaactgatgaaaggataaacaaaatgtggtatattcacacaatgaaatattaatgatacaaaggaagtgctgacacatgctgcaacatagatgaactttgaaaatatgctaaatgaaagcagttacaaaagaccacataatgcatgatttgatttatgtaaatgtccagaaagggcaaatccatagatacactatagaaaatagattagtcgttgtcagaggctaaagagagtagggaggattgggatggggagtgacttatgggtacagggtttcttttagggggacaaagatattttggaattagtagtgatggttgcacaacctagtaaatatactaaaatatatgaaattgtacattttcaatgggtgaattatgtagtatacgtgatttatatctcaacaaaaaggagtttaaaaagaagtatgtgtatcattgactctttcgatataaacatagaaatcattagacttatcgaaagggatgaatctttagcctccatgggatgttcttaagcctattgctgttttttgatttgtgaaggaaaataatcaaattgaaggtacattaggaaggacagcaaacatatgatcagcgattgtgtctaaaaatgcaggtgtaattggacatgctgtaccactttttattcccaacataaatttgttgtttgacttttgtacttttgacattagtaatattttctgaaataaattgtgtatgg

SEQ ID NO: 295484 - DNA, 1000 bp, Homo Sapiens
ctctcccggcacctgcagaaaaagtggggaaaatccccgaagaggcagaaacgtgagtgtgcaggggcggcatgaccaggggaaggcagacaatgcctgtgtgcccatggctgccctcattctcttgttgtcccatcagaaaacctatatctggaggtccagtcccctgaaggcgcccatgtgcgtgcctgggctcagtgcctcctgcaggacatttatagacactctgtgcacagacaaccccctcagcagagagcagcacacaggccttggtgccctattcatccggaagggccgccagccagtggatttcccgggcccctcagccctctggagtgaggcacagtctcctcaccagcataagcacgtggcatcagatgcggagacagttttggacgtggatggatgtttacacactgagactccttcagtgtcccttcaagaaaatgtggacacaatgtctctgaagcctgttagtgaccatagaattaatttcactaatacctttcggtcaccgactcctgaaaagagaacacgtgaatatcatgagtccgttgaaaaaagacaatcaagtgaagatccttcctccaaaagtggagatctgttggaacccagtgaggtggattggacgtcagacctcaagaaagtggaccggatcgggctggctctcctgagcaagtcaggtctgagtcgtcagacgggaactctgtggctgtggaatttgggaccaaataccggctctggatggatgggcacctcttccatctgcgacccatattctgatgcctcacatcggaacctgctaagcacagcgaagccttttccttatctgcctgaggagtggaagcttccttctgcctgcggtgttgggacggcttcccagacccgccttcatgtcctcaatgcagccgacccctggctgcaagtcagcatcggggtcctgagatcagtgtcaatcctcagcttaggtgaaaagcaggtgattgaaggaaagggttga

SEQ ID NO: 295485 - DNA, 719 bp, Homo Sapiens
atgtctttaaaacgtccatcatatttcttcagaatagtgtttttggtgctcagctacaaaggccaatccttagagccatttggaaggaactgtgtgcaaaatcttcgattgacttatcttgattatacatccctatggcaacaccaccaccctcttccaagttatgtaccagaaggcaatgctgagataatcgagggtactcggttgaggatactcaccagatttggctgctttctctcctgcttccccagagtctggcctcttctggttttagcatcttcattttctgcagagatggagtctcaccatgttgcccaggctggcctcaaactcctgagctcaaggaatcctcccaccttgacctcccaaagtgctgggattatagaaatgagccaccatgcctgggctcccaattctcgaagttggagaaaatggaaaaaaggtgatattgatgatctttcctgagtcctattatgtgcctgacattgtttgagaagctgaacttctcaagggagagatctgttcttcagaccagagggaaatttggaagcccaaatagagaacagtatttctagatctgacctttagactataagaggcacctaattccttaaaatagaatattgttgcttttcattatgccatgcacatgataagggctctgtatatattttgggatgagggcaatagtattgtccatgtttctctaaaataaactg

SEQ ID NO: 295486 - DNA, 903 bp, Homo Sapiens
atgcacccgaaccaaggctcgaggagctcttacaggccctttatcatgaaagttggtgtggcctactcacccctctctgtagcagggttctttcttcaggtagagtcgtctgaagaacgcttcaatttttgtagcttcaccctcaggctctctcctcctgccgaaaggaaagaaggccaagggaaagaaggtggctccggccctgctgtcgtgaagaagcaggaggttaagaaagtggtgaatcccctgtttgagaaacggcctaagaattttgacattggacaggacattcagccccagagagccatcctctgtaagtggctgaaagtgcctcctgagattaaccagttcacccaggccctggaccaccaaacagctgctctgctacttcagctggcccacaagtacagatcagagactaagcaagagaagaaacagaggctgttggccctggccaaaaagaaagctgctggcaaagggggcatccccactaagagaccacctgtccttcgagcaggagttaacaccatcaccaccttgctagagaataagaaagctcagccggtggtgattgcacacgacgtggatcccatcgagctggttgtcttcttgcctgccctgtgtcataaaatgcgggtcccttactgcattatcaagggggaggcaagactgggacgtctagtccacaggaagacctgcaccactgtcgccttcatacaggttaactcagaagacaaaggcgctttggctaagctagtgggagctatcaggactgactacaatgacagatacaatgagatccgccgtcactggggaggcaatgtcctgggtcccaagtctgtggcttgcattggcaagctcgaaaaggcaaaggctcaagaacttgcaactaagctgggttaa

SEQ ID NO: 295487 - DNA, 1000 bp, Homo Sapiens
atttgctaacttttggatatccttttggttacaccaaagaaaaagttatggctatttttttttccttgaactgcctacagtatcatgtcctaattcagaaagatttatcaaaatctattatatattatcttactttgaagaaaatgctgaatagctcttgttagtcaaataaactgataaaaattggtagggcctggctatcaattagccctgggaaatgaatttttagattaaaaaggtttttttgcatcatttggtttgtgcatttttatatttgtttataaataattgagttgctaattacttctaatcttctccaatcagattttcaacaattttagacatgggacacacgtgtgtgaagtctttattttaatgtaataatctcattacccccacccttactcccttaacttccatgtacttagactcctttatttgttaaataaactagagtattgtcttcttcattagaaggacctaggatgacaatgcggagagtcttggtctgaatctagtgcgactaccacctgccagcttttggggggtatggaaatactatctaaaagttggactgcatgggtcaaatcattatgagacttataaactaaaactttagatacccatatagaaatgtctttgaggcaaaaacaaacctaaagaatgaaggctctttcccttctctgaaaaaaacaaaacactgctcttcacacaaccggaagtcaagaccagagatttggagcaattgtctactaatttggcacaaagatcgtttctttagaaaagtggcattggcttttgaatatgaaatcttctcatagctgcctaaaaaagactagaatgtatatggatatcagaaacctttaataatacataatttatgcaaagataagataaagcaacataacactaattataaaactatttttaaatccccatttttaatgaaaaatatacatttgtatttaatttcctttgaataaaacaattgtaaagtaaa

SEQ ID NO: 295488 - DNA, 1000 bp, Homo Sapiens
gggtggcttccaggtgcaggttctcgcgcaggcctcagccttcataggtgcattccgctctagaacattcctgttcatgcgtggtcgtcgctcactggtggccgcttaggtgcacttctcaatggcagtgcccagcacggagcaatgcctcggagtggcagtttcttcagtacggtccccacggcctctcccaaggcggaggatgctgccgccaaggaaactggctcaccacggacgctggtgagctatggagctatcagtgaggtgtggatttctcaggcctctggcgggagccggagtaaaggccctgagtgtctagaccagccagagtgtctgcgtgtaggtcagcaaatgtgggcaaatgtctaggcggtggtgtcctgcagggagccgaaggcccgtgggggacgtgaccaactcagcattccgctggaggctacaaacagcaaactgtttatcatgaatgcaggatgtgggcaaactcacactgccctgccaccaaaaggtttgctaacagacatcactccctagctccgggctccttaaagttatctgcctaaaaaatctagtgcctattgtccaaaaaatgcaagactactgtgaaccaaacggcagactgacaatcacccccctcccccagctttctcgctatctctttttgcctaataaatacggagggctgtgtaaagctcagggcccttgtccactaaaggcaaggtgcccctaaccccttcttccaaatatactctgttgtctcttgtcttttattcccgtgttgcccgcctttgttcagtccagtaggtccccaacaatgtcctgagggtatgaatcctgaaagactactctccatgaagcaggtatttaccaggttagtgcatgtttcctgggtattaagggaaaacagtaaaatgttctgtacgggggtcccggttctgtgtcgcacgagaagagtgtgtgtctttttacttttttaatatggctcaataaaattttaaatcac

SEQ ID NO: 295489 - DNA, 1000 bp, Homo Sapiens
ggggctgtggccgagggctgcccgcaccccgagacccttcctcgtgggcccctctgcccggggcgccgcccagagggggcccggacggaaccccccgcgcggggaaccaccgggccgggcagagctggcgcgatgtgtcgggtccggacacgacgtggagaggccaccagtccggtcctggggcggcggcggcctacagggccgggtcttccttctgcagatgccggttcgagccgcggcccgatcccgatcccgggaagaaacgctccgtggctcgcccagggttaagagccgcggtgacaacccgtttttgtttgagaagcggccgtgtctgagcgccagggatgcgcagaaatgggagcctggccgcgcctctgcagcggccttggaggagcctctggagcgggccccgcgggcgcgtggggtgggacctgctggagacccgcaggcggcggcggccaagcagggtcaggcggttggcaccacaggtcgcgccctcggctgcagtcggggcagctccagggggccgcgtacctcccgcttcacggctacgcgtgggggcggctccgtcctggcctcaccagcctccccggagcccctgccggtccccagcctgggggctcaggggtcccgttgggcgtgtgtcccgcccgggccccggtgtggggggcgcgcagtcctcagggccgcctccctcccgcccccagcacagcgccccccagctctcagccggtccttgcggccgcgggatcccagccccagcagcgggaaactgaggcccgcagcaccgatgcgcgtaaggcagctcggatggggtcagaggggcgggaaggcggaaggcgggccgcaccccccggaccctcaggacctggagcgcgtggagggcgtggaccaccccggatcccccaccaccgggcgtgtctgccaagggtgtcattgggcgccgcgcagaaggggcttccgaggacccgcccctcccccgcagccgtcagggcgctga

SEQ ID NO: 295490 - DNA, 1000 bp, Homo Sapiens
gttcttgagggattggattatgcccagccacttggggagggcagtccaccttcctgagtccacaattcaaatgctgatctaatccagaaacactctcacagacacagtgtgtagtctgggcaccccacagtgcacttaagtggacacataaaattaaccatcccagggagtgagatgggtaagggaagatgggccacagtgggtgtgtctccatgcctacccccactgtgggcagctgctggagcacacgcctcaaagtcttccctgagggagagggagctgaggtgtttatatcccagctctgtcaggcattggctgaatgtccacactcctggatcaccgcctctcatcctcatgatgtcccatggtcctcatttcacaagtgagctctgggtacatggggagcatcagtcacaccctgggtcagtacctcagctgtctctcacatgacatcctcattatccacactgcaaagccaaccatccctatgatgggttcattgtggatcatgacttagtgggtcaagagtttggaagtggctcagctgggcggttcttctgctccatgtggctgccagatggtaccctgctggtgggcagtctggtctagagggtccatgatggctttactcacatgcctggcatcttgacagggacagctggaaggcaaggttcagctgggactgtccacagagctcctccctgtggcctttccagcatggtggtctcagggtagctggacttcctgcatgacagctcagggctcccagagctactgtcccaagagatagaaggtggaaactgccagtctcttaggctaggaccagaaaccagcacccctgcacccacagccttttggtagtgatgaaataaacataagatttatcattttaatcattcgtaagtgggattaaatacatttacaatattgtgtaaccatcggcactgtctatatctaaaactttttcatcatctgcaataaaaactctgtatgcattaaa

SEQ ID NO: 295491 - DNA, 1000 bp, Homo Sapiens
gacctacaaacgagatctctatgcggctgaatcgattattaaggagagaatttcccaagagatttgtgtagttatggatacagaagaagataacaaacatgtaggtcatcttcttgaagaagtgctgaaaagtgaattaaatcatgtaaaagtcacatctgaggctctgggtcatgctggcagacatcttcagcaaatcatcttagatcaatgctacaattttgtttgtgtgaatgttacaacctctgattttcaagaaacccagaagttactgagcatgcttgaagagagtagtctttgcattttatatcctgttgttgttgtttcagtaagtgaaattaatgcagatttttctcaaacttatgcttccttctttgttcattttcttgattttaaattagtacctcccagtcagaaaatggaaaacctaatgcagattagagaatttgcaaaggaagtaaaagaaagaaatattttgttatatgggcttctcatatcttacccacaggttggagagaagcaggcagataaactttccctagaagaactaaggatacttgttaaccttaaaaagcacattcctgctttccgtgccgatagcactcacggaagcctggttaacgttcctaaaacccgccggactttctgtaagaagtgtggcaagcaccaaccccataaagtgacacagtacaagaagggcaaggattatctgtatgcccatggaaagcggcgttatgacaggaagcagagtggctatggtgggcaaaccaagctgattttccagaaaaaggctaaagctacaaagaagattgtcctaaggcttgagtgccttgagcccaactgcagatctaagagaatgctgcctattaaaagatgcaagcattttgaactgggaggagataataagagaaagggccaagtgatccagttctaagcgtcatcttttattatgaagacaataaaatcttgagtttatgttcaaaaaaaagaaaaaaactct

SEQ ID NO: 295492 - DNA, 1000 bp, Homo Sapiens
gggtccaagtgattctcctgcttcagcctcacaagtagctggaactagaggcaggcaccaccactcctggctaatttttgtatttttagtagagatgaggtttccccatgttggccaggctggtctcaaactcctgacctcaggtgatacacccacctcggtgtaccgaagtgctgggattacaggcatgagccaccatgcctggcctactagaggttttacacagcaaacaagttgaagaattttgttcccataggacaaatttgtacttttttaccttatttaatttttttttaatttttgtgggtagtgtgcatacacacttatggcatatatgagatatgttaacacatgcacataatatttaatgatcacaacagagtaaatgaggcattcatcaccttgagcatgtatttatcctttgtattacaaacaatcccattatacagttttagttatttcaatatgtgcaattgaattactattaaccacagggtcattttatgatcataaaaattacatgagtataattaatacccatacatttctgagtcttgattaaatatttttaaaattttgttttataaattttttgcacatgtggcatctctgctgacaaacaaaaacagacttttagtttcaatttacatagagttacatatacaaatatattactctaaagatataccagccgagcacagtggctcccagcattttgggagcctgaggtgggaggatcatttgaggttaggagttcaagaccagcctggccaacatggtgaaaccccatctctactaaaaatacaaaaaattagctgggcatggtggtgcatgcccatggtcccagttactcaggaggctgaggcaggagaattgcttgaacctcggaggtggaggtagcagtgagctgagatggtgctactgcactccagcctgggtgaaagagcgagaaaccatctcaaaaaaaaaaataaataaataaaagatataccttaagcat

SEQ ID NO: 295493 - DNA, 1000 bp, Homo Sapiens
gtcgatgctccgagggagaggagcttgttacaaacacacattctatggaattgagagccatcgctgcatggaaaccaccccgagcttggcgtgtgctaataaatgtgtcttctgttggtggcaccacaacaaccctgtgggcactgaatggcggtagaagatggaccagcctgaaatgatcttgaaggaagccattgaaaaccatcagaacatgattaagcagtttaaaggagtaccgggcgtcaaagcagaacgctttgaagaaggaatgacggtaaagcactgtgcattgtccctcgtgggagaaccaataatgtacccagagatcaacaggtttttgaagctactccaccagtgtaaaatctccagcttcctggtcacaaatgcacaatttcctgcggaaatcagtaccaaagacagcctgaagaaaatcgaccgcccactcttcaaggatttctggcagcaattccttgacagtttaaaagccttggcagtcaagcaacaacgaactgtctacagactgatgctcgtgaaagcatggaacgtggacgagctccaggcctacgcgcagctcgtgtccctggggaatcctgacttcatcgaagtgaagggcgttacctactgcagagaaagttcagcaagcagtcttaccatggcccatgtgccctggcatgaggaagtggtacagtttgtccgcgagctggtggatctgatccccgaatatgaaattgcatgtgaacacgaacactctaattgcctcctgatagcacacagaaagtttaaaattggtggtgaatggtggacatggatcgattataaccgcttccaggagctcatccaggaatatgaagatagtggtggatcaaaaacgttcagcgcaaaggattatatggccagaactcctcactgggcattatttggtgccaatgaaagaagctttgatcccaaggacacaagacatcagagaaagaacaaatcaaaggctatttctggatgttga

SEQ ID NO: 295494 - DNA, 1000 bp, Homo Sapiens; identical to SEQ ID NO: 225086

SEQ ID NO: 295495 - DNA, 1000 bp, Homo Sapiens
cattgggtcggccttcatctgaaacgagagcttttccctctcctcaaactttgttggaggatccactcagactctcacctgtgcttccagggggaggaggaagaggcccaagcagcccagggaatcccctggaccatcagattaccaatgaaagaggagaaccaagctatgacaggttaatcgatcctcacagggctccttctgacactgggtccctgtcatctccggtggaacaggaccgtaggatgatgtttcctccaccagggcaatcatatcctgattcaactcttcctccacaaagggaagacagattttattctaattctgaaagactgtctggaccagcagaacccagaagttttaaaatgacttctttggataaaatggataggtcaatgccttcagaaatggaatccagtagaaatgatgccaaagatgatcttggtaatttaaatgtgcctgattcatctctccctgctgaaaatgaagcaactggccctggctttattcctccacctcttgctccagtcagaggaccattgtttccagtggatacaaggggcccgttcatgagaagaggacctcctttccccccacctcctccaggaaccatgtttggagcttctcgaggttattttccaccaagggatttcccaggtccaccacatgctccatttgcaatgagaaacatctatccaccgaggggtttacctccttaccttcatccgagacctggattttaccccaaccccacattctgaaggtagaagcgagttcccttcaggattgattccgccttcaaaggagcctgctactggacatccagaaccacagcaagaaacctgacaatattgttgctttcttcaaaagtaattttgactgatctcattttcagtttaagtaactgctgttacttaagtgattgcacttttctcaaattgaagtttaatggaataatagttctcaggatagtatttcgtaaataaagatggtttgaata

SEQ ID NO: 295496 - DNA, 1000 bp, Homo Sapiens
ttccctgagaaaatggcaaagaaaattcaacacagaaggccagggagggtgtgtggaaacgattcacatgttcaaaagatttatatgtgtagaagaaagctgtgaagtgtgaagtatattttctattgtagaatggatgaaaatggaataaaaataatatcctttgctaggcagaataaataacttctttaaacaattttacggcatgaagaaatctggaccagtttattaaatgggatttctgccacaaaccttggaagaatcacatcatcttagcccaaggtgaaaactgtgttgcgtaacaaagaacatgactgcgctccacacatacatcattgcccggcgaggcgggacacaagtcaacgacggaacacttgagacaggcctacaactgtgcacggttcagaagcaggtttaagccatacttgctgcagtgagactacatttctgtctaaagaagatgtgagtcctaagcagacttaaagccaagaaaataagaagaggaaagagagaggggctgccttaaccagctgtggtgctgacttggacaattccaggtcaagaggaactgtctactttcgactttgtgtgatagtaactttttaagcagtggaccgggagcccaagactcagatgcagcaagctttgcaaggctgacgagagctgagatcttcagtggccgatgggtacagggctgctgggagcgtagccacgtctgctccaaggtggcttgaatgaggcagtgcccaagtccttttgactggctgaggtgagcctgtggctcagtcacagtttgtccctctcctaataagtgcatttcccagacagcagctccttggtgtcatgcaactgaggaacctaattggctgggtgggttgttcccatccaacttccacctgtcacgaaggatgctttttcagatcagtctccacagctaccatcttgtcgggcacagagccgggcatcaacaagtgtatgttgaataaagaatgaattgatg

SEQ ID NO: 295497 - DNA, 1000 bp, Homo Sapiens
ccatccagggaggtgagctgggggccctggagaatctccaacctccgccagccgcaaccgaacttggaccaagtacgtcgccccagatgggcaggaggacttcggcccaggtgcccagcgtcgaacggcagcctccgcacagcagaccttgcctgcctactgcccaggcctgcaccatgtcccatcactcagcggccagccatgatggggcccagcctctcagagtgctcttccggagactggaaaacggacgctggagctccagcctcctggcggccccctcatttcactctcctgagaagccgggagccttcctcgctcagagccctcatgtgtcagagaagtctgaggctccctgtgttcgtgtcccaccgagcgtcctctatgaggaccttcaggtttcctcctcctcagaggacagcgattctgacctggagtgagactgcaggtggcaggggctccttggcctccagctcccgtgacttggaggggactgtgggactgaggagcgcagagcagagagcagactctgcgctgacttcgatgctccccggctgtggcgcttctgtggatgtgggagcccaggccaggcagagaacagatgcagggactctgcctcattgaattctggtgagggacgttgtatttcgcatgggtctccggaaacgcgccaggaaaagcttccgcgtcagtgattctttgcgtcagaaactgcgtgatgcgctggagtcagacttccgctgggacgtcaataggaaactggggaattactgtgtatttgctctttagatgactgaataagggaaaagttagggaaccctgagaggtgcagcccttcctctgtgctccgccttgagagcagtgtttcggacgctgggaagcgtgctgtgcaaagtgctctcggggtctttcctcagcctcgaaaactgggctctggaatgcctttgtaaatatgtgtgttgaatttgttttgaagtgaataaaattctcaaaaagatga

SEQ ID NO: 295498 - DNA, 1000 bp, Homo Sapiens
gggagggcgtcaaggccaagtacctcatgccgccccttgtgacaatgacctccccgtcccacttcactgccatcacagaaacttttcacatgcttacaaagggtgttcgtttctcctctaagtatttgctccccagccccacctgcaagaaggtggaactcctgctgtggggctgggtcatctgccagctctccaaggagctggcgggaaaccgctgcaatcagagcgaacccagggcccggttgaaggggaacaaagtggcatcattccactattccaagggaggtgttaaatacgagggtgaggctgtcaagcggtccctggtggagtcctacactcacccaaagagcagcgagacagagcggagggagaacatcgataccgtcatgaactggttcaccaaggaagactttgactttgtggctctgtgctacagagagccagataacgtgggacaccgattcgggccagaggcagagaacaggaagttgatgattcagcaaatcgacagcgccatcgggtatctgacccaatgtcaacaagatcccttgtccaactacatcaagttcagggacttagtcaagtttgatatcgtgggctacggtggctttgggatgcccctgcccaaattggggcaagaggaagccctttaccaggcactgaagaatgcgtaccctcacctccacatctacaagaaggaggagtttccagaacacttccatatggctaaacatgaccgggttctgccaatcgtgatgtatgccaactctggttacagtatcaaaggggtaagttcattctaaaatgaataaagtcaccttggatctaggagacaaccattagggaagggtggttctgcaaaaatcaaacataagcgcacagccgggcacggtggctcacgcgtataatcccagcactttgggaggctgaggcaggtgtatcacctgaggtcaggagtttgaaaccagcctggccaacatagagagacacccccacacag

SEQ ID NO: 295499 - DNA, 1000 bp, Homo Sapiens
gagcttagaggcaaagttaagagactcatcagattctgagctgctgcaggatattttgcagaagactgtgaggcatcctgtgtgtgtgaagcacccgccgtcagtcaagtatgcctggtgctttctctcagaactcatcaaaaagcacgaggctgtccacacggagcctttggatgagctgtacgaggcgctggcggagaccctgatggccaaggagtccccccagggccaccggagctatttgttgccctcgggaggctcggtcacactctccgaaagcatggccatcatctcccacagcaccacgggtctggtcacatgggatgccgccctctacattgcagaatgggccatcgagaacccggcagccttcactcacaggtctgtcttagagcttggcagtggtgccagcctcacaggcctggccatctgcaagatatgccgcccccgggcatacatcttcagcgactgtcacagccgagtcctcgagcagctccaaggaaatgtccttctcaatggcctctcattagaggcagacatcactgccaacttagacagccctagggtgacaatggcccagcgctggactgggacagctctgcctgtggtcctgggtcacagtcctgaaatccacaggtccagcgctggccagggacaaaggcccacccctgcaagccagcagaccaatcagcagacacctgaaacacgaagttcacagcaggatgtgctgtattgcccagaagccattgtgtcactggtcagggtcctgcggaggctggctgcctgccgggagcaccagcgggcttctgaggtctacgtggccttcgctgtccgcaattgagagacgtgccagctgttcaccaccgagctaggggacacgaggactccccctgccctgccgcagcccccagagcacatggtgcgggttccaatccgcgcctgccctgccacagcctccagagcacatggcgcgctttccaaaccactcctgggagcctag

SEQ ID NO: 295500 - DNA, 1000 bp, Homo Sapiens
tgtatcaaagacccctagtatatgcatttgggtgtccccagctcttgcctctgtctctgagcagttacctgggatcagagaataaggcagctcttctcttctatccctcagaaggctcttgaaattttgtccctggagcctctctaactggaagtagcagttcatctcatgacaccccacattttattcaggtgagtcctgagttattacacagagacagacacagctgtgctccttttactgcagtccagaagataaaacaccagcatgataaaacagccgaacctgtcagccaccttgcaagccttttctatatttgattcaatgtacttttcccgaagcaaaatgaaagttctcacagaggggccctcctctgccttgtcctcagaattggaaaatgtattgtccgtgaaggagcctcaccactgaacctaaaactcaagagaaaatgtttcctgaatatcaagtgggatgacttgaaattttgtcaaacaggcagaatcttaatacgatcggccttactaaggctaaatggccttatccatggttgaaattgacacatcatcatattaaaaaatctccacgagtgattgattttactctgcagccagggtttatgtcaagtgtgaggataatgagcaagaaattcaagcccttggcaaactggttggagaggcaaggactgtgtccaggcagagctcatatcattatttattgtttaatctatttaattaaatatgtaatttacccacaaactgtggctgacattatatgtactcctgagccacattaagatgtactatttgtgctgtgaaattctatgggatttgacaaatgcatggtggcagatctccagcgattattaaagcgtaacacagaatgcttctcttattcaagctcgtcttccctccacatagagggaatcaatcgacttttgtatactgatttttgaatttgcttctttatttccatcttctttaattaaagcacaagatatcgt

SEQ ID NO: 295501 - DNA, 903 bp, Homo Sapiens
atgcttgcccgacccctctgggaggggccgcctcttaagccagcgcaccggacaaacgcccggggtccggggcccggggcaaaagcgcccagcccggcccctcccaggcggcggcggcggcggcggcggcttcccagtcaccctggagggaaaacgcgccgaggggagacgcgcggagggctcgcccgggaccgggctgcaggccgcgcccccaccgccttctccgcggttcctcacccgccgcacatccacgcaggttcaaccccagcgcggggcgaacgcgcgtcccggccccaggcttcccacccgctgaagccaatgggtcgcacggctccggcgccacgtcctcgggggcgaggccctcagggaagggaccctgctctaagtccctccgaacagtggactgggtgcagggggagtccgagcccccccgatcctcggctggcccgcctcctggctgccagtttgtggggtcccggcgtcccgatccgcggcctctgtttagacggaaggcgccaggacgcaggctccgctgggtcgcagcaacagcccaggccacgggggcggttccggcccggcctagcgctcggcgccgcgcacggagataggggcggcgccgcggagaggagacgctgcgctcgtagccggccgggcggcggtaggaggacaactagcgattgcacccaaggcaggaggagcaacaggagggctgccaaggtccagttggaggctcaggtcatggccacccaggaaatggaacagggagaaaaggatccagaaactgatgagcacagggaaagaaaaccttttgcagaaacagatgaggaagacaagggggttgatgtagagaagctacaagtaattgcagctgccattaaacagggtcttgctgcaaaaagataa

SEQ ID NO: 295502 - DNA, 960 bp, Homo Sapiens
gggccttcggcagcatccccgcggcctccttctcacgtcctcagccttggtgaggctgcaccctcacgtggctctttgccccaggttggccaggcaggtagaacggccctgcaccccatttccagggccttcagcaggtctggaccacgggaactgccagctttcaccccttagccgggcgtccctggatccccccgggctctggctctggccgttctgggatttcaggagtcactgagcagtagggcacgtcggcccgtgctgcatagtgacctgcctcccgcgacccaggaggccacagcagcaatcagcttctgcctcctggccatccttccacacccctggttgaatggggctgagcctgagttctccccactgaaggtaagttcggggagacttcaggccagggcagtctcctgtcttctcttggaaaccacagcagcccatgcacacagaatggcagccacattccagcttccagggcaccaggagatgccgctgaccttccaggatgtggccgtgtacttctctcaggcggaggggcggcagctgggcccccagcagcgggcgctctaccgggatgtgatgctggagaactatgggaacgtggcctctctgggattccctgtccctaagccggagttgatctcccagctggagcaggggaaggaactttgggtcctgaatcttctgggagctgaggaaccagatatcttgaaaagctgccagaaaggtgagaatggatgggatgctaatcctgggagcagcctcccaatcctgccttaagaggctccaagcgagggacagctggggcatggcgttcatattaatggcctcccccaggggcagtctcacagatacagcccctctacaaatgtgagcatgtgcacatgctttagaagttttatcttgctggtctgtttctttgctttaaaaatatatatatactacttctgatca

SEQ ID NO: 295503 - DNA, 1000 bp, Homo Sapiens
tcacttcccctgttgactgttatttcttttcttcctgctttcctactcccttgatcccaaactcactaggggtatttagtgagcacttactgttgcagtaagactctagccaaggaagacgaagagacagttggagaccaaagagaacttcaattcgggcacccgagcctagagcaggctcatgcccaaaatggctaccgacccagacaaagaaagcaggcttgcttatatgtcgtttcaggcgtgaaaaacaaggcaggatacaagtttcagacaaagacagtaaattattcaacctgtgacaattctgagaaaacttacatttagttatcttgaccagtcaaccttgaagctggacagagctggggtaagggaaaacaggaattacggaagtatgagggagtcgcgaggccggagataagcttggaaggttgagataagctcgcaggtgcaacttcttagcaatgctgagagtggctgcttaaatttcttagcctatgtataacttctaaatagcctacactaaatggtaactattacctatgttgtgtttgttattttaaactttaatgttatttattttatttcattttccttccacattacctctgctgttagcagctttgagaaatgctgctataggatgtgggaagtcattaaaggatttaagcagggagaggcaagatcagattaacatttcagaaaaatatttactgttttccagctgaaactagtagagtacaatttactttctggtcacagcacacagcagtcacatcctggaggaactgtacttctctaagatctagtctgtcctgtggtttaaatgacctttagcaaattgtctttattactttgtacactgctttcaccagtctgctcttccatggctaacggggcagaactgttatttttagggttttccacatccagtatgttcataagatttctaccctgtgtgaacttccagatgtcgaataaaggctggatgctgaccaaa

SEQ ID NO: 295504 - DNA, 776 bp, Homo Sapiens
atgacaagaaggtgtcacgtgctgctaggactgacctcttcagctccatttacagcctccccatggcctggaggggtggaggtctgtagaatgggaggactttgcctcctttcaggaaacagaccggctcctgggctgtctcaatgcctctggggctgtagactggctcctcccaagatcgcagccaaaattgtaggtgatgctgcaacgacagtgaataacagcactccagattttggtctagggggccataagagacagttggaagatggagatcaaccggagagcaagaagctggcttcccagggagactcaatcagttctcaacttggacccatccatcgtcccccaaggacttcaatgacagaagagtgcagggtcccagacggtgtgattactccaggcagcagtggcctacccaagcacagtgtgtccttgacaagagccccagaatctctccagaaagcgaagatgatgctggatgacattgtgtctcggggtcatggggggcccccaggacagttccacgacaccgccaaagggggccagaatggcactgtacaggacatgatccctgcgggcaacgccggcctggtcatcgccaagggcggggagaccatgaagcagctgcaggaatacgctggagtgaagatgatgctggcgtgccgatacagttcaagcaagatgatgggacagggcccgagaagattgctcatataatggggtccccagacaggtgcgagcacgcagcccggatcatcaacgacctcctccag

SEQ ID NO: 295505 - DNA, 1000 bp, Homo Sapiens
ctcacgtagtgctccacctacacgagggcccccaccatcttatggtggaagcagtcgctatgatgattacagcagctcatgtgacggatatggtggaagtcgagacagttactcaagcagccgaagtgatctctactcaagtggtcgtgatcgggttggcagacaagaaagagggcttaccccttctatggaaagaggataccctcctccacgtgattcctacagcagttcaagtgcggagcaccaagcggtggtggctgtggaggaagccgatctgatagagggggaggtagaagcagatactagaaacaaacaaaactttggaccaaaatcccagttcaaagaaacaaaaagtggaagctattctatcataactacccaaggactactaaaaggaaaaattgtgttactttttaaaaattccctgttaagttcccctccataatttttatgttcttgtgaggagaaaagtaaaacatgtttaattttattttgacttttgcattgcttttcaacaagcaaacgttaaatgtgttaagacttgtactggtgttgtaactttccaagtaaaagtatccctaaaggccacttcctatctgatttttcccagtaaatgaggcaggcaattctaagatcttccacaaaacatctagccatctaaaatggagagatgaatcattctacctatacaaacaagctagctattagagggtggttggggtatgctactcataagatttcagggtgtcttccaactgaaatctcaatgttttcagtatgaaaaacctgaaatcacatgcctttgtaaggaaagtgctattcacccagtaaacccaaaaaagcaaatggatgatgctggccattttgcctttctgacatttccttgggaatctgcaagaacctccctttccccctcccccaataagaccatttaagtgtgtgttaaacaactacagaatactaaataaaaagtttggccaaaaccaaaaaaaaaaaaaaa

SEQ ID NO: 295506 - DNA, 846 bp, Homo Sapiens
acccatagtaccccattccttgctgcaatgtaattacaagtgtgctcctggtggtctttaactgaagggcactgactgggtactggtgaagttccccgcaggaactgagtcagaccccatctcagggccctgcagaagataggtgcctgctctaaggcgtggaccctcgcgacagccctggcccgtcttgacgggcgagggttactgtacttgtcccaatcgtacagatgagaaagctcagactcagggccagcaaccccggtcccagcggagcgcccggcacgcgccgacacttcagcaccagtcgcggtggccaccactgtgcgcggagatggctgcgacgcgtgcgcagatctcgatcccaaactccctcctgccagaatctggacccgaatccacccattgcccattttccgctgccgctggagagaatctctgaggtccccaggacagcctgcctgcacggaagagatgcctcctcaggaaatttgtgcacagagataacacaggggatatgccatatgaagatgaaggcagaattctacaagcccaggaatgccaaagattgccagcaaaccaccagaagctaggagagaagtgtggattagattctttctcacagccctcagaaggaaccagccctgccaagaacttgatctcagacttctagtctccagaactgtgagacagtgcattttgttctgtaagtcagccacatggtttgtggcactttgttatggcagccctaggagatgaagacaatatgcaacatggtatgtccattataggacactgtgggctataaatgtgttctttggcctgaagaaataaaacttggtggtccaa

SEQ ID NO: 295507 - DNA, 769 bp, Homo Sapiens
atgattatctaccaggacctcatcagtcacaatgagatgttctccgacatctagaagatctgggagattgtggacgggctgtgctgggaggtggtggggaaaatggtcagtaggacagaaggtaacattgatgactcgctcattggtggaaatgtctccgctgaaggccccgagggtgaaggtaccgaaagcacagtaatcactgctgtcgatgttgtcatgaaccatcacctgcaggaaacaagtttcacaaaagaagcccacaagaagtacatcaaagattacatgaaatcaatcaaaggcaaacttgaagaactgagaccagaaagagtaaaaccttttatgacaggggctgcagaacaaatcaagcacatccttgctaatttcaaaaactaccatttctttattggtgaaaacatgaatccagatggcatggttgctctactggactacggtgaggatggtgtgaccccatatatgattttctttagggatggtttagaaacggaaaaatgttaacaaatttggcaattagtttggatctattacctgtcatcataactcgcttctaattgtcatccacacaacaccaggacctaagacaaatgggactaatatcatcttgagctcttcatttatttttaccataatttattcggagtggaggcattgtttttaagaaaaacatgtatgtaggttgtctaaaaataaaatgcattttaactcatttgagagaataccttttcgtttaatgcatatttaaactaaa

SEQ ID NO: 295508 - DNA, 1000 bp, Homo Sapiens; identical to SEQ ID NO: 119357

SEQ ID NO: 295509 - DNA, 1000 bp, Homo Sapiens
tattgagtatagccaataaggagaaccacagttaagctggtgtctctgggttctggacatcatcctcaagaaaactatttactaattacattgaatgaggttattaaaatgtgtaagtttcacacaaaaacaaaaagacaattcattccaaattgtgcatatggatatataatgttaattatgggaattccattttaagaattactacaattctatgtgttctgtataaaaacaggaaaatagttgttccaatatataaaaggaaaacatttaaaaatgtattttcttgggaaaatcagttgccagaattcattagtcaactaacaagcactcctctgtggcaagaagccctgcttctctgttgtagcaggcagctacccacctaaatgatgaggtcaagaaatatacagctgataaaaagataaaaaatatgtaatagtccagtgattacatgtgtactacggatcagcgccaattagttgtaagcttttggtatttagttcgttacagcaaatgttttcttttttaaattttcttctgcaaatgttttcttgtcatgaaaactgttttccatttagcagaattacaaaaatagtcaagaagaaatgttctgattgatgtatacagttagaatgtgtattaaagattattataaaatgataactgaattatatccatttctaaagtatgttgggacaaaattttttaaacatgtgattctgttttgaaaattgttttaccactggatcagtgtggttcttaaacttggctttatcttggagtcaccagaggagattcaaaagatacctttacctggctccacctccagagatcgggattttaaatggtctgtatctggattttaagagcccttctggtgattcgactgtttagctaggtttgagagccactaccctagatgagctgtcctgctccagtaacattctttttctaaaatcatttatagtatattagaaataaatccatggaaattccaagt

SEQ ID NO: 295510 - DNA, 1000 bp, Homo Sapiens
tacagcggctccagggtggagaccccggtgtcctacgtcggggaggacgacgaggaggatgatgacttcaacgagaatgacaaggacgactgacgtcctccccacttcaaattcagcttcaggaaaacatttagggaaaagaaactttttttttaatgtaggttttctgtttccttttgtcctactcccaagaagatattggtaagctatttaatttagatatgcacctctgataagcaaggattgtttcctgtaggattaggacgtgctgtggatgtgtgttttgataccagtgtgctgatgcagagcgtttatttactttttagtattttgtgctttcattttttatttttcttttaagtgcagagttcatttttgcccctgaacagtttttgctgagtttgctgaagaaattgtatttcatccacatgcatgaaaataaaacgccctcttgttgtggatggtgagcacctgatgccgtttatttgccgtgagtttggacggcgcccccactggcagatagcgagactctgtggagttttccatttgttcagtggtacggtgtccagagccccaagcaaacagcagaattcgacattttaaacaataaacaccatcaaccttattaactttattttctcttaaattatattgactgtcgtgattccatcaagtttatacactcttttctctccctattttgcagcaacaaattgcaaagtgcttttgtttgtttgtttgtttttgtttggttaaagcttactgccacgctggtgtggctatggagactgtttggaaggcttggaatggtttattgcttatggtaaaatttgcctgatttcttacaggcagcgtttggaaaccttttattatatagttgtttacatacttatcagtctatcatttaaagacatatactgaaacaaatgtatttgtttcataagcatcttcctgtaatctattataaaattgaaattaaatataaagaatgttttaacaa

SEQ ID NO: 295511 - DNA, 647 bp, Homo Sapiens
agagccctttgctcctccctcagaatgaatggagaccagaaatcagatgtttatgcccaagaaaagcaggatttcgttcagcacttcccccagatcattagggtgctgagtgaggatgagatggggcactcagagacaggagatgctgttgaccggctcaaggaggtcctggagtacaatgccattggaggcaagtatcaccaggatttgatggtgctagtagcattctgggagctggtggagccgaggaaacaggatgctgatagtctccagcaggccctgaccgtgggctggtgtgtggaactgctgcaagctttcttcctggtggcagatgacatcatggattcatccgtctcccgccggggacagatctggtggtatcagaagccgggcatgggtttggatgccatcaatgatgctatgcttctggaagtatgtatctaccacctgctgaagctctattgcctggagcagccctattacctggacctaatcgagctcttcctgcagagttcctatcagactgagattgggtagaccctggacctcatcacagccccccagggcaatgtggatcttggcagattcactgaaaagaggtacaaatctatcgtcaagtacaaggcagctttctactcctaccttcc

SEQ ID NO: 295512 - DNA, 1000 bp, Homo Sapiens
ttcagtttcatcctactccagatgtattaaaaatatataaaagtgaattaaataagcatatagaggatggtatgggaagaaatttggctgattgatgcaccaatgaagtaaacaccttagtgcttcagttccagcaagaaattgttgaaaatttgaagccattacttccagctggtatataggataaactacatacactgatcccttgcaagaaatttgatcttagttataatctaaattaccacaagttatgttcagattttcaagaagatattgtgtttcatttttccctgggctggtcttccctcgtacctcaatttttgggccctagaaatgctcaaatggtgctcctaggattatcagagcctatctttcagctccctagatctttagcttctactcccactgctcctaccagtccagcaatgccagataatgcatcacaggcagaactcatgattacattagtaacaggattggcttctcttacatctagaacttctatgggcatcgataatgttggaggaatgatttggaaaactataggctggaaactcatatctgtttcattaactatgtatggagctttgtatctttatgaaagactgtcctggaccacccatgccaaggagagagcctttaaacagcagtttgtaaactatgcaactggaaaactgaagatgattgctagctccacaagtgcaaactgcagccaccaagtaaaacaacaaatggctaccacttttgctcgcctgtgccaacaagctgatattactcaaagacaactggaagaagaaattgctagattacccaaagaaatagatcagtgggagaaaatacaaaacaatttaaagctcttaagaaataaagctgttcaacttgaatatgagctggagaattttactaagcagtttctaccttcacgcgatgaagaatcctagcaatagagattgctttggtgacaatgataggaggaaatgaaacttgtaagatcaggaca

SEQ ID NO: 295513 - DNA, 1000 bp, Homo Sapiens
  misc_feature (1)..(57): n is a, c, g, or t
nnnnnnnnnnnnnnnnnnnnnnnnnnnnnnnnnnnnnnnnnnnnnnnnnnnnnnnnnttcatatatagggaagtggggactggcccagcatttaaacttaatccaggccatggccagctggaccctgagatggtgctatcgagaaagccaatgggagcaccctccgtggggcacagagaaaggacgctcagcctgaccttcccggggctgtccgtgccagcggctccgcgtgagggaggggcccgctcctgcttgtctcactctgtcgcccaggctggagtacagtggagcagtctgagttcactacaacctccacctcccaggttcaagtgattctcctgcctcaacctcccgagtagctgggactacagtcacgtaccaccagtaatttttttatatttttagcagaaacggggtttcaccacgttggccaggctggtcttgaactcttgacctcaagtgatccattcaccttggcctcccaaagtgctgggattacaggtgtgagccaccgcacctggcctgtgtatttaccttgtatgctactacattgctgatttcatttattaggttttttttttaattcttttttaaaaaagaaaaaagagacagagtctcgctctcttgctctgtcgcccaggctggagtgcagtggcacaatcttggctcactgcaacctctgcctccagggttcaagtgattcttgtgcctcagcctcccaagtagctgggaccacaggtgcccaccaccatgcctggctaatttttgtatttttttgtagagatggggttttgccaggttttgccatgttggtgaggctggtctcgaactcctgacctcaagtgatctgcacacgtctgactcccaaagtgctgggattataggcacaagccaccatgcctggcctcatttattagttctaacgtgtgtgtgtgcacacacgccctttaggcatttctacttataagatcctatctgcaaatagagataattttacttc

SEQ ID NO: 295514 - DNA, 1000 bp, Homo Sapiens
cgcacgctgctaccgagctgcaggaggccgcgggcgcgagactgggaatgcgcagggcccccgcctggctctacaagcccgggccgcggcccccgccttccccgccgcctcccggcgctccgtgcccgccccacgaggccggcggctgctgctacctggggccgttgctgcttgtgccgtgagcgacggccagccattgtccccgccgctccgtcagccgcgcccggccgcgcgcgcaccggaaggcgcattggcgtcttgcgggctccgggccgggtgggcaggatggcctccacaagccgcatggcgcgcatggggagcctccgttgatgccgccgcgccgccctccgaggctgcatccgcggaagcccggctccccgagcgctccggcccggcccggcgccccggacctgagtgcgtccccatgaaggcgcccgggctggcccaggcggccgtggcagaggagaccccggactgggcgcccgagctctgccccagccccgagtcgcggtcgccggagccgcctgccaaccgccttcaagacttcgacacgctggtcaccgtgggtgacgcggggctgcccctgcgccctgggtctccctggggggcgctcggagaagtagagcgcaccccccagccccggcgagtcccccgaccgaccgggtgccttccctggaacgccgacggctcctgtcggggaccaccctccacccccagcacacacagcactctggggcctgggccatccgacgtcaccaaacttcctgtgggtcacctcgcctggggtaaatcgtgcgctctcccaggcagcggccccagggacacgggcgcggggtccctcaggccagcctcccagtgtgcccagcggcagggtcctcggcggggaatgtacagatttctccaggggctgcaggagcagctgggctccggggtacaggtgttccgtggctttgtggggatgaagacggcggagttggggacggatcctaacatgtcctga

SEQ ID NO: 295515 - DNA, 852 bp, Homo Sapiens
atgatgccaataagagagacaagaagggaaggtaatgggggccgggagccggggctgcgggaagaggcccgtggatgtggagaagtacccccttccaggctgagggctgtggggcggatggtccggggctcggggactgccctacatttggcctgtgccactgtccaaccagaaatggtatttctgcttgtgtccacaagatgtgagcttaacctctgcgaccgtgaatgcaggacacctctaatcaaggctgtacaactagggcaggaggcttttgcaactattctgctgccaaatggcgccgatccaaatattatggatttctttggaaggactgctctacactatgctgtgtataatgaagatacatccatgatagaaaaacttcttttacatggtacaaatattgaagaatgcagcaaggtatgggtcaaccaatgttattatcaaactatgtgaaatgcatttattttaacattgacccatgtaagggtcaatttttcatatttggaaactcaaacattccttgaatgaaaatattttgaaatgccttaactgtcaaagattttactttaaatattggaacttttaaagaagcattataaggtatggctttttttcatgcacttatggtaaataattataaaaacaaatgagttacaataaatttataattcatgacaactgaatttgggaggggtaatagtgaagtgtttttccactaaattacttttttctaatcagtgtgaagtgacacaggaaagtaaaattggcccttataaataggctttattttaaatttcaaagaaaattaaagaatttcacaataaatgtacatcttgttgctgttga

SEQ ID NO: 295516 - DNA, 939 bp, Homo Sapiens
atggatctgaagcaaagccattccgtgaggctgaatgatggacatgtcatgccgatgctgggatttggcacttatgctcctgatcatacccccaagagcaaggctggtgaagccaccgaagtggctattgatgcaggcttccgtcacattgatgcggcgttcttctaccaaaacgaggaggaggtcggaaaggccattcgagagaagattgctgatggccctgtgaagagagaggacattttctacaccactgagctttggacaactttctttagaccagaattagttcgcccagccctggaagggtcactgaagaaacttcaactggactatgtcgatctcttcattatccacaatccattggctatgaagcctggggaggaattgctgcctaaggatgccagtggaaacattatttttgatactgtggatcttcgtgacacatgggaggccctggagaagtgcaaagaagcaggtttaaccaagtccatcggggtgtccaatttcaatcacaaactgctggaactcatcctcaacaagccagggctcaagtacaagcccacctgcaaccagagcaaactcctggagttctgcaagtccaaggacattgttctagttgcctacagggccctggcatctcacagagacccaaactggatggacccagatagcccatatctcttagaggagccaaccttgaaatccattgccaagaaatacaatagaagcccaggccaggtttttgactttgagttgactccagaggacatgaaagccactgatggcctcaacagaaatttccgatatgctaagttacaattaccctcagtgctagtgactgaggtgtccccagtggcctccaccaagttaagatcctctggaatttctccggatcttcgaggcaagactcttactccagtgtcatcttcgtccatctga

SEQ ID NO: 295517 - DNA, 1000 bp, Homo Sapiens
agcagatctggtactgatgcttatagatgccagctttgggtttgaaatggaaatgtttgagtttctaaacatctgtcaagcacatggctttcctaaaattctgggagttctcacccacctcgactccttcaagcataacaagcaactgaagaagacaaagaagcgattaaaacacaggttctggacagaagtttaccaggttgccaaactgttctacctttctggaatggtgcatggagaatatcaaaaccaagaaatccacaatctgggccattttattacagttatgaagtttaggcctctcatggcaaacttttcacccttatatcctggcagacaggtagacgtcgtctcccatctggtgtcttatggaatgaatgtcactttcagcctagagacacagttgtgtgcctgccccttttcctctgctggatggatggaagatttgacaaacccggaggatatccaaacaaacatcaaatgtgaccggcaggtgtcactttatggttatttaagaggagcacacttcaaagataaaagccaaattcacatgccaggggtagaacattttgccatgagtgacatcggtttcctcccagacccttgtgttcttcctgaataacaaaagaagtgctgtttaaataagaaggagcagctggtttatgtgcctgtttctggagttgagggtgtgctgtatgacaaagacgctgtctgtgttgaccttggtggcagccacggttttcaggcatcagacaaggtggggctcacccatgagctggtccagagtctcatctccacctactccaccattgatgccaagatggcttcaagtcgagtgacgctgctttccaattccaaaccacttgggtcagaggctatagataatcaagggctgttgatgccaaaggaggaaaaacaaatagacttgaaaactggtcgaatgcgtcagaaagccatttttggagatgattctgtgcgaacgtcttctctcctttcttga

SEQ ID NO: 295518 - DNA, 789 bp, Homo Sapiens
atggaccaagttggaaacctagagaaagaaaacagggtcttggaagagatccagttcgtggacacaaaaatggagtgtcctgagatgaactgtgaggaaggatgggccttggcgaagtgtggaggaaagaattatgaacaggccaaggcctgctttgaaaaggctctagaggtgggccctgaaaatcctgaattcagcactgggtatgtcatcactgcctattgcctggacggttttaacacaacagacagtaatgagacattttctctgcaccccctaaaatgggctgtcagtctaaatccaaaagatgcacacattaaggttatccttgccctgaagcttcaggatgaaggacaggaagctgaaggagaaaagcacactgaaaaagctctaatcaagcaaaggcccacatttgcaatggtttatgtggacctagccaacagtctactaggtcagctgttcaaaggagatttatattcagggagtacaggaagtcaactttttcatatgggcaaagatgttgacccacaagaagatctacaaacaaagcacatgggcagaaagagagaaaagattcttgtgtgcaccacagcagctggggaggggatggcagtgagcagccaagaagcggtctctctccaccctgggaaccaagccattgagctaagttctgaaaaccggtatgttggagttatctttatcaagaaacttcaaaaagttcatgaaatagctgaaggaggaagattaatgaagagagtcataaaagaatattctatggacaacagataa

SEQ ID NO: 295519 - DNA, 1000 bp, Homo Sapiens
tgaaatcatcaaccaaatcaaagaccctgcagcagcagtcccactgcaaccttccctgcccgaggagaagggcaatgaaaagatcgtggccatggtgagggtgtgttgggatgaatctctggagaaaagacccagtttctcttccatcaagaaaactttacgagaggccagtcccagaggtcatgtgagcatactggccagtgtgatgagcaagctggaagtgtatgccaattacctggaggaagtggtgcaagagaggaccagccagctgactgcagagaagaggaaggtggagaagcttctgtccaccaaagtgcccagcttcactggagaacaactactagccggaaggtccgtggaaccagaacatttcgaatctgtgacaatctttttatctgatattgttggattcacaaagctgtgttctctcagctcccctttgcaagtcgtcaagctcctcaatgacgtgtacagtttattcgatcacatcatcacaacttatgatgtttataagtggactccctaccacaatggaagccagcatgtggctgagattgccaccatgtccctgcacttcctcagtgccaccatctgcttccaaattgggcacatgccccaggagaagctccagcttcgtattggcctctacacaggtcctgtggtggctggtgtgctggggattaccatgtccagatactgtctatttggagacactgtcaacatggcatccagaatggagagcagcagttcacctctccggattcatgtctctcagagcactgcaagcaccctggtggcattgggagggtacgatttgctaaagagaggcaccattccagtcaagggcaaaggagagcaaacaactttctggttgaaagataaagaaggcttcactcttccactcccgaatttactgaggaaaaagccaaagtcccagagatattgtgaggtgtttgctcccagcctgtgcctccagcaaatgcagatttggaggagctga

SEQ ID NO: 295520 - DNA, 1000 bp, Homo Sapiens
aatggctgttcaggcctcctggcgtcttcaaattgaacccgagaaggatcagagctgcagccgcgcaatcacagtctcgccgtatcccacctgcagggagtaccccaccctcagggagcaccccacccgcagggaggagcacccctcccacagggtgcaccccacccacaggaagcgccccacccacagggagtaccccacccgcagagagcaccccaccagcagagagtagcccacctgcagagagtaatccacctgcaggaacaccccacccacagaaagcaccccacccgcaggtagtaccccacccgcagggagtaacccaccttcagggagcaccccaccagcagggagcaccccacctgcagagagcaccccaccagcagagaagcaccccacccacagggagtaccctacctgcagggatcatcccacctgcagggagcctggggaaggtcccggtttgagggatcgatgctgttcttttgagcaggagctgcccccaggagtgcaggggccacaggccttgcatttaaagaaccagagtggagtgaccccactgatgctgtatcttggagggggaaaaatgaagcctcaatgcccatctccatcccatcgaggcagcagtgaccactgcttcactttcgtcttgtctgctcatagtgacaatgaggaagcctcccctaaactccttgatgactttctctatgcccagttctttatacatcagatcatcctagttctggggttctacgtgaacaagagcatggtgggttcagaaagaagcatcctggagacagtgtgtgagtgggaggcaggctcacacctgcaccatctgcccttcaccctgctgcaggggaagcagcgggccctgctggggctcctgccttgcgcagatgacagccacacctcccaggacgggacaaatctccaagtgttaaagggggctccatcccagcagctgctgcgctgccttttgcccttggtccggattccatga

SEQ ID NO: 295521 - DNA, 1000 bp, Homo Sapiens
atctggtagctacagagaacaaatagtgaaggcatttgaagtagggcctgcattttattctgggcaatatggtgtcctgtcaacctggtcagttattctgctcctgaatttcatgaccttggatagtcaggcaggcacctcagaggtagctcctgccacaacggttgccccaggaagtttcagcacagcagccacaacttctcctggagcaagtggaatgactggggttacaacaactacaaaggccacaacttctgtagaagaaagcagaataacaagagccgaagtaatcacaggcacctctggggtatctcttgccacaacagttgcccctggaagcttcagcacagccacaacttcttctggagcaagtggaataactagggctggccccaactcagaagccacaacttctgtaggagaaaatggaaaaacaagaggtgaaataatcacaggtaccactggagaattgtctagaatgaccattatacctggaagttctaacacagccacaatttcccctggagcaagtagaacgactggggctgcacctgccgcagaaaccacaacttccctagaaggaggtggcaccactggagcagaaataaaatcaggcacagctggagtgccctctgctacaacaattgcccctgggagctccaactcagaggccacgacttctttaggagaaagtggaaaaacaagagttgaaacaatcacaggtactactgagggtaaaactctggcagctggaagtgcccacacagatatcatgggagaatcttctagaacgaccattctatctggaagttctaacacaggcacctctggggtggcacctggcacaacagttgcccctggaagtttcagcacagcagctacaacttctcctggagcaagtggagtgactggcactggacccactgcagaggctacaactttctctggaatcactgaagcagtaacagtcccaagtaaaaatgggaagttggtgaaatag

SEQ ID NO: 295522 - DNA, 1000 bp, Homo Sapiens; identical to SEQ ID NO: 119360

SEQ ID NO: 295523 - DNA, 1000 bp, Homo Sapiens
accccgagccagcctctgttcaccaactgcttacaaggatgaggacactggaccctgctacgagttctatgccaactccgtagtcctgggatggctccatacagcttgccaagaaatagtgccacgtccacctcgagaggaaacccacacccagccacactcccaagatgatctggagaattctggggccaaaatcggcaaggccccagtgcacttcagctgggtcataggagtcatgatttgctgtatgctcaatatctggggcatcattctctacctgcagctgccttggatcgctgctcaggcaggcacagccatctccagcaacggcaaaatcaaggctggctcctgtatgattcaacgtgcttccgaaaataggactgacatgggtgtgcagaatgggagccgcctgggcgcaaagtgccagtatggctgggatttcagcagttgtcgagagcaagggtcctgcctctgtgggctctctaatcactatgagaccatgaacatggtgtctgcctttagccctctgatgtctgctggaatcttgagagccattctgttctacctcttgcagcagctgtgccaggataaaccatacacaatcactggcttttttggggggaaaggccatggcaagaaccacgagcctctgtggggctatctgctcaccttcctcactgctgtaggtttcatccttatcgccgagctgagtatcattgcccccaccatcgccaacttcctcctctgttcctgtgccctcaactttggctgtctctacgcctcccttacctggttgtctgttgtgaactggggctcttcagcccaggcagacacctaccaaatggcgctgtcctactcagtgagcctcaccaatgttgatgactttgactacaactatggcataggcctcataaggatgccaggagggttaagcccggctactcaacaccaagctcaagtacacccagcatatttggatgtcatagggatggatacttag

SEQ ID NO: 295524 - DNA, 393 bp, Homo Sapiens
atgccagccagtgcctgcgcggcttgctccagcaaggtaaaatttcccactgcgaggcaggcagtgatgctgcggccgcttcgcactgtggctcctgccgaccgccaggcgctgttacagtggatgcgaactaacccaaaatttgatgttcactcttctaattctctgggatttatttctcattacttctctctcatggaaatgaaattcatttatcatcatgtactctctgacatatcaggaaaggtgttggttgacatcagctccaggcctagcatagtcctttatggggtactgtccagcttgcagacatcaacatttggaaagcattttcttctgctagcaacagctttgcctgtcaccatccaaggtatcgtgtatgccacagaatag

SEQ ID NO: 295525 - DNA, 564 bp, Homo Sapiens
atgaagggccaccagctgctggagccgtacctgatggtgagtgtgaacgaggtgcacgtgggccagaccagcaccaatggaggaccaccaaacccatgtacaatgaggagctctagactaacgccactgatggcggccgtcatccataagatgcccctgggctatgaccacttcatgaagtttatctggggagtatttgggaaacagggttatcaatgccaagtgtgcacatgtgttacccataaacactgccatcatctaaccattacagcctgtatttgccaaaacaatattaaccaagaagattcaaagattgccaaacagaggggagacaaaaaaagtttaaggatcccaatgcaccccagaggtctccttcagcctttttcttgttctgttctgcgtgtggcccaaaagtcaaaagagaacattctggcctgtccattggtgattcggcgaagaaactgggagggatgtggaataacactgctgcagatgacaagcagccttaaaaagaagtctgcaaagctgaaggaaaaatacagaaaggatactgctacatattga

SEQ ID NO: 295526 - DNA, 570 bp, Homo Sapiens
atgcccattggacccgtggacaactccaccgagagtgggagtgctggggagagccaggaggacatgtttgccaaactgaaggagaagttcttcaatgagattaacaagattccctatttttggagagcccctgcaggaatcggggaggggaaactgaagcggcaaatggaaaccacccagaaccttgtggactcctacaaggccattgtcaacaagactgtgtgggacctcatagttggtttcatgcccaagaccgtcatgcacgtcatgatcaacaacaccaaggagctcatattatcagagttgctgtccaacctgtacttgcatgggaaccagaacacgctgatggaggagttggcagagcaggcacagtggcgagatgagatgctgcgcatgtaccacgtgctgaaggaggtgctcagcatcatcggtgacatcaacacaaccaccatcagcacgcacatgggggcccgtggacaactcctggctgcaggtgcagagcgtccttgccagacgcaggtaccagggctggcccctatggccccaagtctccccagcccccatggctga

SEQ ID NO: 295527 - DNA, 1000 bp, Homo Sapiens
ccagtggagggacagcgtctatgacccctggctgaagccactcagggtctcctatgacgtggcatcctgcctgtacatctggaacactggctacctcttccaggtggaatttgacgatgccaccaaggcatcaggtgagtgccagctggggctcgaggactttctcctctccgctccctgttctgggagcagggtcaggggcttcgcggagaaggcggaggagagctggaaggtgctgctttccttgcaggtcatgtgccacgtctgcatgggcagctgggaagctggcatcttacataaagggacagagaagcctcctggggaacaggggcctagcggggacaggattgcagccacctgcagcggccaactggagatggcagcggtggcccaccgcagggggtgtaggtggtcaggggccactgaaccctcccctgtggagcatacccccgagggtgcccggcagctggggactgggctccacagggagttcagagtggctgctgactccacggagcactgttgttacttgggccccacacaaaacatctaccttgaaatccatccttgggagaaactcctctcaggtcttggcatcaggaggagctgggcatgtccaggtctccggcttggttcctgccgggagcagaacggaagggtcccaatgtcttctcgatgccctggtccttctgggcctaaaacatccacttctggggctctgtcctctggtggctacaaggataaagaatctgaggtcctgaaagccaaagacctaagaggaatcgaacaagaaacctgggagaggagcacagagcagcgcagttgggggtgtttacacggcaagcagagtccaggcagggaggccacaggatacctgacaggcacctccaagaaggatcttcatgggagtactcagggaccaagacaagtccaaagggactgtggagaaggcccctggcttctggccatcagcacagccaaggccccagtacacaactaa

SEQ ID NO: 295528 - DNA, 489 bp, Homo Sapiens
atgcaggggcaggagtggactccaatccccgggaaattctgtagggctgggattatagcagggacgccgcctaccgccaaagcgagcaggagtcaaagggcagcccccagggtgcgcactggcagcgctagggaggatcctgcggcgggcccgtctgctgcgcacagcccggccctgaaccctagggcgcctctgacactgcgggagcgggggccagacttggggcggggcctctgcgcccggcaccccaccctaactacaaagccagaggtggctcctgagctctgttccccctcccaccggcttgcctgcttcttcgcctctggcttagctgggtcctgcacttatgccagcttctgcaaatgcaaagagtacaaatgcacctcttgcaagaagaactgctgctcctgctaccctgtgggctgtgccaagtgtgcccaaggctgcatttgcaaaggggcatcagataagtgcagctgctgtgcctga

SEQ ID NO: 295529 - DNA, 1000 bp, Homo Sapiens
cctccggaggccacccttgtcccgccctgccccaagggcacagcccgcgcccctcccccagtcctctccctgctgggctgccccctcccgcggccgcatccctagtcagtccctgagaccgtccagagttcagtccccgggatcaggcttgcagtgttgggccgccctccttgccagatgccgccctggagagggcaagggcgcagaaagggctgagcgtcccgggtccctgcgtggccgaacggcatgtgagcacattccaggaataaggaaacgagaggaaggagcctgttctataatcgataaaccccaattcacctcaccacctcttgctcaacccatataccgccatcttcagcaaaccctgacaaaggccacaaaggtccacatcgacagtagcattaacgacctcgatgttggatcaggacatcccaatggtgcagccgctattaaagttgcccaaacaatttcatacgaagttaccctagctatcatcctattatcgatcctactaataagtggccaattcaatctctgcaccctcattagaacacaagaacacctctgactactcctaacatcatgacccctagctataatatgatttatttccacactagcagaaaccaatcgagctgcttttgaccttactgaaggagaatcagaactagtctcaggcttcaacattgaatatgctgcaggcccattcgccctattctttatagccgaatacataaatatcattaaaataaatgccctaactgccataatcttcctaggtacaatatataatattcacctaccagaactctacacaatatgcttcaccattaaaaccctattcctaacctctctatttttatgaatccgaacagcatacccccgattccactacgatcaactcatgtatctcttatgaaaaaatttcttaccatttacactagcactacttatatgatacatctcaatatccgctacaatttccaacattcccccctaa

SEQ ID NO: 295530 - DNA, 1000 bp, Homo Sapiens
agagtacatctgcttcaaaggtctgggctggccccagggctgctacttaatgggcccccagaaggcctcaggcaacactgggcgtgcagaggacctgacactcaaggttccactggtccagactcttccaggtgaagacggggaaacggacttgtgttttccaggctgtctgactgtgagtggccccagcaccgtgatgggcgccgtgggggaatccctgagtgttcagtgtcggtatgaagagaaatacaagacgtttaacaaatactggtgcagacaaccatgcttgccaatttggcatgaaatggtggagaccggagggtctgagggagtggtgaggagtgaccaagtgatcatcacggaccatcctggagacctcaccttcaccgtgaccttggagaacctcacggcagacgatgcaggaaaataccgatgtgggattgcaacaatactgcaggaagatggcctgtctggtttcctgcccgatcccttcttccagtgtcagtatgaggaggaatacaggactttcaacaaatactggtgcagacaaccactttttctactatgtgacaagactgtaaaggctggagagtcagcaggagtgagtaatggctgagtgtccatcagggaccatcctgcaaacctcagcttcacagtgaccctggagagcctcacagaggaggatgcaggtggaggtgtcggtgttcccaggggagcccccttcactcagcaccaggcctgtctgagtctagggctggtcattctgtccctgaactccctgttcagcagcccctacgtcctgctcctggtcctggagctgcccctgctcctgagcatgctgggtgccgtcgtctggggtaaagacaccctgagcccatcacgtcaggagaaccagccatgccgagtgtggatagacctgggttcccgcctcctgggaaggcctgtctgccatgtctgctccctgcggaggcccctggccatcacagtggacccaggatag

SEQ ID NO: 295531 - DNA, 651 bp, Homo Sapiens; identical to SEQ ID NO: 119361

SEQ ID NO: 295532 - DNA, 1000 bp, Homo Sapiens
agaattagaaaggaaagagaaacaatataagaaagaagttgaagcaaaacaacttgaaccaactgttcaatcactagagatgaaaccaaagactgcaagaaatactccaaatcaggattttcataatcatgaagaagtgaaagatctgatggatgaaaattgcattttgaagacagatattgctatactcagacaggaaatatgcacaatgaaaaatgacaacctggaaaaagaaaataaatatcttaaggacattaaaattgctaaagaaacaaatgctgcccttgaaaagtgtataaaactcaatgaggaaatgataacaaaaacagcattctgcctgctgggctggaggaagtggagctggtgccgtccctgctctcttgctgggaagcaactgagggggcggcgcggcaggccccggcagccgaagaggctggcaggtggcactgtggggtgggtgctcctggtgaaaggagtccactgcatgcgtgtgggtggagtccggcccccgagagccaccgacatgaagaaagacgtgcagatcctggtggtgggagaacctagagttgggaagacatcattgattatgtctctggtcagtgaagaatttccagaagaggttcctccccgggcagaagaaatcaccattccagctgatgtcaccccagagagagttccaacacacattgtagattactcagaagcagaacagagtaatgaacaacttcatcaagaaatatctcaggctaatgtcgtctgtatagtgtatgccgttaacaacaagcattctattgataagatagcacagcccctcaatctgagtgctcagcagagtgcttgtgaaggcagcaccacagcaacagttgctcagagggaacagattcaggagccttggtttagcaatagagtccagggttttcagctcagtgtctttagcctgtctctgctggtcatgtcagttatgtactattccatccaggaggtgctatttacattgtag

SEQ ID NO: 295533 - DNA, 315 bp, Homo Sapiens
atgggagagaagaaggagggcggtggtgggggtgatgcgggagctgcggagggtggctcaggggtcgctcccagccgggtgctgcagcagtgcgggcagctccagaagctcattgtcatcttcattggcagcctgtgcgggctgtgcaccaagtgcgctgtgtccaatgacctcacccagcaggagatacggaccctggaggatgccaagaacctgggaaccagtgcatctgctgctttcccttctaggattctagcccagacaaaagaggcaaggggcatttcttcagaggccttgagcttcactacacaatga

SEQ ID NO: 295534 - DNA, 1000 bp, Homo Sapiens
cttggagactggcaagattactgatttcatcaggttcaacactggtaacctgtgtatggtgactggaggggctaacctgggaaggattggtgcaatcaccaacagagaaaaacatcctggatttttcgatgtggttcatgtgggaaaggaacagcagaaagggtgccatgggaaggagggagaaaaatataaaacaatacagcacccagacagacttcccagcgccacggcagaagcacgcccaacacatggctctgggctgcgatgggctggccagatgatgagcttcagggtcatcaaaggagggagaaatgaggggttgcctgaatttgtgttgattggtgcactgcacagagcaaggacgaaatgtaaagctcaaagggaaagggtggagccgaagaggaatgatattgctgcagaaactgtgcagctctcgagcgcaattcagaaatgctgtggcggtcgccagactcttcgggtagctcccggcagctccgaggtagcgctcccctccccaaccatcgccctccgggatgggccgcaccgaagagcccgctcctcagctagggcacgaagtgcgccgccgcgatgggcagctggaggaaggggcgtgacgcaagccgggcccgggctacactcggtggtggtggaccggcgggaggacgagcgctacctcagtactacttctgggtctcccgcgcgggctgaggaagcgcctttcgccgccaagcccgccccgcgcatgcgccgactgcggctcgcgcgcgcgcttcggaggttttttggccagacccgcacgcggaaccggcgcgggcacctggggagaaatggatggagaagggacctggctggaaagcctttgccccgctgctctgctccgcccataagaggacccctgaaatgtcccgtgcagtttgttcaagtcccctgtgtgatgaaatgtgcctctcgccttacccgtgtgagaatacctgtggtgtggcagcgagtattttggtga

SEQ ID NO: 295535 - DNA, 369 bp, Homo Sapiens
atggacttggtcaacatcaaagaacccatattggagaaagtccttatgagtgcaaagaatgtgggaaatcctttagccagagctccagccttgttcaccaccagagacttcactctggagcaagcccttatgtgtacagcaggtgtgggaaatcctacagcagaaatgtccaccttgcagggcaccagaaagttcacaacacagaaaggttttatgagtggggacaatgtgagagagcctttggctgtccctctaaccttgctcagcaccagaaagttcaccctgcaaaagccttatgaatgcatagaatgtgggaaggtttcagccaaggagtgccttgttcagcaccaaaagttgacactgaagtaa

SEQ ID NO: 295536 - DNA, 1000 bp, Homo Sapiens
gaaggggaccaagctgactgctgaggaggaggagattttaaacaaaaagcgacctaaaaaaattcacaagaaatacgataaaaggaaacagaatgccaaaatcagcagtctcctggaggagcagttccagcaaggaaggcttcttgcatgcatcacatcaagggtgggacagtgtggccaagcagatggctatgtgctagagggcaaggagatggagttctgtcttaggaaaatcaaggcctggaaaagcaaacacatcctcatcctttctgtctttgcccataatgtcaaagtgttttctgtggaagaaaaattctactgtgggcaaatgtatgggaagacatttaatggtacttctcaagctgttatccccctactcacaacttgcagcttcccagtgggcaccgtcttgggcatcaacctacctcctggtaaatcagccaagctcagcccctccaaatcttattataaacccatggcctgctgtgtcctttcctctggctgtagaggaggtgggcagcaggtggcagctcacatccaaggtcttttggcagtttccacatctgcatggaaaacctcttccttggagccagtgccgatctcacctgctgagatgcagcatgttagtgatgccagcagcagccatggtggtcccagcattaaccaggcagtgccccttcagatgttccagcaccagcagctcaattccccttgccgtctgctgaaacgccgattccctgcaaatctggggaaacagcgccatctagcagcctttgctccaagtgcttcaaagctgggttcattgttgactgggctaggtggaaagagacagttcttttggggtggactaagttggaaagatgctccccacaaatccacctctggtacctgtgagaataatcagtttgcaaaagtctgggctccattttgcttcaggaagacagctcagctttctactctggatggatcagcggagtttcataacattgcattagcatag

SEQ ID NO: 295537 - DNA, 645 bp, Homo Sapiens
atgtgcttacatctttggattgaggatgtcctgcgattggatggctgccgaggcctcaactgtctgcagtctgggacggcagatgatgacagcactgggctcggttttagggaccctgcttctctgctgttgtttactagcttcagattccatctggccttgttgacgggaaccttgataccatctgcaaaacttgtaataaagcaattttggtctgaagaaaaggaaaacagcacactgaagcccatttgggaaatgtcacgtttggtgcttcaaaaggaagaaattaagaatttgagcatgacaagtatgggtcctatatttgaggacactgaacttcccagggaggtcaaacccacgatcccaaagggcatcagccatgagcttgattgacttgcttacatcgcccaccccaagtttggaaggcatccttgtgcctgcgtctccagaggtctcaggctctgcttgccagaagccaaggccaaggctcagtcaaaccaaggcccaggctgtggctgtggctatgtctctagctccagctccagttccggttccagttcagggtcccaaaggttcccagtcccccagaaggttcctgagtcgaggcttttgtctgccaatgtaaagatagaaggattggagtga

SEQ ID NO: 295538 - DNA, 1000 bp, Homo Sapiens
ttcaatgtgcttgttggttggactgttctctcttgttccctggggacctgtctgggaaatgcccaaattccactgggataactgccggcaagcatggtggacgaatctgctgttgctaaataactttgtgtcggtcaagaatgcgtgcaatggctggacctggtaccttgccaatgacttccagttccacctcaccacaccagtgattatcttcatccatgtaaagagtacacagatcctcatcctccttggggccatgctgttcttggcatctttcacagccactgctctgatcaccttggcatataaacttcctgtcgtggctccatcagaaaccagtgaagaggcgattgtattgtatttcgtggagtactacacaaagccctactgccgatttgggccagttcttgtgggcctctttctgagcatttacatgcaccaaaaccaccaggaaaacattctcagaaccaagatgcaggtcctgctggggtggagctgctccctggtcaccctatttgcggtggccgctctggcatacatggtggatgactcctctgcttcctctctagtagctgcagctctctaccaagccctccaccggaccctgtgggcggcggctgaaaagttcacagacttaggcacagaatgcaatgggagcatcgatgggatgatgggcatcttcactggcccagagacaggctgtggcttcatgcatcagtgcttgttccctccaggtctggtgaaccgtgtgctttcttgggacatctggagtttcctgtccagcatcagttatgctcgctacttggtgcatccgattctgatcatcctttacaatggccttcaggaaacacttattcaccacactgacaccaacatgttctatcttttctctggacaccgtgtgctgaccttcgtcactgggctggccctgacgctgttcattgagaaaccatgtcaggaactgaagcagcacctgctgggccatgaatgttctggttaa

SEQ ID NO: 295539 - DNA, 1000 bp, Homo Sapiens
ctgtaaccattcacagcttcccaggactgggacagggacatctccggagactgccgtccccctcacctcttcccaggactgggacaaggacatctctggagactgctgttccccgatacttgctttacaacttggggccccaccaccacccatgggtcctgccaccactcacgggccccgccaccactcacgggccccgccaccacccatgggtcctgcaaccactcatgggccccaccaccactcacgggccctgccaccacccatgggtcctgccaccactcacatgggcctcaccaccacccacgggtcctgccaccacttacgggccctgccaccactcacgggccctgccaccacccacgggtcctgccgccactcacgggctctgccaccacccacgggccccttcactactcatgggttccgccacctcttacgggtccacactcacaggcgccacttcctgatgctgttgctccatgaggctccagtgggtgcgactgtgcctgaggagttgtctggggctttttgtggcagcagcccagggatcagggcttcaggagcggctgccgcctcccccaagtcacaggccccggctcgaactcactgctccttcaaactccactgcatcacctggccttggacatacttcatcgggccgcctgtcagcaccaccatctccctgcaaggccaggagccccggggtgagggcagcgtggctccactctggaagacctccctgccagcccagtggcgggggtggggggtggggctcgggaacggccaaaaggaaaaggatgacattcttgggccggaggactgtgaaacccagactgcaaacaacttcactcccctcacgtgtgtctttgtgagggagaagcgcattcatcgtatctgtgaagtgtctaatggaggccccattgtgcacttcagggccatctggaaggggcctgactccggcccctgcaaggcggtggatgccagcgctcagacatga

SEQ ID NO: 295540 - DNA, 1000 bp, Homo Sapiens
ttttagccaatcttcatcacttactaaacataagataatttatactggggagcaaccttacaaatgtgaagaatgtgacaaagcttttaacctatctgcaagccttattaagaataagaaaattcataccagggagaaactctacaaaaccagaaataagataatttttactggagaaaacacctacaagagtgaacaatattgtgaaatttctaattaatagtcgcaaggaaagccccccggggcctctgaagcaccctcgccccactctcaacccccttgggggaaatcagaagccaaacctagattcacagtgtcagggatcttccctagagtctgggtcacgcccctcttcctggagggcttcaggcacacctggcgcccaggaactgccgccgaccgggctgcgccctctctcaagcctgggtgtcccctccgctcagaggtcggcgcgggcgagcgtcagggaaggctgtccccgcgggcttcctgctgccgacccccttttcttgtctcccacctccttgccgagtcccgcacatctgtaacttcagcgacgctgaagtttgcagcccgcgtgagaggcgcggccctgggggacagggcagagttaaaacgcgactcgggcctccctccccagctccactgccccgggcgtgccctgagcctgcggccttggcagtgggcccggaagggtgggtgctgccccaaggtcgcatccaggccctcggaccctgccggggccagtagtgggcaagacgagactccaagagcggccgggccgctggggtcactggggatagtcctgaggtcttgccgggtaggatgggggtcccagacccacgctccagcggggacgccccgactccagcccggccccggctccggaccggccgggtctccgacaccgtccgccacgcacgccgatccgccccctctctggcagaactgggccctgggcgtggccgtggccgtgggcgtggctctacccatggcctga

SEQ ID NO: 295541 - DNA, 423 bp, Homo Sapiens
atgcgcgctgtaaatgcagtgtgcgtaaccgggcgcgagagcatagattcttaccgcaaaccctgggagcacaaggagccacagctgcaggtggatttccacaccgggatggatgaggactcagacatcgctttccatttccgagtgcactttggtcattgtgtggccatgaacagccatgagtggggggtctggaagtgtgaggtgaaatctgacaatatgccctttgagggtggccaatcatttgacctgcgcatctgagtgctggacaaggaggaccaggtaatggtaagtggccaacactgctacagctttgcccatcgactcctgccagggtctgtgaagatggtgcaagtgtggagaggattttggcttttgcttgaaggggaaaaagcaaaagtggtcatcaccaagagggcctga

SEQ ID NO: 295542 - DNA, 837 bp, Homo Sapiens; identical to SEQ ID NO: 225090

SEQ ID NO: 295543 - DNA, 672 bp, Homo Sapiens
atgccggcggtcaagaaggagttcccgggccgcgaggacctggccctggctctggccacgttccacccgaccctggccgcgctgccgctgccgccgctgccaggctacctggcgccactgcccgcggcggccgccctccccccggccgcctcgctgcccgcctcggccgccggttacgaggctctgctggccccgccgctccgccccccgcgcgcctacctcagcctgcacgaggccgccccgcacctccacctgcccagggacccgctggccctcgagcgcttctcggccaccgcggccgcggccccggatttccagccgctgctggacaacggcgagccgtgcatcgaggtggagtgcggcgccaaccgcgcgctgctctacgtgcgcaaactctgccagggcagcaagggcccgtccatccgccaccgcggcgagtggctcacgcccaacgagttccagttcgtcagcggccgcgagacggccaaggactggaagcgcagcatccgccacaaaggtgccgccgcccctcccttcgctgccgggacccgcgggccccgaccccaccccctacccgactcggacacccgggagcctccggctcggccgagggggcgctgcagctccagggctgcgcggggacacccccgccgcgcgcggaggcctcggtga

SEQ ID NO: 295544 - DNA, 1000 bp, Homo Sapiens
tctgggcccggttcacctcgtcccggaagccgaggacgccggcgggatcggtccggacgccgtagtccggccagccgaaggctgtctgcaggcctgtctgcaggccacggtggctgctttctgggccacggtgcaccaggagaacacgcgtgtcatcgtcatgaccaccagggagatggagcggggccgggtcgcaggggcggggtgccgaggtgctgccagcaaggctgatgcaaagcgctcccctcggaacaagtgtttccgggactggccagagctgcccggcagccaagagttcggccgtgtgcacatgcgcgtcctcggcaagggccaggcccagggctactgcgtgcgggagctgcaggtgtggcggccgggccaggaggagccacagcgtacggtgcagcacttccagtacttcggctggccggactacggcgtccgggccgatcccgccggcgtcctcggcttccgggacgaggtgaaccgggcccagagcagcaagccgcgggccgggcccatggtgtttgtcctcagtgggggcatcggatgcacgggcaccatcatcgtgattgacatcctggtggacgtcatccgcaggcaggggctggactgcgacaccgacgtcccgaagacgatccagctggtttggcggcagcactggggaatggtgcagacggaggctccgtacaagttcacgtacctggcgctgcagcggcacatccggggcgacgcgagccgcctcaggagcgcgagaaccaaaacgtgggcgccgccccccgctaatcgggttgcagcccccggctccccgggcatccccggtctcggccactccgtgcgggtctgccctcaccgcagctccggcctgccggccctgcctgctcccgtggtctgggatgtggccccgtccgagggcaagatgagcacccccacccaatggcaggaccagccctgcggggaaattgggggacgccccatggagctgggcgagggcggctga

SEQ ID NO: 295545 - DNA, 1000 bp, Homo Sapiens
tttgcgggatgttgatgagaatttctgggccatatggtctgaatccagggccctgtcctcctccccagaggccatgagtaagaggcagacagcagaggactgtccaaggatgggagagcaccagcccttgaaggtgttcatagacatctgcctcaaggaaataccccaggatgaatgcctgagatacctcttccgaaagcttcattgttacctgaaggagatgaagaatcttcgcaaactcatttttctccaggtgccatccttacacgtcaattaccgcgaggaatgctcagtcgccaaaatcagctctatgttcctcaggctgaaacacctccagctgcttaaaatgaatatggtcaccttccacagagggcacctgggacagctgatcagcaacttgcatgaggaccatcatcagatgaaccccttggagaacttggaattaacttgcggctacctattggaagaggacttgaagtgtctctaccagtacccaagcctcgcttacccaaagcatctgaatctcagctacatgctgcagttctgtatcagtcttgaacccctcggagctctgctggagaaagtttctgccaacacgagggtctcgagagaggcagcaattactcttaagaccctcatctcggagggctgtcagatccactactcccaactcagtgccatcctgcctggcctgagccgctgctcccagctcaccaccttctactttggcagaaattgcatgtctatggaagccctgaaggacctgctgtgccacaccagtgggctgagcaagttaagcctggagatgtatcctgcccccgaggagagtttgaattccttggttcatgtcgattgggagatcttcaccccacttcgggcttagttgatgtgtacactaagggaagtcaggcagcccaagaggatcttcattggccccgccccctgcccgtcctgtggctcatcaccgtctgaggaactggagctccatctttgctgctag

SEQ ID NO: 295546 - DNA, 459 bp, Homo Sapiens
atggactggtgttgctccatgccgaccaagggcccgctgcagtcggtgcaggtcttcggacgcaagaagacagccacagctgtggcgcactgcaaacgcggcaatggtctcatcaaggtgaacgggtggcccctggagatgattgagctgcgcatgctacaatacaagctgctggagccagttctgcttctcggcaaggagcggtttgctggtgtggacatctgtgtccgtatgaagggtggtggtcacgtggcccagatttatgctatccatcagtccatctccaaagccctggtggcctactaccagaaatatgtggatgaggcttccaagaaggagatcaaagacatcctcatccagtatgaccagaccctgctggtagctgatcctcgttgccgggagtccaaaaagtttggaggccctggtgcccatgctcgctaccagaaatcctaccgataa

SEQ ID NO: 295547 - DNA, 1000 bp, Homo Sapiens
cgcagtgagtttatggtccccccagctcttccccagtggccctgcatcctgtggggccggaggagccaggggctgccagaccctcatggggctgatctctctcgggctcaccctgagcctttgggacgtgtatttgctagaaggggaacaggtgttgacgccaatggcacgcactgcctttaaggttcagaggagtaagtccacagcacctcgtgaagatatccaggtgtggccgtgggcatgttttcaggaccagttttcccatacctgggccctggatgatgatgcagttctcagacacccttgggcctctatgaggaaacaaggaagcctggggacctgccacccccaggtggcctgcagcaccagggccctcagggtcattggaggaaccagatccatctatgggactccccacccctccctgcgagcactgacagcctcagagagcagcagaggctcctcactcctgaacacccctccaagggtgccaggacaacaagccttgagccagagagacaagggaatctatgtccctgatccccgaccagggcgtttagtggccaaacctgagcaagggtccttggcacccaggcctgggctggcttcacctggcaggaagaccctctggcagggggacaggcaggcccctcctggcccaacaactcggttccagtggcccatttggccagcttccccgccatgggtggcccgtttgggggaacctcaggtttcctggaggttcctccagtggaactccatgccacggctccatccctatgaacctggattgactggcaagtctggaaggggtcagggtggcaccccgcaagctgcaccacagccccagacacctcggaaaatcccgttcaatggggaagccagtcccatcaaggccacgagagagaaagctagagacatgcagcagtgtgttcccacctcagggccttggctctgccacctctacttggaatgttctcagttccctccaggcttctag

SEQ ID NO: 295548 - DNA, 1000 bp, Homo Sapiens
tttccggccttccgtgggccaactggcagcccaggagtggggaggctttggccaggcatgctgccacttgtgcgtgagtccgcggctggcccttggaggaggccaagctggtgtctctaggagggcccacacgggcaccctggatcccccagagagcagattgggacctgctgcagctgggaggggagctgtccagaaggtcggcctgggactgagcatgggcctgcagctggcagagagaagggtcgaggcagccctgaagaagcaggccctgctgcagacccagctggaggagcagctgcaggacaaggtgcttcacgagaagggacctggcccagcagcagatgcaaagcgacctggacaaggctcacctcagtgccaggtgggtacctggtgggtgccacacgaggcaggtgtccctgcagaaggtaaaactggagaagtgacagagctgggcctggcagtggagcgtcttcagaagcagaatctggagaaggatcaggtcaacaaggacctcaccaagaagcttgaggccctggaatccctgtggctacaggagcaggcggccctggagacagaggacggagaggagctacagcagagcctaagggacctggcacaggccgtcctgtccgaggctgagagcggcgtccagctgagcggctccaagtgcaccgtggatgcgtcggagcgcagcctgcggggactctggggccagcggaccccgtccccaccgcggtgctactcgccaggcagaggccgttcgccccgccgaggcccctccccggcctgctcagactcctccgccctcgccctgatccactccgccttgcacaagcaccagctgcaggtccaggtccacgaggacgcccagcgcgaggtgcagcggctgcggagagccaagaagctcctgagcaggtgctggggaggtctgagctgggggctactgaagaataagtcagcgtttgggcataacaccagtcgagccttatgcgtgtga

SEQ ID NO: 295549 - DNA, 564 bp, Homo Sapiens
atgacagatcaggtctttgtgacactgaccacaaatgatgcctacaccaaaggtgccctggtcctgggctcatctctgaaacagcacaggaccaccagaagactagtcatgctcgccaccccgcaggtctcagactccatgagaaaagttttagagacagtctttgatgaaatcatcgtggtagatgtcttggacagtggtgattctgctcatctaaccttaatgaagaggccagagttgggttcctacctcccagcatttaaagtgtttggtgcaagtgccaaagttgtgcatttcctgggacaagtcaaaccatggaattatacttatgatcccaaaacaaaaagtgtcaaaaatgagtcccaccatcccaacgtgactcatccagagtttctcatcctatggagccatatcacatctgtcccttggggggatcccagctatggcacagtctgtgtatcctcagaagaatggaaggagcggtgggaacagggctagaccgattatatgggagcagattcctttgacaacatcaagaggaagcttgacacttacctccagtag

SEQ ID NO: 295550 - DNA, 1000 bp, Homo Sapiens
cttgttccacctgctccaggatcagatgattggttcccttcatacagactcattgccaaatgatgaggtggagtttgtccgaactggctatgggaaggaaatggtaaaagttctccatattcagtgagatggaaaatatcacagcattaaagaggtggcaacttcagtgcaacttactctaagttccaaaaaagattacctgcatggagataattcagacatcatccctacagacaccatcaagaacacagttcatgtcttggcaaagtttaaagaaaatgacccagcaaacatagatggggctatggaaaaagcattttgtttctttttacaaatcaaaagcatagaagcctttggtgtgaatatttgtgagcattttctttcttcttttaaccatgtaatccgagctcaagtctacatggaagaaatcccttggaagcatcttggaaagaatggagttaagcatgtccatgcatttattcacactcccactggaacacacttctgtgaagttgaacagctgagaagtggaccccaagtcattcattctggaatcaaagacctcaaggtcttgaaaacaacacagtctggatttgaaggtttcatcaaggaccagttcactaccctccctgaggtgaaggactgatgctttgccacccaagtgtactgcaagtggcgctaccaccagtgcagggatgtggacttcaaggctacctgggacaccattcgggaccttgtcatggagaaatctgctgggccctatgacaaaggtgaatacttgacctctgtgcagaagaccctctgtgatatccaggtgctctccctgagccgagttcctgcgatagaagatatggaaatcagcctgccaaacattcactacttcaacatagacatgtccaaaatgggtctgatcaacaaggaagaggtcttgctgccattagacaatccatatggaaaaattactggtacagtcaagaggaagttgtcttcaagactgtga

SEQ ID NO: 295551 - DNA, 810 bp, Homo Sapiens
atggtgaaaatgaaggcctaagtcaatggatttggctttattgggtgctgggtcaccagggctacttataactctgataaagtgaatattctcaccatcaatcaccccttcatagagctcaactacatggtctacatgttccagtatgagtccacctatgacaaattccatggcaccatcaaggctgagaacaagaagcttgtcatcagtggaaatcccaccaccatcatccaaaagctagatcccaccaaaatcaaatagggtgattctggaactgagtacatcatagagtccactggtgtcttcactaccatggaaaaggctggagatcacttgcaaggttgagctaaaagagtcatcatttctgccccctctgctgatacccccatgtttataatgggtatgaaccatgagaaagatctcatctttgcatctactggcgccgtcaaggctgtgggcaatgagatccatgggctgaacgggaagctcactggcatggccttccatgtacccaccaccaatatgttggtcatggacctaacctgccatctggaaaaacctgccaaatataacatcaagaaggtggtgaagcagacatcagaggatcccctcaagggcatcctgtgctacactgagcactaggttgtctacttcagcttaaccattgacacccactcttccacctttgatcctggggctgtcattgccctcagtgaccactttctcaagctcattttctggtatgacaatgaatttggttatagcaacaaagtggtgaacctcatggcccacacggcctccaaggagtaa

SEQ ID NO: 295552 - DNA, 1000 bp, Homo Sapiens
cgaggctcatgggcttcctggaggagatgaaaaagcaaatcctacaagagcaaggagccccatgaagccacccagaacaggactgtcaggaccaccagaaagagagatgcctatttcaggattggcagtggggggcactttgccatcccctcgagaagtgactcttacagaacggctcctcctggatggcccaccacctcattcaccagagactcctcaatttccccccacaactggagctgtactgtacactgttaagagaaaccaggttgggcctgaggttcgctcctgccccaaggcatcccccagacttcagaaagagagggagggccaaaaggcagtgagtgagtcagaggctttgatgctggtctgggatgcatcagaaactgagaaattgcctggtaccgtggaaccccctgcttccttcctgagtcctgtttcctcaaagaccagagatgcagggagaagacatgtgtccgggaaaccagacactcaagagagatggctgccctcaagcagagctagggtgaagacaagagacaggacgtgccctgtccatgaatctccatcaggaattgacacctcagagacttctcccaaagcccctagagggggtttggctaaagacagtggaacacagggcaagggtccagagggggaacagcagccaaaggccacagaagctacggtgtgtgccaataacagcaaggtcagctccactggggaaaaggttgtcctgtggacaagggaagctgaccgtgtgatcctcaccatgtgccaggagcaaggggcacagccacagaccttcagcatcatctcccagcagctgggaaataagacccctgctgaggtttcccaccattttcgagaactcatgcagctcttccacactgcctgtgaagccagctctgaggatgaggatgatgcaaccagtaccagcaatgcagaccagctgtctgaccatggggaccttctgtctgaagaggagctggatgaatga

SEQ ID NO: 295553 - DNA, 540 bp, Homo Sapiens
atggcgaagattttcgggaaaaggaaaatgattcaatgcagtaaacgtggagcaggccgtaaccattatggaagcaatccacgtcctgggggtcctccacacaattaccagcggaattaccagaatagagaaggttcctggagaaggttcctgccctactacctgaagagaccctatgggcgtggaccacagtgttccagccctccagcgcagggagcggagatggaggatgctgacagccagggtgcaggagcaccaggtagaccagtgaggcaagatatgtatgtggctataggccatgattccactggggccctcttagccaaagacagcctagagaggatggtgatgaagaggataaaaagaaatcaaggagatgagaccccaggtcagcagcaaggtctcgctccccggctgcacgcagctcagcttccaacattcgggaaaggcgtgcccggatcgcgaggggccgctgggaccgagtcccggacgtcgcgacgcgcagggggctgctgcggccggcggtctcgggaaaagtga

SEQ ID NO: 295554 - DNA, 1000 bp, Homo Sapiens
aggcgtttccccttacctgcaccgggcctgccgccccgtttacatccacgcatgcgtttccccttacctgcactgggcctgccaccctgtttatatctatgcctgcgttttcctcttgccttttcaatccagaggcctcactagctttggcctagtcatcctttctccttgtcttctcttcagccgtgccttgccaaaggtgtctctggcctggctagcgggttggggcagcagcagcaatcaccagtgtgacctgagggcgccgtgtcacaagcgcagggcagcctatgtctgcactcacctgtgctctggcccaggccggccctgcacttcgattgccgggagccctgcacgcggaactgtgtctgcagaagctccttttggcacctgggagggcacctctcatcagtactccaggacctcggccatcgccacggaccgcagggtgaacgctggacaagtgcacaagcgcagcccggtgaaggcacagcggtcccaggaggcatctgggctgcaccccagcgagccgcccatacacgtggagatgccggccaaggccctgcagcacacggcagaggaaggcgcgatgggagccatgctgggcccggaaggtccggccattgcaagttttccttttcctgtgtggcttcgaccgcagttcttccttctgctggggcgctctgcttacctgttcaaggctgctgccttctcaagcaggctcagatctaaccacgtatgcacacatccatccatccatcatccttctctccatccatccattgtccatctattcatccacccacccatgcatccatccaacacaaatatatacatccctatatacacagatctaagcattcatgcacacatccatctctccatccatccattgtccatctatttgttcccccacccatgcatccacccaagctacatatatacattcatatatgcacagatctaactgcagctgacagtgcaggacaaccccagccaatag

SEQ ID NO: 295555 - DNA, 1000 bp, Homo Sapiens
gttgtaccgaggggatgtggtcccgaaagatgtgggcattaactaccagcccctgacggtggtccctgggggaaacctgaccaagttgcaatgggccatgtggatgctaagcaacatcacagccatcaccaaggcctgggcctgcctggaccataagtttgatctcatgtatgccaagcaggcctttgtgcaatggtacatgggggaaggcatggaggagggggagtcctctgaggctcgcaaggacctggcagctctggagaaggattatgaagaggtgctgccccgcacctgctgccttcttccaggcccaccccacttgggcagcctggtagcgctgggctggcggggtgtcctctggctggatcctttgcggccgctgcattccaacagggccggcactctcccgagggaggtgctgtctttgtttctccctgaggagacacaaagcgcagccaataggaacggacgagcccctaatgactcggtcccttctggaaacaaggatgagagggaagcagaaaggaggaactgcggagtgggccagaccaagctgggacgccctctgccatttacctttggtgtggcctatattctgccattactggggcagctggagctccgtgtgtttggatgctgcaacacgcgggtctcagagagctctcggtatcccatctgcgggctctgcctctcactccgcagcacactcctgaagcctcctcctacctccatcattggcggtttttctcgccacctctcattggaacgagtgggaccatctcacttcactgccacaccctctgcactgacagacagccgggcccggcacccagaatccctggggacaatgggcccggctctgacttcgggcacgctcgtcgtgtgcagagacacggccgcagagtcctggggctcgctcgccatcctctgcccggcacacatcgacttgagcatctggaagacggccacgggggccacgttcaacttcacctggctctga

SEQ ID NO: 295556 - DNA, 1000 bp, Homo Sapiens
cagaacgcaaacctctgtccattatttttccaatcgaaagccaggccagatagatctgtttcaagaagaaaaagcgttatttctatttgattatgcaagccagttctttaagcctttaggacatcagatggatggaggtgacttgctggcctttgttgcctttaactctagtattcggcttctttctgaggaaggtgccaaaacggcttccgtggccaaagcccatcaagggaaatgcttgatggttactgtgcctgagctgcctgaagcctggtgtaggagtctcaacttgatcttgaggcagctgcaaatgttaggtcttgacacttgggatggcaacaagaccaggcagtgcccagagtggtcccagcggcctaggttagaggagggcctcaagcaccagaatacgtttagcttcaaaaatgacaagtttgataagagtgttcagaccaagaaaattaatgcaaaacttcctgatataacagtgaaggattcttatcacacagtgtgtagaccatgcgcctatgaacttgaagtttgcacagaatgtggaaagaaagaagacattgttattccgttcaaaaatctaagttctaaccatagaagaagctgcagaagaaatgaagaaagggatgataatttagattttgatgttgatttagaagacacaggaggaggccaggcccagtgtgggaacaagatgctcttcagagaaatctctttgacactggctgtctcacccagcacctacactcttgaaaatctgagggccttagcagaatttgaaagtgtccaagggagaagtggggatgccattcagcgagggagtggtggaggagatgcagggcgtagaggtcggggctgtgagttcggtgttcgacaggcggagttagtgattgttaggagacacctgcaccttgcagggagcagctgtcagcaccgggtaaccagcaaagacagagaagtggatgatgtcaccaaggaagattttgtagagtaa

SEQ ID NO: 295557 - DNA, 1000 bp, Homo Sapiens; identical to SEQ ID NO: 119365

SEQ ID NO: 295558 - DNA, 1000 bp, Homo Sapiens
ttctcccttgggagatgacaacagtggctggtggtttctgcttagtgggctgaggggagcatttccaggagtgggatgtctaagccaggacttaaaggaagggaagtgcacacagatcctcacagcaagggtgcaggtgctaaagcaggaggtgtgttctggagcccctagtgggttggcaaagctgcctgtgcactcagggcctgcggaagagatggaaagctgcaccctaagtgggaggaaaatgcagaccatccctacagatgcttggactcctctttccatggccacatccagaaccactccttctctgcagggaccagtcatgtttgcactcaaaattaaatccaagtactattttccagagaaagaactcaatctgcctggagaagagcgctcctataaaagccgtggcttgtcagagaggccagagcagagcctgagtaacaccagctccccagcctttgtagatgccgctgccaccaggagccctgtactatcagccacggtcaaccccaccgtgttcttcaacattgccattgacagcgagcccttgggccacgtctccttcaagctgtttgcagacaagtttccaaagacagcagaaaacttttgtgctctgagcactggagagaaagcatttggttataagggttcctgctttcacagaattattccagggtttatgtattagggtggtgacttcacacaccataacagcactggtggcaagtccatctatggggagaaatttgatgatgaaaacttcatcctaaagcatacaggtcatggcatcttgtccatggcaaatgctggacccagcacaaatggttcccagtttttcatctgcactgccaagagtgagtggttggatggcaagcaagtggtctttggcaagatgaaagaaggcatgaatattgtggaggccacatagcgctttgggtccaggaatggcaagaccagcaagaagatcaccattgctgactatggacatctctaa

SEQ ID NO: 295559 - DNA, 1000 bp, Homo Sapiens
taatgatgaggacaaagtgtaccatgatgtaaattttgaggccctgcagaacctggagaaggaaattctttctaaggtctgtgatccacaaggatgcaacctggatttgtctgtaggaattgatatctcaactccttcaaagaaaattcagcagaagcttcaagggttactgccagagctgatgcaacagttggctttactttctaacatcagccgtggcatttctgatcagatcgacccaagattccgctacttggtgcctggctcaaatggccagcttacctttgactcaggctttgaaaaatacagttatgagatcatccagaagttcttggttcatcaggctgccaggaataacaatatggatgtgaactttttgcagtccttgggagataatgctattcatctctcttctgctaatgtaaagtgcgtggggctcagtgctcatgaggctgatgcccagtctcattctttgtatgagccagaggatgttttggggctgaaactccctgccttcttcaacaatgtccctgacactgaccggggtcttctgactcagacaggactagcttttgagggttggaggttgaagatggcagctccttcccatcgttccaaaccttggggattgtccagccaaattatcttcagacaccaaggcttcacccgccctcttcatggagacgatgcaagggcatctgagatctttggaagccaaattctcgcctctctttgggaaatgaaagcaggggccacatttcaggtcagcagggtcgggggtagaggcaaaggtcatggacttgtgggccctggaggatgggatgattctgagacattgaatccctacactgatctcagtagaaatctcagactgttggtgctaagcataagaggtcttcggtatcagattgttgtgttttttagtaaaaccaacacaaaacagaagaaagaagtaaccatcggtagtcctgacatcaacatgagcttcaatcattgttga

SEQ ID NO: 295560 - DNA, 798 bp, Homo Sapiens
atgcgctcccctgaaaacaacaacaacaacaaagaatcagaagagatactaggctatctaattcctaaatccaaacctgatatttctaaccagacactaacaaacagccccaattgtgttcgggggagggtttcgcctccggttttgctcggcagcagcagcagggacgtgttggctagttgtagtatattccaggagctacaacttgtccacgacaccggctacttctcagctttgccatccctggagacctggagaatagagactgagagaagagggaatattccagaggagacaggccttgaattggaacgctacctacagacggagcccagaaggatctcggagacctttggtgaggacttggcctgtttgctccacccttctcctccccggtgcattgaggaaagcttccgtagcttagacctcctgctgctccccgtggaagcggccatctacagctacacagctgtcaaccaggtccagctcaacacaatgacctcattaatgcccccactgtcccctgagctcagccaccatctggtcaaaacctcacaaactctctctgccgtggatggcacggtgacgttgaaactcgtggccaagaaggctgctctcatctccgtaaaggtgggaggggtcacaacagcttcagcagctgtgatggtgccagggcccgatgagctcacgaggcactacgggaaacacacaggtgcaaacctcttcaaatgcaaccactgcaacaggtgtttttctaggtctgaccatcttgccctccctatgaagaaacatatctaa

SEQ ID NO: 295561 - DNA, 1000 bp, Homo Sapiens
cagggaatcccagtccccagttttgatatttgagagtggcttcggtaatggctgctgtaaggcctctcatgatcgacccctaatgaacatgcacaaaccctggaaagcgttgcttcagtctcctgttatggctggaggtctctttgctgtggatcggaaatggttttgggaattgggtggctatgatccaggtttagaaatctggggaggagaacagtatgaaatctcttttaaggtttggatgtgtggaggagaaatgtttgatgttccatgttctagagttggtcatatctacaggaagtacgttccatacaaagttccatctgggacaagcctggcaagaaacctgaagcgggtagctgagacctggatggatgaatttgccgagtacatttaccagcggcggccggagtacaggcatctctccacgggggacatctctgcccagaaggagctgcgcaagcagctcaagtgcaaggacttcaaatggttcatggctgctgtggcctgggacgtgcctaaatactaccctccagtggagcccccgcctgctgcctggggggagatccgaaatgtggcagcaaatctctgtgtggacagcaagcatggagccaccggaacagagctgaggctggacatctgtgtcaaggatggttctgaaagaacatggtctcatgaacagctttttacctttggatggagagaagatattcgacccggtgagccactgcatacccggaaattctgctttgatgcgatctcacacaacagccccgttacactctatgactgtcatggcatgaaggggaaccagctctggggataccggaaggacagaacattattccatcctgtgagcaacagctgcatggattgcaaccccgcagagaagaagattttcatggccagatgtgaccctctctctgagactcagcagtggatttttgaacacattaatatgactgttttagaaaaatttaaccaccatgccaactcctag

SEQ ID NO: 295562 - DNA, 1000 bp, Homo Sapiens
tgttcaccattttacacaagctgacattgataactctcaggtgtggttcatacaggatggaagcccttcttctggaatgttctactttagtgtgacagatggtgcacaccacaccctctataaactcttccacctggatgtcattcccatctccatcagcattgtgaaccttactgacctacttctcccacaaggccagacaaccatccccatcaccaatgctcacctgtcagccatgaccaatgggaggaacccccaaatcacttacatgataacatggcccctccaacatgggcacctgctgattgaaaaccaggtggtcaccaactttggacaggaagatttggattcaggaagactcttttatcacatgacaaatctcactgccacacaggaccagctacagttctcactgtttacatcagaaagcaacctgacaggacaaacactgaacatcagagtgcagcctttactgcgggttatgccaaacctgaaaattgccgacagagaaaagcctatgatttcctcaagacttgtggcacagacagaaactttagggaaactgacccagaccagatggcagaaagcagatccctggggacagcacagtggtgaagagcccagtgtggatggcagagtttctgccatcaaggtcatttggccaccagccaccactaatagtcagcttttgggcacccacacagcccagagagagcagttaccctctgatggtcatcatacccttggctgccgtggtcttcgtgctgaaagtggctgcagtggccatgtgtgtctggttgttgagccagaagtgacaccccttctgcaaagctccagcagccccccagtctgtcttttcagggccctgcagtgtgaacaaatgtcttctccagtggccgagccagtggacaaatgtgctgcttgggagacatggatgaacctggtcaaactctgccgacaaaccaacccaacactgaagcacaaccagtaccgggtgtag

SEQ ID NO: 295563 - DNA, 1000 bp, Homo Sapiens
ctccacggaaaaccgcccacgtcccgccatccccaaggaaaaccgcccacgtcccgtcatctccatggaaaaccgcccacgtcccgccatccccacggaaaactgcccacgtcccgccatccccacggaaaactgcccacgtcccgccatccccaccgaaaacctgcccacatccctccatccccacggaaaacccccacggcacatggccatgcgagggaagcaggcaggcacaaaagtaatttcaacagcctgtgacgtgtgctatgacacaggcagcataggctttgacgggagtgcagaaaagacgcatctcacaggtgtcaggaacaggtgtctggggatgggggcaaagcggagaaaagctgaattttgcaaagctgactttgcaaatattatctttgcctctgtcttcgagaaggccaagctcccactgacgtcaaaggcagttggcctgtggggaatgtgcgggctcagtcagagtgcgtgtccaatgccttggtggaaaatgcagccggcagctgtgtggctaacagctggcagaatggggtctgtgtgtaccagctgctgtcccacccttccaggcctgtgggatagggcccccggctgcccttcagcagcaagtccaactgccctcagtgaggaattaatggagagtcctcaggtcctggaactcaagcccatctgtcttgtgttctggggttccatgggcccctctggtttgtggaaatacctggtccaggccacccctgttaagggcaagattcttgccaagagaattaatgtgtgtattgagcacattaaacactctaagagccgagctagcttcctgaaacgcgtgaaggaaaatgatcagaaaaagaaagaagccaaagagaaaggtgcctgggttcaactgaagcaccagtctgctccacccagagaagcacactttatgagagcccgtgggaaggagcctgagctgctggaacctcttccctacgaattcatggcatcatag

SEQ ID NO: 295564 - DNA, 948 bp, Homo Sapiens
atgaaggccaactacagcgcagaggagcgctttctcctgctgggtttctccgactggccttccctgcagccggtcctcttcgcccttgtcctcctgtgctacctcctgaccttgacgggcaactcggcgctggtgctgctggcggtgcgcgacccgcgcctgcacacgcccatgtactacttcctctgccacctggccttggtagacgcgggcttcactactagcgtggtgccgccgctgctggccaacctgcgcggaccagcgctctggctgccgcgcagccactgcacggcccagctgtgcgcatcgctggctctgggttccgccgaatgcgtcctcctggcggtgatggctctggaccgcgcggccgcagtgtgccgcccgctgcgctatgcggggctcgtctccccgcgcctatgtcgcacgctggccagcgcctcctggctaagcggcctcaccaactcggttgcgcaaaccgcgctcctggctgagcggccgctgtgcgcgccccgcctgctggaccacttcatctgtgagctgccggcgttgctcaagctggcctgcggaggcgacggagacactaccgagaaccagatgttcgccgcccgcgtggtcatcctgctgctgccgtttgccgtcatcctggcctcctacggtgccgtggcccgagctgtctgttgcatgcggttcagcggaggccggaggagggcggtgggcacgtgtgggtcccacctgacagccgtctgcctgttctacggctcggccatctacacctacctgcagcccgcgcagcgctacaaccaggcacggggcaagttcgtatcgctcttctacaccgtggtcacacctgctctcaacccgctcatctacaccctcaggaataagaaagtgaagggggcagcgaggaggctgctgcggagtctggggagaggccaggctgggcagtga

SEQ ID NO: 295565 - DNA, 819 bp, Homo Sapiens; identical to SEQ ID NO: 225092

SEQ ID NO: 295566 - DNA, 1000 bp, Homo Sapiens
agttcatactggaaagaaaccctacaaatgtgaagaatgtggcaaaacatttacctgttcctcagcccttactaaacacaagagaaatcatactggagacagaccctacaaatgcgaagaatgtcacaaagcctttaggtgttgctcagaccttactaaacataagagaattcatactggagagaaaccctacaaatgtaaagaatgtcacaaagcctttaggtgttgctcagaccttactaaacataagagaattcatactggagagaaaccctacaaatgtaatgaatgtggaaaagcttttatgtggatctcggcccttagtcaacataacagaattcatactggagagaaaccctacatttgtgaagaatgtggcaaagcctttacctactcctcaacccttattagccacaagagaattcatatggaattgagaccttacaaatgtgaagaatgtggcaaaacctttaagtggttctcagacctgactaatcataagagaattcacactggagagaaaccctacaaatgtgaagaatgtggcaaaagctttacctgctcctcaaaccttattaaacacaagagaattcatatggaagtgagaccttacaaatgtgaagaatgtggcaaaacctttaagtggttcccagacctgactaatcataagagaattcacactggagagaagccctacaaatgtgaagaatgtggcaaaacctttacctgctcctcaagccttattaaacacaagagaagtcatactggagacagacctacaagtgcaaagaatgtggcaaagcctttaggtggttctcagaccttactaaacataagtaaacacaagagaattcatactggagagaaaccctacatttgtgaagaatgtggcaaagcctttatccgctcctcaacccttacaagccacaagagaattcatatggaagagagaccttacaaatgtgaagaatgcggcaaaacctgtgtttctcagacctga

SEQ ID NO: 295567 - DNA, 1000 bp, Homo Sapiens
tgtttccaggcctggcccccacggtggccctgccgcatcaggccctctgctcatcgagcgcgcacacgcggcacaagtcattaagacattctcgacctgcgaccggcaggcacacacccactcacagaggtggcctcatcggagcccagggccgtggccgggaagcgccgggagggtcccagggatgcggtgctactgccccctgctggcagcttctggaacaccgcgggctgatgacaagacagaatacgcagaaaggcctcctcccttcctccacacagctttacaacagggaacattcaggggtgcggccctcagtggggacgtggaactggctgcggccagaataactcccagtttgcagagagggaacgggcagcacagaaaaggagagcagggggaggagggatcctgtatctgggccctgcacctccagggccatactgaagcgtccagctccttctgcgtaactggtgccctgcccctgatgctactgggcctcccctgcaccatgaccccttctccctgggtctccttgcctggatctcatccctgctgcctgcctgccagtctggtctcctcccccactgaaggctctgatcaggagctgaaacttctcatatggaaccagtgggtttcctccccgaccttcacctacccgtctgcagaggagctgaaacttcccacagccccaggtctccaggcactgagcagctggtgtccccagacaactctctttacaactggcactgaaagccagacagcccagcaccccggcagtgaggattccctcccctgccatcagtttgacccacccttgccacataggagccagaccccagagggcatgtctgtctgtgtctttctgcgaactgatctacccaggtgccaagacctacgccagccaagcaagaagctcctggcccagaagttggttgacttagcctctgctccatccctgctggggatccccttaccttgtaccaaaaccattgcctga

SEQ ID NO: 295568 - DNA, 549 bp, Homo Sapiens
atggcaggtgaaaaagcggagaagccgatactaaagagaagaaacccgaagctaagaaggctgatgctggtggcaagaaaggccatgtacaagaggaagtactcagccactaaatccaaggttgaaaagaaaaagaaggagaaggttcttgcaactgttacaaaaccagttggtagtgacaagaacggtggtacccgggtggttaaacttcacaaaatgcccagataatattctgctgaagatgcgcctggaaagctgttgagccactgcacaaaacccttcaatcagcacgtgagaaaactaacacaccggaaacttgtcattgccacctcaaccaaaattgatatcagcaatgtaaaaatcccaaaacatcctactgatgcttacttcaggaagaagcagctgcggaagcccagacaccaggaaggtgagatcttcgacacagaaaaagagaaatatgagaatacagacagtgcaagattgatgagaaagctgtggactcacagattttaccaaaaatcaaagctattcctcatgtgtttgccctga

SEQ ID NO: 295569 - DNA, 987 bp, Homo Sapiens
atggaagctgtgaccttaatagtttatttaaagaaagactaccaaagtgttgctaattgcaaggggcagaaaagcagttacaatggccttcatcaatgtttgtcaactacccatagctaaacctgtcaatgtaatacatgtggcaaagcttttgagttatgctcaacctttactgaacataagaaaatttttagcagagagaaatgctacaaatgtaaagaatgtggcaaaaactgtaggttgttctcagattttactatacagaggagaattcatactgcagagagatgctacaaatgtgaagaatgtggcaaagccttaaaaagttctcaaacgttactagtagatcataagaaaattcatagtggagagaagccctacaaatgtgaagaatgtttcaaaacctttaccttctcctcaacccttattcagcacaagagaaatcatactgaagacagactgaacaaatgggaagtatgtggtaaagcctttaagtttttttcagaccttattaatcataagagaattcatactggagagaaaccctacatatgtgaagaatgtaacaaagcctataggtggttctcagaccttactaaacataagataattcatactggagagaaaccctacaaatgtaatgaatatggaaaagcttttatgtggttctcagcccttagtaaacataagagaattcatactggagagaaaccccacatctgtgcagaatatggcaaagttttacccgctcctcaacccttattaaccagaagagaattcatgtggaagagagaccttacaaatgtgaagaatatgggaaaacctttaagtgcttctcagaccttgctaatcataagataattcacactggagagtaaaccctacaaatgtgaagaatgtggctaagcattgatctcattttcacatcacattagagataagagaattcatactagagagaagctccagaaagtgttaaaaatgtag

SEQ ID NO: 295570 - DNA, 1000 bp, Homo Sapiens
ggacgcaggaccccctcctccagaggtcctcagcagtaagtacgggcggtcgtccacaaaacatgactcgagggggttgcaacattcctttctgcagtcaataaacatggatgtgattgcagacacctcagtacttttgggaaaatttccatattactttttggaatctttggtttacaagataattcccaagaagaaaaagaatgttgctggagagattgtacttacaacgggagctggaagtggacttgggaggcaattggctatatattttgccaggtttggagccattttagttctatgggatgttaatcaagaaggcaatatggaaacgtgtcgactggccaaagaaaagggtggtaagaaagtgtttccctacacgtgtgactgtagcaacagacaagaggtctacagagttgctgatcaggtcaggaaagaatttggtgacgtgaccatcctcgttaacaatgctgacttagtcacgggaaagcccttcctcgatattccagatcacatggtggaaaaatcctttcttgtaaatgccatcactcatttctggacttgtaaggccttccttcctgccgtgattaaagctaaccatggtcacctggtttgtatttcaaattattctgcaagtaaatttgcagcctttggctttgctgaatctctcttttttgaattaactatgataaagaaaactgaagttaaaagcaccatcgtgtgcccacatttcatcaacactggaatgtatccgtttctgttaccaattctggagcaggagtatgtggccaaaaaaattttaaatgctattttagaggaacaagtttatttaatgatacccaaatttgcatatatcggattgattcttaaacaaataatatctccaaaaatgttgattgcctttggtgagtaccttggagtggacacttgcatggcttctttcaaagggagaaagaaagcaaatgaacttcagactgaaactgaagggaaacaccagtag

SEQ ID NO: 295571 - DNA, 396 bp, Homo Sapiens
atgaaaagtactggtcgatattcctgtgggaagtatggagaaaagcactgccataggacagctgagactatggctgagaaggtgtcagtggacagcatggagaaggaggcttttgcagcagctgaggagctggccactcagaagcatgaaccaagactgcacaaattctgggagctgcacctgaaagagactgaagcttggaaattaaatcgccaagaagttttacaccagtatcatttgttgaccaagcagatcaaacctgacatagaaatatattaaaaactaagagaaaaatatggagaggagttctatacaacatctaacagccttcttcatggaacatatttgccttccacagagaaaactgataggacagaaaagcaaattgaaaactga

SEQ ID NO: 295572 - DNA, 1000 bp, Homo Sapiens
ctccttcctccggggacacggggagctggctgaaggcaaaaaagacttagccgctggtcctgtcggatccgccccgcggcggcgccctccagccataagctccacgcagttcaacaagggcccctcctacaggctcttggcggacgtccagaacaggcttctgcccaaatatgactcccagaaggaggcagagctccgcagctggatcaagggattcactggcctctccatcctccccgacttccagaagggcctgaaggacgggattattttatgcacactcgtgaacaaactgcagccgggctcagtccccaagatcaacggcttccgtgtagaactggcactagctagaaaacctctccaacttcctcaaggcaatggtcagctacggcatgatcccgtggacctatttgaggccaacgacctgtttgagagtgggaacaatatgcaagtgcgggtgtctcttctcgccctggcagggaaggccaagactaaggggctgcggagcggggtggacatccgtgacaagtactcagagaagcagaacttccacgacaccaccatgaaggccagccagtgtgtcatccggctgcagattaccaacaaatgtgccagccagtcaggcatgaccgcatatggcacgaggaggcatctctacgaccccaagaaccgcatcctgccccccatggacaattcgaccatcagcctccagatgggtacaaacaagtgcgccagccaggtgggcatgaaggctcccgggacccagcggcacatctatgacaccaagttgggaatcgacaagtgtgagaactcctccatgtccctgaagatgggctacacgcaggttgccaatcacagcggccaggtctttggcctaggccggcaaatatacgaacccaagtactagccgggtggcccagtggcccacggggctccctccgccggcaactgcccagggccaggggaggccccttactaccaggaggagaccggctactga

SEQ ID NO: 295573 - DNA, 1000 bp, Homo Sapiens
caaatgcaggcccagggacctcttgagcagtaatgtggctgagttggaggtgttcctcctgctcgagaaccagaagaaggagcccacccaaaaggcagaaatgctgaagcacatcatccaacagcacatggatcatttccgtgaggccctcagcaaagcctctgagagcctggaatgttttgcgcaacaatatctgaatttgaggcagatgcccaacagggatcctatatgctacaaattcctgtggggccctcatgaccacactgaacccaaaaccgtgtacattttggggtttgcagacaagattattcacgttgacttctggtcctacaggtcagtgtgcaaagaggtcctgagagaagatcaggacaaagtccaagccaggatttcagggaataggggaactaatgccatggagtgtgcaggggccagggccattgccagtgactcagtaaaggtggacatggcccattatgaaagagaaatgaaaatctatatccctccaaaagcagagaccaaaatgaagttcgaagatcccaatgcacccaagagccctcctttggcctttttcatgttctcttctgaggattgcccaaaaatcaaagaacatcctggcctatcaattagtgatgttgcaaaaaaactgggagagatgtggaattacattgctgaagatgacaagcacccttatgaaaagaaggctgtgaagctgaaggaaaaatatgaaaaggatattgctgcatttggaggtaaaggaaaacctgatgctgcaaaaaagggagccatcaaggctgaaaaatgcaagaaaaagaaggaagaggacaaaatgaggaatatgaaaattaaaaagattaagtttcctatgtattcagcactcacaaggctaggagatcatgactttctgaaaatccctaagaacaaagatgctgaactcaggatctggtcctataatcgaggtccatcttcaggcctgttagatatttgtgcctaccccaagtag

SEQ ID NO: 295574 - DNA, 891 bp, Homo Sapiens
atgagaagtatgaccacttctcctcttgtactgcaaactctctggccccctaatcaaggttatccatccatgacaactttggatcatggagatactcattatcacagttcacaccatcacttccatcgtgaaaaatccagatggtttcttaataggaaactgtggtatgttagtcataccacagttggtgctgtccagattatcattgctgcaaacactgacaccaccaaggctatggggaaggtcattcctgtgctgaatgggaagctcattgatatggttttctgtatctccaacatgtctgtcatggacctgacctgcattctggagaaagtatacaagtatagcgacatcaataaagtgttgagtcaggcattggaaggccccttagaggacaccctggcctacgctaaagaccaagttatctcctgtgactttaacagtgacacccattcctccatctttgatgcttgggctagcattgatctccatgaccatattgttaagttcatttactgggtattgggggaaatgctctttaaaaatatacagctagaacaaggagggatgcctgactcaattaaggccttgcaggtgactgaccacagagaagagtttggacaaggcacagtagcacaaatggtcctctcatcttttgctgaccttttccatccaggttgccactctgatctgcacagttatgctggacatgtgaactataggaaaggccagcccctgaagaatccaccagagataaggcagtggaggataggatcagaaattgtagccggttcctggaagtctgtgctgcactcagcacggctgggtggaaataagtgtgctaacttggctgcaacagctcctgcatggcacagagctgactggccttga

SEQ ID NO: 295575 - DNA, 1000 bp, Homo Sapiens
ggttcaagaaaataattactcatcaaagatttgtactcaggatcctgagcgtaaacgaggaaaagtagattatgccaaagaatgtactaatgggtttgaaactcattgccaggagacagcccataaagctggtggtcagctgtccccaactgatggaaacagctgtctgttggaaaagactcatagttatcatattgaagattccaaatccacaaggaaaagccaagtgtccccaccccatgagtcaataggcttaggtttacagttgacagatttcttagaggaaattagtagtgattctgaatgcttcagtgaaacccttagtataaacaaagaggagaaagagaaatctgtggccacatttaatagtttctcagaaaaagaacctcttgacactgacaaaatgatcactcgcaaacaaaatacaaggtcgagtcagcagacctttttttcaaagtggaagcgtgatggtgaggaaaaatactctaattacaagtttaggacaccaggtaggaagtctgagtatgaaccgagatggatatgttcatggcctaggggtgaaagtcatttcattagacatgaaaacaacaatggacaaatgaagggacaactagcccccagatacttgtttgatgaaggctactaccaggaacccagttccagttatctaaagaggtttagtgatagtacattggaccagaaagtgaactatgggccctctcaggtgcccgtaatgtcatcaagaagtgctaggtctttctattttggtaattttcacggaagaagagggactccttggaagtcagaatataaccagaattcaagatttagaggatgtaattataactatttgaagttcaattctgattattactataatagacataatggtcaggagtatattgactatggaagctattcaggaaataactgcactggttctttaaattttaaatgttttgatgaccacttagatcaggagtatcctttttcacaataa

SEQ ID NO: 295576 - DNA, 1000 bp, Homo Sapiens
gataaataatggccaaccagcacctgataacttcttgtcatccgttacaccagggcttattaatgtgtcagtagatggtattccacccatgagtaccagggatcagtatgttactgtcactcacaatgcccatgaagagaagatggaaaatggccaacaagcagctgataacatcttgtcagctgttccactggggcttattaatacaccagaagctggtattccagccatgagtaccaatgatctgtatgccaccaccactcacaatgtccatgaagagaagatgaaaaacaagcacctgataactccttatgctactgtcattcacaatatccaagaggaggagatggaaaatggtcaaacgcctcctaatggcttcctgttaaattctgctccaccagagcttataaatatgacaggagatcatatgccacccaacgcattggattctttctcctacaacttcactagtgacccaccagtcacagcaatgtcttcagtggaaactgtgccaaatataccacaaatatctcctgccatggcaaagaaaattaatcatgatataaaatgtcaattaatgaaagaagtttgaaggtttgggcaaaaactacaaggatctatgaaagtcaagagacaatttgttgaatttaccatcagggaagcagcaaggtttaaaaaagttgccttaattcagcaactcgagaaggtgcttaaagatataggttcctactgccatctcagaaaagttaagcacatgagaaaaaaaataattgttttagtgcaaagaccaaggagaaacaaggatacacgccgcaggatggaacaggttattactgaagctccctataattttgaagcgaagagaattcccttccaaaagctaagaaaaaaagaggctctccccttggaaactgcaacatcgaggctccagggcctgctagcaagctctggccttgtagatgacagattccggtgtcccaggagcaccagtccatcctaa

SEQ ID NO: 295577 - DNA, 1000 bp, Homo Sapiens
aactggtctgacagcacttattaatatggcagcggctgatattccggccatgagtaccagagatctttatgctaccgtcactcacaatgtctatgaacagaagatagaaaatggccaaccagcacctgataacgtgttgttgactcttccaccagagcttattaatatgacagccactgatatttcatccatgagtaccagggatccgtatgctaccatcacttactacgtccctgaagagaagatggaagatggccaaccccaatctgataacgttttttcaactgctccaacaggtcttaatatgacaggagctgatattccagccatgagcaccaatgatctgtatgctactgtcactcacaatgtctgtgaagagaggatggaaaataaccgaccacaacctaataatgtcaggtcaactcttccactacggcttagttatttggcaacagctggtattccagccatgagtaccagggatcagtatgctactgtcactcacaatgtccatgaagagaagacaaaaaatggccaaccagcacccgataatgtcatcgcaactgttccaccagcacttactaatatggcagcagctggtgtttcatccatgagtaccagggatcagtatactgcagtcactcacaaagtccatgaagaaaatataaataatggctaaccagcacctgataatgtcttgtcaactgttacatcagggcttgttaatttggcaggaggtggtattccacccatgagtaccagggataggcatgctaccttcactcacaatgtccatgaagagaagatggaaaacggccaaccagcacctcaaaacatcttatcaaatgttctaccagggctcattaatatggaagcaactggtattccatccatgagtaccagggatctgtatgctaccatcactcacgatgtccacgaagaggagatggaaaattggcaatgccaactagataacgtcttctcaactgctgcaccatga

SEQ ID NO: 295578 - DNA, 645 bp, Homo Sapiens
atggtccaagggcaatggaaggaagggaagcctcaggacaccgcgtgccctgctccaacagaacacggggacctgtgcagggcgccagagtccctaggagaaggctctcgctcagtgggtgccagcctagagaaccaggaagcgcagccctccccttcgctgactctggcgccctctaaaggcggcctgtacagcggactgtacagccgacttataaatcaaagtgttctagtaacacacatagttaattatgaggactatctgcagatacaggcttctccacttcaaacgagtcaaccaactccacctgaagaacttcatacagttggctacgtgtttacaaatgatgggcagcaaacaaggagtgatgaagtaaatcaggttgcaacagggcatcaaagcaaacagaaacgttccagagaatccaagagacactcttcatctaagagaaggaagagtatgtcgcggtggttaaacaaacaggaagatgctgcagtcactcacatcgtctgtgaggagaagataaataacgaccagccagcacctgataatgtcttgtcaactgctccaccatggcttcgtgatatggcagcagctggaatttcatccacgagtaccagggatctgtgtatgtctgcttattag

SEQ ID NO: 295579 - DNA, 798 bp, Homo Sapiens
atgcacaaatgtttcttcttctttgaaatctgggaattccctcccttcctgcaaccctgtgcccaacaattctatattcatggcaactatggtacaccttcactggcagaagcagcatgttcactgaaggatgaatctaaagaggaggatgtggctacttctgggatgccaagtcctccccagagccctccccagattcctctctagagtcctccaagctcctgctcctcctcctctacttcgtggagcacacctgatgaagactccagcatccaagaagaggagcagacttcaagcacctttatctatttaaggagcccatcacaaaagtggaaatgttcaaggttgtcaaaagatacaagaactgatttctccctgcccttcaagggagcctccaagtgcttggaggtggtctctggcattgacatgaaggaagtggaccgcatcagccactcctatgtccttgttaactcgcgggacctcacctatgatgagatgctggctgacagccagagaatgctgaaaaatggcctcctgatcattgtcctgggtgtgatattcatagagggtaatggtgcctctggggaagacatctaggatttccagaatatgctgggcatgtatgctggaaaggagcatttcatctatggggagctcagaaagctcatcaccatagattgggcagctaacagctcttcagtatctcaaattttgcatagcaaacacagcaaggtgttggaggcaatcttgcgcctaggtactcagagggcaaatttccatgatgtatcctatacctaa

SEQ ID NO: 295580 - DNA, 795 bp, Homo Sapiens
atggtgagggtcacacccactgctggacagtgtgagtcaggggcagcctggactgatgccatggcatttctgcttgctaaagatgccagcctgcagagcctggccaggaagatctcctcccagccagcccagagtcagaggtgggtatgtgggctggcaaaactcaaggctcagaaacttctccagcagccatcttgggccaggaagcctgaggcagacaaaaaggaggcagattcagcatccagctgcacagggatccctacagatgtcctggccacagaccttgagtctctctttggcctggatgttctgcgactgcaacttcatgagaagatccaggaggcctggggccagggcagtgccaaggagctgtcccctgctgccctggagtaaaggcggtggagaaagagggaacgggactggcaaaagaagaagcgagaggagctgtggacagaggatgtgatgatccaccacgatgattgcctgctgcaggaggccctgaagcccaaggagaatcacagcgcccagcagcacagcgagtgggagaagcgcaactcaggcgtggtagagaagatgcatcagtgccaagacctgctggcagcagaacctgcacaagaagaaggtggcccacatccagcaccgaatgctcagagcccacaagaactgtatcctgctgcaggacctggagcttgcaggcctagcaggagggcctggcctggcccagcctgggcctttcccatgttgggctgccatcttccatcttgtgaggctccaggggaccctctcaatccttga

SEQ ID NO: 295581 - DNA, 855 bp, Homo Sapiens
atgttagagcagcatggtgctaactcagcaggagcacggacagaagagaacgcaaagaaaaactgcatgagggtgctgttaccaactacacagctgaagatgcaagaaggctgtaatttttcattcaattttggcaaagaaaacctgacaggtgaagtggaagaattggaaaccctgggagaaaatggccccattgccccaggaagggaaggcaggtttttgaggacggagattccccctcatcttggacctgcatcctgtcctgtgcactcaactctggccatggcggggcgaaggaggcggcctgggaggaagctgatgatgggaggaagctggcgcctactgactcaggaatacacaactgcccctcgtcggggacagtccaacttgctcctcatgtctgacgtgttgagtcaagatgagctgcgagaaaagctacaccaaacgttgaaggatcgggtgcaagggaactccctcttactagcagcctctaactcttcagtggccgatcactaacaaagatgtggctatgagtcttcactttctgttttctttccagaaattgctgacaaccttcagcttattggtgatcaactggcagatgcttatcctaagcatataaagtttgagtctttagaaataaagctaaatgaagataagagagaaatagaaaagcaacttctggcagaaatgtgtcaaaagaaaatctatgctcaaagccttgttttactaaaagatatagatttgttaagaggaaaaaaggcaaagctaaagcagagagttgaagcttttgaattatgcatatgcatgtttatcttgaatcttcggaatgatgagattaaaaagaattactaa

SEQ ID NO: 295582 - DNA, 751 bp, Homo Sapiens
agacccagactgtgcaacccccaaagcaggtctcctcactcaccgggatagatagaactatcggccccaattcctcagccctacctgcaaccaccgcttgccatggtttccttgtgggtggagggtactttcccgccccctggtttcgggcttgcccacgtggcttgctctggccatggaatgaagcagaaacgaaagcctgccagttctgagcctacgccggaagacgccttgggcggttccgcggtccctgtgcgcttccaccttcacccagaaggacttctctggtgcagccgctgcttcttcagccacggcccaaaaggatcggagccccctggccgatccgcaggtctgcagggagccacagagcgcagcggccggcccagcgttcaagcccaagcacaggcctgcgagaaccttgttccagccaccgtttgggatggttgattaggacttgttgctgtggcggtagctcaccaatccaatgcgtgcacccgctcctttattaggctatagggccagtggctgcgacagggacctgatacaacagtgcgttaaataaggagcttattgagctatcatgtcgtaagccggtggagaagtccagggctagtgtgggggctccggcgggggctgtggcccccatccgcatggagcctccccacggttcacaggtctcggtcttcggagccttcagccccgtgagcccgaacagtccacacggcggcgccagaccctcttcccaacgcca

SEQ ID NO: 295583 - DNA, 1000 bp, Homo Sapiens; identical to SEQ ID NO: 220465

SEQ ID NO: 295584 - DNA, 1000 bp, Homo Sapiens
ttttactacagcaatcatcagttgtaacatgctagatcatttatttatttactgtatgtatttttcagtgtctaccttatcttagtagaatgtcaactccaggaaggcagtaaattttgcctagttttttcactgatatatcccaaacaccttgaaggtgtcctaacatacaataaacactttataaaagtatattgaaaacattagccaatgtttgttaatgaagtccgtatatctatgatgtaaaagtgtatatgtatgcatatgcatatgtatgtatagaatggttttaatgagttaaacttctgtgagtaaacatacttgattgttagtgtaacatgaaaattgcaaagtcagaattttctaaatgaaaggtcataaagcttctttagtaaatgttaatttgtttcaaagtattttaatagtgatataaaatcctagatgtgttcaattgggttgagataatgatattggagaaaaattataattttcttgatgcccaagcccttccatctttaattttaatacttacggcacttcattaaaatgcatgctgtatttaattttccaggaaattgtacagcataaaagaagaatgtatattcaaagcaatttccagtcaaactagttgaaacttttagaatataagccaatagagcctgtgtcttttctagatgtgaggctgttcttggcacatttgcaggggtcagtgtagcttctgagctacctttaacccttgctcggtgcacctatttcctaagacctttatcacattctgtaccctttccaaattgccgataccaatttcaaatccccagggcagacataatattctcataatatctgaccactgctaacagctgtgggaagaaaacttgctgtttttagagcctctgcttcagtgtacatatcccattttcatccctcgtttcttaaaagaattatattgctgacaaatttaactttgagtccataataaatcttggaaattttttctggc

SEQ ID NO: 295585 - DNA, 1000 bp, Homo Sapiens
ttatggaagcatgagaatgaactaatgcacagggtaaaaatttaaaaacaaacatacaaatgcaagtaaacaagccaatatttcaactgttcccattgcattatccttattctttatctatggtaccagaaaataatacatctgaaacaatttttttttcctgccatgatgtacactcaagtgggtccactggggtttctttcagtttcccaaatactagatatgactcttccctataccttatcttcatatgaagaaagctatgagaatatattaataactgaatatagtaacactactataggaataagcatgtgtatattccaactgatcttttaaaacttttattttgaaatatttatagattcaaaggaagatgcaaagagtatagggaagtgctatatgccctttatctagttcctctagtggtatcaacttacataactgcagtatcatatataaaccaagaaattggcatctgtataatccacagacattactcagacttctctagttttacatacactaatttgtatgtgtgtgtgtgtgtgcgtgcacgtttatgtgtgtaggtctatgcaattttaccacatgtgtatatttgggtaaccactacaatgatcaagatatggaactgttccgtcaccactaagatcccttgtgctattcctttataaacatctccctgtcatcctttttcacccataaaagctagtaaacactaatctgttcttcatccttataattttattatttcagaattgttatataaatgtcatcatacagtatataacacatagagattggcttttgtcactcagcacaattcccttgagatgcatccaaactgttgtgtatatcagtaatgcaatatgtttaatttctgtgtagtattccatggtagagatgtgccatagtttaactattcacctgttgaacaacatttgtgttctttctacttttgggctattacaaataaagttgctatgaacattcatgt

SEQ ID NO: 295586 - DNA, 1000 bp, Homo Sapiens
cctctgaaatgtggtagatctttttccaaaggaagatcttactaactctcagtgtaaatctgtaccttaactttatcactgtttaaaacccatctctaaataacataggccaagatctccaaaatcgataatggggaaactgctcaacagcattccagaagttcttaaccataagagtgatgctatagtagaaagtaaaccgtgaggcatcatgcatcttgactgaaaattccaccccacacccactgagctaatctggagccgccatagaagacagggaagttggaagtagagacctttgcgtaggccatcacccctcgccatcaatcaaaaggaattctgtgagcttctactgagagcctagagctctggtcagcagcacaaagacagagccaggcagaaacaactccagagccacacctcctctgaaagacaattgtcaggtgagattttcaaataaaaccactggggattatccactatctccccaagaaattcaaatgtttagaaatataaacacaacacatactttttttcagtattttataaagttcaacagttttgatgataatcacatgtatgccaaatgatttgtaaagtgtaaaatttgaaaaagatcagatattaaataacaaattgaatgagaaaatacgacaacaataaaaaaaagttttatgaatggactaccagtttttgcttttttgaaaagaaatattacaataaggttatttgctcaaataaaacctacctgacactcttgcaaatgtttagggagggaaagtgtgtctccctttatatttactgtttctctctgaagccaatttcatttttttcaacatcctggccatctgcattcatataaagtggttattttcatggataattcaccttatatatgaaatataaaaggtatctggaataaattcattgcaaaattgatgttacctgttaaatcttcctagtagtttgttttcaccaaaataaaatgagtgagatttac

SEQ ID NO: 295587 - DNA, 1000 bp, Homo Sapiens
gatggagcctagatggggcagccttctaatgctcccagtatttcgcaaatcatatgtcacgtcaaaattgtaatgacaaagctcacagcagctgcctacgccaggtttggtgccagctctaattagagcattgatcatttctctccccttcatgaatgcacatgagtgcacattttcatatataagggcaaaggacatttcaaagtttggatggaatctttcctacttagaagtaataaaaaacaatactttgaaatcttaccaaatgttaaacaaatagcaacaatttttccatttgaagatgtgtgtcttaaggtctgttggatctttcaaatttctattttggacatggaaactacagatgaaatttaacttactcaaagttacacagaactcctggctgatctcttttacttaattcttctaaaatctaaagtaagaataattttgaaattttattggtaatgcttaaataacaaaagttactttaatatgttacatgtttgaagtttcatttatacttaatatctaatttaacgcttgtgaaaatattattcagtatttttttttcttttctaaaatgacttgttcagggctccttttgggattttaagtgagaaaaactctatttcataatattgttaccatgctcatccaataacacttcatagatggttagccatctctaaaattaaattttgtagttgaggagcattgaaaatatcacctatatttggatttctgtttaacacttcaaaatgcattttatcataatttaaaatttgatttaaatacaaacctctttatagaaaacctgataaatgtagttttatttgtttgcttgcttttttttgcagggagggatattcccttgataccactctgtctttatgactcatcggttatttataaatgttatcatcgtttttctgatttttaaataagtttcagaattaatacatttaactgaataaatcaaccaataatgtcaaacttaaaa

SEQ ID NO: 295588 - DNA, 1000 bp, Homo Sapiens
tgtatttggtcagaccatgcatatgacagtcacctcctcacctctgctccttgccctctcacctggttcccccttgccagcctacatttgaggactggatccaagagcaagacctaacatttctccctgtcgtatttactttgtaagcttcagcccctccttctagtctgtcaggaatgggaatgtttttgaaaacagactctgaaagccaatgagatgtgctcctcctgcccacagttggacccaggctccatatttgatcagtgaacagccacgtccgcacatgtgccacaaggcatttgtctgcaaattcatccggagaccttgacagatgcctggaggtcagaaatcagcctcctctatgctgccatgtggccccaggagcctgaaggaaacaccaagtacatctagaagttgatggttgaccgatgggagagggggcaagatgccagtcactcagtcagccaacctttcctgaagattgttggaggctccaagtgacataggggataatgcagagaacattcagagacatcatctactgcctgtgcgctctggaagtttctagtctcacaaaaaggaagaccagggaggcccttaagaaaatatagcaggctgaataatatcccccaaagatatcaggtcctaatccctggaacctgtaaaagttacctgatttggaaaaatgatcttggcagatgtgatcaagttaagggtttctaaatgcaatcacataagagggaggcagaggagacttgaaacagatggaaaaagaaaagaaaagaccacgtgaccatagaggcagagattggagtgaagtggctacaagccaaggaatgctggcagccacagaagctggaaaagacaaggaccagattctcccttagagcctctggaaggagcatggccccatcaacaccttgattttggcccagtgatactggctttagacgtctagcctccagatccgtgagagaatacatttttgttttcttcagcc

SEQ ID NO: 295589 - DNA, 1000 bp, Homo Sapiens; identical to SEQ ID NO: 225095

SEQ ID NO: 295590 - DNA, 1000 bp, Homo Sapiens
acatatatgtttgtttatattaaaatgagcatatgaatatttctgtatacttcagataaacattcttttccataaataagcttcatcatccagaagccatgttgaaagttggtaatcaaggataggaagtgtttccaagggttgtcagtgattaaatcaaccttaccttagcatacatgtatgagagaagttagataaattatacatagagagatagctagatagataatagataaataaggtagatgacagattagatacagatgataaacagatatgctatcagtctagatctattactcacagtcagtcgtatcacagtgtaattccatcaacttcatttgcagcaaaagaacagcccctgatgtacgcctgtttcctgaatatttggaaatattaatattaatatagatagagtcagcttgccagtataaagaatctatctctcactataggcagagccatgtgttggatattatggaggaatatgtattattttaatcgtttaaaagactaataaacttctaatctacttttgggagcctctgctcaagttcctgaggttcctactctaaaatccacatcaccctccaactgctccctatgtgagccattagggagcacaatgaattagagaatgaatcctattagcccactaaaaaattatctttcaaaggatgaagactgatgctaaggaaaaagagatgaggcctccctggttccgcattattactccttcctttcttgggttacggattgaacactgaccttttctttcactcttctgcaagacaaccccataagaaagctgaaacctgcttttgtgaaagcctatgattactataagacaggcacagagcaagaaaatgtttgaggcttgtgtctataaacaagacttggctggaatccccagacccacgactttttaaaaggatattttgtccctgcaatacagatactgaatgaggttggcaaataaatatgtatttctagagactct

SEQ ID NO: 295591 - DNA, 1000 bp, Homo Sapiens
ccgattcagccccaccccgccctcggaatccgctgcctcagctcctgctgtggcactccccagcagcttgcacctcgctcgcggagtccttgctgaaggccagggcagctgtgcggcctggcgcgggttacttgatgccgtgcaaaagccaggagacacatttggttctggccgccccggagtcaccgtgcccggggcgaatggactatggctggattgggagaccacttcctcctctgtaaagatgacagacgagggagatctcacgttctgggggtgccctatagccctcttttggccagaagcggtggatcacgcctgtaatcccagccctttgggaggccgaggtaggaggattgcttgagcccaggagttcaagaccaatctgggcaacatagggaggctacgtctctcaaaaaataaataaatacataaataaataaaaataaagccagcgtcgtggcggggcgcctgtggtccctgtggtcccagctactctggaggctgaggcgggacgatcgcttgagcctgggaggcagaagttgtagtgagctgagatcgagccactgcactccagcctgggcgacagagcaagacactgtctcaaagaaaaataaataaataaaataaggccctctttttccgggaccaacagactctgagggcagggacaaactgacccagcctaaactgcctcgccttccctgctcccgggaaaggggttttccctgagggaaggtagcatcttgccattttcttcctgcacagctttgccttcccagggatccacccattgccacctgaggaaatgccttggagcccatctaatccccagcccagctacttgggacgcctacagagactacattgtcagaggatgcatcttcctctagtcttggagggtttcttttcaatatgatcccaccggtgcatgcaaggctcaattctacatcaaaaaactaggcccactcctgtcgccgagacccccaggcttcaggtc

SEQ ID NO: 295592 - DNA, 804 bp, Homo Sapiens
cgggagcaaagatgacccggaggaccgggggaggaccttcccatgcgcacgactcgcgatcttcccagtgccccagagccacggacccaaccgccgcctaccccagcccgcggcaccaaacctgttcacaactgcgactccttaggtccgcttggacaccgccggaaacggaaattcaccctcgcgccgactcgccggagggaaacaaaaaggcagaaaaaaagggaccgccgcctggatgactttcaggggacagctggaagaaagactcgtcaacggccgagtgctggcgccggcgccgtctgcgcagtgcgttccaccgggtccgcgtccctcccgattcagccccaccccgccctcggaatccgctgcctcagctcctgctgtggcactccccagcagcttgcacctcgctcgcggagtccttgctgaaggccagggcagctgtgcggcctggcgcgggttacttgatgccgtgcaaaagccaggagacacatttggttctggccgccccggagtcaccgtgcccggggcgaatggactatggctggattgggagtccacttcctcctctgtaaagatgacagacgagggagatctcgcgttctgggggtgccctatagccctcttttggccagaagcggtggatcacgcctgtaatcccagccttttgggaggccgaggcaggaggattgcttgagcccaggagttcaagaccaatctgggcaacatagggaggctacatctctcaaaaaataaataaataaataaataaataaataaataaataaataaataaataaa

SEQ ID NO: 295593 - DNA, 1000 bp, Homo Sapiens
aacagcctttccagtgagtttaattcgtgtgcgcaccacagcaggaggccctttagaaactggatctcatttcattctcacaacacccaggaaggctcatagctgccattcatatagatcttaaggtgggccagacactgttgcaactacattccacaaactaatatatgccataactctattgtggggaggaagctagaggccctagaaagttaggtaacctacccagggtcacacagccaggaagcaataggaccagcatccaacagcctggctccaggtccttactgtgtgcatggccacctctctgtcctgcaaggtagtcactactgtctacatttcgcagctgtggacaccgaggctctgatgtttagtgataggctcaacgtggcagggttgttgagtggtagagccgggctatgaactgacctgaggggaggctcatgtctgagtcaggttccgccccatatcctgctgtcagagtgatctatggaaacacctgcaagtgcatctctctacagtgcaaaatgtcacacagcaggtccttgaataacgtcatttcattcaacgtcatctgaacactgagtgagaaatgacgatgctgatcagaaaaaaatccattcccggctgaggtcactgtctgtgtggagttggtgtgtgaaaaatggcattggtattttttttagtaattgcatcgaatctgcagatggctttgggtagtacaatcactttagcaatattaactcaaccagtttgtgtaaatgggatgtctttccatttgtttgtgtcctcttcaatttctttcatcagtgttttatagttttccttgttgagatctttcacctccttggataaatttatttctaggtatttcttttgtagttattgttaatgggattgcctttttgatttcttttccagctgttattattggtgctactgaattttgtatgttgatttaacaatttttttaaattataataaagatgagcatctcact

SEQ ID NO: 295594 - DNA, 588 bp, Homo Sapiens
tctagttctctaatggatagctgtacattatattcacaacttacaaaatctgtccagcaagataacagattagaagacacttaacattgcttcccccacaaaggtataagcagtaactattcaaagacaataaaactaccctgaagttactagaacttgagagagaagcagaggaactgatggagcctgcagaaatgagagaagctgtgactgataaatgacgattttagaatctgccacccactaccccaagccacataacagctcacagaaaatttctatacatttaggatgtctgagttggaagaaattcgaagttgaaaataaacattcaatttccctatcagttgaggaggcttcatgggaagtctacatgggtctcatcccatggaaaacactgagagttccaggagggctgaatgacctgagtgaactgaagatgcattctgctcagcaggaatgccatgctgaggagactgtcaagtctcatagcactgcagaggttatgagccctggaaatgcctgagtccttttttgtgtttatgtggcaccttcccctgacccagaagcagctgaaatatttagtaa

SEQ ID NO: 295595 - DNA, 1000 bp, Homo Sapiens
aagctttaccaggtcaaaccggagaagaacccaacaagtaactcatcccagcctaactattcttcaagggcaatcaacctacagcatccaagcacagagaaatcaaatccatggagaatcttcaaattaggctcagaatccatttgggtcaatgaatttactgttattaagatcttagttgtgttcaaccatgatttgacataccttagagtgagaagatattcttcctggcctcagactagttgaaggtagagagagagacaggcccttgggtgtggggagacctctcctgggataatacacacaaaaaaccaagagctgctcactgtggtgcaggagacagcagggcctgaagccagaggctctgtgtccttgaatacaatgttttactcctctgacccctgttactgtgatttggagaggcagacaatataggatgggctttgcaggcagggaggtccagttataatcccagctcttactaagttgggtaagactcactctgagacttagtttcttctgtcatctctcaatagaatcataaaggtactttcctcttagtgttgttttaaaattcagtaaaataatgcaggcttagcacagggtctgatgtaaattttcaatgaattatcgttgtcaatattgttctggaaaacaagagggcatattagaagatcaaaagtactgccaagcattgaagtgccaattctagatccagtctcagccctctgagaatggatatcattgttttcaagccattcagaaaccaatgtgaattgaacacctagtatgagctctctgagggaagagccaagtcatgcattttttatcttaaggggtcttcaatacctctagcccaaaacagtatctccatcaggattcttctctgatagtgttcatttcttttttctcaatggatgccttaaaaaaaaaatcctacaaggaaacctgtactcctcaaatacaccactcaggtgaccattaaatcatttacattgtt

SEQ ID NO: 295596 - DNA, 1000 bp, Homo Sapiens; identical to SEQ ID NO: 225098

SEQ ID NO: 295597 - DNA, 768 bp, Homo Sapiens
atggaggaaaaagcagtgcctgagcgggcaccgaaggcactcgagggccctgtgctctttggcaagtattggcattcacgggaagaaaggagggcacgtgattctgccttggaaggtcataaagacaaaaggttggccttccctggagcaaaacatagaaatatgtcccctggggccgtgtcatatgccagtcctactagtctttgtttattttgcagcgcaggaaggcggaagggaaggcggagaccggcaagagaggggagaaggcccggggaagacgctcgggaccaagatgcggggcccgggtgcgagcagctgaacctctcggcccccaggcgtggtgacctgggtggcgacgctcgtggaggccgaggagcttctggaccggcgcttcgggggaccaagtggagaggctgctggagttgtcgcctgagtcctcccttagttcttcgcgccggcctcgcccacggctccgggtcccagccgccactgcagtctccgcagcaccgagcggggctccaccgactcgcgacctccagcctccgcctcaagggcagggagcgcggctggtcctttttttttctttcctgctgccatgagcaggtattcacaaacttctcctcctggctagtgtgcttcatgacaaagcaaagagattcctcaatatcgatcacagcaaatgtttcactatgttggggtgatccgagccttcatggttcctactttgtggatggtgtctggaggagatctgctgagtctcatcaatga

SEQ ID NO: 295598 - DNA, 1000 bp, Homo Sapiens; identical to SEQ ID NO: 119369

SEQ ID NO: 295599 - DNA, 548 bp, Homo Sapiens
atgagggagcagagctcagggagcgggaaagcagagagcgtgcatgtgcgcgagggtgggggattccaagctgacctctcccaaggcccatgcatcacaccaggcaggagttttttcatctgcacacaacacggactggctctgactcccagctgccctccaggcaggagctctggttccaacagtaacactggctcctcaaacttccaacccaaggaacggtttctgccaagaaaatgtgccttaggagatgagactaccagtggagcagaattccggcagttctccaggggctgcctgtcacgagggcactcaagctgcctgcagagaggcccatacggggagcatctaaggtcccgccaacagctggcaccaacttgccaaccatccgggaagaagaccctccagccccagtcaagcttgcaaatggctgtggctctggctgatgtctcaactgcaacctcttgaaagactccaagccagaatgttcctgaatttctgaccccccaagactgtgagatatattaaatgtgtattgttattttaaa

SEQ ID NO: 295600 - DNA, 1000 bp, Homo Sapiens
aagaccccacactccacggccaccagctcccttccggagacggcgctcggacgtcgcgggtcacgggcggggaatttagcccaggtgctcgttgggccgcgagcggccgctgggcctggattcccaggctcgctgtgcagactccaaccttgagacgtcaggacggcgtgggctccgggccgccgcgcaagcccaggaccccgagtcgcgggcccccacgccgcagcgcgcctccctcctcgagacccggggctccgacccaacacagggcttctcaaatgccccgggcacagcactgctgcaacttgcagcacagagggcccttccctgcgcacccacagcggtcgccgcctctccggcacggtctcccggatctggatttggggagcgcaagtgccccctgtggccggcccgcgcctgaccccgcgggcctgagaaggcagaagcggccgctcctgcgcagccagcgggtaccgggagctgcggccagcgccgcttctttcctttccttttctctccgttttccttctccttccccggaggagaaaacaaataaagaagagcaaatagccgggaggcgctcggcatccaggacgttccctcccccgatccaagttggaattagcatcctctcgggggtggctcgggagcggcccggaggagccggcggcggcccgaggagcgagggaccgaaccgggagccatgccgcgctgagggggggccgcacagccgccgccaccgccaccgccgccgggtggggtgggaggggcgggagacgccgccgccgccgcctccagggtgggcgcctttcgccgtggacgccgaccgtccgggacgagggttcatagtggcgtcatgcacgcagactcctgcaagttcccctaagttcttagaggactgctttgccttttgatctgagagttgcaaagttccataaagaatggcccttgtggataagcacaaagtcaagagacagcgattggacagaatttgtgaagg

SEQ ID NO: 295601 - DNA, 1000 bp, Homo Sapiens
gttttaactggacatggtggcacacgcctgcagtcccagctactcaggaggctgaggcaggaggatcccttgagcccaggaggtcgaggctgcagtgagctgtgattgcaccactgcactcaagcctgggcaacagagtgagaccccaacttgaaaaaaaggggacatcgggatgttcttgtgtatttttcatgttgagcgcaatactgtaaaccttgaagaacactttgggacccatagagtgccaccagtcatgccaaagagctcctgagaagcagagaaaagtcatgacatttcaagaaaaagttgaatttcttgatatgttccgtagattgaggtttacagctgcggttgcctaccaattcaagataaatgaatccagcgtaaggaccatagtaaaaaaataaggaaatttgtgagcaggcacaaaagccttaacactttctgtgaaatacctttttatcttgtattgggaatgcagcttttatgtgggtataggattgctgtgtgtgatggttcatattaaatgtcaacttgattagattgaagaatgtaaagtattgtttctgggtgttgccagaagagattaacatttgagtcagtggactgggagaagacccaccacagtgtgggcaggcaccatccagtcggctgccagcatggctggaaaaagcaggcagaagaaggtggctgaagctgactggctgagtcttctggccttcatctctctcccatgctggatgcttcctgcccttgaacatcagactccaagttctttagcttttggactcttggacctacactggtgttttgccaggggctctcgggccttcggccacagactgaaggctgcactgtcggcttccctcctttagaggtttggggactcagactgagctactactggcttccttgcccctcagtttgcagacagcctattgtgggacttcaccctgtgatcctgtgcctcagttctccttaataaactccatttcatatg

SEQ ID NO: 295602 - DNA, 1000 bp, Homo Sapiens
ggtcgggcaggtgtgcgtcagcgagctggagcaggccagctgcagaaaagagatcgcgttgaaaaaagagaaaaataaggagcctttattagaagaaagcctgccagcactgaatgagcagacacttcctgtccagcctggggagatcaaaccactggacgccaaggacaagattttgaagatgaatggggagaccgggagggacctggatgggacgtcctttccccacctgtggatgctgaaggcagaagttctgctggagatgaacctgtaccagcctgcacggctgctcctgtcggaggcttacctggctttccaggagctggatgagccttgtgcagaggcccagtgcctgctcctcctcgcacagttggccaacaaggagaaaaactatggacaagccaagaaaatgatcgcacaggcccagcacctgggcggaagtgaggagttctggtacaattccactctgaccctggcagaggcgctcttgtccatggaacactcaggaagggaagctacggtgtgtcacatatttcagaagctcatcaatgccttcaagatcctcaagaaagaaagaccaaaccgattgcctttactggaattcatgatcacagatctagaagccaggtgcctgagcctgcgggtcagagttgcgcagcactcagcggtcactgaacccacagagtgctcgttgctactgaaagagatggatgatggcctgttggaaattgagagaaagtttatcgactgtggctgcaaagagaattgtgttgacgtaaaactagagcgtgcgaagatcaagagccctgcggctgcccacaccttcctcgagggcatccacattgggccttgcacctccagcccttggcagacacgcacagacatacagcaccacccacccccaccagccacaggcacacgcgcattgcacacacatgcccaggcccaggtcacacgtgcacatcccgagcacagccctgagctgcttgcagggccctga

SEQ ID NO: 295603 - DNA, 1000 bp, Homo Sapiens
ctgggcaccatgtctacccacccatgagagttaggaataaacacaaacgagttcaattcagttcagcaaacagttattgtgcatctattttatgccaggaactgcagaaggtgctggggtacaaagtgaagaagataatttgcttggtctcaagggggagctcctggtctaatacccaggctcctataatccctcagcattatcctctccactttgcctgttcccctgttgctcattacctgtgcaaccgctcctccctctctggctcaattcctgcttttcttccctctgttcctttatcctgctagtgtcttccttttcaaccatagccaacactccatcttcaaatgcttagcgatacaacttatacctcaactatctggaaaggctttctgaactaagtaggagaagttgtaaatatttaactttttatttttctaaattatctgattataagcaacagtaaaacaaagatcccatattattatctgcagagttaatttggggacaacagggacctcttagtttttttgattaattttaaacttacttgtaattaattggtagtatatgttacaaaccattaaaaattacttaacagtaatcacttttgaaaataggaggaaaataaacatttttatggcagatttgtttgccttaagaattattttgaaagaagtattagaatcgaggcttagaaaaacggtagagtgcttggctgggcgcagtggctcacacctgtaatcccagcactttgggaggccgaggtggatggatcacgaggtcaggagttcgagaccagcctgcccaatatggtgaaaccctgtctctactaaaagtacaaaaattagccgggcgtggtggcgcacgcctgtagtcccagctactcaggaggctgaggaagatcacttgaacccgggaggcagaggttgcagtgagccaagattgtgccactgcactgcaggctgggtgacagagtgagactccatctcaaaaaaac

SEQ ID NO: 295604 - DNA, 1000 bp, Homo Sapiens; identical to SEQ ID NO: 225100

SEQ ID NO: 295605 - DNA, 1000 bp, Homo Sapiens
tcccaggggagctgctcaggatcgtcctggtcccatgcatcaggaagaaaagggaacctgagagcagagggaaaatgcagaaagtggggcagggagactgctccctgaaacccccatgggctgctggtccaagcagaaagtgttgtcggaggggggagaggcagggtgaaatgggacaggaaacgaggacttccgatgaggaggaggagggggcagtgggctgcgggtcttggggactgaacagaatggggtttgctagacagagctttcgtctacccactcctgaagtcctgctggacctcagctggcccttgtgaactgttgagggggatataaacacaaaggcctgcattcctgtgggtgcacaatcctaagagaccatggactgcctgtgtgtggtgggaacaggaaaaggaggctgagtgtagccctgcttggaatttagtgtccaccacagatgtatccactacccagggccaaagactcggcagcctcagaagactcaatggaagctgagcacaggactagaaagggtcagggccctcctctgtatgtaggggtggcacatggccactagctgggtgatggggcactgagaaattaaatgtttgacataaaaatgtaatcaggacccgagaggaggtgggtggtgtaatgaacagcatcctagaagtccggtacagatttcacgtgtcaccttctagttccttatctgaaattgaaaggtgaggtcaggtgcagtggctcaggcctgtaatcccagcacttagggaggctgaggagggcatatcattgaggtcaggtgtttgagaccagcctggccaacatggtgaaacctctactaaaaatacgaaaattagccggctgtgctgcacacgcctgtcgtcccagctacttgggaggctgaggcaggagaatcccttgaacctgggaggcagaggctgcagtgagctgagatcacaccactgcactcaagcctgggcatcacagcgagacttct

SEQ ID NO: 295606 - DNA, 1000 bp, Homo Sapiens
agcgaaaggcagctgattcagcacctggagaagaccggcaacagggctgagtttccttgcactgcagaggaggggagaggcaaggagtggacatgagcacggaggatccagggcactcccttgatggtgatgccctcgaagggctgccccgtgcccattgtacagaatgtggattccaccccacgccatgagagctctcgcgcaggcccagaccactttataagccatatttcccaccaattcctgtttctggatctgtcaggttatttcatatttctaggcccttagctttgcttcctcttccctgaacgccctttgcccacatcatcccagctctccttctcctcctgccttctgtcttctcttcctctcatttcttgtcacccaggctggagtccagtggcgtgatcacggctcactacagccttgaactcccgggctcaggtgatcctcccacctgagcctcccgagtagctgggactacagatgcacaccaccatgccagctaatttttaaaactgtttttagggatggggtcatcttcctgtgttgcccaggcttgtctcaaactcctgggctcaagtgatcctctcacctcagccttccaaagtgctgggattacaggcatgagccacaacatccagccccttttctcttttcttacccttctttcctattttcttttccattttctttccctcccttcttctttctttcctaactattaaggagtagattgaattcaaggtctttatgtgtgtcagtttttgttttccaacaaatatttcttaaaaaccaaccattgaaacgtaatggtaaccactggcccctgtctccacctccacacctaagaagccccaaatccagatgtgtccattaaaatcagtccagatcttctttaccaagccactagatgtcatattaatttcacagcagaatagggaagcccatgccggagctgaaaacctgcaacaacaaaaaagcatctaaatactgcaaa

SEQ ID NO: 295607 - DNA, 1000 bp, Homo Sapiens
ggtacatactgtcccctaaacatgcacaccgacacatgcacgtccacgcacacaaactcggcctatccatcttttctgaaggaaagccgggttctgggagtcggcactgccagctcttcttgctcccgggttccaggagaagatcccagctttggcagaataggctaggaaggagctgggggtaggggcgatggcaagaaagaaaggggcgcctctcaccacagcccccagccccgggcctccggttcgctctctgacgcttggcagcagcgaccctaaataagtccgccggcgcccactgcactcctggagagcattcgggaaaacttgctggaggctgccgggcaggaagcaaagccagaggctggcggaacccctgcaggtgatgctcactgtttctgcgggtcagaaaaaagttcaggggatatctgtctaggccctctgggtccttttcttgtggcaggacccagctggtgggactagggcgggttggcctccagcacccgtgcaatggaaactccaggtaacacccacgaagaatcgggaccgctgactcgggtgactgccgcccggcctgcaactcagatgcgcagcgtgcactgaggcagggtgacctgcagtcgccccctcccctgggaaggcagtcagaactgttctagaagtagctccggcctgtggcggactcgaagtaaggcaggaggacttccaggacctttgtagtaccacaccaggaactgcagctctctaaggagtatttctatgtatgcgaaggttctctacgtctagactgttggatgcgcttttgtgtttttggttctgctttgttttttaatttttaatttgtgtaagttcatactaggtgtatacatttatggggttcatgagatgttttgatacaagcatacaatgtaataatcacatcatggagaatagggtatttgtcccctcaagcatgtatcctttgtgttacaaacaatccaattacactgttttagttatt

SEQ ID NO: 295608 - DNA, 1000 bp, Homo Sapiens
caggcctggcccaggtcagggacaagtcagaagctacatctggagcagatccaggatcttatcctggtgcacacgaggggccagcatcgtgcttgcacatttatagctcaggtgctctctggtgttaccaggaagctgctgggaagagacggaggccggagagtgtcccaggacaatgcttccttcactcatgttcatttttaactttaaaaaatggcctccatgatccccaaaatggtcttttggtgtgagggaagtggttgctgtaaggaaagtctctgctcgacacacacaaaaattctcctccatgactttggaccatgtctctgataaaaagactggctgggtgaggagtccagcctgcagacctcccatttgtcctgagtcctctgttgcagtggtcctcaatccccaggttagggatcagtaccagttcctcttaggaactgggccgcacagcaggaggtgagcagcaggccagccagcaagcattgctgccagagctccgcctcctgtcagatcagtgatggcattagtttctcgtaggagcgtaaaccccattgtgaactggccatgtgaggtatctaggttgcatgctccttatgagaatctaactaatgcctgatgatctgaggcggaacagtttcatcccaaaaccacccccgcccactgtgaactcagagagcacctcagcctatggtcaggtaccatctacagcacttgtgccttaaacacccatcagcagatatgaagatttcccaaagcatgcctcaatttagggttgtgcaaactagtgtagcctcttgcctataaatgaagactaagggctccatccaaccagctcgcttgtctgggtccagtctccagaactcttccagcttccctgtagtaaaagaacacaccttggtgggcattgttcatttatcagtgcacagggccacgttgacaaagtcttaatatttaatggcttacgagtctaataataaaaaaattaaaactc

SEQ ID NO: 295609 - DNA, 1000 bp, Homo Sapiens
aataaaaccttggcgagagtagaaagcagagagcccccggcgaccctcgacccttggccgaagggcctcaggccccgtccttcctcgttcgccgccacatcagggaagtgggcccccgcgggccctcgcgtccccacccgccccacgccgcccgagcccggaaggagcagcactcaccgcagtgcgggcgcagcaaacacggaagctgcgcggctgcctagaggcctccgcagagccgggaatcagcggcgccgacaaggagatacgcgcgcccggccgaggaccagcgttagccgccgcgcgagggcgcccgggaccgggaaagacgctgggaggccaggatgcccggcgcaactggacgctcatcgggagtcacggggtcggccctcaggggaacggggactatccgtatcaactcggtgtttgttcgttttcttcaccttgcggtttgtgccctctccacatttcctctctgtgtctaccattctcctgggggacgtggcaaaccgtgagccgctgcgtttgagttttgggaaaccctgcggaaacgccctggcgccggtggttttgcgcgtcctaccctgtgtcacctcagggttatgatctggcccctggcaaggctccccaagtgtgatgcctccccccgtccagatgactgcattttgaggatggagtcagtctggtggcattttttgcttaagtaaacaattgtaaccgtttgtgtagcatcagcgttcaacagctgcctgtgcaaatcgaaaaaagcgaaactttggaaactaggaagcatcagatgaataattctgaagacttgatgtcaacgggagtatcttgtttttaaacttttggttttctgttctggagacaaacagttcatatgcactaaagaaaaaagtgtcattatttcagatgctcattgccagcaaagagaactgtattgcaagtcaggcttcactcccagtattttctgaatgtttcaataaaatgaaatatatacgtc

SEQ ID NO: 295610 - DNA, 1000 bp, Homo Sapiens
tgcagctagagctgagatgatggaaatagcacagctgcttgagagacatcacctggagaagaaggaacgagagaaagagtgagaggaatagaagatcaacactactctcccagcatctcttattgagagagcttgtgaagaagtcagctggcaaaggagccaagtgtgactgagcagtgtgcagagagtgtggtgggcctgggagacaataggcaaacaatgagtacattcaggcagtcagcacaaatttactaagtacctttttttttgagactgagtctcaccctgttgccaggctggaatgcagtggcgcgatcttggctcgctgcaacctccaccccccaggttcaagtgattctcctgcctcagcctcctgagcagctgggactacagacacaccccaccacacccagctaatttttgtatttttacaggagacggggtttcaccatgttggtcaggatggtcttgattgcttgacatcgtgatccgcctgccttggccttccaaagtgttgggattatgggcgtgagtcactgtacctggcctactaagtgccttttaaatgccagacactgttgtgatgctggggggtgagcagggaacaaaacagaaaatctcctgccatctaggagccagcatcttagttggggagacagtcagcaaacataaaaaaagtaaaatatgtaatctcttaaatggcagtaagagctatagagaaaaatgaagacaggaaaggggcagagagtggtgggaatgagggggtgggcaggaaaggtctcactaagaacagtttaagcaaagacctggaagaagccaggcagcgagccccgaggctcttcggggaagagcatggcaggcagagatacagcaagggcaaaggccttgaggcctgccttggtcaaggaaaaataaagaggcctgagcagagtgtgcgaggggagaagaagtaggaaatgagggcagggggatacagctgagcagtttgggctccagaaat

SEQ ID NO: 295611 - DNA, 1000 bp, Homo Sapiens
gatttgccggccgactgtggtcttccttggcttgcagctgcgtcactccaatccctgcctttatcatcacatggcattctccctgtgtgtgtgtgtttccaaattttcccatttttataaggacaccagccatattaggaaccgccctactccagtatgacctcatcttaactcattacatcttcagcaaccccgtttccaaagaaggtcacattctgaggtactaggggttaggacttcaatgtggagatcacagttcaagctgccacactaagtgagctcattcacagtgacaagactagggacatacaaagggccggggtgaatatgaatggtgttccatggtgctgcctgaaagtgactggcagcagtgtcagcaggggagcatgtcctctgttctcagcattcactagagaggtgtgctgagctggggcccagctggacacattggatgctgtgctccagaggaggaactgcactcacctatcgctctcctttgtatgggacaagtgggacagagccttgatggggggaacacaccactggggttccaggcagccttaactatcgaggaatggcaggaaattctgtctgcccagcacctggtgaccctggagctcctcagtttcccgggaagttgagttttggagcagtctcttccagagaggctgggagtgcatcactttccccctggaggtggcggaggctgctgggcccaactagctcattgccaggcaatccagagagagttccagacaccagatactgaacaacctacttgtctccacacctagtaaagcttggatccaatgctgccaacttttctgcctctccagttttggagcccttaatgtgaaggtgcaacccagaagcctgcaggctgttcgtagcctgtagatgtgttttcttcccagtagctggtgtatacagtgtttttgtattatttttcaaataagcaatacatttgtgtggttcaaaaattaaagcgctatagaaaggt

SEQ ID NO: 295612 - DNA, 1000 bp, Homo Sapiens
ataacctggtccagcaaaatctcttgctgtctggtagggaccaggcaaatacaaatggatgagttaaagtcctgcataatagatacctcattggaactatgaaccaatgactccagagaaagagccacacctgactgcctgtcatcttctgacagaggatgtcatgttgtatgcggtgtgatcatctaccaagatcctaggaccaattatatggctcattgacctgcacgggtacctggaacttcagctcaaacatttacgataaccaagcatccaaaagctatgaaaacacagaactggcagccaatccattaaatcactcaaacatctattaactagcaattgtataaaatttgctggatttgagcactgtaagggtatagaagggcaaatgaagatcaataacaggagaggaaagagaagagtaaaacagttagcatctgttgatggccaggcatcatattaagtatttcatatatattatttaattctgaaaggatctttttgtaagttaagaagctgaggtgacatgagttgctcaagttcacacagacagcaaagggtgagccattgcaatgcaaagcccatgtccaattcctcactccttgctactctagcaagagttctgggggtaagttttgtaaggagagaaagaaaagagagaaaatccttgacagtaagtgaagcaaaagcctggatatctgaatgggaggagacaccgttgcagagcccatccgtcctgattttcccagaggcacgggagcagagcacgtccccaccgaacctaagcacgcggaaagatgcccacagattgctgcatttgtatttttactgagccagcattgaggaattccacagacacatatgttgtgtacatacgtgggctatcactttttaggtggatgtacgtgttaggattatcgaaataagcatccatttaaaagaatgatttgaatttgtacctttctgtcatgaaaattctgttaatggatgtaataaa

SEQ ID NO: 295613 - DNA, 1000 bp, Homo Sapiens; identical to SEQ ID NO: 119370

SEQ ID NO: 295614 - DNA, 1000 bp, Homo Sapiens
gcgacgggacgggaggcgcgaggttgcggggtggcccggccatggttcgggactggcccggtggcggcgacggcggcggcagcgctttgtctcctgggcggccgggccggcgcagccgcgggagagcgcggatccgacggaaggaggcgggagcaaccggacagtccgccccgaaccggcacgcccccgtgagcccgccctcgaaatcactcttaaagggtccgctcctggctcgcgactccccagttccctagcccagaaaagcggattggagcccgggaagctcattgcgattccaaaggtcacgctgatgcaagagatgggttcccatgatcttgggcagctccactcctgtggctttgcagggtacaggcttcctcctggctgctttcacgggctggtggtcccagtgacctgccgagtgggaagagccgtggctggccggcctcccagtggcgacgacgacctcgctgtgttcgtggcagcggcactctcaaatctgggcacggtgatgggaaggttatttgttggaatccctttgcctttccaagggaaaataaacacaaaaagtgagaagtcttggggtctcagcgagcgccaaaacaaaaaactggactctggcggggatgtgggcaagaagcgactaagcgaggaaggaaaccagtttgggcctccgagaaatctggcaggcgagaagaattgggggacaggacgggcggccggagcgaggctgggctatacgggcaccggctgtagcaaaggcaaagctgagggctggggccagaacccaaatcgggggcctggggccgtggcgggtcgggtcagcatgatcgcagatagtcagggtcgggcagggctgggctccctccctggggcgatgatgaaagccgtggtcgctattgcaccgcccagccctgcgggcactgataaggccctgcaggagggagtcagcaagggcgcgccccctggaggccaggcccctcgaccctgcccgccctag

SEQ ID NO: 295615 - DNA, 890 bp, Homo Sapiens
ctgagcctctcatgtggggagatgagcgtctttctcctgggaccgaaggagggaacaagacggagaaggaagaggcggggctgcgactgtgcccagcgtactgccgggctgccgggtccctgctctgggtacttctctgctttcgggcgtctcgtctagaagctgcagcttggcctgtctcacctctacacagaggggctgctggcgcctgacggaaaaaggtccacacacccgatggccggcccggggtggacgctgctgctactgctgctgctgctgctgctgctggggtccatggcagggtatgggccacagaagaagttgaacctgtcccataagggcatcggggagccatgcaggagacacgaggagtgccagagcaactgctgtaccatcaacagcctggccccacacacgctctgcacccctaagaccatcttcctgcagtgcctgccctggaggaaggtgagcccaatgggtacagatgctcgcacgactcagagtgccagagcagctgctgcgtccgcaacaacagcccgcaggagttgtgcacgccccaaagcgtcttcctgcagtgtgtgccctggcgcaagcccaacggcgacttctgcagcagccatcaggagtgtcacagccagtgctgcatccagctgagggagtacagccccttccgctgcattccccggaccgggatcctggcccagtgcctgcccctggtaagtcccgggcgggggctcagcctccaggccctcccttggccgccacagggaagtcgcacagaaacacagcaactggaccgggaccgcggctgtgagaggtgggctctgagcacccaggcacccctgctgggagaggccggcgcttcaccgcccatctcataaggtgggggc

SEQ ID NO: 295616 - DNA, 1000 bp, Homo Sapiens
ggggttatgtccttataaagtggaaacttgaaaggtactgtctgttgttgagtggggaaagacatttttattacttacagggtagccataaagtttctaaaacggtaatatattaaagagggagagtggtaggggagaacagtatgaagtcaacaggaaatggctaaagatggagagctcaggtagaatagtttaaaaaatgaaaattgatagagtacctggtgtatttgaatacagcctagagagctttcattttccaaagagtgtggggataaattagtgaatgcatatttttcaaaattaagaaaacagaacatataattttgaacgctgagaaaaataaaaatttaaaaactacactgtatacacggtatacctcaactgtgaataatagtagtcatgtaaagtcagtcataattatgtaaatactgaatactgattttacaacaaatgattctataacgctgggaggatgggagaaaagagatgtgtgtgtgtgtaatggtggtgagccaatcaagatctgatatagaaaaatgcagaaaaaggagtatacacatgttttcttcggattaaaaaaactaataataaatcaccaagagtggtaaagttttaaatcaagatctgatatagaaaagtgcagaaaaagtagtatacgcattttttttttcaggaaaaaattaactaataaaccactaagaggggtaaagtgttaaaatagttgcattgttctatattccactcattgtgtccagcaaacagtgttctatggctttaagtagtaagcatcttgccccgtccaacaccatgtctggcctagggtaattgttctttctagtctttattctttgtctccagccaaactccatttgggcacattctcctatagccttttctacctgaagatactctgtgttttaaagctaagcttaggtggcgctttttccattaaatttttcctggattcccattaaaaaaaaaaaaaaaaaaaaaaaaaaaa

SEQ ID NO: 295617 - DNA, 678 bp, Homo Sapiens
ggaaatcaggagaaatagggaaatcacggctgcgtgtggttttcgttttgggggctcatgaagcggcctgggccctgtgactcctccagggattccacatcccaggtgctgcgggacctgcgggggcgagaaagctgggccggtgacaggagggcgcaacccaccccatcccccagggaaagggcttctcccagttccccaccctcccagcccccgcccggcccattacctcttcttcttgtctctcttgtccaagccagggtccctgagcatgagaatgagctccactctggggactatgcccctccaggcagctctgtggagatcgccaagatcttccaggcagacgtcgtacccaggctccaggaaggcgctgtcattgtgctcggctccacagcccacgccgtcctcgctgctcctccttattcaattattaaaactagtgaataaattcagcaaagttacagcacaaaatgtcaacacatggtaatctgttgtatttctagacactagcaacaaacatcagaatgtaatgatgaaaacgattccaggcatgaaccaccaaacttggcctaccatttactgttatcagaaattaaaacaagtcaattcttctctctcacttgctgtcactctgaattatttgcttacagaataaacataactttgtgtccaaaa

SEQ ID NO: 295618 - DNA, 1000 bp, Homo Sapiens; identical to SEQ ID NO: 119371

SEQ ID NO: 295619 - DNA, 1000 bp, Homo Sapiens
tgtcaggacacgcgcttttcgcccctactttgttcttgcgcagtcttcccagctgcggagaggagggagcgaaagcaaaacgaaagcacccggggcgcatcagttgcaatagcttccctgagcgcggccgtgggaggccaagatctgaggtcgcgaggcgacggtgggggcccgagctgcgcagaaactgggtgggggcggtccctggagggcgcccgggagctgctagaagttgtccggagcccctcaacccccttggaaaagcgaacgcggatgttaatataccaactccgcagggaacttttggcccgggtcttgagctgaaattccagactgaatgggaccgtgctgaaagttcgacgaggcaaaggagtatggcgcgggggcaagctttgacccccggcttcgtatcctcgggagaggccgggactccggctcgcccagcgagggtgcgcagaggcctcctgggattctaggcccacagaatttttgctccagtgaagttggataagcactccgcctccccgcaaaaaccagagttctcggcttataaacacttcaataaactctggtgacattctccgcgctcgctccttgccctcgcggcagtcactgcagggacaaaggcggcctgcgcagacttggaagaggcgcggcccgcgtgggcggctttaccggccaaagacgttttcagttaaggggaggcatcttcagagctgagggtaactccccacagccaccccgcaggtagggcagccaaccccaatctggtcagcttaaaagtgtcctcggtttcgccccctttcccagcgaaccaacactggcagattggcctgcgagccgctcgctctgttgctctagcacatttatgtagccaaacggtcgaagagccccatctttaagcccaataaacacttaactttattctatttaataacacattttgttgtggcaatatttgtggattttggcaggtattaaaatctggtgatcctaaatg

SEQ ID NO: 295620 - DNA, 611 bp, Homo Sapiens; identical to SEQ ID NO: 119372

SEQ ID NO: 295621 - DNA, 1000 bp, Homo Sapiens
ctagattaactactcagcctccagaggaaggtcttcaggactcagaccttagttatagattagaagttaatcacttatgtcttcagacaggccctgttccatgtttagagagagatctttgagcacccatcttcatacatttgagaacagggtcactgagagggagtctctgaggtcacagagtttattagttcattttcacactccaggaaagaagtttaattcacagttccacatggctggggaggcctcaggaaacttacaatcatggtggaaggggaagcaaacacatccttcacgtggcagcaggagagagaagtgcagaagaggggaaagtccccttataaaaccatcagatctcgtgggaactcactcagtatcacgagaacagcatgtgggaaccactcccatgatgtaatgccctctcacaaggcccctcccccaacacgtggggattacagttcaaaatgacatttgggtgcagacacagagccacaccatattacagagccagaagagctgagcagtgggcgctaagtaaatgttcattaaaccaaacccctgcacaaggctggcttcatagaggtgccacctgtgcagtggcaaaagccccactgtcagaggggacctgaacttggtttagtgctatgttgtcactgccttcaaattcttaacaatttttgaacagactccacattttcagttagcaccgggtcctgcaaattatgtacccagtcctgtccctgaaacaaagataaggtttgttcatgaagggactcactcgacccctccctgcccatctcactccaagatgccctaagtaaaggggaacacagagctaggagaaggcagtatttgaggatgatcttggaggtcccacctgatcatggctggtgatgcatgtgtgtgggtgggagaatttggctgctctcttctggcaccttccatcccatgtacaaggcctgcactttgcctgtctgtcccaagtcctcctacctga

SEQ ID NO: 295622 - DNA, 1000 bp, Homo Sapiens
gttgactgtgagcttgacaccctccatctgaatgggaaacagctccttacacctccggtggcactcctggaatgtgcccgggttgggcaggcagccgcaggccccatcctcagcggcccctgaggcgctggcggttgcagccccgggggtccgttccgaacctcgactcctagtggtgccggcgcccaggccgcctctcagcggcggcagcgtgaagcctggcggcgagggcggaggtggcggccctgcgggcggcgagctggcggccaacatgttccccatggtcgctggcggtggcgcctgctcccggcctggtctccgctcccacccggtgcgccacgcgcaaccgaactcgctgccgccgccgccacccccgtcgccagcatggtgtatcttttggacatgtccattttggaagaaacttttgtgttaaaataaactaatatattatgggctagaacataaaattcaccaagaatttcaagataaaaatactaatgttttgcttgtttgggttatttcaaacaataactttgaaatctataattttttcaccaccgaccctctacctccttgcatgctcattctcctgtgtggctagatgcatttcggaaaagtgttttgaatattatttcagagcaagtatcattccagaaaataagtttaaagtttgaaatgtttattttttgtaacccatgaatcttcagcttaagtatcttctgacataaaagcattttcataattataaaagtgctgatattactctccacagtattatatctgatcctgcaaagtagttcagataccagagaatactcttaaacattttgactcacgcatttaattatgtttaaaatttatgtaacaagacattaaatgagaaagaatggaatgaaaaatgggttaaaagaatgcaaaatcgcaaaaagaatgctttgaatttaaatatttcccaaaatttgattttctgagaaaatatattaaaaatcatacgtaatta

SEQ ID NO: 295623 - DNA, 1000 bp, Homo Sapiens; identical to SEQ ID NO: 225104

SEQ ID NO: 295624 - DNA, 671 bp, Homo Sapiens
atgctcagtcgggcagctctccgggccggcgtgggagcccgcgctccaaagcccggtggggggaggggcgctcacgcaaccgccactgtctggagcgggctcgcctctgcggcggcactcaccgcccgggctttactgaagcggagtctagcatgtgcggctgctccacagcggtgtgggtggcggcggctcctctgcagcagcctcggcagtaggggtcacggtggccaagcccaccgtggagctcatctgagagttgtaaggtacgggactgcctcggtctttgggacgccccgtctggtagcatcccagatccagcacgttccttccggccctgcaccccggcccggtgcctcacaccccgctaccccatgcatccagactctaaggcagcccctgcatctcagtcctgacatcgctgtccctggagcatcctccgctggagctggagcttgacagccaagacaatccaaagcaaaaagaacacagctggaggcatcacgctacctgacttcaaactatactgcaaggctacagtaaccaagacagcatggtactagtaccaaacagatatctagaccaatggaatggaacagaggctgcagaaataacaccgcacacctacaaccatcagatttttgacaaacctgacaaaaacaagcaatggggaa

SEQ ID NO: 295625 - DNA, 1000 bp, Homo Sapiens
cgcgccgtgctcatctgcatacgccacgcccttgccggggtcgtccccggcgctccggtctctcccgctcccggaccggggacctaccgacggcaggacgagagagtgccagagagagagagagagacagtgacagagagaagagagagacagaaagacagtgacagagagaagagagagagagagacaggagagaggggagagagaagacagagagagagagagagagagagagacagtgacagagggaagatagagagagagagaaggaagaaaagagggggagagagagcgagcgagcgagcgagcgagcgaaagagagtttgcggccccaccgcccagtccccaagggatctagcgtctgggccgggcagggctcgggtttgggctcaccttcctttcagcaaaaagcaagtttcggccccttctcttctcgccagcccaacagaagtcttccccacagggcacaactattatgaggatcaacacacccagctaaaacagctcaacttcctcatcacacaacacagttctggccagttagacacacgtccccggaaagggcatctccaggagaataaaaaggccaagccactttttgaagaaagtctttgtccctaccccctttttctacctggaagtcagactcaggcctggagtgtagcggccgccttggtacctggaagcaacaatcatggccgggagaccttacacctggcatggtagagcagacggaggaggggccgcctggtgaatagcctggccaacagccccaaactgctaccccttaaattctggatttcaggtgactgctgtaacttgaagcaagaaaagtgaaactacagaaaagggaggaccactggacggctgctttcattctacgcccactttttagagtgcattcctacaataagcaccctaataatgtaaaccaggggccaagggatgcaccttccactctacttccttccccagaaaagaccaccttggtaaatacaga

SEQ ID NO: 295626 - DNA, 1000 bp, Homo Sapiens; identical to SEQ ID NO: 225105

SEQ ID NO: 295627 - DNA, 641 bp, Homo Sapiens
atgccgtggagcgatttaagagcctcggaaatttcctttaaggtcaggagagaagctggtaacagatggggcgaaggaggaaaagttctttttgcggcaccctcacgccttcccagccctttcgcggtttactcgctccccggaaagcagggcattcaagcagccctgaggagaggtccacatggtgagccactgagggccttgccaagagccagcaccaacggtccaggtttggagtgtaccaccttggaagtgaatcttccagtccagtcaagccttcagatgacttcagaaccgtccatgtaagccactcttggattcctgacccacagaaactgttggagctgccaatttgcaggaaatagaggagagaagcatctgttgaactgcaccatgagtatacactcagcaaaggccaaactgtggaaaatgatacaggtcaaacagcctggattctttaacagtaagtgatgtttctgaagcaccaatgaaaatgaagtcctgaagtcctgtgctcaatatgaaatgttggaagttagaagaaaaaaacaaaacttggatccaatctcaaggcactttttgtttaatgggaagaagtggattattttaaaagctacaaataaagttacataaaagtagca

SEQ ID NO: 295628 - DNA, 1000 bp, Homo Sapiens
gggttgaaaaggaagagaaagaggagaagcaggaatgtgagagaaatgaggcagagggatgggctagggaagagagaagcccttctgcgttacctggaaatgcagcaacaataataacaaagccaatgttaggaatgtttaaaggcagctgccacatagcactttttatagcttgtagactctctcatttaatcctggcacttacatcaatctgattagtagctattattagttttataggtgatgatccaaggcgcaattatttgttccccagctagtaggtgacagagcccagattgaatctgactccagaaccctaaccacgatattcccctgtctagaaggagccagttctctcctgcaacccccactgctcagcctctaggagttccagccaccagccacctgcaccctcccttccatgtggctttgccctctgttcttctcctctccactctctctccaaggtccaagtggtcaaggtcatcccaagggtctgctgggaccgtgtgtccttattctgtgccttgctggtcgccaaccttccccatctgccaaggactgatgtccagcccaggcccaggtgcaggtgcccaggtcatttttgccactgagtaaagggagacagaatgacagggtaaattaccaaccaccagaacaccatggagccaatagcatcaatgcaagtgaagtatatttatctgttggcctgaaaacatgtcctagtatattgtcccattaagcaaaaagcaggttataaagctgtgtacattaagaaacattttataagtgaaacaaaagtattctccgtttctatgcagagaaaaaggatatttgccaagatgttaacagattatttttgctgtcttctcttggcttatttttgttttctctttttcaatgaacaccaattagtcacatgattttaaaaagcaataaaaataaaccaatcccagacggattgtacttcttcctgtcctcatttctaccccgagtctcc

SEQ ID NO: 295629 - DNA, 1000 bp, Homo Sapiens
cctgtaccccgcggcagaagcgtgtgtctgccagggtacagggctcatgtgcgggtccatttgcttttggcttcacagacttcgtcgtttgtgagggtacccaggtcagccccatcccccagcccctccctacgtctgtaatacagctgctccctgggtctgtgatacagccagaggctctcgccacacacggcccgccttccgtcctagacccccagcctcttgactgagctttaaaatttgcatacattaaggctcactcttgctgtgaagttctgtgggttttgacagatgcacagtgtcgtgtctctgccattacaatgtcgttcacgttagtttcacagccctaaaaacccccctgtgctccaccgatccaaccatttcctctttcccgaactcctggcaacaactgtttccataaatgtatttttctggtgggtttttggtgaacaattttatcaaattagaaatatttcatttgtttcaatttctaatttgcccagaaatttttaaaaagtcaccgatggcatcacttgagacattgggacactttttgccctgtcatctattcagatggtatttgcacggatcagattctgatattaaaccttccttgaattcctgggagaaacccttagatctatcagggtcccagcaggaaagagacccacatttagagcaggttacttgcagcagtgtttaacaaaggggctctttataaaggtagggcagagtactggaaacctcaaggggcagtacatgtcccagggctggccaaaggcatgcctggtggagagaattttctggaatgtgaaggagagtgctgtggagaggagccatgacattcccaaggccacctcacacagtcatctgccatcatttgcagatcacatgtcagcttacttagcaagcctaacagaacggacaggaaaacgtaatgttataaacacataattctccccagagaattatggggacataataaattcaatgcaattct

SEQ ID NO: 295630 - DNA, 1000 bp, Homo Sapiens
tggctctggttctgccctggccttgcccttaccctggaccctccctggccgtgttttttccatggtccttctctggccttgcccttgccctgtcccctttcttgtcctgccatgtttctggccctgccctgtccatgtcctggacctgactctggccctggacctccctgtccctgccctgccatactctggcccattcttgctctacactgaccctgtcctgccttggccctgtgctaccctagccctgccctggccttctgctgaccctgatcctgccatggccctggccctgccatgtccctgccctggccctggttctgccctgcttctggccctggccttggtcctctcatgtccctggctatgaccctgcccctggtttttctctggccatgaccctgccccagttctgtcctatccctggccctgtctcagttctctcctagccctggcctttcacagtactttatgcttagtaagggctccatagtgtctgtgagttgaatgttgtgttcatagtatctgccaaaacagaaagaaaaaaaccaaaatattttgataggaagttaaagctttgtatataatatgccttgaattgtaagtgcttgttattagttgtattacatataggtcatggttttgtacacataactccaaaccattgatactgttaaaagaatatatgaatatatgaaagaatgtataaacgtaagaatgtatgagtatctaatgacctttccaaattaatttttatttttagctctattagatttttctcagtgtaacaaatgtttattcctatgtaattaagggcgtatttcctgtacagaatattcatattacctaattgaaaattatatgatacaaaaatataatactatttttaggccaggcatggtggctcatacctgtaatcccaacattttgagaggccaagtttggagaatcatttgagtccaggagttgaccagcctgggcaacatagtgagaccttgtc

SEQ ID NO: 295631 - DNA, 1000 bp, Homo Sapiens
ctaattggggctccaattgataagggcacatggcccatctggaatattcacaaacattcttcctgtttggactcaggaaaggggtaccaaaacaggaagcctcactaggaatgaccccttccccgctccagagacaaagaaacagaagtttcaaccataaacgtgggatgaacaaggaagcctctgcatcagaaaaatcgaggcaagcctctggaacacagccagtgtgcctagtgtaaggagaaaggccactgaaaggatgactgtcccaaaagaaaggaccaaggggccagaaaaaggaggaatatgactaggaaaaagctcacagtcaaatcatggagcagggtcactgctctgaccacagagagtgatgccacagagagtaaggaccaaggagagtccttaatcactcagagacaattaaaatttccccacaggaaccctgggtacaactgacagtgaggaaaaagttaattgatttcctggttgatactgggcaaactattcagttttaacactttatgagcaaaaagcaccaaaatgatcatacctgtgataggagttgcaagaataatgcaacaaaaggctttcctacaaagtttagaatgcaaactagaaagtttggacctaaggcactgctatttctatatgtaagaatgcccaattcccttgctgggaaaagacctattatgcaaattaaatactcaagtaatttctcccagagaaacaactacggctgcaggtcctgctacagaaagcactgcaactaagatgttattcacttgccttaataagaaagaagaattctccctcagaagtctatgagagagtgcgtaattgtgaataggcagaaggaatccaaggaaaaacaaaaaataccgtgagtgcatatagaaaaaatagaaggggctactgtgacctgggcggcggggaggaggcgaataaaaaaatcagtatacattaataaaggaagccttagaaggaatacagcctgtctttc

SEQ ID NO: 295632 - DNA, 695 bp, Homo Sapiens
aggcactgcctggcaaggctgctggagggagatctggccgcagatggtgaaggagaacatcgaggcccccagtccccaagcagggctccatgggtcgggcggcgggcattggctcgtggttacccgatggaggaaaacttctgggagaatcggctggtgagatgcctgacaccgctctcctggcgtctgacatcaaggatatcttaattttcttagtttttaaaaattatggtaaatacacaaaagatgaaatttaccatctgaaatacttctacgtgtatgattctgtggcattaaatacactcagagtgttgtgcaaccatcaccaccatccatctccagaactttcttcatcttgcaatctgaaactctgtgtccactaactcccctttccgcctcccccagcccctggcagccaccattctactttctgtctctgaatttgacgactccaggtgccacatgtgagtgaaatcatacaatcatttgtctttttccaactggcttctttgacttagcgtgacgttctcaaggcccacctgtgttgtagcgtgcgtcagaacttccttccttcttagggctaactactgtccccattgtatgggtaggccacactttgtttgccgttcatccctcagacatcaagaatatctcacatagtagaaagagtcaaagaatccaatgagggcttcatc

SEQ ID NO: 295633 - DNA, 772 bp, Homo Sapiens
ccaatcaaatgtgtagtcatattgatggatcaggttacctggtttaatggctctgtgtataaaattctttgtatgcacatgttcaattctactgatcatctggtcagctaatataagtacagttttcattgtgaaccttcttgaacagaaattggtcttcgaggctaggtcccagaaaaatccatgactagtacattatagtcttcttcctgaccacaccaccgtatgtgggggatgccaaccccaccttgaagcatcttgtaaagcctgctcttgtacagcaactggggatgcctggccctgagattctggcttcactaccacttcttcaccgttggtgatgctgatcgccagacagatgtctccgaaggagctacaccagatcttccaaagcagtttatatttccttccgacaatgaattctgctgctagccgtcctgagagacgaagatggaggctgggccaagcctaccgtggaaggcggcaggaagcggaacacggaggcctttcccggcgtccagggcccagatgccggcgaagggaacttgatgcccgctgctcggtcaggattctttgtttgttttttggttggttgcctgccaggccgcagtttgtgaagggcttctagcggttaccaggctgggccacctgttctgggcagccgccgctgcctcgctttcgcggcgacgtccgggctggaaaaggggcgcagtgagctggggagcggtaccgctgccaccactgccgtcggctccggcccagagggacccct

SEQ ID NO: 295634 - DNA, 800 bp, Homo Sapiens
aactaagcaaggagtgagagctctgttgttctgctgatggggctcagtctgttcttcctcttttccaacaatcacacttatttccaggaaagagaaacctctacatggatcccttgcatgggtgttgtacaatgggagctttcattcctgctttggcacctgcaaccctgggttaacagtaccatggagcggagaaagcgtttaccagagtgcggtgccgcgatcccaccccgtgcagcagttgagcagaggtcatctttaagtaaaagccatctgatattttactgcaagcatgtggcagtgaagacgacaatgactgctagtatggtttgtgccactgccttgatttccgctcaggcaccagcagtcttacccaccattgctttggtgcagttggtggagatatcaatggatcaaaagcgcaagtaatatgagaggccaggaatcaaccaaaagagcaagaaaagaagccactacagtaatgagcttcggctgcctgcacctcttccagccacaaaggaaaaaaaaatgagaaagctgcctctattctacttcttttcaaagctgcccaactgttaatattttagactcggctccctatgcccagtaaatataaattttcagaactgtgatcacagccctggctaaatagtgcccctggtcaaaccttcgtaggcaaaatgttttctccagctttctgctagttcttagaagccagtgtgaaggaaaagggatgtcatgaagcatcactctccaagctgatcatctattccattgccttgagaattatgtagaataaa

SEQ ID NO: 295635 - DNA, 1000 bp, Homo Sapiens
ggagagagaggctgtagtgagctgtgatagcaccactgcacctccagcctgggcaacaaagcaagactctgtctcaaaaaagaagaaaagggaaaaaaaagaaaaccacaaacacatggtcacatgtaatccactttaggattaatagagaaaatggtactttgtaaagtgaaataggataattgatcatacaaaaaaataaaagtacatttaggaacaacagtgtgtcttgactgtcctccatagtacagttataaatctgggcaaacatgtaaaggaggaagacacggtccctgatctgccgaaggagtacagatactggtgggagtagaatggggacatcttttaagctgaagaggtcaggaaaggcttaaccaagcagtgggtctgagctgagccttggagactggagtgaggatgagaattgttggtaagacaagggcagtaattatagattcacattttgtaataaaagttcatccttgcagaccaccagcaggatccagtgggactacactgtgagaatcactgcaaaatggccagaatttatgtttgtgggaaaatctgagtaattattgaatgactacccagcattgccaattaaaacaaaacttggatgagaccagtcttccaattctgtctgatgaaacataaacggaaagcctttataatgtaatattactgcctgagtgattattttcagaatacaatgatcagccaaatggcttctaattgatctcaaaatatttactgagcctctcagtgtgataatgttctgctgagttgctgatttacccccaaaagaagacagtaagaatatgagcattccaagactaataagatacacatgccgtgaatggttaaatatataaatataggccaggcgcagtggctcacgcctgtaatcgcagcactttgggaggccgaggtgggtggatcacgaggtcaggagtccaagaccagcctggccaatatggtgaaaccccgtctctactaaaaa

SEQ ID NO: 295636 - DNA, 1000 bp, Homo Sapiens
ccaggtgtcaccaggcagcatacaggtaacaggcctggaagattccccacagcccagctggacatgctgaaacactctggggctcctcgttgagtgggacaaactgcaggacccagtgagggaaacgggaacataacaggccgagcagtatggctaaatccatttattccaaaatcaaaagcaaaacaacaacaaaccaaaaacaggagtcccatcaccagggagccatgaccccatccccgcctccttcctcgctcctatgctagcaataaataagtttcccagccgcgaataattataagaacctcttcctcatatgccagctgcaacctccgctaggtacgatacagaatgttacacagctacagtatgtacacgggggaaggggggccacccccagcagcctgtgccctggcctggtctacagttaactccactgtcccgcctcagctgcctctctgagtaagaagatgggagcccccctgagggaaaagttgctttggtgagagtaagaaggccgtcagacctcctccaaacaaaccaactccaccaacctctggctcttaaataacaaacatcatcatccagaaatgtaaggactcagccttggtcaaggtggtaaagggtctgtttgtctccctccattagacaagggtcttgtcttgctaccctaatggtaaagggctgactggggaggggttgtagggacatggtgggggtgaagactccagacccacttctccaggcttatgctgacaggggcctgcttttatttatttttatttttatcccatgactttttttaaatcctgtaactaatttttcataactttttaaaataacttttcataaaactttttttttactttttttccacaacttttttttgccacttttccacagtatttttttatcctgtaactttttcatcccacaactttaatttctgttaacttttttagtttgtgttcttttaataaacacacttacatagttacaa

SEQ ID NO: 295637 - DNA, 852 bp, Homo Sapiens; identical to SEQ ID NO: 119375

SEQ ID NO: 295638 - DNA, 1000 bp, Homo Sapiens
ccatggggcacttccaggaaggagcccctgctgctttctccaaagagctctgcttcgggtctctaaggattggttttatctgcagagaagctaaaggaaggaatctactggtcccctaaggacctgatgacacatgcacagagatcccatctctcttttcattccctgaagtaagggaggcaatgaagccatacgtgtaccacaaagagtgtgagaaagaaggaactctccagccggggtctttctctgagtcatttttcagtcgtagggtacaaaaagctccaggttatattcaaggttttattttttccagagtatcttcggggaaaaaaagtatatctgaaaatcacagaaattcttttctttcaaggtaaattagaggatttgaaggggcagtgctggatgatctctgggttcccctctagtccaacacccagactctgagattgcttccctgtgggagctcggcctggcctccttccatgggcgtttcttccaacgtggaggtttgtcagtggcgtgcctgatggccagggccagatgctgttcttcacaccagaacgtcataatttaaaatgtctatgctctgaagcaagaaatcagagcttcaaacctaaaacttgtaggatttacaaagcagtttcattccaccaacatctattgagtactcattatgggccaggtacagagatgagaagtgggtctgagaacagtccctgcccccaagtagttcacaaatctcattgtgaagaggcaggcacagaaaatctatccatctggtagcggccaacccaagccaggtaggcaatactttccctcatagagttagagggtagtttaaagaaactgccacccagagggaacggcggtgaggttttaggaattatgattcctttcctaaatttctttgctatttgttatgagctacacaaatgtttatacacaagtcttaaagttttggctgattagaatattttcaataaagagagaatttctactt

SEQ ID NO: 295639 - DNA, 1000 bp, Homo Sapiens
gccagctccaccgccccgcccgatggtcccagttcctctgggaatcgtcctgtatgcaacatcttcacaagagtggcaggcagttgaatctctggccttcgtgggaccactggacatctggcagagaaccaggaaaccacggttcccttctgtgagtccctcagccggaaaactacaaggagccagttgtccagcacagtgtcatgggacagtgggccctggtgccacaatgcccggcatctccaccagatacagctttgagatcttcatgatgaagcttgctccaatccaagggctgtcaggtggggtttgcggttcagctgctaacctttctttggtcctagtggtccaagcatgctggcctgtttattatttctttaacttccaagctgtttcctactcctggacctttccacatgtttttggaaatgttttcatttttcctgatacttttatctataacctcattcttcaggcttctattgcaagaccttctatgctgaagcacttgtttatatgaaggcttcactaaactcaaattggatccatattaaagaagagaaggatggatttgtttagacaacacaaacctaggaagggtttgagaggtgaaacaaactgggttatggatgaacgggggcaattggaatgtagaattgaagcagtaattaacatcttggtttcatctgggtgtttggcatcatgttcagaaatgtgaaaaataaaattcagcaccgttattactgaattagataaaatgattgtatttaattaatccgtaaatattaactaattattctgtttaccataacatgtaatgaatataattctccaccaggcaaataaagaaagaaagatgtaattaggtgatttaagcataaaacttggctgaaagcatatttaaatcttggtcatagtttactggcattaatttccttgggcaaaaatctttgtaggtcctcagacaaccattttctcttctgaggaatagatttccctc

SEQ ID NO: 295640 - DNA, 466 bp, Homo Sapiens; identical to SEQ ID NO: 225108

SEQ ID NO: 295641 - DNA, 858 bp, Homo Sapiens
atgctggccggggagggggcggctcagatgagctggttcttgggcttcggacacgtcccgctcgcacagttcaggtcatggtcccggcagactcgggaagtcccccacccatgcaaagacaaccccttccccaccgggccccgaggggaccctctaaaaagggcagggccgcccgggtcgcctcatcgggggaccccgagacaattcatccagacccacccgcccctccccaaggaaactgaaaaagcaggaaatgaggctcggatgccggcgaggagggcagctgctcgggacccccgcccgggcccgacccccgcgggggaggctgcgggcccaggcaggggctccccggcctccgcgggcagaggtggcggcggccccggccccgaggctgaacgggcggaggctgacaggcctcgaccgcgcggcccaggcggccggctcaggggagaggcccgggggcccgcgctgtcctcgcagcctcaacccacacggccactgccgccgccccctagagcatccttgcgcgcgcccgccctggagccgcccgctagtaccgcgcggccgcccccgaccaacagccccaacgcgccggaagtggcgagcgccgggcggccccacagcgcggccgccgggctgcggcgctggaaccggaccaatccggaatcgagcggggcgagcggggggagcgggcggagggcggagggcggggctgcacctgacggctcccactggccccgccttcttaccacgccctctcttgccccgccccctgcgcccaccgcccgtgcgtccacgcgggccggcagccatcttgtgagtgccttttacgggcggagcatcgagctggcagcgtga

SEQ ID NO: 295642 - DNA, 1000 bp, Homo Sapiens
ggctgcaaggggaggttctctctctgttccctggaaatctccttgggccttgtgcagcatttggatggacacgcagcgacaggggacgtgctgaattctagataacagatgcctgccttaaaatggaggcacaaagcccagccctgtccccttggctggccggctctgagcatcctgagaattaacagaggtacatgtgctttataaaaactggaaagtgtactaaaaattcaaagttattattatttctaaaatgtctccagcctacgatttgtcataaacacctatcattctgcatagataattgggtaattgttcctcatgccagagggaacaaacgtctctctttgaaatgtgtgtggaggcttacacatagagagccctgttataacgagggtctgactccatagagatttgtagatgccaaaagactaacaataacctcctccaaaaaataactgcatccagcttttcataggcaagttagtaggaccacctgattccagcattttaaaagagtcaccctctatatggaaatgtggtcaaaatactagtccaggaaaggaacatgacagatttgttggccaaaacttatttcaaagcagaatctttgtaaaatatgatttttttcccacatatctgcatttcaagactgggttatctttgtttctttgtgattgttatttaaatacatattagttttaacttttcctaccttttcttgatcacaccatccgctgagttaaggatctgtaaacaaagcttgaattgagccaaaatgatctaacttccaaagggaacccttgtttcctcaggtaaacttgaacgtcttcattgatgatagagaaccttgcttctcaaataacctagcatgaagggcaacttggtagttgtttttgttgctaatatccaattccccatggcctgatacttttgtaaaatacataacagttgaattactagaaaaataaaatgtcgcttgaatgttgcagtcatgtca

SEQ ID NO: 295643 - DNA, 1000 bp, Homo Sapiens
caaaactctctaatcaaaatcacagggacctggaaatattggtctatagcaatttggtttttgggggttttgttgttgttgttgttgtttcgggggcggggagggagttggttttggttttttggttggtttttgtttttgtttttgttttgagacggtctcactctgtcattcaggctggagtgcagtagtgcgatctccactcaatgcagtctggaccttctgggctcaagcgaccctcctgcctcagcctcccgagcagctgggaacacaggcgcacaccaccacgcccggctaatttttaaattttttgtagagacagggcattgctatgtttcccaggctggtctcaaactcctgagctcaagcgatcctcccgcctcggcctctcaaagtgctgggattacaggcaggagccaccacgcctggcctatagcaattttgaaaactggctcaagcccattcctctatcccctgacataaccccccaaagagaagactttttaaaaaggtaagaaaactgtttttttttcatttttaagagttttatattagctataaatttctggagtaaagatttggttccacctagtcagctcccacatttttctccccatcatccttggggctaaggtgtaggagagctgggtagagacacacacactcacacacacgcgcacacacacgcacacacagacacacacgtgcgcacacacacgcacccagacacacgcgcgcgcacatacacgcacacacatgcacccagacacgcacacacgcgcacacagacacgcacacgcatgcacacacacaaaaacactccttgtgatggagctctttaatcctcctggaccctgaacgctttggtgaacacaagcgtacaaaactaggataacccaaatattattctgaattctttttttcagtcgtttaagcaaaacaactttcatttttaaagtttatgtgatttttccttataaatatcatcacattccacgat

SEQ ID NO: 295644 - DNA, 1000 bp, Homo Sapiens
caccgcgcccggcgtccgttgagccgcggctgccgcagcccggcccgggggcctcgcgctcccgacctctgtcccgggcctcgccccgcgggaaggacccggagccacggcggggagactggaaaggcctagaaccgcgcccgggctcctctggggcccgaagtctcccaagggggtcgctcctgccagccaggcgggagcgacaggcatcgtttttgtgcctcctccgtggctgtggaccggagccccatagcccaggacttgcacacgcaaggggcgctctcggggaccgcagacctcggcgacgaccccagcccgtcccccgaggggccccgatgaacgaggacctcggggtgccccctccccagcacgtttgtgcgatttctgtgatctagtccttaaggaaggtggccgttttctttttcccccctaggatgcagaaagtagatgacattccatccacactgtgtgagcaaattggagagattgccttgatagaggactgatgtttttcactgatgagatggtaggggttgtcttgctattggagaaatacatcatccctgaagaactgtgagcaagtggagcgagtgtgggctttgaagggtagcgagcttgcaccctgaccggggagggcccgggtcacacagttgttgatgtggaacaggtaattgccctgtttggagttgcctgttctgcccaggaatgtactccagggcctgatggcgatgctggaactcgcactacagtaaataattgataagaggaggcagttgtagggttcacttttagctggaagttcttaggggacagaaaaataacttggagtagtgagtggttctgagtaagctcaggaaacgtcaaataaaaactggatctggtcatttaacacgcagctcgcagatatccagtgctagaagaaaacaccaaaacgcggtaaaattctgtatgtgggtccacttcccgtgtctggcgattaaaataagaatatattcttgcg

SEQ ID NO: 295645 - DNA, 1000 bp, Homo Sapiens
ccctcaggcgctcccacagcccggcaccgccccctcgccattccggagccagcgcgggctaagcgggcctggccggggatgagcggagccaccgtccccatattcctcggtgccccgggaccgcaagagggagccgtggtttccggaactcctcccgcccctccgggcttttcctctgttaggcaggtggcgattcgctgtctttgcctgttatggccgctgccgtcgccctggagacaggtaaccctcttccatgactgttccttaaagtggtgcgctgtcccagtagaccatgctctagctttccaagctgctagaactgtcagtgtttctcagccttggcactattgacattttgggaccagtgattcttcatcgttggcagaggggagggtgttgacctgtgcactgtaggatgtcaggtggcatccccggactctacccgctaggtgccagtagcacctaatgtgccacccaccccctcccaacaacttttcaaccaaactaaaatgtctctagaggttgccatatatcctctgggggacaaaatcacacttagttgagaaccactgtcccacattctacacacagaagccaaaaggatattttttaaatgtaaatggcatcatgtcgttcccctgttggaaacccttcaatgttttcctgttgaccttagaataatctcaaattccttactgtggcttagaagaccttctgtggactggcccctgcttgcttttaactcctctcttccgttctgcttccatgtctatataattgcttctctctcactccagccacactggccttctttctgttccttgaacattcaaagctggttcccatccaccctttgtatttgctgttcttctgcctagaatgcacctgttccagatcactgttcattcacacatatctcagattacatgttaactaatcagcaaggccttccctgaccattttatcaaaagaagccacttacttccattctctatcacat

SEQ ID NO: 295646 - DNA, 532 bp, Homo Sapiens
gagtcgacctttgagacctgcttattcatggctgtttcacggatgtcgaagtggaggctcagcagggttggaggttcccggagtctcccagctgaaatggaagtgcttggtgaggtttggtgtgtccgagccgaagagcagccaatgacaggcctggggatcgtctggcacagcccacttgacaaggccttggaaacttggtctctgcagcagcaaccggatttcagcctgggcctcggacacctcggcctgggactgtacatcttggcctcttacctactgtgtccgcgtcagcctccctcacagcctgatggcccctgcggcagccccaacccggtttcaggggctaagaaaactacagttgcatgaacgggtggaggtgagtgggaggcagaagcggcggggagaaccagtctgttccgagatctctggaccaaccagtggatcctgatggtcagccttgtctagagccccttccagcgtgcaggccagtcctcctggcattcttctaattacaccgagctgtgagtta

SEQ ID NO: 295647 - DNA, 1000 bp, Homo Sapiens; identical to SEQ ID NO: 119377

SEQ ID NO: 295648 - DNA, 1000 bp, Homo Sapiens
gagtgcggtggcgatcagagctcactgcagcttcaatctcctggctcaagtgatcctcccacctcagccttccaagtagttgggactacccacatgcaccaccatgcacggctaattttttggtttttttgggttttttgtttgtgtttttttttgttttgttttttgagacagagtctcgctctttcgcccaggccggactgcagtggcgcaatcttggctcactgcaagctccgcctcccgggttcacaccattctcctgcctcagcctcccgagtagctgggactacaggcacccgccaccacgcctggctaattttttgtatttttagtagagacggggtttcaccgtgttagccagggtggtctcgatctcctgacctcgtgatctgcccgcctcagcctcccaaactcaagcagtcttcccaccttggcctcctaaagtgtggaaattatagcatgaaccactgtcaggctcttttgtcagtcctatcaacctctaacatcctcgcaccagacaggacaggtgtctgtattgaaactttattacaaaattataaagcagagctctgtaacaaaataatacacatttgggtttgctttaacctccaagtaagtctgagaaaatcttaataaaagccacttgaagtaacaattcacatccaagagatttccacaaatttatacaatgtatattgagcactagttcctgtacagcttattcttattagtttggatccaactattccaatgtattatgaaccagtcagctatctgtcttttgaaacaagtcttaactgaaatctcagagtaatcagcaaaagctacggaataattctaagaattagatgtttccatatcattaaaaccaaggatccatgaggggcagaagggaggattcaaagatttaaaaaaaatcaaattttagaccttggttaaatattaactggaatgggatcttggaactcccaactttaatttggtgtaataaaaatgatgc

SEQ ID NO: 295649 - DNA, 1000 bp, Homo Sapiens
gagaaaagggagacgagcatcggggggtgagagacaaactcaggtctggctcttggcccttgacgccactgaattcgcttcccacggtgggaagaggagaaaagggccctgacaccgcggctcgccaggggcccgctgcgtagctgcatcccgatcccgctgaggggacagcaaatagtgaagtgctgatagcttgtggttgtcgttacactggaaggaaatagaaaaccggacagtggtgtgtgtgtgtgcgtcttggccaaaggaacttcttgggctgggattacaggcgtgagccaacgtgcccagcctaaaccttttagacttcattaggattctggttggtaaagaacattaaaaatgacaagctcattatataggtgctaattttaattactttgactactgaacacacgccaggtactaacaaagaagggagtattcaccctggggatttaaatctgtgaaaaggtattaaaacatatataaaacataataaaatgaaatcccaaaggtctctttccatctgagcttactttccctaatttgggtttgtctcttaggtccaccgggcatacttagtatctttggacaaataggaattcaatgaaaacgtattcttaaaggcgaaaaaggtggatttgctaggtaagttgctgtttctcaaggaggtagcctgggtgctataaatccaatccaatctaatctaatctaataccatacaatataatacaatcgatacaataaaatcaatatcccaaggaaaacgcttagaaaattatttcatggcaaaataatttttcaaagttttcactgtgcatcttcctggttttagagtaggcacttatttttattttcactattgctctatttttagccataaccaccagtactgcagcaaatacttcttgagaattatcctatgtactttaaaatgaaaagtatctgcttttagagagcaaacctctaattgacgaaatatataattgctacattaaaa

SEQ ID NO: 295650 - DNA, 855 bp, Homo Sapiens; identical to SEQ ID NO: 119378

SEQ ID NO: 295651 - DNA, 1000 bp, Homo Sapiens
tggtggaatcagaggtttctggctgactcggtgggtgctttgaaccaggaaaggacaagaaagaggttggagtacagtggcatgatctcagctcactgcagcctcgacttcctgggctcaagaaatcctcctgtctctgccttccgagtagctgtgatcacagttgtatgccatcatgcccagaccagatttcgccatattgctcaggatggtcttgaactcctgggctcaagtgatccgcctgccttggcctcccagaatgccaggattacagatgtgagccactgtgcctggcctgaagtctagtaatttttaaaactttgcatgttattctgctcatgagccaagttcgggtgcctgtggaacagctatattcctcaaactagatatgcaccccagtccctggggattctgtcaaaaggcagattcacattcagcaggtctagggtggggggcctgacattcggcacgtctcacaagctcccaggcgatgctgatggtgctggtccctggacgccctcttgagtagtaaggaacaaaaggactctcccctgttcttttcagctacgtagcccagtggttctccacttaggcttcacactggaatcatccagggagttttaaactatagtgatgcctggcggtgtcttactcgcagagcttctggtttgattggtctaggttgcagcctgggcaaggagatttaaaaacttctcagatgggccaggcatggtggctcaagcctgtaatcccagcactttgggaggcagaggtgggcggatcacgaggtcaggagatcgagaccatcctggctagcacggcgaaaccctgtctctactaaaaatacaaaaaattagctgggtgtggtggcgtgtgcctgtggtcccagctgctcgggaggctgaggcagaagaatggcctgaacccgggaggcggagcttgcagacagccgatcgtgccactgcactccagcctgggcgacagagcgagactccgtctc

SEQ ID NO: 295652 - DNA, 1000 bp, Homo Sapiens
tacaaaaaattagctggatgttattgcgggcacctgtaatcccagctacttgggtggccgaggcaggagaatcacttgaaccagggaggcagaggctgcggtgagccgagaccacaccattgcactccagcctgggcaacaagaacaaaactccatctgaaaaaaaaaaaaatactgagccagtccatgtgcattatttcatttctggtggactcttcccgatgttaatttcacctgagatatttatgcatgtgctcatgtgaacacacacgtgcgtcagcacacactggcctgctcatgcacacacctgcaagtgctgcttccagcctcctgccacgaggccagcctggctccctccctgtggagtgggctctgcccacggggcagatggactaagacgaacgctcgttaagccccccagaagttgcctggcttggcactctctgcggtatctgaggcggggctcactcgcccatttgacagatggagaaactgatgcttagagatgtggagtgagtgcctgactcccccagcgcccccggaatcccccagccccaccgactctcccagatcccccgactcccccagcccccccaactcccccagccccaccagcacctgctcccaccctccccaaactcaaattgcacccgccccagcttcagggcttggttggggttcccttttcagtcaaggtacaacatccaggcggtaaaatgctcccatcagccacttactggcgcagtggctcatgccggtaatccagtactttgggaggccaaggcgggcagatcacaaggtcaggagttcaagaccagcctggccaatatggtgaaaaaaattagctggccgtggtggcacatgcccgtaatcccagctagtcaggaggctgaggcaggagaattgcttgaacccaggaggcggaggttgcagtgagccgagattgtgccactgcactccagcctgggtgacagagcaagactccatctcaaaaataaat

SEQ ID NO: 295653 - DNA, 1000 bp, Homo Sapiens
cgcgcgagtctggcgcctggcgtgtggaaggcgctcagtaaacgtttgtggagcgaagaaacgacgcaaaggtgatgagcacgacgcagttaggaggctattggcccggcgcgggggaaaagggggaaggtcgggctcggggtggcaggaccccagagggcaggggtggctgccggggtgctcttggggcaaggtgggcgtcaaggcccccagcaaggttgggataaagtttctctccgaggcacagactgccgcctgcgggctcagcatttacctctcccttcctccttcctaacgcaacttcagcggagggctgagggctctactgcgcattacctggaaaacttatttcactccacggccctaagaggtgggccttattattagccacggccagggttagggtgaggccactcctccagggcagaatttcagggggtgcccacccccccgccctaaatcattcagcaatcaacataaattatagttcaacgcaatgtatcttatcttgtgggccgcaagccacccaggtgcccaggcaagagcctgaaggcacaagctgttccagtacagcgaagaaaataattagaataagaaaagttttactagagataggaaacggataggattatatctgactattattaatcattagtttgtagcatcactctttgttctattaccataatgatctctgttctattatgattaccttgggggaaaccaggccacacagagttaggagctgaagggccacagtgagaggtgaccagaagacgagagtgtgagccctcattcacgcccagagaagggccgctggagggctccttggcctagcggtaatgccagtgcctgggaaggccctggttacttagcaggccttggtctagcggtggccccagtgcctgggaaggcacccgttacttagcagacccggaaagggaatctccctctctccaggagagacagagtgtgagccactgtgcccggctgggagcaa

SEQ ID NO: 295654 - DNA, 1000 bp, Homo Sapiens
ccacactgggagaggtctgattgtccccatgttcctggtgtggaaccacatggaagaggcctatgttatcccaacagtgcagaagcacagcctgagtctcttctttggctgagccaagggcgtgctggagaggcctgacagaagaaggagcggcccttgtgaccagtgcccttttggttcacaaggaacttctcctcttgttgaagtgacttggctgagcttgctacttctgctttgagagtcaaatatcaggatcaagactttaattatccccaatttacagatgatgaaaccatattgggcaggaaagaaagtcaccccaggagagcaagttggacctgagcactggctgaggacaaaggggaatgataatttgggatgtaacttgttaaggggtctcacaagtgttcttgtgatccaggtgtcgagaggatacagcagaaaggttgccagggagatgagggtagggtacaccgcaagagtgggagaaattaaagagaacacgcaacaaagccttgggacactgggagggggatggaccacccagttttgtgctatgggagaagagagcaagaaaaggaatctgtgttaaatcccgacagcctgcatgagaagcaaatgcccttcattttcttcatcagcggcgagactggcatccctgcagctttgggagaccatgctagtgtagatgccagctcacgccagcgggcctgactgggagaccttgggctggggttctggtctggggctcctaggcctgatgggaggagagttcagccccaggtttcctgtacttcagctcatatccacacaatggtaattattgaaatgagagactcaaaagaagatggaacgtgaacttttttgttgtcccatgtggacacctgtgttcggtttccagttctacctcttgctgtctgtgtgttcttaagtaactcacttaaacctttctgagtctcattttcttcatttataaaataaaagacgtaacatttatgtc

SEQ ID NO: 295655 - DNA, 1000 bp, Homo Sapiens
cgtgcttatgagataaacgacaggacccacaactctcccaggagcacagccccaggacctaacccaccgggttctgctcgctcacccaattcccagtgcgagcgcgcgggggaaacgtgctcgcctcccgcacctggcttccgcggccccgggagtcgccaactctcccagcaggcagctccgacaacccggacagccgggccgatcccccgccccaccacccgctcggctctcgcgtcctcctcttcctcctcccgtggccccttgcctcccgccgtctgcctctgcggccgccgcctgcggctttgttttcctcccaggtcgcattccccacacgtgattccgtgttattgcaaagagggctttggagcgcgagcgcggggcgcgcgcacctataaatacggacacccggccccggagcccgcgagccagcggccaggcgaccggcgggcggccagccagcgagccgaactagccgagctaggtagcgaggcgtgcgcgtgggccggggcggcggcgcccccatccccagcaccgaggggcgagcatggcccgcccgcgggggggctggaccgccgcgcacgccgcccgatccccgcgccctacccagcccgggtcgccgccgctcgcgcccgccgcttagcgctcgggcgccgctcgcttctccgggcatcgcggaaatcccgccgcagccccagcctcagcccgcggccgccgcgccggcccagccgccgcccgaacccccccggaagccgcgcatggacccgcggcgccgccaggctgccctctccttcctcaccaacatctcgctggacggccggctgccgccgcaggacgcggagtggggcggtggcgaggagggcggcgcggccaagccgggcgccggcggcgcctgcggcgcgaggactcggttcagcttgctcgccgctgccgagcggggcggctgcatcgcgctcgccgcgccgggcacgccggctgcggggttagccgctgggtccgg

SEQ ID NO: 295656 - DNA, 1000 bp, Homo Sapiens
tgatatatgtttgctggtgcataagggagaggaaaaggttcgtcctgatggaaaaccactcagaagccaaggagtaattcagagggaaccagcccaggaagacactggacacaagaggtgtccttttggtgatgagcagacacaagaagatttaaccatcagctttaagtctcttcttagcgttgtgcaagccagagagttgttgctagagcgtggaggcaataatgatggaacagaaggcaagaggctgtcatcgttcacatcacaaggaccagagacacctttcctgggaagagagctgacaaccttctgtggtgagaagccatcctctcttgaatgggggctcccactgtacatctggcacccacttcacagatccatgaactggaagatgctttcttataactcagagaaaagagatgaaaatgaatcaaagaacaggaaggagacaagctcaggaggaaaatgtgtgtctggatcatcttgtggcccgaatggggagaaaaggcctgtcacagccggcccggctgtgactaatgccaagctttgcatacagtggtcacagacaccggcagcatgctccctttacagcgccggcgatgcgctttgttgggtttttgactcttgcggaatcactgaaaaaacatcgctgctggtcatagagagtggcccgctgagcttatgggaaaggctgcaagaaaatccccaaaccaaggtgagccagcagcaaagaggtgggcagacttctagggtaaaaatgtccaggaatgtggttaaaggaaaatggccagtaaagagggtgtttcgccagcttgttctcttgatgcggccacaaaaggctgcaatggaagatgaaaaccaagccaaaggcatgccacttctgcccaacacagggtttgtccattttctcaagggatcggcctcattgcatgaagtcagtccccagagagagcacattccgtttgcaccgggcctgctgcagaaggcccaatggatgtag

SEQ ID NO: 295657 - DNA, 670 bp, Homo Sapiens
ccctggggacccatgtttctagttgggctccgttggcctttttgatgcgggagtgatgaatccacgcaggaatgccatccaccttcagagccgttggcatcgtgatgacggtgtgaggtctcttccaagcaggagggagtccttctctctggaactaccccggggtcagcagttgaggactcagaggtggaatttttgtgggcacccacatggtagtcgatccgctgtcctccggaagacggtcaccctttggggacctggaaatttttttttcaggtggcactcccccctacaagctggctgtccttccgggggagcacacagcgggcccggctctcgcccggtgacgtttctcccggtgacgtttctcgctggggcctccaaatgtcgtacctttaatctggagacaatacgggtcagaggtcaggaaactacatcagcgccagtgcgagcgcccacgagtccggtggacggatgagaaacggccggggggcagcctgagtcccagttcccgccgtggcaatggccaatttcccacccgtggacgcaaaaggccaggactccacgctgctgaccctccagcgtcccatgtccggcaggcacgtggccgaatagcccaagactgaggactcacacttcccactttgcacctggaggccacctgcagacc

SEQ ID NO: 295658 - DNA, 1000 bp, Homo Sapiens
tttcctgcgtctctcagcctacctgaccttgtctttacctctgtgggcagctcccttgtgatctgcttagttcccacccccctttaagaattcaatagagaagccagacgcaaaactacagatatcgtatgagtccagttttgtgaagtgcctagaatagtcaaaattcacagagacagaagcagtggtcgccaggaatggggaagcaaggcggagttgggcagctcgtgttcaatgggtagagtttcaggctggggtgatggaagggtgctggaaatgagtggtagtgatggcggcacaacagtgtgaatctacttaatcccactgaactgtatgctgaaaaatggtttagacggtgaattttaggttatgtatgttttaccacaatttttaaaaagctagtgaaaagctggtaaaaagaaagaaaagaggcttttttaaaaagttaaatatataaaaagagcatcatcagtccaaagtccagcagttgtccctcctggaatccgttggcttgcctccggcatttttggcccttgccttttagggttgccagattaaaagacaggatgcccagctagtttgaattttagataaacaacgaataatttcgtagcataaatatgtcccaagcttagtttgggacatacttatgctaaaaaacattattggttgtttatctgagattcagaattaagcattttatattttatttgctgcctctggccaccctactctcttcctaacactctctccctctcccagttttgtccgccttccctgcctcctcttctgggggagttagatcgagttgtaacaagaacatgccactgtctcgctggctgcagcgtgtggtccccttaccagagtgaggatgcgaagagaaggtggctgtctgcaaaccaggaagagagccctcaccgggaacccgtccagctgccaccttgaacttggacttccaagcctccagaactgtgagggataaatgtatgattttaaagtc

SEQ ID NO: 295659 - DNA, 747 bp, Homo Sapiens
atgcgaaccctccccctgcgcttcgccggcgatctgggcacagtggcggagggactcccgcgcacatgggaggagggcggctcagccttccagtccccgggcgcgccactgaggcctgcggcgcagcgggggcacccgcagaacgcccggcccggaccgtgggcgtacaccgcggcgactgcacgctcagaaccccccgcgcgcttcccacgcctcttgcacggccgccccggaagcgcgctcgccctggaggtcgcagaacgagcggcgcgcgccgggctgggcctgtggacctggaggaaattgaagcggcgaggaacaggggatttgaggcaactcagagaggacaggcccagcagccggccccagcctgatatcttccctccgctcaggccccagacgcagctgcatcctggagtccttctgagaaatgtgggacctgccccagctccaccccaggggcagcgagggaggcgttggatggagccaccccacggctcctctgtgaaggtctgcacgtcactcagaaagttgaagcaaaccaagcagggttggagcccacagttcacagccggctgcacaggggatgcaccaagcacagtttcctatgacaagtggaaacctgtgcgccacagcaaaactccgtcaccacagcagcagatggctccgaagaagtggagcgttttcatcaggttcaactttgaaacctccaccatcaccatcaccagcaccgctgtgtcatgctga

SEQ ID NO: 295660 - DNA, 1000 bp, Homo Sapiens
tccagatgcagggaagagtaaccatgggaatgtgggtcagtagcaacaggcccagaagggcagccacagtggaattgtcaggcgtggaccctgaaatgacaatcacaacatgattgctggcaggagcctgaaatggtacagctttggacatcggtttggcaaattcttttagagagaaacacacaccttccctaggacccagcaactccactcctagtaaccaagtgaaatggaaggagttgtcctcagcaaaacgtgtgtgcgaaagttcacagtcactttctcggtgataaccaagagctggaaaccactgcaacacccaccagcaggtgaacggattaacacactgggctagggccacacaatgagatgctacgtggcaacacaaaatgaaccgtggacacacactgcacggcggatgaatatgcagacatcaggccacgtgaagggagccaggccccgaggcgccacgctttgtgattcagggtggtccctctgcccccaggacactggcgcctcttcttcctgctggctgcagggagtgcttgtgtctgaagaactccaggctggtgtgcccagagggcggctggaggggctcagaaaccattttcacttttctgtctcctccatgtctgcactgtttggggaagaaagcacgcagccaaagagcgcaaagaggctcagaggaggcccgggtgccctggagagacgctgcgtcctgacgacacagcatccctgtcccgcagcggagatttcccagatgaaggattccccggcgggagacagggccctgcacacaggtcctctgccatgctgctcaccatgcctgtgtgttatctcaccatgaaaagtcacctaggccaggcatggtggctcacgcctgtaatcccagcactttgggaggtggaggcgtgcggatcatctgagatcaggagtttgagaccatcctgagtaacatggtgaaaccccatctctacgaaaaatacaaaaattaactggg

SEQ ID NO: 295661 - DNA, 1000 bp, Homo Sapiens
gactagaatgtttcggattacaaaagaaaccggttctcttcacatccttatccttgtgatgcagcattccgcttgcaattggaagccgtttaatatcagagagaaaccatatttatgaaagtaaagaggctgcttagatgactgcaaaccagccgtccttactggttttatcactggtaatgttataaagacagttgtccagtttcatgaatcttgtaggtttttttttttttgatgttgttttttttttcaaaaatccgtattgtagaaaaatatgctgtcccagaagagatgattggacactctcaagcgtggtgctggactttgtcatctcttgcacagccatctccacaccttagtgcttacctcatgttagttttttatattctgcaaagacgaaaccaaaataatccaaatttgacacaaatacctgggctacatcttatttgagatgtttaacaaatgtctggatcatcttttcttatatattacgcaggaaacactgtgaagtaagcaaagttggaatgcccaagtgaaagaccatttgaatatttacaagtagatttcagacaggaatactacagggtggtcacaggataacaaattctaggcagcagatttacatgacttgaggctgtgggctgttaagacgctgaaaaaccagggtgtggaccaagctggctaaggctgagtggacccaacgtggtgctggattggatggaggttttacctaggccctcattatatgctcattaacatactaaatcacacacccgccagtgccatgacagttctgagaccagtgtttgatgtaaaaatggcaccacagttccaagaaatctccacctttacccaggaattttcgtgaatattccaattcttggttaaagaaacccatcaagatgaaaccccagaacccattattctctcttgggtatgcccaagctcccctttcttgagtgtgtactttttgctttgcaataaatctcttctttcacta

SEQ ID NO: 295662 - DNA, 1000 bp, Homo Sapiens
gagccgcacatggtcacagagtcagaggcttgtgaaattatgctggcaaacagaaatgagggaagtagcttcttccatttgctactgtgtctcccaggccactgggtgctctctgcagtgtgcaagggagtacagcacccctgggagcccaggactggtgttggctttctgttaagtcattttcaccctaagccattcttggcctcctcacccacagaatgagggaggttaggctgcaggccacaggtggatcttcatctacagcctggagctggggagagggaaccaccccagtcattgactcgcctgggtttctaggaagaggaatgagaacgaggatgggagaggggctgttggcaggggtgggtggagaggtctctgattgtctgatggagagcagcccagttcacagggaagtgactggggtgattctgagactagagtatcccaagccctcccccatcctctcagatccctgtgactgctctaaaaccacgccctctcattttggctcagtggatctgtctttgctcagccttctccctctggggtcggagcaccccctccatggcgcattccaccttctccccactcagcctcagcagcagctccaagaaatgctggccacttcccaggctttactcacagtttccacgtgtgtggaagtaactatagaggccaaatttgcattatcaactggggactcctggaaatgggggtgtctccaagagatatatttgatacacgtccagagaattcctgaaggaaagaatctggggttgtcaggctgatatcatgaaccccacatttaacacattaagtgaagagaggggacaaaggccaggcttgggaaggaaggagggatcaacaaagcccttacccaggacagataaaaatgatagaatggcagtaaccccatttggagcccccatttgtagtcagcaagcaaagtactggtcctttttacaccttatctaaccatcgagacacgcccctgtgg

SEQ ID NO: 295663 - DNA, 672 bp, Homo Sapiens
caccaaatccaaacaatcaggccacaaacccgtcaagagctcgccggtctggccgtccagtcgccgcccgccttgagactcagcctgagctacagcttcgaaactagcctctagccttctgggtctcagcacaactcttgagcaatccaaccctgtggccgtgggcagataccaagatgcacagttaccgtgtggccagctgccaagcgccactacttgcacctgaagtcgcagccccgcgctgcgcacccagtcgaggcgccaacacgcgaactgggcgggagtggccggcccgcgggggagcgaggaacgacagggttccccccactcgctgcccagactggccgcgggatagcgcgccccccccaaagcctgcacccctgccctgctcctctatcattccgtcccccttgctctgtcaaaccctgccggggctgctctgtctctgccgacccgccacttgcccgaagttcggcctgaggagcttggggccctgaggagcgccgacgtaggcagccagccagtcaatcagtcagagggtcacggcggcccctcggctactcagtggcagccaggccagaaagaagcagccgccaaccctggagcagaatcctacagccgacctgacctagtaggcccccagccctccagagcttggggtattgcagagcc

SEQ ID NO: 295664 - DNA, 1000 bp, Homo Sapiens
ctgccacttatgggaatggtgagttaggacaaatgatttccctgggcctcagggtcttcatgtataaaagggctgaagctcagtgggtaactggagcactgcctgggttagatcctggctccacccctttccagtgtgacctagggtgaatgagttcacctctctgggcatcagtgtccttgtctctaagatggacttgataataatgaaagctacccctcacagggctgtggtgaggatgaaggggtctggcagcacatgtagaattcttagagcaggcttttttcctgcagagtctttgttgctatcatcatcatcatcatcatcctcatcctcatcatcatctacctccagggattcttggggggcttaaacaaggcaggttgtacaaattatctggcacagacgtcattaaataataacagggcagagtgacgggtgctgtgatacagggaagagctgggagagacacaggaaagagaaaagacttctgtctggctgggtggaagaagggtgtggaaggtatggaagccaagggaaaacttcccctttgccctctgaaggttcactgaaaagtcaactgacaaaaggcagatgaatagcagaaatggcatgcaaatttattaatgcgcacacagggagaaccacagagtgattgattactccccactctgcaatggggtgcagaagcttatatgccatcttgaggttacagaaagaatgggggcttggggcctgagcgcagtggctcatgcctgtattcccaccactttgggaggccaaggtgggtggatcacctgaggtcaggagtttgagaccaccctgaccaacatgaaaccccgtctctactaaaaatacaaaaaattagctgggtgttgtggtgcgcacctgtaattccagctactcgggaggctgaggcaggagaatcacttgaaccagggatgctgaggttgcacgagctgagatcgcaccgctgccctccagcctgggcaacaagagc

SEQ ID NO: 295665 - DNA, 1000 bp, Homo Sapiens
ctcccaggagctgggattacaggtgtgccaccacatttggctaatttttttacttttagtagagatggggtttcaccatgttggccaggctagtctcgatctcctgacctcaggtgatccacccgcctcagcctcccagaatgctgggattacaggcatgagccaccgctcccagccaggatcttctttttaaagctatcaccacccactctcattccccaggactctcctcacccctccggctgcaaaggcagctggtgtccctactggctccttcctttctgcccctaaagacaggcacacaggtgattttccttttaagtgtttttctgtggattactgcggggaaattgacaggggctacaggggctgataaaaggaataatctttgatattctttcagttgggtcgctgattttcttgctgggctgacaagagcaatcttccctacttggaatcttggttttattccttagcatgggccttatcaaacctactttttaatgaagggagaatgaagaagccattgaagcagacctctagctgccagtcaggtctgctctgaaggctgcctatctgcggggacatgtgacttctggggctttccagattaagtaatgctcaccccacatgtctgaaattctccaaacactattccggccctgctgtgattcttagagcagaggttctttgcctttttagtgtaatggatccctcagcaacttggtgagcccttctcagaataaagtttctaatgcagaaagtaaaacacatgggataataagggaagtcatgtcctttgaaatccttatcaaaaatatttttcaaattttgtgatataataagtttggttgctattatatagcataatataacttcatatctaatagctattgttattttgaagtagtggtgaatatatatgctattttgagatgtctaaaacaactgtaatgtgttacaaaaatatccatgatttctatcggtgacaaagtcaaaa

SEQ ID NO: 295666 - DNA, 1000 bp, Homo Sapiens
ggatcagcctctggctgaggcccacacagtgtggccgctcacccacctgtccacagtgaactgccagtattcttgcagtcatgggtatccagtgcagggagcctgtgtagtacgacagatcaatggccctcagcgtgagcatgctcccctggtcattcctgaaaccaaggcgcagcgcgctgtttcagcgaggctcagaaaagcggtgcccagccccaccctggggcagacaccactgagatccagcccaccctcctccgccccacccctaccccacgcttcagatgaggtctccagccccctctggctcctcctccgctgggctttctctgaagtcagcggcagcatcctttctcctgagcgctgcagcccccaccccaaccccagaggaagtaacccaccccacaggtcctgggactgccaggctgtgccccagccacccttgagtgtgcccagctgtctccctaggctcctactccctgtcagccgccacccagggctttctgcctttagtaggaaagggggtcttcaacaaaatctacactttggattgaaactgccacccaaacgcaaatcccctctgttcctcgtggggccgtgtctcacacatggctgggaaacacacactgtacccacccacttccggagcactgccttgggctcctagaactcatccagcccatcccagctcccggctctggtacacgctttctccccagacggcacccactcctccctcagcaaagactgccctggctgccctcggctgggccttcccctgttactcagcctctgacacacccaaatctcccctgctgcacccttatcacactgtttgattacaatagtgtatgtaatggtgtgctgtctgcttctcctgctaaaatgttaactgccagtttgtcttatctgctgatgtgtccccatctctggcagagcctctgcacatagtaagggcccagtaagtatctactgggtgaataaatgcatgagtgaatgc

SEQ ID NO: 295667 - DNA, 1000 bp, Homo Sapiens
gctgctttagagactctctgcttcaggaaagtgaggcagctaggcagaaggagaaggtcggattgtagaagctggggtggccggcagctcgctcatcggtgttcgtgggctttgtcggtccgtgcctcgtctctccctggaaagggagggaggcttcaacgtcgagagggagccgctgccgcgttagttccgagcttgaagtcactaggacttctctcaaacttgagtgctgaggagactcagatgttggcctcagctcctaggctgaactcagcagatcggcccatgaaaacttctgtattgagacaaaggaagggatctgtcagaaagcaacacttgttatcttgggcttggcagcaaggaagaggacaggtagtggagatcctgcaatctgaaaagcagactgaaaggtgacaaagaagctgaagatgggtggtagagagaggtataacattccagcccctcaatctagaaatgttagtaagaaccaacaacagcttaacagacagaagaccaaggaacagaattcccagatgaagattgttcataagaaaaaagaaagaggacatggttataactcatcagcaggtgcctggcaggccatgaaaaatggggggaagaacaaaaattttccaaataatcaaagttggaattctagcttatcaggtcccagcttactttttaaatctcaagctaaacagaactatgctggtgccaaatttagtgagccgccatcaccaagtgttcttcccaaaccaccaagccactgggtccctgtttcctttaatccttcagataaggaaataatgacatttcaacttaaaaccttacttaaagtacaggtataaaataagacaaatgtttaagtttagttatgttcacagatagttgtcaattggtctgaaacaaatttgctagggaatctatttgtgtagaactaattaatgtaaaaaaaatagacttcatctcgtgttgtgtgcactgtgatataatggggtag

SEQ ID NO: 295668 - DNA, 685 bp, Homo Sapiens
atgctcagctctgtgacttctctcccgtatccaacgaaatcctcagagcggtccaaatctccacttgcagattctacacaaagtgtgtttggaaactgctccatccaaaggaatgttcagctctattctaccaaaagtgtgtttccaaacggctccatcaaagggaatgttcaactcggtgacttgaatgcaatcatcacaaagcagcttctgagaatgcttccatgtaggtttgatgagaagatatttccttttcctccccaggcctcgaagccctccaaatgtccccttgcagatgctagaaagagggggtttcaaagtagctctatcaaaaggaaagtacagctctgtgagttgaatacaaacgtcacaaggaagttcctgagcatggttccgtttagcttttacgggaagattattccatttccatcgaaatgttcaaagaggtccgcatatccgcttgcagattccaccgaaagagtgtttccaaactgctgcatcaaaaggaatcctcagctccgtgagttgaatgcaatcatcaccaagaagtttctgacaatgcttctctctagtttttatgtgaagatatttccttttccaccacaggcctgaaagcactccaaatgtccacttggaggctctacgaaaagaatgtttcaaaactgctctatgaaaagcaatgtta

SEQ ID NO: 295669 - DNA, 864 bp, Homo Sapiens
atgctagaaaaagagagtttcaaaactgctctatcaaaaggaatgttcaactttgcctcaaagcgttccaaatctccacttgcagatgctacgaaaagagcgtttcaacctgaactcacaagggaaggttcacctctgtcagttgaatgtcaacatcacaaagaagttctgagaatgttcctcttcagtaatgtgagttctctcccgtatccaacgaaatcctcagagcggtccgaatctccacttgcagattctacacaaagtgtgtttggaaactgctccatccaaaggaatgttcagctccattctaccaaaagtgtgtttccaaacggctccatcaaagggaatgttcagctcggtgacttgaaagcaatcatcacaaagcagcttctgagaatgcttccatgtagctttgatgagaagatatttccttttccaccccaggcctcgaagccctccaaatgtccccttgcagatgctagaaagagagggtttcaaagctgctctatcaaaaggaaagtacaactctgcgagttgaatgcaaacatcacaaagaagttcctgagcatgcttccgtttagcttttacgggaagattatcccttttccatcggaatgttcaaagaggtcctcatatccgcttgcagattccaacgaaagagtgtttccaaactgctgcatcaaaaggaatcctcagctccgtgagttgaatgcaatcatcaccaagaagtttctgacaatgcttctctctagtttttatgtgaagatatttccttatccaccacaggcctgaaagcgctccaaatgtccacttggaggctctacgaaaagaatgtttcaaaactgctccatgaaaagcaatgtt

SEQ ID NO: 295670 - DNA, 830 bp, Homo Sapiens; identical to SEQ ID NO: 225113

SEQ ID NO: 295671 - DNA, 394 bp, Homo Sapiens
atgtctctctatacatttgtacacactgtttcaaattgtaaagtcttaagagtcagtgactgtcctatctggtcactgattaatcttgcctggttaatgaaatgtgattataaaaggacccccaagtatttcctgcacttctggcagcaattttcttccctaaatcgctggtacttctccttaggatactcaggggctcctgcctgtcaggcttctttgcttgcaaggccttctctctctggcacttcttcctttcatcagaactttcctgtcctgctcttatctgctcaccaggtgggaaaacagctcgagaaactaatctgagcaaaggtgttaaaggctgacatggatttaataggtttaatatgcatcttctccaagaagcaggtcaaat

SEQ ID NO: 295672 - DNA, 1000 bp, Homo Sapiens
tcccaaaggcagcccaccacagaagccctgccacagcccaaggggttagatgctgccaggatctgtttccgccacagagcagctctgtgcagcacgttcctgccaaccaccctgagtgcttcagggcttccgaggccgtgacagtgagggcagcggcacttctgggtcaccgtgggacaggtctctgcctcaggacacggattgacaagctctctgagtgggccaggagctccttaatgtgagccaagcccagccctgccaccttggccccgttcacctcgaggatctcatcgcccacccccagcagccctgagtacagcttggccatgctcatgtcagccatctcctgcacgtagatccctgcagaggaaaacaggagaatttcacaatgacacccaaatcgaagaagtgcatctctggaatgctgaccatgttgatgaggtgctgtttgtgtggcacagggaggaggtgctcataccaggcacttctctgtgcgcatgcacacatacacacacccctcattattccatctcacaaccacaactggctttagacatagatacagtgcgcctcctccatggtctaactccattccactgtctctgcttttaaagtggaaatgctcctagtgcaaataacgcgttaaactgttgtcatttatttatacctgacagtgagtgagctaatctttttctgagatgagcttttcttgtagaattgggaggaaaatagtttttaaaaattaggaaccatacctactcagtgcctggcactatgatccagttgctgcctcaggtcacccaggcccagcgtaaaggccggggtggtgggaaggtatcatcggaagagcaaaagtggctgagccacatccaagcctggtttgctgcactctattgccaaagactgacactggcctcagtcttactcagatatggctcctcaattgggatggggaagcatctgagcaaaaaaccccaggaaaaataaaaattctagccac

SEQ ID NO: 295673 - DNA, 1000 bp, Homo Sapiens
tatcatcagagtgaacagacaacctatagaatgggagaaaatgttttcaatctatccatctgacaaaggtctaatatccagaatctacaaggaacttaagcaaatttacgaaaccccccacaaacaaccccattaaaaagtgggcaaagaatgtgaatagacacttctcaaaagaagacatacatgcagccaacaaatacatgaaaaaagagctcaacattactgatcattagagaaatgcaaattaaaaccacaatgagataccatctcatgccagtcagaatggcgattatcaaaaagtcaagaaacaacagatgctggcgaggttgcgaagaaatagcaacgtttttacgctgttggtgggaatgtaaattagttcaaccattgtggaagacagtatagcgattcctcaaagatttagaaccagaaataccatttgatccacaatcccattactgggaatatacccaaaggaatataaataattctattataaagatacatgcatgcatatgttcaatgccgcactattcacaatagcagacttggaatcaacccaaatgcccatcaatgatagactggataaagaaaatgtggtatatatacaccatggaataccatgcagccataaaaaggaacaggatcatatcctttgcagggacagggatggagctggaggcattatcctcagcaaactggcaaaggaacagaaaaccaaacaccgcatgttctcacttataaatgggagctgaacagtgagaacacatggacacagggaggggaacaacacatattggggccagttgggggagtgcggggtggagagagcatcaggaaaaatagctaatgcatgccgggcttaatacctaggtgaaggaagggttgataggtgcagcaaaccagcatggcacatgtttacctatgtaacaaacctgcatatcctgcacatgtatcccggaacttaaaatttttaaaaatcgtcaataataacaatgaaagc

SEQ ID NO: 295674 - DNA, 1000 bp, Homo Sapiens
caaccatcagtattttccaacaacagtgtaactaaaaatattataagcaacagacaacagtattctgacttcacaaatatccagattgtgtgtttatattataattccttctctatgtataccatgtaaaacctccatgtatcttaaaagacagtgatgttaatatcaatactggcagaaataacttgactggtatataattaattgtccaatctacctgggcctggtggctcacacctgtaatcccagcactttgggaggctgaggcaggtagattacttgagcccaggaattcaagaccagtctgggcaacatgactaaaccccgtttctacaaaaattacaaaaattagcctagctcggcatggtggtgcatgcttgtagttccagctactcaggagattgaggtggaaaaatcaactgagcccaggaagttgaagctataatgagtcatgattgctctactgtacttcaccttgaacaacagagtgataacctgtctcaaaaaaaaaattggtcaatctaatgccacattatattttgctttatatttggggtatattttatttcatagtttattatttttcccttcatgagttctaatagttttctcctcgacctaaggttaatccacttttaccatatgcttatcatctagtgcatagaacctccctgtttgtcaaagcactctaattgttgctttttattcatttcagaatgaatgttttctatatgcctgctgcaatgcatatcttttcctgttacttattttccttgaactcatggattagagtttctcttctatattttttgtttgcaattttcttccttatttgttataattcaccttcaattaacttgtttggctaaagtatatgaaaacaaaacctttggaattcttgcacatgcaaaactgttactatgatgctctcacatatgtttgtataatgtgtataattgcttactatacatattaattaaagattcaaaattgctttcta

SEQ ID NO: 295675 - DNA, 1000 bp, Homo Sapiens
tgtaatcccagctactcgggaggttgaggcacaagaatcacttgaaccctagaggcagaggttgcagtgagccgagatcgcaccactgcattccagtctggacgacaaagtgagactccatctcaaaaaaaaaaaaaaaaaaaaaaaaaaggacaatgcctgagcaacattacctgggtcccctagcccagcagggttctccttgtctcagccaaagatgggaagctgacttggttaggctgggcatccagacaccgaggctgaatagaaaagagataagaaaattacaacttacagactgaccctggggatgccagagggtggtccagatggagtaaaccccaaaaatgaccttctctggtgttagcctccacatgcattctgtctattgtgctgcatggcttgtgctatggtctgaacactggtgtctccccaaaattcatatgttgaaacttaattcccgaggtgatagtattaagaggtggggactctgggagatgatgagatcatgaaagcagagccctcatgaatgggacaagtgcctttataaaagaggctagaggaaagctgtttgcccttctgccacgtgaggacacatagagagcaccacccataaagaatgggctctcaccagacaccgaatctgccagcaccttgatcttggacttcccagcctctagaattgtgagcaataaacaactcataaagatatttatgaggccaggcacggtgactcatgcctgtaatcccagcactttgggaggccaaggcaggtggatcacttgaggtcaggagtttgagaacagactggccaacatggtgaagccccatctctactaaaaatacaaaaattagctgagtgtggtggtgcacacctgtaatcccagttactagggaggctgaagcacgagaattgcttgagcccgggaagtggatgttgcaatgagtggagattgtgctactgtactccagcatgggcaacagagtgagaccctgtctc

SEQ ID NO: 295676 - DNA, 1000 bp, Homo Sapiens
ttgcctcagacatgcatacggcaggagtgtgagatctatggagtgggctcagctcatggagcaaggaggacggcaggggctccaatgatgatgtctgcccattttactgagaagcatgacatctatcaacttcccagatccctgcgagaatggattgaggagtctgagctctggaaatcaaagtggctaagcgagcaccgttattgctgttaagaaaacctgcaatgcgcgagttgaaactttctaagtttggatctgcttttgtctgacctctgcctggatagtaaggcagctgagtgattcacaggcacagaaatgcaccacgttgctattcccagaccctgccacaaaagactgttgaattcccaatgtctccatgctcacttcctgtcctcactgtgactatgaggcactttgaagatttaacacattatagaaacacacagcatcatgtttataataagtctacattctgaatcaaaataatggtttagtcttctcagatgagagggaatatctggggctaaatgagggagggatctccccaacctttctgtcttcgagctggccatgaaggaattctctgatctaccttgtctgactgtggattatgagacctccatttcagaaggggtcccaaaccctggaggaaggaatgttgctcagagagatcaagaagaatcttaacagacaggcctcgctaggtttccctgctcagtctattaatattaaatcatcctctttggtccaatcacatttctacatggttgtccatgtttcagtcatgcctacccaaagaagtatttataaaaggtccaagagtatggggtcggagggtacagaaagcttccagacagctcagcttccaaacagacttgtggagggtcctagagggaccaacaccaataccaccgagccctcgttgctgcctcttcagcgcagaatagcccaccaagtccacgtttccctagtcccaaggtcggatggctggggagggtag

SEQ ID NO: 295677 - DNA, 709 bp, Homo Sapiens
gcaggctgaggctgaggagctggcggcaggaacaagggagagctgtgtccccgccggcgcccccacagccgcctgccggggatcttggcagtggaggtgctgctgcgctccacagacctcagacctcggctgggaccagaaatgcctggattccgcctgggccggtgggggactttgggtccccagagtgcaagctgtaccactgttcgggtcgccagcccccagcccccagtacacaggggctgccgtggagatgacgctgaaggcgcagccgctggaggacctggggtctgaccggaagctggctgcagaccctgcggaggcacgtccaggcctctgctctccggggctacggcctcccacaggcacgttcctacacccctctgtgaaccgcccacaggcccccccacaggtgttcctctgtgagctggtcgggcggccggggccggggccgggcttcgctgctccgtgccttccacctccctggcggtgcggggcctcagggtgggcctgggaagctggaaacacctttggaaacagccgcctgaggcagctgtggacagaagaccctgcccagcagccaagggagctggcctctccgctcagcctccccacccccaccaggcccagctgttgttttcacggctccgggaccaggcggatcctcagccaagagcttcccaggagagccctcatcttcaacccctag

SEQ ID NO: 295678 - DNA, 1000 bp, Homo Sapiens
gggtgggggtaggcgtagagtttgaaatgggcagctcccttatctcttggaaggttggaaggtagtctgaagtcctcattgtacctacaggatcttttttatgtcattagtttggtcagtgctggaggtgccctaaggggccttctatccacttggctgcaaatattggtaggtttattacagagatgggggagttgactgattgatagcttcagttgaactgggattgagagaggtgtggttgtgagttattattgaggtcttggcctcttgtcactgttcataatccaggcctgtttttgtaaacaataggccactggcctccatgtcctgtccagatgcattgcatttgctcttggaatcccccctgcagttttaaccagatatgtcttttttttttttttttttttttaacacatcctattcttaaactgttgccatcgggagtgttaataactttgatcttcccagatttctctccagaagcacgccatttgactaaggtgcaaagtgactttaaatgtttaatttttggaaggttcaaggctgataggtgttaatagaaccatatctgccaatttcttattggcaaaggatttctcaagagtgtctcaaaattaaacactttggatatttacaaacattgctcattgagatgaggtaatgcagtcggctatttgggttctctcttcaaccttgccacaaacagactattttgctttgctctgatattttcccattgatactattcaggatcatagaattttataggtggctgagcatgatgtcttactccgagaaggtgcctgatgaatgcttatggaactgatttgaatagtttagtccttcattttacagctgaggagaatacagagaactgaagaggcttgtccaaggtcacacggctagatggtggcagatctgaaactagaagcagatttaccaactctcaattctctattctgtatctttactatgaaacatcatctgaccagggtgg

SEQ ID NO: 295679 - DNA, 1000 bp, Homo Sapiens; identical to SEQ ID NO: 225115

SEQ ID NO: 295680 - DNA, 1000 bp, Homo Sapiens
ataattttgtgtggacatcttacacaagtactaagagattcatagataagaaggcaacagcatgagtgttgtttatcaagtaaaactgcttaggttggttaagttaaatattgctatgatttgaatgttccccccacaactcatgttgaaacttaatttccaatgtggcaatactgagaggtggggcctttaagaggtgattagatcatgagtgctttgcctccataatggattaactcatttatggattaatggattaatgagttaatggattagtgagttatccactaattgctctaatgggagtggaactggtggctttataagaagaggaagagaggcctgagctagcatcacaacccttggcatgtgatgtcctgcgctgtctctggatgctgcagagtctcccccagcaagaagcctttcaccagatgggccccctcaaccttggaattctcagccttcgtaactgatctgaagaggtactgcagctgtcagaatggaaccatttcccttcctcgctgtggcccattgcagaattttaggctagcaatatggggtaggatactcactcctgatgctgggcagtggcagcaaaccacagctcccagtcagccatgtaattacaaagcaaacaaccagcactctacagcgcactgtgttgccagatgatttgcccaattacaggctaacaggtttgaccgaggaggaaagaatggcagttccacatcatgactgtcaactgagcatctcagctaagccatgtaacaggtgaactggaagtgtctttcctggtgggtgggggagaaaaggaagaagcagcagcaaggagttttccccagagaaagaggactggcagtgtccgcggcagggaggcagcacgctggcttggtttccatcttgctacaatcccaaatatatccatgagtagggagacagtagtgggtttccaggggagatggagaaatgatgctagttaatgtccaacacaggacattaa

SEQ ID NO: 295681 - DNA, 832 bp, Homo Sapiens
atgcggcgacttctcagtggctgtggctggcgttggtccgaagcgtggtgttcttccctggtgtctttctgcttatctctttcctccctgggccctccggcgcgagggaccgtcatcacctccccgagagaggttgtccgcgctgccaggcgctgggcagcaggctctccgggtggccgggcgggcggcgcggagacgtcggcgggcctgatgtctgccttgagcgcccgcggtcctagcctgcctaatggcaccattgttgtgcggatgctgatgcccagcgttgagcctgtcgtctcctatattaggggaagttctcctggcccttcccaactacctcccctgtgcaagtttattacaactgaacggcctcaaggatgaagtctggctctgttgcccaagctggagtgtgttggcaccatcttggttcactgcaacttccacctcccaggctccagtgattctcctgcctcagcctcaagggtagctgagattacaggctggagtgcagtggcatgatctcacctcactgagaacctccacctccagggttcaagtgattctgctacctcaacctcccaaatagctgggactacaggaaaacattctgcctgtgttgcaatatccagaaactcctagatatactgatcaacagcagtttgaatgttttcctgatcagtgccattgacatagtcctgactcaccagagaagcaaagcaagcctcgaaagatggctccaattcattcaccaggtactgtgagaaggtctcagagtatctggtgctgcctgaagaagtgaagcctggccccggagctccaatgtgggtagtgg

SEQ ID NO: 295682 - DNA, 1000 bp, Homo Sapiens
aatagtgggggctggccaggcacagcggctcatgcctgcaatcctagcactttgggaggccgaggtgggtggattacttgaggtcaggagtctgagaccagcctggccaacatggtgaaaccccatctctactaaaaattaaaaaaaaaaaaatggccaggcatggtggcgtgcatctgtaatcccagctattcaggaggctgagacatgagaatcacttgaacccgggaggcggaggttgcagtgagccgaaattgtgcctctgcactccaacctgggtgacaaagcaagactctgcctccaaaaaaaaaaaaatggaacatggaaacatggaatgggagaaaatatttgcaaatcatatatctgataaggggttcatatccagaatacataaagaactgttacaactcaacagcaataaaaacaactcaattaaaaatgggcaaaggacttgaataaacatttctccagagaaaactgtgaatggctaataatcacatgataagatactcaacatcactaaccattaaggaaatacaaaccaaaactgcaatgaggcgcaacactttggtggatcacctgaggtcaagagttggagaccagcctggccgacacggtgaaaccccgtctctactaaaaatacaaaaattagctgggcgtgatggtacgtgcgtatagtcccagctacttgggaggctgaggcaggagaatcacttgaacctgggaggtggaggttgcagcaagccaagatcacgccactgcaccccagcctgggcaactgagtgagactccatctaaaaaacaaacaaaacgcaatgagaagagaggattttgaatgttcccgacacaaagaaatgataaacgcttgaggtaatggatatcctaattacccagatttgattattacacgttgtatacatgtattgaaatatcattttgtaacccatgaacatgtacaattatgtgtcaactaaaaataaaaggaataaaacacaatgag

SEQ ID NO: 295683 - DNA, 1000 bp, Homo Sapiens
cctgaatgaacaactctatgagccgatggcagataaggacactgaggtcctctggggtaggtgaccagcccaaggccacacagctggtctgagattaggccaggagaggagcccgggttggtcacatcctggagttggcgtcttggaaactgcatcaggagaataacaaagatgagacgcaggctctaacaagtggataccagtgactctcgccccgccagccccagccctgcagccttgggcccttccaggagtcatggtctgcctgcctggggcattccaggcttcgacccaggtcctgcactttctattttgagcctcttagtcctgaggactgtgtgttcccagcaggcggcgcgggccagaggctgagcctgggtgtggctgtcaccctatctggggccagagacccagattcccgggcccttaacctgttggctgctgagggctctggcataagccctgttccctgcttgattgtctccccttcaagcccctgccctggtatcgtatcggcccatctcaccttggattatatccctgtttggccccatttgaatcctggctctgcccctttccagcaatgtgaccttgggcaagtcacttcatctctctgggtctcagtttcttcatctgggaaatggggacaataagagtacctgtctctggccatgtgtggtgactcatgcctgtaaccccagcgctttgggaagccgaggcgagagaattgcttgagaccaggagtttgagatcagccctgggcaacatagtgagacccctgtctctacaaaattctaaaaaaattagccgggtgtggtggtgtgtgcctgtagtcccagctattctagaggctgaggcgggaggattgcttgagcccaggagtttgaggctgcagtgagctatgattatgcccctgcacatcagcctgggtgatagattgaggccccatctctaaaaataacaatactaataataaataaaaatgaaaatgagtacctgt

SEQ ID NO: 295684 - DNA, 1000 bp, Homo Sapiens
aaatttctgtgaggcgaaagccacatttgccagctctgggtacgaagttcacttcacagtcggtccttcgcttggtgagctttgggagccaggctgccgtggccagatgtttaggagcacgacggtggctctgcagagggcgatggtgtgcagccgggctttcctgtcgcccacaccttgcaggccctcacccctccccgtgccttcacccagctcctcctccagtgccattcatcccagcaggcagcaaggacatggcagctgagaaaagatgccagcagaacgcacttattttataatatttaacaactgtcagtgccaaactgcattaacacagtcatcctcagatttttcagagggctgtgtacacatctgtgaaaataaatgttaacctctaagatttgaatgaagattctctgaagatgggcagcaggtgacctttgttttacactgagcaatttttcaccatctcagccgctctggccattttgaaaagggctacaaatctgctaaggatgagtcctcatgcctggttatcagaagtttggaccgcgtgttcctgaggattggccaagcaaatggctcatttccaaaaactgccctgtggagagggggctgggggacactcgtgacacctgtcgggcggcacatgtgatgggtggagcacccaggttctccaagcagcaggaggctctgatggacccccctcccctggcggggggacgctactgctagaagcagcgaagggcccggtgccccaggtttcagctgcctgccttctgccgtaagttgccccagcaccttcgtgcttttcaggagcgtaagctgagcagactcagtcgtcccagtggtcagtgtggctggggcagagggacacacggtccacaagacgtccatgctctcggaatgctccaggggtttggctgtggggctccaccaccattgcctgagcccggagccagaggctcctcccacactgcctggtctgccccacagagca

SEQ ID NO: 295685 - DNA, 638 bp, Homo Sapiens; identical to SEQ ID NO: 119380

SEQ ID NO: 295686 - DNA, 734 bp, Homo Sapiens
gcacatgcgcagccctcgctctcgcacgcaactcgtggccacctagcctagaggcggctgccaagcgtcctggctgagggatggcgggaccccaggcggctggagtggagaaagttgaccgcccccgtcttttctgccccgtgggtggctactgcgtgcccccaagtaacccagaggttgagggccccccagtgcgcggcggccgggggtcaggatgcgggactcccctccaccgccatgatctcgcagtgtgggggagcgctcggggacagaaatgaggcccgagatgtgtgccttctccttgctcctgaccgctgacttcgttattccaaatacgcagccgaaaccatcgctcttgcaggtgcagcttttctctgcctctcctatgtggaaagcagcgcagcgtggactccagccaaactccctcgattggattgcagctctctggctctctgtccctgtgaccttgggcagtttacctcctctatgtctcagtttcctcagctgtgcaaaggggttactgatcctgcttaatggggtgggttgttgtgaagaggaaatgagttaacataagtagagaaagagactggtgcctggcaagcactatgtgagtgttttgatgttattattgctgtttttattagagctgtgtgtaacgggacgtttaatgagccttttcctgttaccctggaattagtgagtcagggcacaaagtgttcatttcctcaagagga

SEQ ID NO: 295687 - DNA, 1000 bp, Homo Sapiens; identical to SEQ ID NO: 225116

SEQ ID NO: 295688 - DNA, 886 bp, Homo Sapiens; identical to SEQ ID NO: 225117

SEQ ID NO: 295689 - DNA, 1000 bp, Homo Sapiens
gacagcagcgagccagcggccggactctgtatttcggaccccactccagtgctccctgggtcataccaggatctgcctctgtccacaaagatgagggaaaatgatgactgtgctgtgctctctacttcctgcggttactgcgtgattctaaagctgccactcggaacagcgagtcctctgccgtcgagagcagggaggggtagggtggacaggcgatgccgtggaaagacgtctcggtggaaactgccatggtggaaaggtggcgcgcttctcacggctgagttgctgcgcctgcagacggaagctccccacaggcagagctgcttggatgtgtgagtcatgaagccagagaagccccgctccatgagcagtgactccccaggccctgtgacctccctcctgtcttgcagctcctcctggcaccagtccccagggctctcctgttggtagttcctgcttttcttcttggaaattcctcgtggacctcgagatctttaccctaaaatagttctgttgaatttcaccctggcaatgtaaattgatagcttatcttcacagatgccagacaatggacaactcaccatcagtcctctgctcacctgagacaaatgcatgtctgattgcttcctctgccctattgtttatgtgaaaatgcagattcactgagccagactaaggcatcagtgactgttcctctacctgcctctcacatggagattgtgtattcagtgaaaggctgatcaaagacccaaaggaatgcaacagtttatctcttatctacctatgacctgcgagctgcccaccacccccagttgttgcgcctttccagacagaaccagtgtacatcttacacgtattaattgatgtcctgtgtctccctaatatgtatcaaagcaagctgtgcctcgaccaccttgggcacatatcctcaggacatcatcctgaggctgtgtcactggcatgtccttaaccttggcaaaataaactttctaaattgaaa

SEQ ID NO: 295690 - DNA, 1000 bp, Homo Sapiens
cacgtccctccgctcctctgaatccttccagttcttcttaggccacttaaacgccaccgtctccacgaagtcctgtcggatcaccctcataggaagtgacaaaccacgttttgaacccctctccccacccagcaagcccctagcccgcgagcataggatttcctttctagaacacgtgttctgtgaagggccagaggcaatatttgaggcctcgtgggccacatgctgtccctgttgcatatccttttttttgtttggtttggtaaactgcttaagctggcagaacaacagaacccgcacattctccacgcagcccagcgcccttggccatgcagggctgtgccttctgccagctctggaggcccaggggctggcatgggcctcccgtcctgagccccccatgtacattgcacccatactgggaacgcccccaggatctgctgcgagacccccaaggaccagcttctgcagtcctggaagggctctcctgacccccaagtccgccatcttctgatggtggcaggtgggcacagtcactggctgagcgaccaagggtcagtgagattactaggccggcgctgcacccaactgaaatgaactcacgtgtcctcacaactcctagcagcagatgctgtcagcctcgcatcctacaggaaaggaaccatcgccaaaagacgctgaggaacatcccgagggtcacagggacagtgcagagccaggaccagcccggcccatggtcccccagcgtgcaccacctggcccggcactgtgtgctcagccatgaggactgggaagagtcctgcccacagctcaagtgtctacaccgcactgccatccaggctgtgagccgctgctgagcatggggaatgtggctgctgcagagacgttatgaaacacttctaaaagaatgtaaaagatctcattaataattttgagtacctgttaaaatgatagtaattttggatctagtagattaaataaaacatattattaaaattaa

SEQ ID NO: 295691 - DNA, 1000 bp, Homo Sapiens
acaggctcagtctccctcactaacctgtgacctgggtcagttttgctccagagggaatccttacggcacagcagtgtacctgtatatagggatggtacgccatgaaggccctcagcaattgctggcaccttgatattggacttctcagcctccagaaacatgagaaatacatttcttttctttataaattacccagtctgtgctattaggttatagcaacacaaaatgaactgagacaagtacccatctattactgtgtctgagcccctgggtgggtttggaacagaggtaagttaaggtacagccgcaaggagctcactgtggaccagggaaggagacccacatctgaaatggatgcctcaatctaatcaccaactgctaggatagagttatacacagcatttggtttataattaaggtgatttttgagagaggagaatattttagtttacaaatctcctctttactaagacacacacacacaaagaaacaacacacacatacacatgttgagaagggcccaaatcatgactggctaggagagcaacagcctctagatggtttttccagattgtgaattaaagatctgctgggttggccaggcatggtggctcacgcctgtaatcctggcacttcaagagtctgaggagggcagatggcttgagcccaggattttgagaccggcctgggcaacatggtgaaaccctgtctctacaaaaaatataaaaattagctgggcgtggtgggtgcgtgcctgtggtcccagctacttgggaggctgaggcaggaagatcacctgagcccagggagatcaaggctgcagtgtgccatcatcacaccactgcactccagcctggatgacagagtgagaccttgtctcaaaagaaaaaaaaaaagatctactgagtctgtcttcagggacaagagcacagtttctcctaggatcttcacacctccctcaaaatgtgtacatttttactgattaaataatttaaaaatc

SEQ ID NO: 295692 - DNA, 903 bp, Homo Sapiens
atgcgtggccataaacccacacattcccttcccggacccaaggcggggcagggggtggtgagcggtgaattccctggcaccgaggactcgagggagcggacgccaccccgctctgtggtgcccgcaaggacccggcgaccaaggacccgaccgtcaacggacgcggttgcggccgtcctccgccgccccggcaccgcccgcgcggactcgctgtggaacccgcggcgcagggggcggagtgctcgcgcggcgctgcgtccgggagacggtgggcgccaacattcgcgcgttccgcagacgcgggcgggctcccttccagccgcagtcggacggctccggggtcgtcgggccgggcccgagtgtgtagcaggacggccgcgggcctgctggccttgggagggcagagaggtgcctgtcgcggccggcgacctccccgccaggccgggcggtccccgcgcacgacgcgcctgcgcgggaggcccccggcccggggctggcgtggaggccgcaggcgcccggcctagtgggtgggaggaagggccgggagtgggcgcgatgagcgagagcgggtgcggacgcctacgacatccccgtcgcacccgtgcctcggggaggacttcgagccgctcagagctcgaagactcgcgcagtatgaccgaaagcccctccctgccttctctaagcagctcagcctgtgtttctgtggccagaaagttgcagttcttcccactcgaggccaccaaagtcagaaaagtgttgcaaatgggactccgagaggccaggctgaagctgccacactggctggaatgggctgccttggagggggacgtgggaatccattccaagggacgggggattctttcaaagagcatctcgcctgcttataaaggaggctggctctga

SEQ ID NO: 295693 - DNA, 832 bp, Homo Sapiens
aagtatggagtgggagaatattgtaggggataagtccttgagaacaaacatcagactgaaggcaatcttaccttggatcttgaagataaagagatgtcctcatcccttagtctcatcctaacgaggatctatataaaagcgcctaacacagtgcctggcacatcgtaggtgtattcttttccttcctaaagggggcacaaagatgtctgatcaggaaaggaaatcgacctgaaagttaaatggcgagattgcatttgcactgttggtccatcaaggaaaagagaaaaaaagtcccagtgctccagacaattcaaccacacttggaatcaagtgagaggagagggagattcctttccccagagcctgagaaacagaagcagcagccccagatggcttttgactttgagatgcttgtgtgacacacctggcccccaacacaggcagaatgatgtttgactctgaaaacctccccagtgaattatctgcttggagccggctccagcaatttcctaagcctcagccgggatcgcctctccttcctgtgccagcagcttcccccattcaactggccagggagaggactattcgcagaaagactggccaggaggccaagaagacggtgtgttttacacgagctgatcagagcgcccgccctgtgccgtcccagagctgcctgcagcccaatcggagtccacacctccgagctgcctcgcgagtggagccacaagaagcacagaagttcctaagccaaacagaaaggcagccccaatgcagctgttcccatagctggagccatggaggtgtctggtgattctggagcaagggtgtgtgt

SEQ ID NO: 295694 - DNA, 1000 bp, Homo Sapiens
gatgcccccagtgaagaaaagccaacagcagcaaagcctgatggagagcatgcagcccgggaagcccagtgactgggagctggagggcaggaagcacgagcggcccgagagccttctggcaccgacgcagttctgcgcggccgagcaggacgtgaaggcgctggccgggcccctgcaggccatcccggagatggacttcgagtcctctccggcggagccgctgggcaacgtggagcgctccctgcgcgccccggccgagctcctgcccgatgcccgcggcttcgtgcccgcggcctacgaagagttcgagtacggcggcgagatcttcgcgctgcccgcgccctacgacgaggagccgttccaggctccggccctcttcgagaactgctcgcctgcctcctccgagtccagcctggacatctgcttcctgcggcccgtcagcttcgccatggaggccgagcggccggagcacccgctgcagccgctgcccaagagcgctacgtcgccggcgggcagcagcagcgcctacaaactggaggcggcggcgcaggcgcacggcaaggccaagccgctgagccgctctctcaaagagttcccgcgtgcgccgccagccgacggcgtggccccacgcctctacagcacgcgcagcagcagcggcggccgcgcgcccatcaagcgtggagaggagcggggccgggccaggctagggggcggctgcgcgagccgtcggcgggtggaggcggagggagagcaggggcagcccccgcgccctgcgagctgtaggctgctgggccctggaaggcgagtggcagcgcctgttctccagtaccaggacccaaagagcttgcctcatatggagatgcatttagaagatactaccagattctgtcccaaagaagaaagagaaagtgaacaaacatctttcagcgatcaaaatcccaggcaagaccagaaggggggctttcgcagctccttccgcaagctctttaaaaagaagtga

SEQ ID NO: 295695 - DNA, 796 bp, Homo Sapiens
atgagcttgttgcagaccgggggctggaaggagccccggttctccttcacccaggccctcactcccaggcggcgctccatgactgtcccgggcgcctcctcgcagcgctgtcctcccgccgtcggaggcccgcagctccgcccagccgcctttttaaccagaatcccaagctcacgaggcggagcaaacccccgcgaccccgtggtgggggcttggggcccgcggactttgccccctggtggactttggtctgagcccgccgccctccgcgccactccaggccctggcgagcgcggcggcggcagcgctggggaacggcgtcccgcgccctctgcttctccgcggggcaggggctcggtccccgccaccgtctccggggcgccccacacactggcgcctgcggtggggcctgctcccggcggaggacaaagaatccagacccttcctggacgcttgtccccagacgttccttccctctacgccccgaggggaatcccagggaaggttcccagaaatactacagtgaggagatcgcgggttggaagtcccagcacctgagaacacggtgctggcgctgggctcaagatttggctttcccatctggaaaaggggaatgactgccccgccactcagggctgcggcgctcacccagcgggaagccgcacggcggtccccgcaggtcccgattcaagagcaaataccacgtctggtctactgaattggcaagcctcctggctcaggcaccactggactccaatgttcagaaaacggacagttgctatgttgagctcatctg

SEQ ID NO: 295696 - DNA, 1000 bp, Homo Sapiens
agagaatataacagcaaaacaggctcctggaatccctgtgaatctgttgctgaatactaagctgcacatgcataaggtgaaacttcacagtgcgatgcaaagaactactgcggagctgtgagctgattggttcccagggctcactgggcaatgtttgagtttcaactcgccaatgtgaagaaaccttgctgactgtccagggaattcagtagaaatcccaaaagggtaaggcattaggagaagggctaactaagccgaaaagtgaggtaactctagacttcctccaacaaggtttagaaagcagcctcaaaaagaggaagttcatccgctactaccgtaactgccagccaaaacaaattttaccatttttaaaacaacaaaatacagacatttaacaacattaaattcagaatgttaaaaatactagatatgcaaataagtaggcaaatagaacccaaaatcaggagaaaaatcatttaatagaaacaaaccccaaaatgacagagataataacgttagcagacaaggacttaaaaaattaaaataaaacaaggatttaaaggaaaacatgaacatagtgaagaaaaaactggaagatatagaaaataaccaaatggaacttctggagctaaaaaatacaacacctgtaatgaataattcagtggctgaacttaacagtaggttagacattgtggaatgaaatatctgtgacactgaagacatagcaatagaaactgtcccaattaaagcagagagaaaggaaacaaaagaaacacagaaacacagagcctcagtcaccttaagatgatattaaaaactggagtcctcgaaaaggattaacggtgatgatttgaaggccaaaaacaagtcccaaatttcatgaaaattgtaaacgtatagcgccaagaagctcaacaaatccaaagtaggagaaaaacaaagcaaaccatatcaagcgaggcactttgtaattaaatcactgaaaaccagtaataagtag

SEQ ID NO: 295697 - DNA, 1000 bp, Homo Sapiens; identical to SEQ ID NO: 225119

SEQ ID NO: 295698 - DNA, 830 bp, Homo Sapiens
aaacaccagcgttgctgcgaccgcgttggcgatggcgcacgaaggctcgaggcaggagaggcaggtccgagaccgcggggtgacccggtccaaggcggaaaaagtgcggccgcccactgtgccagtgccgcaggtggatattgtgcctgggcggctcagtgaggccgagtggatggcgcttacagccctcgaggagggcgaggacgtcgtaggggacatcttggccgacttgctggctcgagtcatggactctgctttcaaagtctacctgactcagcaggtgggccgggatccgggtccttcagactcgtctccctctcccgcccctccctgccgacctgagatcctctctcgcctccgcagtgcattccattcaccatcagccaggcccgggaggccatgctgcagatcaccgagtggcgcttcctggcccgggacgagggagaatctgcagtagctgaggaccccacatggggtgaggacgaggagccttcggcatgcacgacggactcctgggctcagggttcagtgcccgtgctgcacgcgtccacctcggagggcctggagaacttccaaggcgaagtacactcctcaggagcctctccggactcctctgccattgctcctgctctcccctttccgacatctcactgcccgagtgcatttccccaggaccctgggggcgtggaccggatccctttaggaaggtcgtggatgggtcgaggctcccaggagcagatggaatcttgggagccttctccgcagctgagagtcacgtcggcccctcctcccacatcagagctgtttcaggaggcagggcccggaggtcc

SEQ ID NO: 295699 - DNA, 1000 bp, Homo Sapiens
ggggagacagagagaaagaggagacactccaggaagacctgcaggtgggagtaccaggttgaaaccaagaacacattcctggaggagctgctgtttgagccagctctgagaacaggaggggacaggactggagaggaggagggggtcccctatgagcaaagactggccaccaccccatctaacacccccacagggcccctgtggcatccctgtccattccctgtcaccacccagtttttccctctggacccaggaattcaaagtaagcaaggaggtccactgctccagttgactgcaaataattccaaccttgagcccaagcagcactttgggtcctggtttgggaccacgaagcggctcggtgagactgagaggcggccagcggcggagaggcggccaccggcggcgcggcggagaggcggacagcggcggcgcggcggagagacggacagcggcggcgcggcggagagacggacagcggcggagaggcagacagcggcagcgcggcggagaggcggccagcggcggagaggcggacagcggcggagaggcggacagcggcggcgcggcggagagacggacagcggcggagaggcagacagcggcggcgaggcgcgcagcggcggcgaggcgcgcagcggcggcgcaggcgcggagaggcgctggcgccggctctggcgcggagaggcgcaggcccaggctccactccccagctgtgaaagggtgaaacagaacctactggaatgaagctggcctcccatggaatgaagctggcctcccgtctccttgatttgaagcagcttctgcacgttggttattatgccatttttctaaatctaacattttaaaatttgtgccttttctttctcttttgcttgacttctcagaggtttttttaacggtcttttcaaagaagtggttttgggttttatttatcaagtctacttttattatggctgttttaaaattaaatacatttatttcttgtttcccttaaaaa

SEQ ID NO: 295700 - DNA, 1000 bp, Homo Sapiens
aacaggggtctctccatccagggatatgatggatggaccctacatcactccattctgcccttcctttccctcctcccattctcccgaaagcctcagtgtatgggcgctgttcatcctctggtgctgaagcagccaagagacccaagtctgcctggctgcctcttaggatatgacagcagagccagtggcctctactagatcctgtacaacctcacaaaacacccagacatcgggagtgctgccagcctgtgatgcaagagtcctaatcctgaagacattgaatgacctgtcattctgctgtttttaccaaaaaggatcatgaggatcagagaggaaaagtcatttgcccaaagtcacacagctgaacagtggtggagttcaactttgaccgtgggctgtctggccccaaggtgtatgcttgcttctctcccaagagacaactttcttatcaggctcaaatgaatgaaaggaggatgttaaagacaacgccattattgacgagatcactcccaagcggattggagattgtcccaatacttagacctatagcaaggccttgggagaaatggtggtgcagcaggagagcaggaacctaaccattgccatcctaaggccctgcattgtgcagagcaacgtggcaccagcttttcctgggttgggttgataatctaaatggatgtagctgactcattattgcggtatgtatagggatgaagaagtaactgtaatgtagtggaggaatagtaagaaaattcttagtgctggcttagcttcattgatccaaaaacataaatgctactttactatcaattgaagcatattatttcaattattctggttataatatggaggcaggatgaaattgtttttattcttttagaattttttttatcaggaaaacagaggtaaagtgctatcaattactatttaagagttctattttgaaaagtctttaataaggatttttcttttctttttaaaaaagacttttttaaaaatt

SEQ ID NO: 295701 - DNA, 1000 bp, Homo Sapiens
cgaatgaaaacactaatgcaagcctggccccacaaaaacctagataatgcttacgttgaagacgacagaaaggaacacagcgatcccctcactaaacttgtcgccaagttccctcctcgccatcccagggtgcgggaaaaaccccctcccgccccggggccccggcagcactcggggacgccagcacgccgggctccttcccacccgcgaaccgcgctccccgcagggcgggccggggcggggaaaaaggagctcgacgcgaagggccgcgggcggcctgggaagggaggagggagacttgggaggctgccgggcggttttattgtttcctttcgccctcctcctaccgcgcctccgccccagcgtcactggaaagccgcccgagccgcccggcggcaggttatttatagcgcgggctgcgcgcgcgtcacggagcccggcccggctgacggggccgctgacgcgcttggccgcggggccgagtccgcggggctgcgcgccggacgccggcgacaatgggcttctgtgtgcagctgccgcagccgccgggggccgggggccgggggccgggggaggggggcgggcgactccccggctcccttcttggtcggccgcgaccccccgaaaggtaacaggcctctttcgcccccggccaggacctgggccctgtgggctttttttttttccattttatcagtaagttccccttgtcccagcctccgctttcacttcccgcgttccctccaccccaaaaaccgccccaacatgtccagagaggggcatctacccagccgcccagccaggggcgaccactttgtgagccccggggagcgggacccgtaccaggcgcgcccagcgggggatgcggtgaccgaggggccgggagcgccgggcaggtaacgtatcctggacctagagtcgggggactttgtttggggcgggaggagcggaacaggggtgggtgtgaacgccggacggcccttccgggactcctgtcccc

SEQ ID NO: 295702 - DNA, 427 bp, Homo Sapiens
caggcctggttagggaaaatagaatgttctagcatagtttaaaatggcaactttcctcccccaacctacaggaagcataagggaatttttctctcatcttctctgtgagaacctggtcaagctcctggaggtaaaaccccaaacagtgttgggggcccttatgactgagtcccctggagtgtttaaccctcagatgtgtccacacgaagcctccagccattcatccattacagttcaggtttccctaccctggcatgggttctcattatggtttctgctcctgtgtttctgctctagaaacctgagaattcaatgatgtattggagaaaacaagtgcctgcaaactgtttgcagatatgtggtctttggtctgagctaccatagaaaagcttcccgcaaccaaatgaattacagacactcagcaaaa

SEQ ID NO: 295703 - DNA, 1000 bp, Homo Sapiens
ccatcaggagcaggcctgaatgagcaggctccagtcagctacattctgctgagagggcctcccttgtcggcgaagcctgttcccacgggtgggagtggcccactcgggcgcaggaatgagggcctgtgtgtggtcagcactgccaggcagagcacttctgaggctttgtgcttccctgtggctaagcgtgtgcagcaggtcctgtggaaaagtcaaacccagctggcttctccacgccgcagagttgaggtggacatcggaacccagacagacatgttaatcatccatcttgatcactgcataaagttagttgtactgtgcatgaacaggatcaagggtttaagctgcaagtactcaatatttggctttacatttcagctactggccttcaacaccacggagagagctattgtgagtaatactgctatgatcacggctatgcaaatatctcttcaagagcccatttttcattctgttggaagaagtggaattgctgaccatatgccttctgtgaaagtgattctgaaggtgtggtccctgggccagcagcatcaacatcacctggaacttgtgagaaatgaagattctcaggctcttctctatacctactgaatcagacattgggtgcaaaggggaacactacagtctgtctttaaggagccctcaagaattaggagcctcccaagctgagacagatctcagctactggctgtatggagttggatgagcttcttacctgacccctgggcttcagtttttcatctgcaagatgaagtttaccagagaatgggacaaacaggagagaagttcctctgcttttatgccagataatcttagatgaatgtatgatgattttacaaggtgcacggaaaggactgtattgaattacatcatgagaaagttattcccttctgatcaactctctttccccagtttctacattgaggcaaagtctcagtttaatgctggaatattataacacttgctaatctttctttaa

SEQ ID NO: 295704 - DNA, 1000 bp, Homo Sapiens
gtgccagaggttctgtccctgccggcaggggtgggactggtgggagcgggtggctgtccctgagcggcatctgtctgctggccatcccagaggacagcgggagaaccctgggatgtgtggccaggaccctggactccaggcctcgctctgcccctggctgtggaggcctgaagagagccatgatcttcatcctggtcctgccgcagcacacgctgcttgtttcaccccccgaccaacccctgcagacctggctcctacagcccctcacatggctgccagccccgctcccctgccagccagacccccagtgcgtgctgcatgtgaagctcatcctgcaaattgcccaccccaatggcacactcggctctggctcttgccagctgctgcttggcctccctgattcttggttttcctcatgctatattctggtgcccctagtggaccctgatatagccgatgtgcctcactgtggcctcaacttccctgaaggtctcacttgcctctcctcacccctctccaggggctatggcccccagggctacactcagtggtgccccaggtggcagatggaaagactgaggctcgagctggcaggccgtgtgaaatccagaaagttgacgccaacacaggagcatggccagggtctgggagccttgggcacaggacctgcagggcttatggtggacagccaggtggagtatggctgccaagctggagactcagtgactggaggggaccagagccacgtctggaagcagggagggaaaaaggcattgttctggagtcaggcagatctggattcgaatcccagctcttccaatcgtgtgggaggcaagcagcccagatcacagatgcggatactgaggcaggaggaaccaaggatgtgcaggagccaggattgaagccatggagcttggacgactcagagggttcttcccaccccatcatgatgccttccaaatgagggaatgcaggcatgtgtgaataaatcagtgaatgc

SEQ ID NO: 295705 - DNA, 1000 bp, Homo Sapiens
agggaccacaggcacagtgagtttactggagttgtatgcatgctcaggtgaggcattcttcccttaccagttgagtgttcctagaggaaggtcatataccagttaaactctgccattttggctcttaacgcacatgcttgagaccactcacccaattcctgagatcttatcggaaagctgctgatcaccagtttcagttttttccatctattgggagactgcctttctctggtgccggctgcgacccattagtattttggagagacagttaactacctgactatcacctgatggttgcctaatgttagtaggggggcatctctcctaccctgctcatgtctgcctgactacctaatgtaacactactttaaattattattctggttgatttcttagccccaaagatgaatcatccctcctcctttcttatttcccaaaacattactaacacaaaatggggatcaccttaaagttcagtgttaggcagcattgcccctggctatttccatcataagtaaacagccttctttctccagagccccctcctgctggcttgttgctggcccctcctcttcttcttgtttattgtacaacaaaaccgcacaggcaaagcttaaaatttgctggtactttaacttgcagagaaatttaactgcttccctcaacctcctgcccatatcagaatagaggcctttgtatgctagagtttccaataccaaataatggcaacaataataaatagtgacaacattttacattatatattactttaagttatagcaaagcaaattttgagtagggctctctccccaccagcaagattcttgggatcttatcgtttgtggggaggaatctggaaactgtattataatagacacccttttatctgatattattgaattgttagtagggtaactattaacaattaattgaaaagtcagttaatacaaagattcataaaatgatatgttttatattttattaaaatgtgtaacctgtt

SEQ ID NO: 295706 - DNA, 1000 bp, Homo Sapiens; identical to SEQ ID NO: 225122

SEQ ID NO: 295707 - DNA, 487 bp, Homo Sapiens
gccgcctggggacactggcccctctgtcaggatcaatccctctaacactgtttggaacattccagaaacttcaacatttgacccactgggcatgcattgatgccagagaggtgagttcaacccagatgtctggatgggagccacgttttaagcccttgcattacacagcaaggccacaggtcctgcggcagcagtgggttcaagaaaagcaccttccatgggcctcagacaccagccagttcatagacaccaacagagtgtgggcacgccgtcctccaccccaatcagcagtggccagtgccctcgcccaggatagaggacacaaccacaagcttccagaggctgccctgcacaagtccagctccccaggctgtgaccgtaatgccacccttaaaggggctgctaaatggaaaatgttcctgagcacagctcgcatgcactgccgcttctgcaccaattcgctcatttagtcttcaaacagctcttg

SEQ ID NO: 295708 - DNA, 529 bp, Homo Sapiens
atgtcctcggagctaacacctggacctgctcctttcccttcaaacgctgagggctcagtctccaagttcctttatgaaacagggtgtaccatcagagacgcaggtattccccacatctgtaggagatggaagggagagaatcagagaaagaagagtcccaggcaagcaagaagctgcgggagaatatgcagcaataaattcaagtgccatttgctcttcaccaactctccggctcaggtatttattgaaacctgctttgtgctgggcaatgtgccagatgttggggataaaatgttggatctttttcatctacttcaatcaaaaccacgtatcacaacagactgaaggcagaacagatatgatcatcaagctgtcttctgttaatccagatgttaaatgtaaaacagtgctactctttgtactaaatgctttattttggaaaatatcattatttctcttaaaaatgtgctatttatgttaacataggagtttattgttatttttgagtgaataaagcaatatttttaaa

SEQ ID NO: 295709 - DNA, 1000 bp, Homo Sapiens
gaagtctgattttattttactgattgctattcttttgataaccctaaagttagtgagagcagaggggaccgaaactttagagtttgacttgattgcctcattaatctcaagggaatgtgacgcattcaccacacgtccaaaagatgtgcagcgtttcacaaagcagcagaatgaagacaatacaaccctgcatctcctatgccgggagctgcagagaagtgcgggcaagaagaaaatggtattttgtttgctatgcatagatgtcatctttttctttcatacactctttcttctggatttctcatcaaagcctgtcgccacctcctccctgcggcgctccggggctgtagacggctactttattgtctcggctgcgcaccgcgcgggacctggggacccggctctgcgccagtcctgcaagtccactctgcgctgtgccttccccggcggcggctgccttcctcttcttcctcttcctctctgtccaagctccagctcagcacgtgagctacgcagcccgactcccgggctctctgggcagccagcgcctgccgcatcccccggcccgggtctgcaggtcgcccccgccaccgccgctcgccgtgcgtcctcgctttgctccacacttacagctgtgccccgggccgcctttctcgcgtccttccgtcctgcctgcctcctctcgctgtcagccggggctttcggctccctctctccccagcagcccccgcccgccgcctctccgggggctggggcggccgctgccaatgaggctcggctgatgcgctgttccggcccagtcattagcgaaggaaagttcttcctcgttgttccaatccgaggacaagctgatatgtcgcagcagcccagggaagcatgcgagctgataggaagtccttttattttaagacaggctcgaatgctaaaactttcttgtgccaaaacccttgactattttatttttaaaataagcacttggcgtgccctcgcagatgtctga

SEQ ID NO: 295710 - DNA, 1000 bp, Homo Sapiens; identical to SEQ ID NO: 225123

SEQ ID NO: 295711 - DNA, 402 bp, Homo Sapiens
caggtgaaatgggcagagtgacgcttacctgggatggcagtgaagtgggaaggggaggtcattgtgacaaggggcggcatgaggtacttggccttgacgccctccccggccagacggtccaggttgggggtgtccacatcctgatcctagtcccagcggaagccctggaaggagatcagcagcagttaaactcctggagggcagagctgtgtctgccatcttcatcattgcattaccaccacccagcacagtgcctggcacaaaagagttgctcaataaataaatccggatgaatggataaatacatggataggcactttgaactacagatgagtttaaatactttgtgtttttcttagtcaaacatgtgcaattaagcatgtgataaatgatatgatgacc

SEQ ID NO: 295712 - DNA, 1000 bp, Homo Sapiens
ctagcgtccgtgccggcaacgctgttaccctctcctgggctggagagtggggacatcccttccccgcccctaggcgtccctggggtcggcgccagagcccgggagcgccggaggctctggctggatggcggcgaggagggctctgagtcctctcccggccaggccgagcttagtatgtggaggcggcggcgggagtgcgggcatggaccaagggaagggggacacccaaaccgcattggtgccttcctttccctccactcgcgccgtagacctccccaaattgcccgtctccggtatgactgaatctgtctgctggcctctcagctaccaactctgcccgaaatctagatcccagacctggtaagtcgcgttcctcccctaccccgccccgccaccttactagcggactctgcccgcgacagcgtgcgcgcgcgtggcctgaggcgcgcgctgagaagttgggctgatttggaactgctgcgctagttcggcctctgccgctggggtgtatacgtttatacgccgtacgctccagggtagtcaggaatgtcgcggggctccccagtgaggcgggagcgaaaagagtgcaggcccactcttctggatcctcttggccctgttgacaccaaagccatcttttaagaataagctttctgctggtctctaaaaggggaaaggggcagcgggggaagagaattgtccctttccctaagcagtttctaatcactaaggtcttcaacaaagtttactgggcggtttccatttgaatgctgtgaaattgttattattactattttaagttaaggtttctaagagtcacagcttctcaaatatacgtgcctcttgaggatgcttcgacaattaccttgtccactaactgcacttccttcccactggaaaaaataaacttaatttttcagtagttgccttaggtcacgtcgtttacatgtcactaatgtgaagaaagaagtaaataaagaaaaacaaccttggcatttct

SEQ ID NO: 295713 - DNA, 1000 bp, Homo Sapiens
agttgttatttcttagtgcttactatttgctacatgcttcacatacgtggtctcatttaatcttcccaaacaattttgccataatattattacaaccatgttgaatctgaaaataataataataataataataataataaggcttagagaggttgagtaacttacctaaggttaccaaattagtaaagactgaactgggatttaaaagcaagatttgtagaatttttctccaaaacccagaatctctgcattgagccagcctgccattctgagacagacaacattcataacacttgcatattgtttgtacagtgttcattgtttaatgtagggcacatttcatacataccaagaggaatcatatgcttattcttgctagtatatggcaaacttttccattctataatacaaatatgactgatgactgctgtcatcagcccagcaaatcacctttcatcacaggtacacagatgacaaatacagagtacggaaggagtcagctgaaggtgctgcttgcctgggctgtcttttttttttttttgttacatctgccacttcatttattttatttgcaggaggagttgaaaccaattttaagggagattttcattttccccctaaacatgaatcattcaagtaaaaccaacttaactatagaaatgtagcaaagtaaggggaaagcagcacaacaacccaagaggcaaaggctggggggaaggggtgggtgcagtctgcgtataacatatgcacaaatgccttatgattcccctgctcaggaccgcctccccagaaggcaagcacaagggcccattttaagaggatgtttccccccaaacatctgagagcgcttcaacttaaacagcttacggttaaaaagacaaaaaagaaagcaaaactaaccaaagaaactccaaaaaaccccatgaaccacccagccataactgccttccttaatcgatcataggagtttcattttataaaaagataaataaaaaacatt

SEQ ID NO: 295714 - DNA, 784 bp, Homo Sapiens
atgcagaagctgagattagtgtcagaagaaaagtacaaccaaaggatgcagaaatatggaaaagagaaacatgagaagaagtggaagaagaaaatacaaatgagaggaaggaatacagaatgcctccgaagctggattgatgtggggaaaacacctttcccttctagttttgagagacttcctcttggctcccaggaggagagattccctgactttgacacacatggcctcttggcacaaaagccttgtggtatggaaaaacaaattcatatttatgtccccttctccctttccatctttcatcatagacttaatttccttaagcccagacatctgttgggacctgactcccagttattggttaccagtgtgtcaggcaatctggactttccagtgatgccacttagatggcacctgtcaaaagagcagtggttccatttctagattgtggatcttcagatacattctgccattttcatttcacttcctgaaagtcagggtcagcttgtgaaaagttgttaaacaacatgctaaatgtgaaatgtcaaccctcacgttaaactttccctgttcagagcatcagatgaagacttcattgggttttatggtggctttctgatttttggtagtccattgaagaagagagtttgaaaattgctgtatactgttaacgattgtctgcccatgtccgcctgaaataccatgattgtttatggaaagtatctctaataaagctggatacagtttggcttggaaaaaaaaaaaaaaaaaaaaaaaaaaaaaa

SEQ ID NO: 295715 - DNA, 796 bp, Homo Sapiens
aacagttcttacatataagttgctctgtagtttgctcttatagttagcccaaagactctgggtgtgaggcctgctgtaaaccaatgttaaactgcttattagaaagccctaaccacctgctttgtaggcaccagaaactcaaaaccaaatctcaactcagctacagaatctactgtggtccttgtctgaaaaaattagttcactcggttggaatcttgtctcagagcatcctcatctctttctcaaaagcccctaccccaacaccggcgtgttggttgtctattgaaacttacaagtggatggaccctttctcccgaataaactggcctttgaaagctctaatcgaaatggtttggcaaaatccatactgcaggagattagggaggacaagaatgatgtgcctttttgtactgctgagcctgatggtggtgccactacttcaggtacttagatgagtcttgatgctaatagaattgtgtcgccaaacatatctggacagttacaacctaatctatgcattaattggtttgggaattgcttgaaattattgtttaattcaatgttttaattcgttttcctaaaaatttaagtgcccccatcatcgtgcaatacctcagtgcagcaactccttgattcttggatgactgaacttcctaacttggctctgccccattgttcccatttttcatgtttttcacaaatagttaaccaggtacctactactgtgcaccgctgcagagcattgaggatgtatgtgatgagtaaaaacacccagcctgcaaaaaaaaaaaaaaaa

SEQ ID NO: 295716 - DNA, 1000 bp, Homo Sapiens
gtagagtccagctccgggaccctcatatttgaactgcagggccatctcatccctggatctccagctgcaccacactcaaattagaacaacatcagctcctccccaggtctccacctgcacagccctcgaatgggaacgtcagctcctccccgggtctccagctgcagggccctaaaactagaacatcagctcccgcctgggtcgccagcagcaccaccctcaaactggaacatcagatccccatgggtctccagctgcagggccctcaaactggaacatcagctccccaccagatctccagctgcacggacctcaaactggaacatcagctccccgccgggtctccagctgcactgcctgcaaactggaacatgagctccctgccgggtctccagctgcatggccctcaaactggaacatcagctccccaccagattgccagctgcacggccctcaaactggaatatcagctccaccccggggctccaggtgcacagccctcaacctgcaacatcagctccccactgggtctccagatgaacggccctcaacctgcaacatcagctccccaccgggtctccagatgcatggccctcaaactggaacatcggctccccaccgggtctccagctgcatggccttaaactggaacatcagctccgaaaccctcaaacaggaacatcagctccccacagggtctccagctgcacagccctcaaattgcaacatcacttcccccctgcatgtccagctgcaccgcctcaaactgcaacatcagctccccgctggatctccagcagcatggccctcaacctggaacatcagctccccccaacccgggctccatctccaccaccctcagatttgaacagcggtagcaccacctcctctccaggtcttcagccccacgtccctccctgaacaatcccttctcatgaaattcagcagtcaagaaatctgcagcggaagtaaatgaataaatgttttgttttcaaattga

SEQ ID NO: 295717 - DNA, 1000 bp, Homo Sapiens; identical to SEQ ID NO: 119381

SEQ ID NO: 295718 - DNA, 1000 bp, Homo Sapiens
ggaataactggaggtgatttcatggaacctggaggctgggcttcaggctggggggagaggctccagactgggtcttctccgtggctctgccccccgctctccttgcttgagtggtgggggccctgcatcctctcatgcccacccccacctttctcgccaaattgtcggaggcttttgtcacctggagacactgttcctgccagctccggtcttggaaaacatggcctctcctctcctgccctggccccggcccctcctgccagctggacgtgggcatttctgcacccagtagaaccccacagccaggaaagatgcctggaaggctagagaagaggcgtgatggggggaccccatgtgtggcgacagagcagcacacccagctattctcagccaccatgtgggagagaaatgacgcctctgtcgagctccccatggccggagctgctccatacagcatcctaaccttcacccccaactactcagttgccatggcaaagggaatattttgactccctttttttaaaatttccaggtgattattgctagaggagtgggaagttactaatttttgtatatttatcttgtattaaaatgtttttactgatttttaattttaattttaatattttttgagatggagtttcactcttctggcctaggctggagtgcagtggtgtgatttcggctcgctgcaacctccacccatgggttcaagcgattctcgtgcctcagacccccgagtagctgggattacaggcatgcaccaccacgcccggctaattttgtgtttttagtagagacaggatttcactatgttggtcaggctggtctcgaactcctgatctcaggtgatctgcccaccttggcctcccaaagtgctgggattacaggcgtgagccaccgcacctggcctgatttttaatttttaaatgagggagcagaggcataactaggtttacaatcatgtcatcaacaaaataaattgtcttatttttctgat

SEQ ID NO: 295719 - DNA, 650 bp, Homo Sapiens
atggtgggaagttctcgcatccccgcccagccgaaagtgctgcctgcgcaggttggtggacggtcctttgaacaggaagaagacacggagcacattcctgttagctacgacagagaggggcaggaatgtgacacagaactcaagggacaggaaggagatgagttggaggctgggtcagtggtccctgccagtgatgctgcctctgcctcagtctcttcttctggaaagtgggattggaaaccactctgcttctctctcaggactgctaggaagacaagattagatggcaggaaggaaaatacatgtacagccaacttccttgagcgttcgttcttttgcatcagggtgtctcaaactgctgcccttaaaacacctgtaagagaatcatccaggcagcttgctcactctgcatgcaggccctttagaatcagagtcagaatccctggggctggagccacaaaactaaatgacatttcaacgagtttgtcatcatgtgagagagaatagtttgtcttctctcccagtagtttcttcatgaagacgccatgtgctatattccatgagatatttcacactcaaagaagacttcttttatactcttttgataatttgtctgggaatcactgtcttgatttataagggagtttgta

SEQ ID NO: 295720 - DNA, 1000 bp, Homo Sapiens
cagctgagaaagtctgcaaagaaatttggctgtgtctaccttggtctttacctcattatcaatgagcaggggctaatttcttcacctgcaaccctattgcacggtcattatcaggactgagtcaataactgcaaaacatttcaaatagagccacatgaagaggaactcaaacatcagatgaatggaatcacatattttatggaagtcagccaagcctcaagagacccttgaaccaagcagctatggcagcagggatggcaggtctacacaggatcaacaacatagattcccttccaccaagtctaagccagcaactgccactgctgagtgctcaatccctcaatgaagagaacaacacacagcccttgatatgacaccattcatcactggacatctccaccttaaggggacagaagctcatctttatcagaatctatacctacttcatatcaccttccctgccttcattgcctctgccagctccagcaactgggagtttataggatgcctaatctcaacatggcactctgcattatgtcttctcaaacctctcatcttaaggaggtacaagagtgggcccatgaccataggatttcctggtcctactatctaccccattaccagaaacagccagcctgacagaacagtggaggagcttactgaagactcagttgaagagtctgcatgggaataacattttatagggttggggcactgttctccaggatataatatagttgatccttgaacaatgtaggggttaatggcactgacccctacacagttgaaaatttgtgaataacttttgactttccaaaaacttgactattaatgacctactcttgaccagaaaccttaccaataacataagcagtcaattaacacatgtttttatgttatatgtattatatactctattggtacaataaaataagctagggagatgaaaatgttactaacaaaatcataaagaagagaaaatatatttactattcattaa

SEQ ID NO: 295721 - DNA, 773 bp, Homo Sapiens
gtgtgggaccccactgaaaatcggactgttcaactcacctggcagccactcccagagcccctggaactctggcccaaggctctctgactccttcccagatcctctcggcttagcggctgaagactgacaccgcccgatcgcctcgaaagccccctagaccatcacggacgccgagcttcagagcactgctgatggctaacatttttaggttgcaagtgttctggccttgaagatatggtaactggttgggaacacaaagttgtcacctaggcaaaggatgagagtggatgtcaagaagcaaggctatgctggatcctttctgctgttctaccagatccatcctccaccgtcatctatcattgtctgtgtggatcttgatcaacggactttgcctctggctcctgattgggtttgcccaatgggaagcagaagagagtgaagttgtggctccttcttttcacagagctgcaggtttcttgaacttttcatcttgcaaaactgactctatacccactggtcaagtgatcttcaacaagggcactgagactataaagtggggaaagaatattttcttcaacaaatggtattgagaaaactgaatatctatgtacaaaagaatgaagttggactcttacattataccatattttaaaatgaagtcaaaatgggattaaagatctgaaactttaaaactcctaaaataatagggaagaatctttacaaagctgaatttggcaatgatttattggctatgacaccaaaagcacaagcaa

SEQ ID NO: 295722 - DNA, 1000 bp, Homo Sapiens
ctctcccccttgggcagccttaggacgtgtgccctcgcctcccagctggcagaagggcggcctgcagagcggggtgggatgcgccccttccccgcgggccgcaggaggaggcggccctgtggacagccgcgccccggacccccacccagcgaggcagggacgcagggctcggcctgcactggcccagcgctgggaaagccgcaggagggcgcgaggggtggcggaccccgctcgctggagccccgcgtggctgcgccgagctacagacgccaacgggcgccggccccgcggaagtccgacgtccgcaggcggccggatttgggaacgactttttcacggtcccacgagttccctgataccccggaggtccgttaaactgaagatgcccacagctttcgtctccggtcccagattcccgcctctccccactgtcagagcatctatcaatgtggtgtccatcacagcggcagcggctttctctttcatcttcctccctctgccagagccagggagggagagtgggaggcgtcaaggaggcgcgcgcgcacacaccacactcacacaccccaaaaccaagactcgtcctacaggatctgggaaaagaaaaagaaaaaaaagccctcaatcaccacctccttctcgccgactccccctcaccccccgcctcccctccagcgggcagccaaggagagctagaggcgggggaggggagagggaggagaagcgacgcaagtgggtagcttttcagcgccggcgaggcgcgggaggaggagaagcagtggggaggcgcagccgctcacctgcggggcagggcgcggaggagggacccgggctgcgcgctctcgggccgaggaaccaggacgcgcccggagcctcgcacgcggccaagctcggggcgtcccctcccctcggccgggcgaactcaaggggcgcagctctttgctttgacagagctggccggcggaggcgtgcagagcggcgagccggcgagccaggctga

SEQ ID NO: 295723 - DNA, 364 bp, Homo Sapiens
cttgaagatgctgtctcttccagatccttcaagattggaaaaagaaggtgatgagcatttttaaactcagttcactgagcactgagcaattgcttaagggaaggtcaaagaacagaaaaaaatatttgaagaaaagaagaaaagatctaaccttcattatacaggtgcaaacaggattgcacagattgccttttgtgataaaaagaggaagaaaaatggcagcaacccagattattattatacttaaatggtctctcacactttatgaagatctttgtgtaaaagtattaagcagtccatttaacagagaagtatgtttgtttcacatgtatcagaaaatgtgagtcttaattaaaatagatcc

SEQ ID NO: 295724 - DNA, 1000 bp, Homo Sapiens
gggctgccccacagacgggcccaggagaggacacgccgggctggcatcacgtgaggagagcgtccagcaaaccacactggtcccgaggcctccacgaaaagtagatgggcatctcgcggcagccaccactgaggcagcaccgggaaagcatggtgggtgcccactggccccgcagagggcaaaggcatgcacacgccagaagggaacgtcaaggggagcaaagagaaccccttcctcctggaatggctgaggggaccaggccgctctgtgatgcagacatctcaaggggctctcccttgcactaccccatgtggactttaactcccaatttggaaagtaatgatgtcatcttctgtggtctcagggtcctagtgagtgtgtgaggataatagtgttacatgttatgcaaagggattgtgaactggcatgggggtcaggtttgcagggcctggagctggtgactccagctctagaacaaccccaggccggctctgccctacccaggagagatggtcataggggaaagagtccagtgggcattggaggcgtaggggccacttagggttgccctttgagctgacagtggggtacagattcagctctgcagtgcccctaacccccactgcggatccacccgggggaatgccctgaggacacgcgaggtgagggtcaggcgtgtcctgctgggtgggaactccggaccctctgggaaggaatgggtgaatcggctgctctcactctccagctcccactcagaggagccctgggggatcccattcctctacctcagaggactcccaggacactgtctgagcccagtgggaggaggacacacagccctgatctgccagtcagtggggctgagggtcaagctgtgcgccttgtgtgctggcggcgtcccgcctgggatggatggagatggtctgtactttcatgggtgaattgtagggcccctgaattgtatgtatctcaataaagctgctaaagaataaatgtaaaa

SEQ ID NO: 295725 - DNA, 766 bp, Homo Sapiens
cctgcacaaatttgcttgctggcaaccatgtgagatgggactttctcctccttgactttcgccatgattgtgaggccttcccagccatgtggaactcttctttcgtggcaattttcccccaggagggatttccctgcagtggacctcctccccagtggtaccttcagccatcagaacacctcgctttagatctgtgggtcccaaatttcatcaaatccaatgaccatttctatgtccttagtaattggtggcaacctggtggagagggaagaccacaggctgtggagttggacctgggtttgaagattggctttgcatgcctagcaggatgtaagcttggcccactgacttcacttctgagccttgttctccatgtctgtcaagtgcaggggaaggatcactcattctgggggcagccctctggcatgtaatgagcagtcctatggagaggcccatgtgacagtagccatgcgagtgacactggaagtgaaacctgcagctccagtcaagcctttagaagactgcagccctggctgacagcttgacagcaaactcatgagagactctcagcttgaacaactcagctaaactgttcctgggttcctggtcctcaaaaactctggaattctgtgaagcacatgacctcaagtctttggataaatggaaacgcagcttatgccggaaagatggaaggctggctgtactaatatcagaaatggaagaggagagacatcactagagatcccatggatattgaaaggataat

SEQ ID NO: 295726 - DNA, 1000 bp, Homo Sapiens
ttaagctgccaagtatgtgataatttgttatgtagtggagaactaatacaacagggaaaagttaaaagctattcacataaatatttataatggatactatttctacacatttaaatcaagcttctcttacgttcataagaagatacgaatctggagaaggaaattatatcaagcagaacgctgctctggtgttgtgaagacgggatcccaccattctaatgtattcaatttatttattcaataagttttgagcatcaactatgttccaggcactgagatattaatctaaggaagacacacgtgttgtcctcattgaggagctcaaaagtctaatacataaaccaacaatcatacaaaaatcatagccatgttacagtgctatgaggaagatgttaagagaatattctggaagtactcatacataaatacttcagaaactgggcattataagaagtcagttgcctctctctactttcagttctacatttttataccttgtagtggatttaaaatggccacaaattcttcaatactcttctatggagagatttgagggctatttcccttcatcttgaatttaggcaggcttgttcagggtctggcttttaagaggagctttcaccttggtctgtggaagtcctgagtcactgtgtacaaagtccatctaccttattacaccatctggagagagctgagactacagggagagggggagtggcccggctgatcccagtcttcctagtgaccctgcccaggaacttggcatgtgagtaaagccatcttggaacctccataccagaccagccacgagatgaataatactaactgatcccagtcaatgccacatagagcagaagaactgcctaactgaattctttccaaactgctgactcaaaaatttgtatggtataataaaatgtttgttttaagtcactgttttgttaggagtaataagcaaccagaataaaattctaatctttatcatgtaccgtgctgaaaa

SEQ ID NO: 295727 - DNA, 1000 bp, Homo Sapiens
caaccagacccgcgtggcccctgcggctgcaacgggtagcacttgacggccgtccgcacttcctcctttgtctttcccttattccttacgtttctcccttgctcactcttccctccttaccctatcggggctgcagacccacggaggccacgttcactcctgcccgtcggccttggcaagcgcgggccccttgtcgcgcagagcggagggtcctgggagatcctggccccacgggatcggatcccactccccactcaccgccagaccggaagcaggaaggcggaagtcgcggcctttgcgtcccgcccacaggcgacccgagccgccagccgggcgtgagccgcgcggggcgggtgacggcacccgggcgggctcctttccaggctggagcccgagactgccacgtcctgcggggaccaagtggtgggcgaggaggcgtggagcggcttcaggactcgaggagcggttccgaagcagctagggacttttgcctttgccccccgaggtcgatcggaagacaacccccatcccctgctgtagcgggacagttggagggtcatgggtgggtgaagtgtttggctgagggaaactcagaccaaagagcagcggcaagaaagcagttgggtccccacaaaacgcccgaagtcaaggtgagggtcacacaacgactcttgacgattccggcgagttcatcctggtgcacatcccactccatgcctctctcttctggttggacaatagttacatccttacgaaaaggaggcaagctactgggccttggtggatccactcaaccttgttaccaagggacatgccgccatgctatgtgaaaaggggggttttgttgtttgtttttaatttaagtatctaattcgtttcacgaaagaatgatcaataccggcccagagtaaacttgataagtaattaaactgtcagggcatagagttcccatagaggtgcttgttctttcaatacacaaataaagggatgcaaaagtcaa

SEQ ID NO: 295728 - DNA, 785 bp, Homo Sapiens
atgactacagcggaagagccacaatctctagatgatgggccattccaggtcctggagcagctggagctgggagagcatgcagaactttgctctcagatctcgttctatctagataatgaagctggctgcaaagtgccttccctgcacctgaagagaactggcggcagctcttccctgaagaagttgctgcggcctggtgatggggaatctccctgtgtttgctcagagctgaaattccacccacttccaaccaactttggagaccgaacaggtttcaggcgcatctgtcatcaggaaagagaaattcaggccccagatggctcacccagtgaggtccctcagccccaggagagcagaaacttcctttgtctacccgacagggctgaagcctcagagtctggatcagtgtcagctcccgcccccacccaggcctgctcagaagaacccaagccactcagaagcaggaggcagccttcaccccaaccagaccaatatccgttccagactcaggattacaacaatctgggagagggtcaaccaagtcagagtcccacatggcagaagagctgctttagcttaagactcttaactctttttcttcggggcaggaaaggtttgagccaatgaaggatgaggctttccaggcccaggacacaaccttgatccaaggcctagttgtggctttaatttttgtaaatcaagcctcaagtttttcttcactcttttagccaaagatatgtttcccaggatgcatgaaataaataaataaaatgtaccaaattaga

SEQ ID NO: 295729 - DNA, 1000 bp, Homo Sapiens; identical to SEQ ID NO: 225126

SEQ ID NO: 295730 - DNA, 1000 bp, Homo Sapiens
cctggactttgtactttttcaaatcatatttaattatttcttgatctttactcaaagaattattctgcgctaaatttgcaacattaaacaataattaagcctggatccgataagttattgggtgactagaacctacaacacaatttatttttaatttaaactctcaagtctgattaaacttgggggaaaaactgaacattcaggtgatattttaaattttctttgtgactaaatagatgtcattaatatcatgcttcatcttactgtgcatagatgacccatggcacacaaagtatatgtataatattgcaatattgtacttccatctttaaaagtatgccaaagacttcataatgaattcaccatatttaaggaataaggcaaattaatgtttatccgaaatcaaaatgagattggataattcctggaatctgatttctgtaagtttcagtcctaaagggaccttaaatatctactagaacgaagtacagtgtatttctcagattacatgacattagtcaaccaatttagttgtaacacaaagtgagaaagccttaggtgttgaaggagtgtgaaaataaaaatctcttttcatgcagtttctgcttcattttccaaggattataatatgctgagtaaacttttggcactaaggaagccagctacaggccacgtaatgaaaactattcagaaaacagttcagcaaatactactatttgaatacagttcaaatcgtatttatataaatactctgcctacattatttaacccaaactggattattcaccattctttgaagatgccttgtgttttctgttatctacttctgctcgtgcagtttacttacaccttcaccctttcaaatcctaactcttcttcaaggcctgattcagattttaactttttaaaggctatctgaatcattcaaggagaagataccctttctctcataaaaacacttagagcaaactaccactattaaatcacttattgcatactg

SEQ ID NO: 295731 - DNA, 1000 bp, Homo Sapiens
ccaaaacccgcaccgaaagggctgtcctgtttacttcgggaggcggctttggcgggaggggcagccacattgggacctccggctgtggctgggttctgggcaccaagcccgctgccaggccggcgcctgctcctgcagacctgccatgccaatgctctccaagctgaggccgggtggcctgcgacgctcagcccgatgcccatcacaagaaaaaaagcaattatcagggcgctgtgcgcacggggccaccttcgcgctggcccgtgagggcaccctcagccggcgggactttcacttttgccgagcagcggcagcagcaccggatgtctccttcgcccctgcgcaccggggtcgcgcagaaaggacggtggttctgaccggcggctctgcggggcggggcgagcgccgtgcgcgagaggagcaggcaggggaagcacgcaggcggcatgaaagcacggggtgtgggactaggagagccagcatggagccccagagaatccagttttcccccgaagaaatgatgcccagcatcacattcacctctaaaaaggggaagccatggacctgtcaggggggtcctggggtgaggacaccggctttggtgcttgggacaaccacgctgggaactcccactgcgctaggttctgggcaccagccccgctgctcgcgggcgcctgctcctgtcagagacctgcccgccgcccgccaccagtgcgctcccagccgaggccaggtggccagtcacacgcagcccgctgcccagcgcaagcagaaaggtgcttctcaaagctcggctccgccgcttggcactctgggccacctttgcactggccgatgcgggcgcctgcagccagcaagacttacttttgtgagcagcctcggcgcaccggatgtcgtctttgccatccccagtgggcgctggggccgcgtctggagagacggtggctctggccggcggggtgcggcgctaagcccgaccgccccatgcctgcccgggtga

SEQ ID NO: 295732 - DNA, 1000 bp, Homo Sapiens
agcaaagccctggggaggcgccgtgggatccctgcctcgggcctgcctagacagtatgtgaatgagtatcccagagattctccccgctgtgacctcgagggccagcctgcctgtgtggccgtgagctgctttcttcccagaggaacttgcttgcggcagcaggactccacagcctcaggggcagcttgggcctcggcaaagtggggagctgcctcggtccagcaggggtccagatcacctcctcatttagagggaccatgtctctagagagatgacatgccaaaaacggaaacctcacaggagctttttgtccacctgcaagcgaggtgcagacacgtttgagatggtggatggacttttttttttctcttttctctctttccaaaatctggacacaccatggcccagtgatggagaagaagtcgaggacctgtcaaggatcttctttcttaggagtggcggagggctgaccagtctcaataaagcacagggggagcccctgtgacccagcgtctgggtggcagcctgtggacaatctgcagctcatctggatcacgcagctcagctgaactcacagcccgaggtccagcactgcccaggggctggcagccgtcctgcttgggtggggctctgcaggatgggcaaccacacgacggtctccctgggagcctgggaaaagggaggattcacagattacaaggggacaagaccctgttggacaaaaatgaccaagtgggaagctgcctagctctgaccaggtctgggaacacactgggattggaagtcatctaaatatagcctgtttatagactgcgatctgactttctcaggcactgtttgtatgagagctggtaactatagcacaatttttctaaactggtcattttcaacactgactttttatttgcatttgaaatgattttattattggcaccagagaactagaacctcggactattgctgtggctgaaagctacgcacagctttccatgaaatctta

SEQ ID NO: 295733 - DNA, 701 bp, Homo Sapiens
agagagaagagtggaggctggttctcaggctccagaagcataagcctgcatggagcatagcgtcactgagcaagacaggtgtggaggatgagaagcgggccacaggatgggaagggaatctgtgtggaggcggtgccctaaacatgctgccttgaggagggacctctacatggggtggccgggcacagccaggctacccatggggacctcaacagctttgccattgcacactatctttgcagacaagatcttaatcacatccaactttctgcagttgcacagggtacctcagacccacatcccagatgacattcctcagaagctcgcagctggagatgacatcaccttagacaacatcaccctagcccaagacatcgctattagagatacatcacctggacactaaagcctccaacccagtgacactctcaaggtgctgacaaaatggacatggacatttgttgcttttcttcttttgaattaggaactctattgtgtttcctgaatttactgtctgcttggcccatgatcctggtatgttccttgctctctgccaaaacatgcaccgtcccctccacacctaaaggaaaacctggtagaagctactactctcaatgccattctaaaattgacgaagagtattattttccccaagaggcagctgctgcaggccagtgaatcctctggaccctggggagagg

SEQ ID NO: 295734 - DNA, 1000 bp, Homo Sapiens; identical to SEQ ID NO: 225129

SEQ ID NO: 295735 - DNA, 673 bp, Homo Sapiens
gaatcaaaggcacaaggacaggctgggcacagtggctcatgcctgtaatctcagcactttgggagcccaaggcccagtcccaaggtgcaaggccacttgtgctagcagcatgcgtcagcaagatagcagaagcaggaagagagctggccggaagatatgtaccctgtgaagaccgagagagaggccgtccaggtaccacgtagcagttacatcagactgagacacttcctgtttacaggagactataaaacccctgccccatcctcatttggtgctgatgccattttcagcctcagcacgcctgcacccaggcgctcattaaaacagcatgttgctccccactgcctcgtgttgtctgttggcgcgctgtcggggttcgaaccgatacaagaaccttccacctacctggtgctttggcctcatctataagcagcttttccactgtcctgaaacaagatagagaatctgagcggccagtcatctgccctaagtgctgccgccgaagactgaatgtcctggaaagtttgctgtcacatctccattatgacaaaagcattgtgccgaacagatgaaaaaatgcattgtcaacggaatcttttatgtttgtttgtcttcctttaagcaacattgccttacttgttataaaagataaataaatatttgttcatttcaa

SEQ ID NO: 295736 - DNA, 637 bp, Homo Sapiens; identical to SEQ ID NO: 225130

SEQ ID NO: 295737 - DNA, 1000 bp, Homo Sapiens; identical to SEQ ID NO: 119384

SEQ ID NO: 295738 - DNA, 1000 bp, Homo Sapiens
gccagtctcgtcttgaactcctgacctcaggtgatccaccggcctcggcctcccaaagtactgggattacaggcctgagccacaacactcggccccatcattactttattcttaccagctgcactcactggtactagcagttcatgatttgcctgagtcaataatgatatcacaacatcagattccactgatcaaaaaaggacctcgtcagtctagcactcagtggcaaaaaaaaaatgtttaagttattattgcagaaaatctggagccttgccagtgaataagatttttaaaggatgtgcaaaaaatctagcaaaagaggcgtgaatgaccagggatggatatgagaggagatttagggcgcagtagcctaaaatgtgcctctgcttgcagagatgcaaaagagggtaaatgagacttttaaagctgatttagacagaggaaaaggggaatgggtggtaatgagacccctgctggaggtatcacacgtgcctgggcagccgcggaggaagactcatgaagggagttgaaggagcaaagcaccagaacccttccagccctgagagtctgtgagtctatgaggcccatgggtgtccaaggatgtgaactgttatgatagttctagaaatggaaagaacagctactgaataattatcagtaattattgcttttcacctaaaatgtgtaatgcagcttccaaaattactgacttggctgagcacagtggctcgcacgtgtaatcccagcactttaggaggctgagttgggcaggtcacttgagcttaggagtttgagaccagcctgggcatcatagtgggaacttgtctctacaaaaaatacaaaaattagccaagcatggtggcacgtacctgtagtcccagctgcttggaaagctgaggcgggaggatcttataaacccaagaggcagagactacagtgagccgtgatcgtgccactgcattccagcctaggtgacagagcgagaccctatctgaaaaaa

SEQ ID NO: 295739 - DNA, 1000 bp, Homo Sapiens
ttgtttccaggcggttccaccttctaatatgaaacagtcttggttgattttccttgatactactttatgctcggcctggttgttggcaagtagctgcccgcgtctgtacgcgcccttgattagtttccactgcatgtgttttaacacagtcctcctttttccacgtttatttgggccaaccctgtctgcaaagatccagtttaatacagatttgagtctacgtgctatagcctggaaatgtactaaagacactacaacatattgctgaaagaatagaatctttattctgaatgcaaagcggacacctagtaaaaaattctggaataataaaacaagcaaggcttatgtgctcagttttggggacgctccaatttaaaggcttagtcattgtcacggtgtaaggtttacccattgcccccatcacacagatgtgggattgttgagagctgagtgtcctatgacctcttctgctgcccaagaacttggggtgggtggtaactggagaaatcaaagtgatcagctgcaaagaacgcttccattgctggagcttggttgtgcgggattctccacggaggtcttaaggcagagacaaaaacaaggactttgggaggctcctgtgagcagccaaaagggtttagagtcaggcagcctcaggttacaaatccagtcctgcaggctaggagttgtgtaagcttaaaaaagtgactgcacttccaggaacatcatttccctacctgctcctccttctgacgggttttctgaggacaatggaatccacactctgtgtcgaacacttttctaattagcgatgtgcagacactgtttattttacaggaataaaaatgccagaagaacccaagtcatattcatttaaagcagggtgacaagtacaccaaaatctgaaaaatcatcactaaagaacttatccatgtaaccaaaaaccattgaaataaaagtaaactatggaaacaaaatttaaaagtaataaaatttaaaagtc

SEQ ID NO: 295740 - DNA, 1000 bp, Homo Sapiens; identical to SEQ ID NO: 119385

SEQ ID NO: 295741 - DNA, 1000 bp, Homo Sapiens
ggctgggacccaggaccacaggcagagctctgttcgacccgagaggagactgagtgtgctggcaggggcgaggggttttcggtggcccagccaaacaccaccttctctcaagggccctgtcctcatcccagaagtggttgttttcctcctgtggtctctgaaagacacaggcatggctctgggacagagccatgtggtgatgactgtaatgggaggtaagcctgcctcggtgccctgccatgcaccccgaggtcacctatgagagaaggctgccgggttctcaatggcccattctgcaaggtagagggcagcatctcatgtgaccaggcctgtgatgccgtgggagatgatggctgtgctctcagagagtgtgactgagcctcccgagggctgcaccaagagagggcgagagagtcagtccagcgatcagaaggcaagtggcttagaagacaagtagccatccaccacatggctgaataaaccatgacaggaccaatcgccactcagcaatgagaagcaactaactgttgacatgccaacagcttgcacgggcctcaagggtgtcatgtggcatgaaagacactcatctcaggccacacaggattccattcattgaacattcctgagacaacggaattctggtgatagagcacaggtcagtggtggccaggggccgggtgtggctatgaaggggtggctgccttgtgatgattcaatatgctatgtttttcctttgtggttttctgtatctatgttttatcttattttttttgagctctgttccccaggctggagtcagtggcacaatcttggctcactgcaacctctgcctcctgggttcaagcaattctcctgcctcagccgcccaagtaggtgcaactacaggcatgtgccaccatgtctggctcatttttctacttttttttgagacagagtttcactctcgttgcccaggcaggagtgcaatggcgtgatcttggctcactacaacctcctcctc

SEQ ID NO: 295742 - DNA, 1000 bp, Homo Sapiens
ggttcgggaggcgggtcctgcacagcgacgcagccttgtcccggtggccgcaggcctggggagcagggcgcagcacacccgccgcccgcttgcaggcgagacgagagcggggcgccgggatgctggcgtccaatttaaccaccagggcgcacgggacggaggccgggggtcccgcttttccgtcagagttcgcgggcgcgtctgcgcctccggccgccgcggctcccggggcctccgcctgcagccggcggcggaacgagggcaggcggctgagacaggcgagctatttgcattccccggcagtcatttttatatgcggaggtaatgaagttgtcagcggcgccccgagtgtggcagagcctgatattcaaatcgccctgcccgctccgcctgctcccgcccgctggtcccgggagccccaggctgcgcgcgcccgcaccgcatcgccgctttgccccgcgaccgcgcgcgcctcctcgtcctcccccgcgcctttgtttccgtctccttctcctttccctcctcttttgtgtcgggccagactcagccccagaaaccagccaccctgccgcgtccgactgccagggatccctcacgccgcgagaaacccaacacacagctattctgtcaggctgccgagaaaaggctgttcggcagttgcagccctggtgaggcaatgaggaggaaaggtggacgcacctgcctggagtggttgaaggaaggcagtgaacatccacgctcctggggttggttttcctgaacctctgtagctgtgctgctcactggggcagccactgaccacaagaggctgccgagggcttgcagtgtggccaggccagaccaggatgttctccaagtgggaaatacacaccccattgtaaagaagactgtatggaaaaaagaatgtgaactggctcattcatcatttaaaaacattgattgcatattgaaatgataatattttgggtatatggggtgaaataaagtatcatgaattaaa

SEQ ID NO: 295743 - DNA, 1000 bp, Homo Sapiens
cttccaccattgtgcaaaaatgggagaccctgccgagcagcagatggccctcagcacggctgacactcaggccaggccccaggtggcagctctcagaacacactgtccagctaaaccctgcacagactggccgttgaaaatacctggtgttcacattccccaaaagttgggcaaatgacagggtcacccagtgcacttcatggggtcagtggggagaaccagcatttcagcacaagttcacaaatcactgggtcccccttgtcaaacactgcaaatatgtagcatgctaagaaaaatctccttacctctcagactctgtatcactcagttcatctgagttgctacaatggacaataaaatctaataagttaaaatgaggtatggaatgctcaggagaaaaacaacaaggactagtactcctcatctgagtaaataatttctctcacagggttaattttagctttgcaagttttttatttgagattatattttaaatcacaatttgtgcacgtgtgatttaaaataaaaaaggcaatcaagtctttctgccagtctaggtgatgtgaaatttaattatcgagcagttatcattaaaataaacgcaaagcaattttttagacataattgaatattccagaagaaaatttctgaaaaatccaaaggtccaaaagaaaacttctcagtgagaatgtctgtttcagtaagataccctgttttgtagtattggatgcagagaatttctagttagacatacataagtcttgccagaattactatagttcagttttgccacctgcatctagaaatatggaagacttatctacgttactggttttgactccccaataatgagtaatgaaaattcctatttatcatttctacatcaacatcagtgtgatagcagaaaacagcatgatttacctggcccacaatactgttgtatagaatttaaagaaataaatacctcaatccattcaggaatgttcttttcccaattaag

SEQ ID NO: 295744 - DNA, 1000 bp, Homo Sapiens
gatggagaccggcgcgggctgggccgggaagcagcccctggcgggctgggccgggaagcagcccccggcgccccggcggaaggagaaaaggagaacggtaaaaatagccggcggccacggcccacgtgcagccgcgggagaaccgagcgcgggcgcgtggagaggggtccgtacctccaaacatgcgcggtgagaggtgagctggtaaggagccgatcaccaggcgcggcccgccggggctcccgcccaccggccggtgctggccgccgccgccgccatcctcagggctgctgtgcaccgagtcctgcgagtcctgcggaccgctgctgctgttcgggatgctgaaggaggactgcgccgcgcgggcccccgacgccacgccccccaggaaacagctgcgcggggctgccggggccacgccaggctggtaatcatagcctcctggtgtcgcacatccatgggaataatgaatttatttggactagaaactaagacctgctggaatgtcaccagaatagaacctcttaatgaagttcaaagctgtgaaggcatgtttcttccaaaaatgctgtcatttgtaaacattcataaacatttaataatattatgattcacttttaagaattattgtaaaatactgttgttgatttaaaaaaaaattagaactggctcacctcaatgagtattttacgttttaaagtagttttctgagaaggctgtgtacttacaaatttgagtataaattttggaatttgagtattaacatatcccattgtaaggcaatcttgactataagttagtcttctgtttcagaatgcgaagatacagaaagatgttttttggggtagcttcaatatataaattttgaggatagattaaacagtcaaatatctatttgtaatagctaatgtataaatttaattatgcatacatatttaaaaatcggatatgcaataatagattgatttagaaacattacttttttatatatgctcatagt

SEQ ID NO: 295745 - DNA, 740 bp, Homo Sapiens
atgattaaggaaggcagtggacacatagagagtgacagtgaggtgatgaggccaaatggagagttctggaacgagagaggagagtggaagaaaatagacggttcagagctggcctgcagtgacaaagagaaacaaggcctgtttgcggtggatatgattggatggccaggacaggaagccaggacctggaaggagagcaaacaaaatgagtttttcaaaaagctagatgacagtgaaaccatgcagagatcaaaaacggtgcaacaggaaactaggaaagcagaaaacagaaatagtgtaattttgaaggaaggaaggaaggaaggaaggaaggaaggaaggaaggaaggaaagaaggaaagaaggaaggaaagaaagaaagaaagaaagaaagaaagaaagaaagaaagaaaaagagaaaaagagaaaaagaaagaattttgtcccaggaagagggccggcttgatgtggttccagcaaactgacacaggccaaagtgtgcatgttacagagaagatcaggagggtgtcaggacttccaaacaccctggagcaaattctggaggcccacctgttgccgttgatgtggcggatcccagcatacgaggagcaaaggagagaggaccttcttctggctctgagagtccataaccctttgaggaagattaagcaacaggcacattctcacatttatttaatctttaacacccctactggctaggtattgttaactgaatatca

SEQ ID NO: 295746 - DNA, 757 bp, Homo Sapiens; identical to SEQ ID NO: 119387

SEQ ID NO: 295747 - DNA, 1000 bp, Homo Sapiens
tcccatggaaacagtaattgtgggcttggctcttgagcacagcataggtcaacgttgcctgattttgagaaaccctgcgtgtctgcttttgcctgagttttcagcccttggcaagaacaacatgccaggtatttatgccttcatgggcttacctaaccgtcctaccttttcagagagcactacaagcaactgctgccatgagcaagatcccagcccacaaggaaaggtctgccctatagatcatcctgtcccagagatctacagcataatggcctggaagcagtctttgttttggagccaagcccagcaaagtctcaattccttccccttcaatcgctatctggatgaacaaggccaagtcattgaccttctctgggcctcagtttcctcacccataaactggagcaaagtcatctccaagacagcaggaaccatgtttactctttaatcattgtatgctcactaaatatttgctgaacaagtgaacaaaaaacctggtggtggtgaaattagactccttcttggtgtcaccaggaggtccagttaaacataccaagacttgaggaattatgtccaaggttccagcattgaacatgaagaacgcaggatttattggcacgtcgtgataaccgtaaagcccacgcttctactgcagtgttgagtttgcgtgcccttgggacagaagacagaatagaggctgagaaaattgcttgttggaagaatgaatcctgggtctgctattacaagaaacttctcaacttctagccttatctctcaccactccttccttagatcctaagattcaaccatccctgacatcaacacaccatgtcctgtgctttgtgccacctgtttacctttgtacatggcattcccacgtggtagaatctcgctcccatacaatctgttatacttggaacccccttcctttattctcaaaacgtaattccctttgagaaagtttctctgacgttttcctgacaatgaaccaatccttcct

SEQ ID NO: 295748 - DNA, 541 bp, Homo Sapiens
atgccaaaaacatctgcagtggacactgctggaattgctcatgagatctgtgatgaacactatgcttctacctcagtcctgagcctggacccagctgtgcaagcctggccagacccctctcccagggctgaacaccaatttcaagtcttcaggtcctactgcaatctaaacaggctatccagaagagaatcctgcaccagtccaagtgtgagcaggcctggagactctgctgctgaactgcaccccctgatggccagcctggatgtcacttctatcctgcttgagccaggctccccggatccctggaccacctccactccagaccagacaatggggaagctgctggtcccacaccatttctgagttttctcctctatccttctgcttaaagttccctccaaggacttaagtgcaagtcatcccagaaacccaggtaggggagtagagaggccagatatggacaggaaggctgccaagaaaggggtgttagccgggcgcagtggctcacacctgtaatcccagcactttgggaggccgaggt

SEQ ID NO: 295749 - DNA, 698 bp, Homo Sapiens
gggcagaggcagggtaaaggacaaatctggcaagtgtcatgcatgggggagtcatccaggaatctctgagccaaagaggtggtggccctgctttcaggggagacctcatctctgcctggagtgacttctggattgtagcctttcagattaaagattcctcaaccctatcatgggctgctctgaggaccctccttcagacacttccagtatagacacagtatccactgcttggggaagtcagactggtggtcagctggaggggtggcttacatgctgcaggaggaggctgtcccacaggggcaactccgctccccacggaaatgtgcggaccctcactccctgccagcgtcttccccattcagaatgcacctgtacctcagcaaaaagaatccctgcccatgttctaacgaatccccaaacccccattgccccttggatgtccacccttgagtggagtataaggcgtgcgggtgacctacatcagaaacagggtgtgatcatttcagttcatcacatctggggcctctggtcctggcacaagctcaatagctagtgcctgacagcattcaagtagatcacatgacacccaggaggggttgtgaggactctggggaagaaaagccatctccagtggggcagggaagccttgaggtctgagaggtaggtatgaggatgctaggggtatgacccaccttgtg

SEQ ID NO: 295750 - DNA, 1000 bp, Homo Sapiens
ggccaggctggtctggaactcctgacctcaggtgatccacttgcctcggccttccaaagtgctgggattataggggtgagccaccgcacctggggtggttactgtttaaaaaaaaagtcacctgactcagacccactgagcacttggagaacatctacaggtagaaaacaaatgttacaaatatttaaatatcctgatggttttggaagtcaaggggagagagatcttacctctgtctaccacccaaccctctccaccaaggtcactataaatacaaagagcatagcttgggctacaggaaagaaggcattcatatgtataaatgtgtgtgtatatatacactgttttttcttttttaagagactgggtctccctctgtcacccaggctggagcacagtggtacgatcatagctcactgcagcctccaaaggtgcggctgaagtgatcctcctacctcaacctccctagtagctgggattaaagatacacaccaccacatggctaagaaggcattctagccctgagtggtggtgacacaggttatatacttgaagtatacacacacacatatatatgtatacacccatatgtaaatataacacaaaaaactatgtatttcactctatgtatatatatttaccattttaaccgtttttaagtgtacaattcaatggcattaaatacattgttgtgcaaccaacatcaccatccatctccaggacttttttggcatcccaaacggaaactccatagccattaaacaacaatttctcatttccccttccctccagccatgggcaaccaccatgctactttctgactctatgaatttcactactctggctacctcatataagtggaactgtactgtactggtccttttatgtctgacttatttcacttagcataatgtttttgaaggttcgtctatgttgtagtatgtgtcagaatttgctaccttttttaggctgaaaaataaacgattcacaatatattttt

SEQ ID NO: 295751 - DNA, 1000 bp, Homo Sapiens
cgagcgaggggggccgtcgcgcagcaggggcgggtggccggacgtctgcccgggactggttgcctcccgcccctccccaagaccctggcacccagggagggcgggaaaggccttggccattcctctgggtaggggactggagaggggaagaaactttcgccgagtccagcgctgccccctcatacccatccccacccaggctgcgtgtccggggcccctccggggcttggcaccagcaggcacgcagcgatcgccgtcgttgttatttagtagtagtagtaacggctgacatttacagcgacgtcgatggcgccaggtgccaagctctttccttgtataatttcatggacactcacgcatcaactctaagcgaagacttggagcggggctcagcaccccaggggtacctctgcaacctcgaaatgaagttgaaaatagcacaggagcccactatcactgtgtgaacattttgtgaatgaagacatgtatgaaaggatgtttggaggcttcaagaaacgaaagccgagagtctagctagaccagagccatccagcccaggagcgatggccacgtgtggccgctggacacgagagacgtggccagtccaaactgtgcagtgcggggcagtggaagccgttggagggcctcaggcaggaacacaaggtgtcgtggcagaaaggaagaaggggccgggcacggtggcccacacccgtcatcccagcactttgggagggaggccaaggcaggaggatcgcttcaatccaggagttcaagatcagcctgggcaacacagcaagaccccgtctctactaaaaccctaaaacttagccaggcttggtggcatgtgcctaaggtcccaggtcctcgggagactaaggcaggaggattgcttaagcccaagagtttgaggctgcagtgaactattatcacaccactgcactcagcctgggtgacagagtgactctgtctcaaaactaaataaataaacaataattgtgtt

SEQ ID NO: 295752 - DNA, 823 bp, Homo Sapiens
ttctctttacaaaaataattgttaaaaataaaattcagaattctattttatttatttatttatttttgaaacagagtctcgctctgtcacccaggctggctgaagtacagtggttccatctcggctgactgcaacctctgtctcccaggtgcaaacgattctcctgcctcagcctcccaagtagctgggattgcaggtcactttgggaggccaaggcaggagaatcgcttgaacctgggaggtgggctccccaggcttaaagcaaaacccccatcttgtctgtctccactctcatcccaggcaatcgccgtcatttccacagcctcaaccactgtctacctgggatgcctcccaagcccgggtcgccagcccaaacctgccttcctagccccagacccatctgtcctggcacacattgccccctgggtccccagcaacctcagccaatgagaccaatgccaacttcctgtccttgcctgacactgtcagccctgagatcagacttgaccattcacctccagtacctgataggtccgtcagtcctttggaacatatcccacgaacattccccaaaccaggcaccggactccacacatcaacaccgtcacgtgagtcaccagcatccctggcagggacccctgtcccagcctgcaactcatctccttcctgtcccttgagttctgtgtcacattccagaggccacaagaagaaaaatgaccaccttaatgaaattaaaagaattgagaagacatttctctatggtccaaaatctttccaactgagaaacacatatcaagatccagcctgctggccctgtggttaa

SEQ ID NO: 295753 - DNA, 1000 bp, Homo Sapiens
ttggaagggtgcgaaatgtccagtgtgtaccctgcccctctctgtcatagctaacaggaatgtgcttcatgtcttcttcctgctcaaaggaccgtccaccaacctgcgcaggcagcactttcgtccgggggggatgggagaacttcccaccatttcccacttatgcactgcattcctcaggagcctgcctcacaaattacaagggcgccacagcagacacacgacattccagtgggtggccatgtcttcatgtcagcttgaaagatcgtcaccagggaaatatctatatctcggcagagagagcttcagcctgtgtagtccagctgtgctcaaatggaaatccagaaacccagatgttggtccaaacaccctgtctcggacagccagctctgcaggtccccagcgtgggatggaactgggtgggccacctaccctgcctgcccacatccctgcctcctggaatcctggaccctgagaaacagggggatgtggtggggaacaggcaagtcttgtgcagaaagccaagatgccacccaaatacactctgcagtctaggtgggtgatattctggtctgcaccacaccagtgcatgagggaatggaggatggagtctagacaagctaaatgtaaaaagatattgcccaagtattttgtgctttgtctgtgttacaatgctatgcccagcccagcgtggtggctcacacctgtgatctcagcaccttgcgaggccgaggcaggtggatcaccttaggtcaggagtttgagaccagcctggccaacatggtgaaaccccatctctactaaaaatacaaaaattagccaggtgtggtggtgggcacctgtaatcccacttactcgggaggctgaggcaggagaatcacttgagcccaggaggtggaggttgcagtgagcggagatcatgccactgcactccagcctgggcaacagagtaagactccatctttaaaagacatataaataaataaatgctatgcccagc

SEQ ID NO: 295754 - DNA, 663 bp, Homo Sapiens
cctttcatcccaaagatgcagccgacttgattgtggtggataagctttttgatgtgctgctggattccgtttgctagtattttattaagaatttttgcattaatgttcatcagggatattggcctggattgagcaggccatttccaatccagcggaagaccttctagaagagatgatggtgggagagtgctgacatactatgtgaagctactatttggagttggacacgagtgcatgtgtccttgtgccacaacgggaatcttgactacaacacaaatgaatccactcaaatgttggcaagtggagcagagtcccagaacaggtacagaaacacccccagttcaaggatcttcacacctggatttaggcctactcctgcaactaccccaggccagttatccaggcagtgactttcagtgcagctacagtcacctctggaaacctgtggagactttaaaaatttccaaaaggcaccaatttgatcttctactactttgcagacatctcttctgcaaacaccagacaaattgagacaatgaccttccacaggacccaaatcacctcttactgcaggaaagaagatccagtgagaaaattagtccacaaatggaatgtaaatccataaacactcttaagtaacagaataaatttagtatgaacgtt

SEQ ID NO: 295755 - DNA, 1000 bp, Homo Sapiens
gcttcccttgggaactactgtcactgccatgggcatctgcatctgagaagcattccttctctgtgacaattatcatagtaacttttgcccagcaagttggcttttctggatgtgttaatgatggtaataatgataattgctaagattatgaatgtcttgcatgaattatttcatttaatcctcacaataaccgaatgaggcagaaacaattttgtgtcttttttacaaatggggaactgagatttggggaagttaaatcatttgccaaagtcatttgttcaatgatgagtagtctcaaaattttaacccaaatctaatcaacatattgtaagattgttacagtaagaatgttattagaacatcctgagaaagagctgatatacatattaaagagtccttcattttcgtgatgcctactccttgcttgggtgcaaggttatttctgcttgttgattctgtccctttgaaaatcagattttaacctctagcctgctagttcctttgtggggaaaaatgattattgctgttttccaaaataccaaaaaatgtcagcccaaccgcctgagtttaatcagatgtttaatctgatatagcatctgcataatgacaccacaaagaataaacaagaagatcgggactgtgtcataaatattgattcttctatagtcagggcctgctgactttcatataaaactttttatttaattaaatctattgcaaacaatgcagcaaaaccttattctagttttatctttcagaatgttgaaatagtcacagcccatggaatcaatgttttgggtaagattttttttaatggaattctgtctctattgctttaatttctttaatctttcactgcatgaaaaatactctaatatcttaaaatttcatgtatttccagcctaaaaataacatctattatagattttcctcattttattgtgtaaatgtagataagcataaagaagaaaataaaaattgtccagaaagaaccacaatt

SEQ ID NO: 295756 - DNA, 1000 bp, Homo Sapiens
ggtaagcagatggaaaattctgagaatggtttgccaaaaattgtattagactgcaataacttttatccaataaaagaaaaaaaggctgaggaatgggactttgcagctgttgctgtaaaaatgcatcttgaaacaatggaaaaactgagaagagtggaaaactttcctgaaaataaagagaaatgctctgaaatgggaccaactgaaggtggtacaaatgctgtaggatgcccaaggtcacacctagaatacagcctagatcaaaacagaccacctgtttctgggtctagtttccccttgctgctgccatgtgaagaaggacatgtttgcttccccttctgccatcattgtgatgttattgaatggacaaatttcccttttcattggaaacagaaatggtactggaccctttctagatctcttgcctcacagcttctaacccaaatcttatttctacagcaaccaacacagcttctcgtttgtaaaacttctcaagatgtttcaaaatggaagaaataccaaaacccacaaagaatccttgagttggtatggttatttttagttgaggacatttgagattccacagatgcagaaaagaatcttctcagagcttccttcttctgattaaaagcagccacttctgggaaataaggctggcataaatcctctcttgagagtggctttactcccagaaacaagaccaagggtaaatctaccataaatcccctctccaggggagtttgatggccataaagaagatgaaaagagttctcacacctgcataaacaaatgttatcacaaactttcttatctcttgtttgttctcccaaaaaactatttgtctttcctaaagaaatccatttgttttccttatagaagtcttttctcccggcttgcttctcctattaagttagatatataaacttctaatttaacttttaggaaactacttcttttgtaagctcttgtatgcaaataaactgttttattctcttgttaa

SEQ ID NO: 295757 - DNA, 989 bp, Homo Sapiens; identical to SEQ ID NO: 119389

SEQ ID NO: 295758 - DNA, 1000 bp, Homo Sapiens
gccatttcacctcactgagccttagtttcctcacctgtaaaatgtgaaaaatatcaccttccttaccaggcttttctgaggatttaatgacatcatgttcagtgcccagtatgggtggataatacccaggagtttcctcctcttctcctcctaagttgacttgatgccccccgctgaagatcatggctgaactggctcaattcggatccaggactcctggctttgtctcttccctagttgcccaccacacccatggacacccttaggtagtttatccttttgggacaactggatttattagaaaagggtattctggggtggaataaggcccttttcagtccccatggagcctttttggaagatgaagttctcaaacccacaagagaattcataagacgagcacaccacccacagttaggtttccctctcaagtgctttatctccacgtggggcaaatagctctttgtctgcatatgttattggagcttttggagtccagccttcagaagagctctaatttttggattcatatcagtttattagagaagcctagttctaaggattagcaaatgggtaggtgctcagccagcccagaacaagcagagccatgacagaagtttctggaatctcacagagtcggtgtcttcatggactcagggggcctaaatccaatagcctggatttgtcactttcccttattcccttatcaaactcttcccttttggacatcagagaaggaaagtacttcctgtaagggggcaatttgcaaagcttcatggaagtggcatttgagtgtggccttaaaggatgtgtaggattgggaaccatagatatttagaggaaggcattcctggcagaaggaacagcagcaaaacacagaagtggaaattagtagcagcattaatggagaataatttggggaataagatatacaaatggaataataaaaatagcattaattaaacattgtgggagtcattctgtaagatggcccctggtg

SEQ ID NO: 295759 - DNA, 722 bp, Homo Sapiens
ggactcagagagtttacacacatgttcacggcagcattattcacattagccaataggtggaaggaacccaaacgttcaccaacagatgagtggataaacaaaacgaggtatatacatacagtgagacattattcaaccttaaagagaaaggaaattctgacacatgctacaacatgggtgaaccttgaggacattatgatgcgcagaggagagacacacagagaagagcaggaagcaatgtgacgtgcagcgcagctctagtgatgcaacctcatgcccaagaatgctgcagctaccagaagctaaaagaggcaaaggatgaagtcgcccctagaatccctggaggaagcacggcatttcggcctcagacttctagcctccggagccgtgagaggataaatatctgttgcattcaaccaccattttgtggtcatttgtttcagcggccacaggaaacaaatataagcttacagccccatctctcacctgtggcctcagcttcacaatctccggccagggactatatgaagccttccaaagcagcccattccgtgttcacagtaggcctagttctggccccagatgagtctaatccctttccctcagtacagtgctttcatgtatgtgaagaaaagaatataaaagtcccacagagcgattccaggccagagagtcccagctactgtcctcggcatccgccagctcatgagaaatccccttaa

SEQ ID NO: 295760 - DNA, 452 bp, Homo Sapiens
tcggcgagcccgcggtgggggtccccgcgccgcccaggcctaccccggctccttgggatagatggggaagctgaggcccagaagggggctgagaccacctcccagtttccccagtgaggtggcgcctgagccacggccaggcccggcctccttccacccggccctgctgtgcgcgcggcgggtgctgacctggcgaggccggacaggggaccaggtcggggtgaccgtcactgacacctggacagtcctcgttgtgttcggggtgggaagcccacggaagacatcaacacaggagactcccaagactgctggggccaaatgtggcaggtggacgtctccccgccaccgagcaagccatcagttctgcagcggacaccagccgagtgtcctccaacaccattccggtacctgcagatagcgtcagatccagacacctacacacacacacacac

SEQ ID NO: 295761 - DNA, 1000 bp, Homo Sapiens
ctctgccacttcatgtgaggtgtggtctcttcctccacatcccccaccccccattctatctttgtcatgttatcagatttacatgcattgaaaatcctaccaggtaatgtggcaattttgttttcaacagtatagattttttttttctttttggagatagagccttgctctgccacccaggctggagtgcagtggtgcaatcttggctcattgcaacctccgcctccctcccaggttcaagcgattttcgtgcctcagcttgccaagcagctgggactacaggtgcgcaccaccatgcccggcttttttgtgttttagtctctactcagtggtgtttcatcatgtttcccaggctggtctcaaactcctgagctcgggcagatcacttgaggtcaggagttcaagaccagtatggccaacatggtaagaccctgtctctactaaaaatacaaaaattagctgggcgtgatgttgcttataatcacgggaggatgaggtgggagaatcactcgaacccaagaagtggaggttgcagtgagccaagatcacaccattgcactccagcctgagcaacagagtgagtgtccaccttggctcgtgggtgggaactcatgagcgcccactccaagctgtgtcctctcaaaaaaagtaaataaagtctgctggtgaggaattttacacatataaatacataaaatatttgatttgagtttatcccatctggagttggccaaactttttgattttcataagtttatatctttcactaaattagagaacttttctgccattatttcttcaaaataaatgttttatgtactaatatctttccattccccttctggaacttcaaatacaaaagtgatagatgttttgatattgtttcacagctctctgaagctttgttcatttttttaaaaaatcttttctcctgtttttcagattagataatttctattgatctctttgtaagtttactgactccttcctctgtaatccc

SEQ ID NO: 295762 - DNA, 1000 bp, Homo Sapiens
tttgaggatgtggctgtacccctctcccaggaggagtgggactgtctgatccctgctcagaggggcctctacaaggatgtgatgatggggacctatgggaacctactctcattagtaggtgaatggttaagcaaactgtggtacatccataccatgggatacgactcaacaatcaaaaggaactgcccagacttcaccacgatgcaatatatgcatgtaagaaatctgcacttataccccctaaatatataaaacatttttaaaagaaaaaaaggaagaagatacttgcaacaacttggatggatttcaagggaattatgctgaatgaaaaaaagtcaacctcataagattacattctatatgattccattcatatgacattcttgaaatgacaaaattacaaagatggaagacagaacagtggtagccacaggttggggtgaggggataagaaagggatgtggctgtggctgtaaaagcgcagcacaagggatccatgtgatagaactgttctgtctcttgtgatggtggtcacatgaatctacacatgataatactgcatataattgtctaaaatgacattttcttcaagagttatctacagtttaaagctcacttttatgaagtgtcacatccatcaccattttaagagacataaaatcatgaaaagatatcaccagaagctacgtaaacatttcagctaagggtaaagagaaagttaagagtgttttcacaaggaaattgaaagaaggcaatccgaatgaagtcaacttggtcacacaaaaatcttggtaaaagaactagaatggaagcccaaactgctgagcaagtgggagaagaaaagaaaacttggttcaaacagatcacacaagggaacccaggacaaatgctgactttggcattatctaggtaacccttttttttgtcataggtgactctaataatagacctgttgttgcaaaaccagtcaaaatcctaccaaattaaaaagaagtccctc

SEQ ID NO: 295763 - DNA, 1000 bp, Homo Sapiens
accttttcacgaactacctttttaccaaaaagtgtggctacttaagggtctttgtgactttgtgtatgaaacacaaaaggaagttcaagatgctgtacttggacagcctatccatgaatgcagggaagttattcttggttatgattatttggagaatgcttatgtacattttccacagttctgtggtgcagatgtacggatttataaacagagaccctttcaggccccagaatttccaattccacccattaaaatacaaagagtacctcggattaaattggagaaattgaagtgtgactatgttagtacaagtaatggagaacatagatgtagcagagatagcctgccctcttccttcaagaaagagcaggaaaataattttgatccagcttgctgtcctgctaaaatgatcttggataatcatgacatctctgttgaaatgggagtaaaatccaactatgaaattagaattcgcaggccttgtgaaattaaaaaaactgattgttgtaaagaaaatttagagaaaccaaggagtccaggggaagttactggctttggagagcctcttagtccaggtgaaataaggtttatagaaaatcaggaaaaatacggtgaagcttccagaataaagattgaacccagtccattaaaagaaaatactctaaaatcttgccaaatacatgtaaatggaagtcacagtgatcatccagaaattaactgccacaaagttgtaagggatattctattagagcagtcactacagagccacaagaaactcaaactaactaaaatgagggcaaaaaagaagaaaaagaaaaaaaagaaattgaaagatgttttgaatgaaaacttacagagaaagcgtgaaggtcttcattctcttgcattcaagtcttacaaacctgagatccagaataagttattgatcatcaaaaaaaaagcaaaacacaagaagcacaaatctggtaagctaacacaaatggatgggagttatatttaa

SEQ ID NO: 295764 - DNA, 968 bp, Homo Sapiens
atgacagattatgagaatgaaaaggggatgaaggcagaaagttcaggaggatcgcatcaagaaccacgcttcgcagtttgtggtcatgctgacaacctccgggaatttgggaaatccctgggctccgaaggtccctcccagccggtcaaagcagcagaaaaaattatagtacttccttcggacgcacgggcttacgggaactccccacctcctgccgtctgccctcccgggcctgaaagggacacggtgtccgagtctttaggtctgcgcgggagcccaggctgcgcacctggggtgagagcgtcggtgacagggctccgcgcggcccaggaacctggggacgggcgggcttgtgtgcggaggacagcagcaggcagtctcaggagtccccaggatggccctcccctctcctccccggcccagtgcgcgggcccaggccgagtcctgtccgcaggtgtaggggctgccgggccccgcggggttgcgggccgggaagaggaatgtgcgtggatgaggttgacggcgaacaggaggagtagagacaggatttcgccatgttgaccaggctggtcttgaactcttggcctccagcagttcacccccctcggcctcccaaactgctgggattacaggcatgatccaccacacccggctgaatagttctttgacattagctttaatgaagctgaacctccacagtcctctacactcttccaggagcagcagaaaatgaacatgtctcaggcatcagtgtcattccaggacgtgactgtagaattcacccgggaggagtggcagcacctgggccctgtcgagaggacgctgtacagagatgtgatgctggagaactacagccacctcgtctcagtgggatattgcattactaaacccaaggtgatctccaagttggagaaaggagaagagccatggtctttagaagatgaattcctgaaccagaggtacccagg

SEQ ID NO: 295765 - DNA, 683 bp, Homo Sapiens
atgctcacaccatcgtcgcttgttctgaggaggacccgccatggccaaaggggcaagaaggctctgctttgccccgccctggcactagagccccggcagcctcatcccgggaaagaggggctgacggacacccagacacaccccaccactaccacgagcaaacccaccctgacacacccacggatacacacgggagccgtggcgccgagcctgtccacggggcgaggcctgggtctctctcctgtcctccggactggagtttacacgaagtcggtggcattgggaaacagggtgcacagggacggatttcctcgtggctggcgaagaaaatgtccttcctctggggaaagcagccctcgggttctggagcggaggtcttggctgggagacccgggacctcagggaacccgcgcctgcaccctcggggtcggtcccgtcccgcccgggttgggtggggctgccgcgagtcggaagaggtgggatgctgctgcctggcggtgctgcagtggcggatcttcaggaggaggatttgtccccagtgccttatttagttcacttggtgaggtcatgttttcctggatggtgttgatgctagtagatgttcttcagtgtctggacattaaaatcttgggcatgcagcaccatatgagaagtttaaaaaataaaatttaaagagagaaaag

SEQ ID NO: 295766 - DNA, 1000 bp, Homo Sapiens; identical to SEQ ID NO: 225133

SEQ ID NO: 295767 - DNA, 1000 bp, Homo Sapiens
tgggatgtcagaagacattcaaggaaggtttcctggaagatttagtacctcaggtggtacaggagaaggtgagatggagagaaagcaaccccagtctgaagacgcagtggtaagaaagggtcattcccctgggcatgtgtggtctgctgggggatgacagccgaggtgaacttgaagcagaggacactcagacaagctgcactctgaatcccgctacgctgaccgcagcacttgctgaagaagccgcctcgccacgcccaagccctgcagagggaaggactgaggaaggcagctcagaggcctcaggcagccacagtgtgcatgcttgtctatgactcacagctacgacgtggcctgtgctgctgcagctgctgataagcctcaaacctcatataccactctcttccgaggattttttaaatacacaaaactgggagtgagaggggtatttaattcccctactaacacatgttgggcgcagctggagcagccaggcccactgtagctgggaagatgcggtgccttgaggtgcaggcactgctcactgccacatgtgagcacaggttctgagggtgaaaggtccctggtatctggccagagtgttagactctggaacataagaagcccccgaggtggtggagaaggtctagccaggctccagactggcttcacagaggtaatgctttttggtttgaaatccgtaagagcgcactacaacttcagggcaagctccaacagtgcttctcaaactttaatgagcacccaaatcatcagggggcgcgggggcagtgggtcgcttactaaaatgaagattctgcatcaggaggtctggggcggtgacacgattctgtgtttctaacacgttcctgggtgaggctgaagccactagtccatgaagcacactttgagtagcaagaatgtggaggaactgtcccaggatgggccatgatttacctgaattctcacagtggcttagacaatggagaccttgtccacaact

SEQ ID NO: 295768 - DNA, 1000 bp, Homo Sapiens
gacaccagctctgaaatcattgccaaggacttaaaggagaagaaggaagttgtgaaagaggcggaaaatggaagagacgcccctgctaacgggaatgctaatgaggaaaatggggagcaggaggctgacaaggaggtagatgaagaaggggaagaaagtggggaggaagaggaggaggaaaaagaaggtgatggtgaggaagaggatggagatgaagaggaagctgagtctgctacaggcaagcgggcagctgaagatgatgaggatgatgatgtcgataccaagaagcagaagaccgacaaggatgactagacagcaaaaaaggaaaagttaaactaaaaaaaaaaggccgccatgacctattcaccctccatttcctgtctcagaatctaaacgtagtcaccttccagtatagctcggtacccccccaccatgggcagtgccacccacagatgacacacactctccaccacccaacctaaaccgtaagaatttgcaacaggggaggaaaaaacaaccaaaacttccaaggccctgctttttttcttaaaagtactttaaaaaaagaaatttgcttgtatttttaatttacattttatatttttgtacatattgttagggtcagccacctttaatgatctcggatgaccaaaccagccttcggaccgttctccgtcctacttctgactttacttgtggtgtgaccatgttcattataatctcaaaggaggaaaaaaaaaaaaacttgtaaaaaaagggccaggcccctgaaaaacaatcttattcccaccattgcagtaacttttttgtgtatgtacttagctgtactataagtagttggtttatatgatttggttaaaaaggccagagataaaaggcttcttttttttcctttttttgtttataaagttgctggggttttttttggcctgtttgatatatgcatgaaacaatgttgtccaacaataaacaggaattttattttgctgagttgttctta

SEQ ID NO: 295769 - DNA, 671 bp, Homo Sapiens
atgggcactcggcagtcaccccgtgtggggttgagcggcgggttctcggttctgctcctgtgcagccgccgctgggcagaatgcctggcttggctgcagccactgggacacctggccctggttctgcgatgctgggagcgcgagcgggctcggaggttgccaggcagctgctgcctgcacacagagggcgactgcagcttgggcgcccaggcggcggagcatggtctgggtggcctctggaatgcgtgcgcgccagacctgagggccctcctgctggtgaaatgctcattgcagtgctgcaaaaaggtgaggtcacaggacacaaacccatatctgagacctggatgccttcctccacgcactcacccactggctgtcctgagcatcaccctgcacctattgtcacagcaacaagggaaaaatcaggtctatttctcaggctggagtgaagtggtgcaattgtggctcactgcagcctcgaatacctcagctcaaacgatcctcccacctcagcctcctgagcagctgggaccacagcatagtggtcaagtccattgtcagcttctgacactgcctcttacaaggaggtgactttggaaatgtcattcagccttcctgtgcctgagatcgcctcacctgtcaaatgggaacaataaagcacttcaaagaat

SEQ ID NO: 295770 - DNA, 869 bp, Homo Sapiens
cgagcctcctgccgcacacacgttcgcacgcggcggccggcgcgctggaccgagaggttggagcaatccatcctccgcgcgcacgagctcagtccctactgccccgacaggtgtggaacccgccgtccccgctatggtccgaggaagtgtacagcactgctccctactacacgtcctgggcccgcggtccccgatgccccccggagctctgtgcacctccactgaaacgcaaggagcagacagaacctacaccatccgtgaggtagcttctgccaacccctctccatctctagagctgattccggttgatgttcttaacaccttcctctatcaacactcttccaggtctaggctgaaatttaaaatctgtgtaaatgttgacacaataatgtttgtacaaacaaaaaagaccaaaaatgaaaaccccctagttaattgctgcatattctaaagatgggatcttgtggagaaattggaactcttatgcaatgctgataggaatgtagatggtaccaccactatgcaaaacagtggggaagttcctcaaaaaactaaaactagagctaccatatgatccagcaatcccacttctgggtaaatatccaaaagaattgaaagcaggatatcgaagagatatttgcacattcatgttcattgcagcactattcacaatagccaagaggttgaagcagcccaaatgttcatcaacagatgaagagatgaatgaaaatgtgatatatacatataatggaatattattcagccttaaaaaggaaggaaatcttatcacaggctacaacatagatgaaccttgaggatgttgtgccaagtgcaataaaccagtcacaaaaggacaaatactgttatga

SEQ ID NO: 295771 - DNA, 1000 bp, Homo Sapiens
atacctacctcatacctagccctctacctctgtgtctttgcatacaaagcaagggagacagggagggttccaaacaaggctggtaccagggatggggatgcatctcaggagagggcctcaagccaacacctacagagccagccttgctacccaatcccctccatgagactcctaatgacaccccctcccctcctctctgactttgcctgttctgcctcacccaaaagaacaagggctcttggctgggcatggtggttcatgcctgtaatcccagcactttgggagcccaaggcaggaggatagcttaaacccagtagtttgagaacagcctgggaaacagagtgagaccctgtctctacacaaaattaaaaaattagccaggcgtgatgacatgcaccagtagttctagctactggggaggctgaggtgggaggatcacttgagcctgggaagtcgaggctacagtaagttatgattgtgccactgcactccagcctgggtgacagagtgaaaccctgactcaaaaaagcaaaaaaccaaaaacaaaaaagtgagggctctggatcccagtcctagcacttacaactgagtgatgctgagcaagggacacaacctctctgagcttcagtgtccacagggatagaatggccatattatctcacggactcaccagaacttgatacaagtacaaatcagttagagaaaaagtccaatgggggccaggtgcagtggctcacacctgtaattccagcactttgggagacggaggcaggtggatcacttgaggccaggagttcgagaccagcctggctaacatggtgaaaccccatctctactaaaaatacaaaaaattagccgggcatggtggtgggcatctgtggtcccagctactcaggaggctgagacaggagaatggcttgaacccacgagatggaggttgcggtgagccgagatcgcgccactgcactccagcctgggtgacagagcaagactccaactc

SEQ ID NO: 295772 - DNA, 902 bp, Homo Sapiens
gcgtgagccaccgcgcccagccggtgggcagccagttgtgttccgggaggaggaggacaccctggaaagacagtggggccagacactgaactgcctttggaagcaagtaggagcaacagcgaaggtttgctggctcagaagcaaggtctcgctgtgttaccctggctggagtgcagtggctacttacaggcatgatcatagcatactgcagcctcgaactcctggactagagcagttctcctgcctcagcctccagagcagctgggactgcagacacgcaccacagagcccagcctgagtcattttgattctgtaactggcttcctctcggcgggcaggctcacaccctccacccccagctggagatggaaggaggatgctcaccgcccattcctcatgcaggccatcgatggaaatgtcagacagtgcgagtccacgcctgaacacttctggggtccgctctgggactgacactggcagatccatcgtggcacccgagctctgtgagggcaagactttgttcggttgtgggctatgcccccaacccctcggacagtgcctgcacaggtggacatttttgttggatgaaggattttctgttaaatgtgtctggcacacacagaaaaacaaagcccagcagatgccgttccattgtttgctgactttcattgattctatgagaagtctgcagtcttttgcagcgttgttttcctatgtataattgtctcctcccaccccactcaccccagctgctttccacattctctctctttgattttcagcagtctgcccatgatgtgcctaaataggactttctttgcattcatcttggctggggctcactgaactttctgaatctgtagattaattttcttttttcaataaaccttggaatattttca

SEQ ID NO: 295773 - DNA, 892 bp, Homo Sapiens
atggctctcgcagaccggccaggacaggtctgcggccccgcgcgaggaggcacggtgggcctaccgttcaggaccgaggacccgcaccccaggaccccacctagcgagctgcagcctggctgcctcgggttgggacaccagcggccctccgggacctgcgcaggtggcgtcgcccggcgttgtctccggagtcgattcgggccggggcacctccccgggcgaccaggccccttcttgatcatcgctggtacggatgagagcggcagtgggcatttggaaagcacctggggccgcgcccgggcgcagtgcccccatgtggcctcccaccccgggcgggcaggacgattcctgcccatctggaagaccaggaacctgcgcgttcacagggttcggaagcccgggctgcgccttcccgcggggccggctgccgggctgggggctcttcccgcctctgcatgcacagagcccgcggtgcacgaacctgctccccgccagccccgcggactggcagggccgctctggagtcacccgcgcccgctccgcagtgcgcaaactcacttcgcagcgggctctcccggggccagcccttccctcctgggcgggcattttcacctccaggtacaagggggtggtccccagaggaggactcaggggcttaaggagaagctgaggcccggtcctctggcctcaacgactgcacattctcgccgcctgcttcacttcttagagccttggaggtgaattggtctcaccacctcaccccacccccaggagatagaaccttctagtaaaaatgagaaaatccggccgggcgcggcggctcacgcctgtaatcccagcactttgggaggctgaggcgagtggatcacctgaggtcgggatcacctgaggc

SEQ ID NO: 295774 - DNA, 1000 bp, Homo Sapiens
gacgctcgcgtgctcggagaatggagcctggagacctggttcacacccgctatgtgtttaaatggataaaacgctcctcaggtctgtgagcctgcaaacaaggtccccactgccatctgctggccccacagacaagaacccacacaggaatgaagcccaaaatatcccataaactttccaaagagaaatgacaaaactgaaatagtagtggtgtcaaaacacagtgtacttctcagcccaatgaagctgggatgggtggcccagggagccccagacttcatggataggcttttcgttcacatggctcaaaatggcaccccagatccagccatcacatctgcactccagccagcagaaaggaggcagggccctcttcttcaaggatgcctcccaaaagttgtgttgccacagctgctcacatcccattggctagaacgtagtcatacgacccacctcactgcaagggaggctgggaaatgtagtctttaatctgtgaaatgtgcccgcttaaaacggagccatggaggaagaaggactagcgatctggggggtaggggttgggtgggcgaaaggctgtgcctccctcggtggcgtcaacatcctggccatgttgtcacatgcacttgctggcaaaattcccaagccatgcgctcacagtttgtgcagtgatgagtgtggcaaacacagctcagttaaaaataaacatcattttatagattagctgaagaatacaatgtcccacgagactatgtggccatcaggaaattaacttttctgacctaatggcccaggaagcactgcgggcagcgtctcgccccgtgtaacgcagcacccgcagaagtgcccgggatcagcctttgcctcggcgggatcctggttcctggttcttccaagggcatggcgaggtccccgctcccttatcttgaggaaagtaataagtaacccagctctttcaactcccaaggttactttgtcaataaagtgcgccttctcaagtctt

SEQ ID NO: 295775 - DNA, 717 bp, Homo Sapiens
cttccctgacagtttgtcgcctagcagctattttggcttcccaagggaaatcttgtcctttgcccttgtggggcttactgcaaatcaactcatcatgaggaagattaatcagagaaaagacatacaattttttttttttttaaactgtgagcatgaagagaatcacagagtgtatactcaatctcccaatgggggcaaaatacttctgtaacctcctttcaggtggcgagaggggacatgggaatgtagccaggttccgctgcacatgccctcttgcctgccgccatggaagatgtgctttttctcctcctttgccttccgccatgattgtgagtcttccccagccatgtggaactaaatgcttgtcagaagagtctggcacctccaacccgtctctctttcttcctgtgtctctgtgtgatctctacacactggctcccctctgccttccgtcatgagtggaagctccttgaggtcctcaagatccttcttgagaagaagatgctggtgctaagcttcttgtacagcctacagaactggctgaaatgaggagaggaggacacagacacacacagatggaagaccctgtgagttctcagggagaagatggcatctacaagccaaggagagaggctgcaggaggaagcagccctgcaatgccttgatctcagacttccagcctccagaactctgggaaataaatacctattgtttaaa

SEQ ID NO: 295776 - DNA, 676 bp, Homo Sapiens
atgtgggatccccaaatacgggaagctggcctcaccctgggttccaaacgttccactccgcggcaggggcgggggcgagtccggagggcgggtccaaggcgcccaggtggccgcggcagaagggcctgtttctctggccttggctgtggttggcagccggccggggagagaagggactcagggaggcaacctggttcccgcccgttgctgatttcgcagcggctctcccgggccgcccccttttccttcctcctcaggccgcgacttggagggttccgctccgcggcgggggcagagccaggggcggggctgagcgcggcctgggcgatctccccggcggctggggtgggctggcgtcttcttcgcgcccgggggacctcctcgcgaccgccgggacgtaaaaggggcttggcaggggcgtcctcgccccactcccggaacctggtttcccgctgctcccgcgagcgtcgggagcccagcaggcctggccgaggcgggaccttcgtcgctccagcccccgtccccgcccccgcgcctccccgccgcgcggagctctggttggcttgctttccaaccggactttggggctagcgtttagaaaagtctcgacctcctccggcccggtcccatcccaagaaccgactaaggctgtgagtgtccgggaaccagacccgct

SEQ ID NO: 295777 - DNA, 1000 bp, Homo Sapiens
gtctggactgtgaagtgaacccagagtgctgtttccttggaaacaatttagatgtagaattttgtgtccccagataactcttgcctaaagctttgcacctgggttgaaaattgaatcttgcttctctgtctggaagtgacttagaatctcccatgagaatcagatgtttccctcttactgatatcatttcaaacagcaaagtttctgatagtctatgattgtagagaacaaagtttctcattgaccaagaaagcaataggcacttaaagtaggggttctttatggcattacaactgcagcctgtccttagaagaaataatgtttcctgtgaattttgcatttggctttatatgtgtctgttcttccatcctgatgaatagcaaggcagatttttatagtccgattttcattttaatttttttagagagttggtatctttgtccattttctgctactgtaacagaatatcacagattgggtaatttataaagaaaataagcttatttggctcatagttctggagattgggaagtccaacttggtgccagcatctggtgagggccttattgctgcattattccatggcagaggacaagagggcaagcaagtgtatgaacaaagagaaagcacaagggactgggctcactttataacaacccactcttgaggtgactaacccattccctcagtgacagcattaatcagtttatgagaatggagcctccatgacctattcactttttaaaggccccacctcctaatactgttacaatggcaatttcaatatgagtttcagaggagacaaacatttgaaccatagcagttgaactttgattatcccagcttgtcattctgcccctgcatccctggtctgggcaaatgtttgttgaatgaataaatgaaagaagaatggaatcagtggaagcatatttggcatgcatacacttctaatagagtgccaagaatcactgttagtgttcttggatgtcataatagtacc

SEQ ID NO: 295778 - DNA, 1000 bp, Homo Sapiens
tccatttgtttgtcacgtctctgatttccttgagcagtattttgtagttcttcttgtagagatctttcacctccctggtgtggtgtattcctgggtatcttggtgtgtgtagcaattatgaatgggactgtgttcccgatttggctctctgcttgactgttgttggtgtatacgaatgttagcgatttttcacattgatttggtatcctgagactttgctgaagttgattatcagcttaaggagctttggggctgagactgtgtggttttctagatttaggaacatgtcgtctgcaggcatactgtagtattaaaagaatgtaatataggacataggacagaaaaacgtagagaaaaaagaggaaagaaggatcacaaatgtaaatgtgttggtttcctcttgaaggaggaatgaggctgagatcaggcagagacaccccaggagctttggggaatgctggcggtgttctcctctgtgacatgggggtgtttctgtagaggtgcccttgataatcacttattaaacaacacacacatattgtgaggttctctctatgtatgttacatttcaaaataaagaggggcaaaattgctaataacaaataacacacatttgtagttaaacacttctcacaatccacagacctggaaatgactgattagttttctgtatgtgtagttttccagttttaagaatgttctacaaatggaatcatacattatgtagagtttcatatttggtgtctttagcacaatgaaatacatataagacctctagaactgcaatgtactctttcttgacctcagtactcaatacgtgttttcctcacttcacaatagttcattcacagtcgattggttttctaaacttgtatatatgtgtagtatgctttataaatatcatatgatagttaactttatgtaatttgttatatcttggtaatggacttttcttaaaaatggacagtatccctaagaataccccgtacatttccattgc

SEQ ID NO: 295779 - DNA, 1000 bp, Homo Sapiens
gcagcctaccctgtggcaacgcgggagtcgcgttgccgcagggggcgcattggggtccagccgtccccagaacgcagatcagaggtagtcggacctttcccgctggcgcgcagcctcagctaggtgagaggcgtcttcccaagaccagacactgccggtgccctatcacctcccactttttttctggaactgctaggggcccagcgctgcttctgcagccttccaggggatgctgctggtggcgcgtatgccgcctaggtgggtggggatgtgctgaggccgaaggagtgacagcgactcgcaggtttcccctgcctgaccagtcctctgattgatattttcttttgaaaaaagggacttgcggccgggcgcggtggctcacgcctgtaatccaacactttgggaggccgaggcgggtggatcacctgaagtcgggagttcgagaccagcctgaccaacatggagaaaccctgtctctattgaaaatacaaaattagccgggcttggtggcgaatgcctgtaatcccagctactcaggaggcctaggcaggagaatcgcttgaacctgggaggcggaggttgtggtgagtcgagatcgcgccattgcactccagcttgggcaacaagaacaaaactccgtctcaaaaaaaaaaaaaaaaaaaagggacttgctgctcttgcagaatggagacacctgtagcgtattaaggaaaatgaagataatctgttgatgacagtactctgaggagtgttaacttggggcatgcatcctcccagcaccttgttccctaaggggaggggagatgcaaataaaggtcctttaaaaataatagcctggtgagttcccaaggctcatgggaatcatgcaagctattcgggttgcttaaaaacttgactgtgaagatgttgtggaatttttttttttctcttcacaatgtagtccttgattggtttttgggagaattttttttttcacaaatggaaacgtgttttcagtggg

SEQ ID NO: 295780 - DNA, 1000 bp, Homo Sapiens; identical to SEQ ID NO: 225135

SEQ ID NO: 295781 - DNA, 330 bp, Homo Sapiens
atgcacgtggccttctgtccatgtgaagtttcctccttacacagcagggcctctgatgaagcagctgtgcatcttcccatgtgtgtcagtgtggatcccgggtggcagaactggtggggatcttggggactgggagttaccaatgactcatttgtgagcattaatgagagcagaatccatgtgtgtggggcctggaagtgtgaggggagatgccacaatgtgttcttcaaggacggcaaacaatttgatctgagcatcttggtgctagacaatgaataccagagcaccctctggttgcaccgctatcctcagctcgtttccaaaatctga

SEQ ID NO: 295782 - DNA, 1000 bp, Homo Sapiens
cccccagcaccggccctcaccgcccctgcagccgcccccagcaccggccctcaccgcccctgcagccgcccccactccggccctcaccgcccctgcagccgcccccagcaccggccctcaccgcccctgcagccgccccccagcaccggccctcaccgcccctgcagccgcccccagctccagccctcaccgcccctgcagccgccccccagctccggccctcaccgcccctgcagccgcccccattgccaccagcatccaccgaggtggggtcatgaaggggacccaggggcccggcggctgctccttcccatgcactgggcagctgcggcccatgggcccctccgccgggtcccgacccacaccgtgcgggaacggacatccagagaagccacctcatttcagcgaggctgtccccagagaatatggagactatggagatgcacttgtgacctggaacggattgttcctgcagaaggagctgtgtgatccaaaagcccaagtatttctggagattttccccttggcttgctgcaccatgaccataaggggcgtgagctcagcatctgcagaagacgcctgtgtcagaagggaccagtggcttttcccacccaacgtccacggggctccaggcccagtggcccctgcaatgcccctgggcaggcacctgcttgagcccaggaacattccaggaagccccacaacggtggtcctgccaacagaccccagccagtcatcctcccccacaggccgccttttcctgagggaagcttccagaagccagggtaggctgcaggcccagaaagcccacgaaatgccaggcaggcaccaaggtgttcctgtggcactgtgtgagcacccatcggcggcgtgcacggccctctatgagctcacgcgtgtcagcgtctgcaaagcccatcggcggcgtgcacggccctccatgagctcacgtgtgtcagcgtctgcaaagcccatcggcggcgtgcacggccctccatga

SEQ ID NO: 295783 - DNA, 1000 bp, Homo Sapiens
aaaatcattatcgtcccacccatctcaatccagtgcacgacaggggtcgtgtttccttgtggggttgacggggaagaagttggaggctgggcgagagggcaggaagcacactgtcgagtgtgtgtgggtgtgtgagggcagcacaccatcaagcgtgtcagtgtgcaagggcagtatgcttaccgtcgactgggtgtgccagggcagtacaattaccgtcgagtgtgtgtgggtgtgcaagggcagcacacttaccattgagtctgtgtgggtgtgccagggcagtacagttactgtcgagtgtgtgtgggtgtgcaagggcagtacacttaccgttgagtgtgtgtggtgcacgtcctgtgcaagggcagtacacttaccgtcgaatgtggtgcatgttgtgtgtaagggcagtacacttactgtcgagtgtgggtggctgtgcaagggcagtacacttactgtcgagtgtgggtggctgtgcaagggcagtacacttactgtcgagtgtgggtggctgtgcaagggcagtacacttactgtcgagtgtgggtggctgtgcaagggcagtacacttactgtcgagtgtgggtggctgtgcaagggcagtcacttactgtcgagtgtgggtggctgtgcaagggcagtcacttactgtcgagtgtgggtggctgtgcaagggcagtacacttactgtcgagtgtgggtggctgtgcaagggcagtacacttactgtcgagtgtgggtggctgtgcaagggcagtacacttactgtcgagtgtgggtggcacacatcgtgtgcaagggcagtacacttaacgtgtttcgtgcccgatataatgggggctctgagagtttctttgtcaaacttcagggctgtggtgcaatggacataagcctcgggctgagtgacaccatcattctgctgacgtcatcctggaatcaggtgttgtctccagggcactttcagggccatctgcaggtacaaggtgacccctaa

SEQ ID NO: 295784 - DNA, 945 bp, Homo Sapiens
atggagctcccttcccggcgcagggctttgctgcagctgagtgggatcctcctagagacgcacagcttcctggcgggctctgaggcgagcgcccaaggagggcttcctggtgacctgcggcaatgcccgctcctctcaggcgagcttcccattgcagctgccctgctctgggctggtgtttgtcttcctgcactgatttctgtgcacagttcactgtctgccgcctgctgcatgcggggcttaggccacacaaccgggagcacgatggctgtggattctgcactttctgagtttacgttgcaactctcttctggagccatcggtgtcacccccctccgagaggtgacagaggtgacaccgtccctctgctcccctggaaaactcatcttcacgtgggcgaggaaaggcccacagatatttaagactgtctctaccagtgtgtctgtcgtgctttttggaagccaggatgagaaacaagggttcctgccctcaaagagcacatgctcagacatctcacctgtttccaaagccccaacactggcctctgggtgtcccctctcgattctgctgccgacggcggcgctcatgtcctcccctgtcctgcaccaccaggagaactcggccgaaacgctgactgctggagctcgcctttgccagatgaagctcctcagcttcactctatctcccctgacagttctgcggttgtcgtgggtctaccctgcagtcactcctggtcctgatctacctaaccctcctcctgatccacctgaccctcctcctcatccacctcctcctgatccacctgaccctcctcctgatccacctcctcctgacccaactgaccctcctcctgatccacctgaccctcctcctgatccaactgaccctcctcctgatccacctgaccctcctcctgatccacctaaccctcctccgttgcagtga

SEQ ID NO: 295785 - DNA, 1000 bp, Homo Sapiens
catgcatccatactgctgtttatctcgaattcaggtgtacctgggcatgcatccatactcctgttcacctcgaattcaagtatacctgggcacgcatgcatactgctgttcacctcgaattcaagtgtacctgggcatgcatccatactgctgtttatctcgaattcaagtgtacctgggcacgcatctgttctgctgtttatctcgaattcaagtgtacctgggcatgcatccatactcctgttcacctcgaattcaagtgtacctgggcatgcatccatactcctgttcacctcgaattcaagtgtacctgggcacgcatgcatactgctgttcacctcgaattcaagtgtacctgagcatgcatccatactgctgttcacctcgaattcaagtgtacctgggcacgcatctgttctgctgtttatctcgaattcaagtgtacctgggcacgcatccatactcctgttcacctcgaattcaagtgtacctgggcatgcatccatactcctgttcacctcgaattcaagtgtacctgggcacgcatgcatactgctgttcacctcgaattcaagtgtacctgggcacgcatctgttctgctgtttatctcgaattcaagtgtacctgggcacgcatccatactcctgttcacctcgaattcaagtgtacctgggcatgcatccatactcctgttcacctcgaattcaagtgtacctgggcatgcatccatactgctgtttatctcgaattcaagtgtacctgggcatgcatccatactgctgttcacctcgaattcaagtgtacctgggcacgcatctgttctgctgtttatctccaactcaaatgtacctgagcatgcaactgttctgctgtttacctcgaattccactctacctgggatcccagacgccactcaacggccgccccatcgcactggaaacctcagaatatatttgtgaactcactacaaaagactacatcaaaccagatgaggcgtga

SEQ ID NO: 295786 - DNA, 882 bp, Homo Sapiens
atgaagcctcgacagaaagaacaggacacgagactgaggaagctccgagagagcagcgagggagaccagtggctggaaaatgagaaaacaaagccactgaggccccagcagcagccccagtgccaaccagcagggggcacaggacagagaagaggaagcggcagcagccccagcgccgaccagcagggggcacaggacagagaagaggaagcggcagcagccccagcgccgaccagcagggggcacaggacagagaagaggaagccgcagcagccccagcgccgaccagcagcgggcacaggacagagaagaggaagccgcagcagccccagcgccgaccagcagcggtcacaggacagagaagaggaagccgcagcagccccagtgccgaccagcagggggcacaggacagagaagaggaagcggcagcagccccagcgccgaccagcagggggcacaggacagagaagaggaagcggcagcagccccagcgccgaccagcagggggcacaggacagagaagaggaagccgcagcagccccagcgccgaccagcagcgggcacaggacagagaagaggaagccgcagcagccccagtgccgaccagcagggggcacaggacagagaagaggaagcggctgcagctccagtgccaaccagcagggggcacaggacagagaagaggaagcggcagcagccccagtgccgaccagcagcgggcacaggacagagaagaggaagccgcagcagccccagcgccgaccagcagcgggcacaggacagagaagaggaagcggcagcagccccagcgccgaccagcagcgggcacaggacagagaagaggaagtgaggaaatggaagaagagggttgacctgagctga

SEQ ID NO: 295787 - DNA, 1000 bp, Homo Sapiens; identical to SEQ ID NO: 119391

SEQ ID NO: 295788 - DNA, 1000 bp, Homo Sapiens
ctccactgctggagttaatgatccatgagcaaaacactgagcccatccacactggccgctggcggatggacaccgccatgctagatctgtgcggtcgcccggggagcaccgggccattcctaacaagcgtgcagtcgagatgcagacaggaaggccaagggagggagaagggggcttcagcacacggcagcgcgtggcccctgggcccgaccccttctccggcagcgcagcagtcctccaccttgtcttgctaattcccagccactgccccgcctcaggccatcctcctggcggtcagagtgacctactcgactggcacttctggtgtgtaggaatctctggtagatcaagttaaaaggcagattttgaatccctggatctggggtggggcctgaaattctgcatttctgaggggctcccaggtaaggccaaggctgctggccggctgaggagttaacagtgtgtgctctggagtcacgtggattcctgcttgccagtagcgcgccttggaaagtcaccccgcctggctctgccatttccttctctgtacatacagtgttgtctgcggtgagggtgacacagctgaataggcacaatgggccggaccagtgccgggcacgcggtgcatgcgaagtcagtagttataactgctcgtctgtgctgcaaccctgcagtgcacccttcgcctgcacaataaaatctaccatcagccaccaccgtgccctgccctcccgtgcaccagtcaccctgagcattgtacgggagttctggaaaggagcagagttttctcaaatgcagagttgcccttgattttgaatgccgttctctccctgatccccccagcaaagtcctcctccttcttttgggctctgagacctccagagccacctccaggaagctgagaagacaggaagtgtttttactcttttccattcccagttttgtacatcacctgacgtatactaggttttaataaatggtgaaagaatgaatgaaacaa

SEQ ID NO: 295789 - DNA, 546 bp, Homo Sapiens
atgcgccgaaaagcgcccacgggggaaagccaagccggggtgcgggtgggggcgggctctggtggcggcggcggcagacacttggggtctggacgcaacggaggcgggagcgtgaacgcccctccagccttcgagtcgttcttgctcttcgagggcgagaagaagatcaccattaacaaggacaccaaggtacccaatgcctgtttattcaccatcaacaaagaagaccacacactgggaaacatcattaaatcacagtgtgacctaaaggacccgcaagtgctatttgctggctacaaagtcccccaccccttggagcacaagatcatcatccgagtgcagaccacgccggactacagcccccaggaagcctttaccaacgccatcaccgacctcatcagtgagctgtccctgctggaggagcgcttccggacgtgcctgcttccccttcgccttctgccgtgattgtcagtttcctgaggcctccccagccacgctttctgtacagcctgcagaactgtgagtcaattaaacctcttttcttca

SEQ ID NO: 295790 - DNA, 1000 bp, Homo Sapiens
ctgcctctcggccgctttggcaggcccagctcctgcctgccagtggcctcttcaggcccatggggctcattcctcacaatggcctttccaggcccagtttttcccttccggcggcctcgccaggcccagaacctcctcaagtcggcctctccggacccacctgcagcgtcccggcgtcctctccgggcccagctcttcctcccggctgcgtctccaggcccgactccggcctcccaacaaggtctttggactcagctcccgcccagcttccagcggccctggtaggcccacaacttcctgaagccaagctccccaggcccagctccggcctcacggtggcctctccaggctcagctcctgccctccgacggcgtctccaggccccaaacggcctccggtcggtgggctcctctaggcccagcttgggcctcccggcagcctctgcaggcccaaatcgtcctgaagtcggcctctccaggcccagctccagcctcccggtggcctctgcaggcccaagtcatcctcaggtcagcctggaagtgggcctggaagagctgcaagtcggcctccccgggcccagctccgtcctctcggcggcctctccaggtgcaaaacttcctcgagtcagcctctccaggcccagctcctcctgcctcccagtggcctctttcggcccagcccagctcatggctctcggcggtcttcccaggccccgcttttgacttttggtggcctcttcaggcccagaacttgacctccagtcggccttggcaggcccggcctcctgcctctcgaaggtctgcatgggcccggcctcggcctcacagaggactctccatgcccagctagctcttgcctcactgcggcctccccagtccaaagctcctgcctttcggccacttcggcaggcccagctcctgccggccagtggcctctttaggcccagctcattcctcacaacggcctttccaggccccatttttcccttccagcggcctct

SEQ ID NO: 295791 - DNA, 743 bp, Homo Sapiens
atgggaaagtgtgagaacgctgcagaggaggaaggcccccctgactccatcctggctgctgcccagcccactggctcttccctgaggaccagtcctgctgaaaggctctatcctcgcccaccactgccgcctccttctgccgctcctggtgctgcttgtgtgctcgtttggtgcggacctggtacctcttttgtgaagtggcagctgaggagaccggcgctcgccatggccgacgaaaagcccaaccaaggagtcaagtcggagaacaacgatcatactaatttgaaggtggcggggcaggatggttctgtggtgcagtttaagattaagaggcatacaccacttagtaaactaatgaaagcctattgtaagccacagttggaaatggagaatgaagatacaattgatgtgttccaacagcagacgggaggtgtctactgaaaagggaacctgcttctttactccagaactctgttccttaaagaccaagattacattctcaattagaaaactgcaatttggttccaccacatcctgactactaccatatggttttctctgttctttcatttcccccttccccattcctttattgtacataactggtatatgtgcacaagcatattgcattttttttaactaaacagccaatggtatgttttgattgacatcaagtggagacgggatggggaaaaagtactgattctgtgaaaataccccctttctccattagtggcatgctc

SEQ ID NO: 295792 - DNA, 1000 bp, Homo Sapiens
cggcctccagtcggtggattcctctatgcccagcttgggcctcccggcggcctctgctggcccaaatcgtcctgaagtcgccctctccaggcccagctccggcctcccggcggcctctccaggcgcaacgcatcgtcaacgagggcccctccggggccagctcctgcctctcgtcagcctctagagacccagcctctgcctcccgcatggcggcctctgcaggcccagactgcccttgagtcaggctctccagggccagctccagcctcccggcagactctgcaggcccaagtcatcctcaagtcggcctggaagtgggcctggaagagctgcacgttggcctccccgggcccagctccgtcctctcggcggcctctccaggtgcaaaacttcctcgagtcagcctctccaggtccagctcctcctgcctcccagtggcctctttcagtccagcccagctcgtggctgtaggcagccttcccaggccctgcttttgacttttggcggcctcttcaggcccagaacttgatctccagtcagcttttgcaggcccggcatcctgcctcccgaaggcctctttcagcccagcccagctcgtggctgtaggcagccttcccaggccctgcttttgacttttggtggcctcttcaggcccagaacttgatctccagtcagcttttgtaggcccggcatcctgcctcccgaaggcctgcacgggcccggcctcggaatcacagcagactctccacgcccagctagctctcacctcactgtggcctccccagtccaaagctcctgcctttcggccgcttcggcaggcccagctcccgcctgccagtggcctctttaggcccagctcattcctcacaatggcctttccaggccccatttttcccttccggcagcctcttggcctctaattttttttatcttttgtgtataaatcccaaaatatggaattttggaatatttccaccattatataaatattttggtaggt

SEQ ID NO: 295793 - DNA, 1000 bp, Homo Sapiens
cattttcacgatattgattcttccaacccatgagcgtggaatgttgttccatttgtttgtattctcttttatttcattgaacagtggtttgcagttctccttaacatctgttaaggagattaattaacatctgttaatgagacctttcctcgattaaatattctgtcattggagattggtacatttctttgtcaagggcaacagtttttaagccattcacatacacacgttcctgggagaagtgacactggggagattttttttttaacccctgaaaataaacatatcggagaatacattcatgatctctccacaggttctaataaaggggggagacctgggttctgcacctggccttgttgtcgtggttacggttgctttcaggcgatggcacctgttctccaggtgtgtctggacttctacttgctttagccatatatggccaccagggggagcagtcaccccacagttgcctggagcgccctctctctccaaattcacagcttgaaatgtcacctgtggccgtctgcggtcatccacggttttctttcttaccttttctttctttctttccttccttccttcctccttccctttttccttcgttccttccttcctttttttttctttctttctcttttctttctttctttccccctctctctctcccttccttctttgtctttctttcgatccttccttccttctcccctcccctcccctcctctccccttcccgacagagtttcgctcttgttgcccaggctggagtgcagtgatccaagaatgcaccattgcactccagcctgggtgacagagcgagactgtgtctcaaaaataaaaataaaagttagcaaggcatggtggtgtgcacctgtggtcccagctactcaggaggctgagctgggaggatcacttgagctcacgagttcaaggctgcagtgagccatgattgggtcactgcacaccagcctgggtgatggagtgagaccttatctctc

SEQ ID NO: 295794 - DNA, 1000 bp, Homo Sapiens
ggcggaacctggaggtcctgtttcttatggacttggttgccacagtccaggagcatttgaaggcacagtgcaggggctcagattggcacagaattctttgtgaaatatgagtgccacagactgtaacagatagcttcatgcacactatgcattttattggtttgtttggaaaatgttggccattgaattattaataggtttatttcaaatagtttggaaattgttgtacttttgaaaacatgctgttcctgtagagttttttgatgagagttatagttgttatatatacctaaagataattttcttttcatttttaagtgagaattctttttatcctaaatcttttattatctttaaatttttttctgtattattatatgtgctcctgaagcgagcactctttttatctatgatacttccataataatctcttctatttatagctattggtagttccccaccagaaaaaaacataattctggtgatagaaatttttatttgctgtttaggtttgtgactgacttgtgagaattcagttgtgatttttaacatgtctcagatatatatactaacacgtctaatatatactatctattttattggtttattttgaaaaacatgggtatagaattatttaaatattattttatttactgaaatatttattaaatatatttatttatttaaatattattattactttaaatattattttaaatattttggaaatactggtatttttgaatagatgctgtttctataaagctgtgtgatgggtattataactgttgtatacacatacatataattttgttttcctttttaagagaggattcttttcatcctaaatcttttacctttcaatctttgtatctattattacacgtgctgctgaagggagcatggtttttatctatgatacttagttaacatatatattacatttatagctatgtggtagttcccctaaattcttgtaaaaataaatttttatttgata

SEQ ID NO: 295795 - DNA, 1000 bp, Homo Sapiens
gaaaatcatccagaaaaccccctacccccaccccagagggaccacagtcagcgtgaagcagttattttctacgctacctgtgcgccataaggaatttcaaaggaatattaagaaggtacagtaaattaatcctggttttcaagagtattggttaatgcacacgagcaaaagatttactaaagatgtttattcttcagttgattctcttcccataatttattgagaaatgctttatttgcatttctcattaaagacttaacttcaggatgatttacttttttctttttatcacataatgtttattaggactgggaaacatagtgagactctgtctctatgaaaaattaaaaaaaaaactgactgggcatggtggcatgcacctgtagttccagctacttgggaggctgaagtgggaggatcacctgagcccaggaacttgagactgcagtgagctatgattgcgtcactacacttcagactgtgagacagagtaagaccctgtctggaaaaatatatatacatatatatacattttttttattttttatttttatctttttttgagatggagtctcactttggtgccactgcactccagcctaggtaacagagcaggaccccatctcagtcaatcaatcaatctcagtggttgaactacccttgatatggttcagctctgtatccccaaccaaatctcatgtcaaattgcaattcccagtgttgagggagggacctggtgggagatgattggctcatggcggctgacgtcccccttgctggtctcgtgatagtgagtgagcgctcatgggatctggttgtttagaagcatgcagcacctcctgcttcactctctctgtctctcctgctccaccatggccagaaacgtgcctgcttccccttcgccttctgccgtgattgtcagcttcttgagggctccccagccatgcttcctgtacagcctgcaaaactgtgagtcaattaaacctcttttcttcataaa

SEQ ID NO: 295796 - DNA, 1000 bp, Homo Sapiens
gttctcacctacttcgactcctctccctgtcccagggaggggagaaaaggtctgggattcattgccaggaggggcttcccccaggatttcctacttctttctttactgctgtgcttgaagctcacaggagacccctcaagaggtggtcaccggcccacagcccaccccatcccccacccgccacccccaccgtaccaaatgctagctctgccctttcttctgtgtttttcccatcaagagagatggttgtggtcatgaagttcttccgatgggttagacgggcttggcaaaggattatttcctgggttttcttctggaggcaaaaaattaaaccaaccatctcaggacaccctgactccaagaaacactcattgaagaagatggagaagactctccaggtggttgagactttgaggttggtcgagctcccaaaagaggctaagcccaagttgggtgagtcccccgagctggcagatccctgcgtgttggccaagactacagaggagaccgaggtggagctgggccaacagggccaatccctactgcagctgccgaggacggccgtcaagtctgtctccacgctcatggtctctgccctgcagagcggctggcagatgtgcagctggaagtcatcagtgagttctgcctcagtcagctcccaagtgaggacgcagtcacctttgaagactccggaggctgagttgctgtgggaggtgtacctggtgctgtgggccgttcggaaacacctgcgccggctgtaccgcaggcaggagaggcacagacggcaccacgtccgatgccatgctgccccccgacccaacccggctcagtccctgaaactggatgcccaaagtcccctctagggggaaccccagacccttagagagtcctgacctcactcttacctggggtcccatatcagccccttcattccatgtattccagttgtaaaacaagtatcaaaatattgggaaataaatatcagatagttctgagtcag

SEQ ID NO: 295797 - DNA, 1000 bp, Homo Sapiens
tggagtgcagtggcctgatctcggctcactgcagcctctgcctcccgggttcaagtgattctcctgcctcagcctcccgagtagcggggattacaggcgcacaccaccacatccagcttatttttgtattttcagtagaaacggggtttcaccatgttggccaggctggtctcgaactcctgaccccaggtgatccacctgcctcggccttccaaagtgccgggattacagacgtgagccactgtgcctggccaagatagaacttctgtaattttattccagttgaactaaactaaggaaccatccattagcccagttcttagaagaggtacttcagacttgaaagaatatgtatttcggtaacttacatgtggctagccatcaagtacatagtcatctgagctaaacgttctgtatttacacagttatatttataaaccaaatattttaataggttaattttaaatatattttagaaatcacagtttgtatctgtttcttagtaggtgtggcctttaaaatatgtgcttattcattgttaaattccagaataatagagtaatacttaatactgtacattcccacttatgtatattttattaaaatttataagcaagaaatgatacataagtggtcatgatcttagggagacaaagaatttctcttaggaaagagaagtgatggtaatgtaaataaaaatgctgtttatagtcacatgattttaagaaaactgtaaaagcagagattttagtaatgacacaaatgtgacaaatagatgttttcttaaaattggcagtcaatataattatgtttctgcctatgatgttgaggaagttctataagttctatcagtctgattcttagttttcttatctgttaagtagaacatacttttacttaccttaaagggtggctttgagaattttgtaaggaacaaacatgtttttggttctggaatataggaggtgctcaataaaagttgactccgaatggcgaaaaa

SEQ ID NO: 295798 - DNA, 702 bp, Homo Sapiens
atgctccttctggatcctaagcccactgacctgaccaccagtcacttggcccttgtccacatcatgatgctgctcaccattgtgttcttggtgtctccagacctttttgagtcccttcattttgacttcaagtgtaagacgcttttctacctgagcagggtgatgagggacctctgcgtctgcaccacctgcctcctgagcacgctctaggccatcaccatcagccccagcacttcctggttgatggatttgattctgtcatcctacttgattctgatataaacatatgattcagtcatcctgggtgtccagaggcttgtgaccagggcctatgccactgtgagccctttggtgctaataagttctgaaaaaaggataattgatattctgcaaatgatgagacagaaattaacaccttggtttttacggattaaacacaaaagcataaaagctggagccattccagaatcaaaggaactttccctgaggacacctggaattaagggacatcaattattaggaagctacacgaaaccagaagtgctcccagaagtttccattgtctggacagaaaaattaaacagatcagcccgagagagtaaaggtacctccgtgagtgccgggggtgatgaacattccattcaaagcaaagttgtgaagcctgaggagtttcaaagactccccaagtgctctataccttga

SEQ ID NO: 295799 - DNA, 1000 bp, Homo Sapiens
caattcttatgggcaatgtggaagaaaggtggtcgaaaatgaaatttacagtgaaagtcacagagtccacaggatgcaggacttcgatggccaggtggtccaggtcgcctgtggtcaggatcatagtctgttcctgacggataaaggagaagtctattcttgtggatggggtgctgatgggcaaacaggtctgggtcactacaatatcaccagctcgcccaccaagctgggtggagacctggcgggagtgaacgttatccaagttgccacctacggtgattgctgcctggccgtgtccgccgacggaggactttttggttggggaaactcggagtacctgcagctggcctctgtcactgactccacacaggtgaatgtgccccgctgcttacacttctcaggagtggggaaggtgcgacaggctgcatgcggtggcacgggctgtgcagtgttaaacgtggaaagtgccgtccctgaaatgattccacccactctctttggcttgacggagttcaacccagaaatccaggtttcccgcatccgatgtggactcagccgctttgctgcactgaccactgatggtgacatgggcccaggagtgccccagctggtgcagacagagtcccacctgaaggccgggctaggagaggccatctcctgggttgacctcttaaacagcatcttgtactttttcttcatgacagtttttacagtttacaaaggagagctgtttgtatggggcaagaacatccgagggtgcctgggaatcggtcgcctggaggaccagtatttcccatggagggttctcttcctgtgggccaaggatcttgggagcgatggaacgccgctgctgctgctggtgacccgggcacgccagagtagttctgacaagtggggtgaggccgtcctaccagagacgccccaccctctcccctggagccagggtctgcattcgagtcctgccctcactcacctaatcatttctgcactcaaggcctga

SEQ ID NO: 295800 - DNA, 1000 bp, Homo Sapiens
atttgacaagaaggatactgatttcactgtggctaagcagctgcttatgaccttgaacaaagcagaagtgttggaatgccttcctgctgtctgtatggacctgctcttgccagttactgcacaaagaaatagtttaattccacttggaatacagccccttaacggagggttgatccctgttcctcatccctatgcctgccttgtcaaggccattaaccgtggattgaggttttacatagtggaacgcagcgcttggccagggctacctctaaatccacgctgctggcagcctccgcgcagcagggatgaacttctgcacgcttgggagttctggcgtgcgcagtggaaggagggggcgagggctgggggaggagatcggaaggggaaaggtaatccccggcgttttcagcatcctctttttagaaagactgagtctctcccaggacagctgctgcggtcacaccacaaacttaaaagccgccctcctgtttggagcgtgcctttcctcgccaccctctcctccccaaagctccagctggtgccttgctctccgcctgtcctagcgcggctctcgggggaggcagcagcgccccctgcctcccggcctggcccctacggccgcagcttcccggctctgccagggctgccggcggctccgcttgctcagccagggctgcggctcagaggaacgcgcgccggtgccccgggttgccgcgccgctggacctcagcctgcatcccgttcccctctccctgaaaaggcaccaggaaaagagagagggagagaagagttcacagcaggtaagtctggtttgggtcacctgctactccagtgggagggtgtgctggagaccgcggtgctaagcggggatagccgggatttgggggtggctgtgggtccgaagtggaggacgagcatggtttgggagataaggaaccgtcctgagacagagaaggctcccgggagcggacagagagtgggcgaaatcggtgcgcagtaa

SEQ ID NO: 295801 - DNA, 1000 bp, Homo Sapiens
ggcgccggagccacactgcgccgagcccgcgccccgccgccacctcggcccgggagccagggagcgagccctgcgtcgcccctgggggcaacggcgggggcggcggcgggggccgggcactgccttctccatcgactccctaatcgggccgccgccgccgcgctccggccacttgctgtacaccggctaccccatgttcatgccctaccggccgctcgtgctgccgcaggcgctggcccctgcgccgctgcccgctggcctcccgcccctcgccccgctagcctctttcgccggccgccttaccaacaccttctgcgcggggctgggcggccgacgcccagagggtgggctggaagctgatgagctgctgccggcccgggagaaagtggcagagcccccaccacctccgcctccgcacttctcagagacttttccaagtctgcccgcagaggggaaggtgtacagctcagatgaggagaagctggaggcatcagcaggagacccagcaggcagcgaacaggaggaagagggctcaggcggtgacagcgaggatgacggtttcctggacagttctgcagggggcccaggggctcttctgggacctaaaccgaagctaaagggaagcctggggactggagctgaggagggggcaccggtgacagcaggggtcacagctcctggggggaaaagccgacggcgccgcacagcatttaccagcgagcagcttttggaattggagaaggaatttcattgcaagaaatacctgagcttgacagagcgctctcagatcgcccacgccctcaagctcagtgaggtgcaggtcaagatctggtttcagaatcgacgggccaagtggaagcgcatcaaagctggcaatgtgagcagccgttctggggagcccgtaagaaaccccaagattgttgtccccatacctgtgcatgtcaacaggtttgctgtgcggagccagcaccaacaaatggagcagggggcccggccctga

SEQ ID NO: 295802 - DNA, 1000 bp, Homo Sapiens
cctgaggggtcccaagactcacccatccacggggaggagcagcaacccctgcttcatgtccctgaagggctccgaggctcctggcatcacatccagaacctggacagtttcttcaccaagatctacagctaccaccagcggaatggctttgcctgcatcttgctggaggatgtcttccagctgggacaatttattttcattgtcaccttcacaaccttcctccttcgatgcgtggattacaatgttctctttgccaaccaaccaagtaaccataccagacctgggccgttccacagcaaagtgaccctgtcagatgccatcctaccctcagcccagtgtgctgagaggatccgctccagcccgctgctggtcctcctcctggtcctggctgccggcttctggctggtccaactgcttcgctcagtctgcaacctcttcagctactgggacatccaggtgttttacagggaggccctgcacatccccccggggaagggaagggaagacactgggatgtactggagaggccagcctgggggacttgactaacctggactgggaaagctgagtgaaactgggctgaagtgaggtttgcagccttcaaatgagatctgacagtgccccactgccagatgtggacatagcccaggtcctgggaaggcttctggtgacagagccgaagatggcctggagtcgggtggggctgggagtgtaaagcatgcccaggcagaaggtggggaggattctgttccagagttggtgggtgcactggaaatgggaaggagagattctcccacgaactgccagacattctggttttttgtttttttgtttgttttgtttcttttgagacagggtctgggtctttcacccaggctggagtgcagtgctgtgatattggctcactgcagcctctgctccccagtagctgcaaccacaggtgcacaccaccacgccctgctattttttgtatttttagtagagacagtgtctcaccatg

SEQ ID NO: 295803 - DNA, 1000 bp, Homo Sapiens; identical to SEQ ID NO: 225137

SEQ ID NO: 295804 - DNA, 1000 bp, Homo Sapiens; identical to SEQ ID NO: 225139

SEQ ID NO: 295805 - DNA, 1000 bp, Homo Sapiens
tgaacaacaagttaactgctgttcccagttatatctggtctttcccacccccaaacatacacaaaagatttttgtcattcttggcactggacaacagaagtgataagacatgccagcagaactctaaaggcagaatgtccttccacctgttttatgctgtaagacaaacttccaagtgcgaggcagtgtggagggctgttgccttgaatggcagctgaatgcaccagcgggatccttggcagcaatgcccaggcactgaagtcgggcattcaggagagctaaatggagaaaagaaacttgagcaaactgcttcctggaacactgagaacctgaatgggaaattaagaagaaccagattctttctattcttccaccagccaagagacccattacaacttgcttatcgttgggtagaggttatatccagggaagagggaaccgaggagaagtggaggaaaggaggaaggcatgagatgttggccctaacctagattgttccagagactggaagttcaagaccaaggtatagcagagctggtgtctggtgagggctctcctcgtaggtggcagacagctgccttctcactgtgtgctcacctggcctttcctctgtgttcctcagattttgaagatttgttttgaatcttgaagagagagcagcaagccttttggcctatggattccaagagtcacattccaacaggtgatatcaaaaggacaaggaagcagggaggggtgacttgcacggaaggtgcccagtgagatgtctctgccatggagattgtgctgatgccacaagcaaagcgtttgtacccctctcatccacaagagaagtccctccgggtatttcagatgatacctgaaaggatgataaggcagggaatcagaggctgacaccgctattggatggactgggggagtgaagaccaaaaggtcattttcaggaaaaaaataaattaggaagtacagggataagacagaagccaccaccaataactcc

SEQ ID NO: 295806 - DNA, 426 bp, Homo Sapiens
ggcccagccctaggagggggcagtcccacagcaggctcacaccctgcccttcagagttgcagcagctaatgctgatgccaggaccttgtcctgccaggaagcctctgattagggctgtgaaccaacttccttttcacatctgcaaggactctgctctaagctcaaattttgcagtttctgctgtcatcacagctgggaatgagaaagggaaggggctccagttggtctccctctgcctctggagcacacgtggaggacatgaggcttccgcaggaacagctctgaaagctgagttctcgggtccctgtgaaggagggaagcttgcctgccttggagcgtgaaaaagtcttgctggacagaagtctcacggtttaaaactgggaagggagaggattgagatcacactagaatgcacagaaaattctt

SEQ ID NO: 295807 - DNA, 1000 bp, Homo Sapiens
tggggcgtggggggcagaatgtcagccggcaaagtggggaccggagtacccgggaagctgggatgaaggagcctcctctgcagccaaaggccccggaagtgacgtttgcgcgccgtgcgttacgggcgtgcgctggcggtgccgggggggcggggcaagcagggggtgtgtgtgaggctggagcggactggggagcccagacctgccgagcgacgtgggcgagcggtgacctggaccacggcgcagacgcgggcgagctgcggctcggacgccagcggacacgcgggcgagtgcgcggcctctccgtccaacgtgctcgttgccggcatctccagcgcccggccgtgccccgacggcctgacctggatcacttcctggccgcctccctgtccggcggctcccctcggtccggctcccacttccccgtccaggatgctggctccgaagcaacatctgtggtcgcgcgggacccatcccaggacctccccggaacgcgccgggatgggacgctcggacccagaccacagcccccggccgcggcaggggcgccgggatttgatcccgcgtcgccctggggggacagaagcgtcccggagttgggaggggatttgaagcctatggtcctgacttccaccccgtggctgagggcgaggctgcggggccggggttaggagcagaagtccctatttccgaaccgtctgggaggagagccgggggatgcccatcacggcagtttagggagagagagggaaggactctgccgctttggaggctaggtcataggcagctggcggtgtctcagcgcgagtgaccaatccttgtggttgggaaatgtgtcgtgggcgtccgtgggctcgttttgcctttgagattaaataggaaattttcccaggacgagtttaccggagcaccttgggagttggtttttggcttggagagctactttcccctctctaaatctaaaactgctttgtttttccttattatttttttcgagatg

SEQ ID NO: 295808 - DNA, 597 bp, Homo Sapiens
gaaaatatatgggctgaatgtctttctatttgctctttaaagaccttgcacaaataatgatgatgactgggatttttttttcatggaaaaaaaaaaaaacagaaatggtgagggtacctggagaggccaaggtgaaggcattacttcttaatttattgatactgagttgcatccaccccagggagctggtgctgcctatcctccgaggaccaaaacagctggaggctaaagcagctaatagcagaggcgcctgtggctatagaggctgtttgaaccctgggctctggcagtaagcactgcactgatctggaaggaaaagacatggggcaggactgagactctgctgggaaagcatcaatgatttagttaagaagaactaaaacagcgaattccataatgggaggttttgcctatgactttcttctagggtgtaagttggttccgcatcataatgtaattatatatttttcacttttttaattgacagataacattttatgtttttatcatgtacaacatgatgttttgaagtacatatacaaaatgcaaaggttaaatctagctcatcaacaaatgaactcacacagttatcacttt

SEQ ID NO: 295809 - DNA, 708 bp, Homo Sapiens
atgcctgtgcccaagtggggaatctggaaccactcggggagcgcgggtggtgggaggcggcgcgtgttgaacaggaagtgcgcggcgtgcagtgccaccgtcccgctccccgtcgccccacgccgccctcgtcgccgcgcccagacccctgcggcggccgcagccgcttgggactcgctgcgagctggtttcggatccatcccgcctcccggcgtctcactgtgtgccctaccctttgaaacacgcccccgcgcccgccctgccgtagaccaggcagcgaggaagcccacagtctccgggggcgctgcgcgcgaagtagcacgtgcttctcgaaacaccgcagcccccgggtcccgccccgcccggcgcgcgcactcgaacccgcccagagagcgaatgaagccagcctggaagatccccagtctcgagacagagcctgacaggggcagatgcactggaaggaccctgtctgggtttagcaaccaagcagccatcctggccccacaggtgtgggacttctgggtcttctcctggctggcttcttgctagaggatttcaagagacccagcaagactgtattgtcccactgaatgctcaagatattggttagaagtagaaaaggggagggggtagtatttagcctctgtccccactaaaaattattcccaattgtcatttgtgtcatctgtttagcttacagttttaatc

SEQ ID NO: 295810 - DNA, 1000 bp, Homo Sapiens
agcgccaacgcaggaaagaccggggcgccaacgccgctttgctggttccctcctgggttctggggaggcgcccggccggatgcacgtcggcggagcggcgcttgagctcggatgccccgggccgccgcctcctctgcctggctcccgctgtcccgggccgccccacgcgcgtccgcggagcctccctcctcgccgccgtccccagtcgccccgcgcgaggtttttccaggtcccccgcctgggccgagccgcagttcctgggtcccccacccccagcttctcctccgtggcaggtgcggggcggacttttctccgcaaggtggtcccgggactccgcgctgggagctgagtgggtgggggccacgcgtcctctccctgcccgcctcgttcgggggcggatctgggggcctcggaggtcacggcccagattgccttttcgtggggtgagacgggagaccccggggctgggacaggagaggcgcggcctcccggagatttcgctgcgggacttcgctcgggcgcgggtgggcgcggggagaagcggccgcgaggcctcagaggcgctgggaaggtggaacccacgggacctgcggatgccgcacctggggctgagcggacaggaggcttcgaggggagccctggaaggtgggcctggagccaagctgcgggatcccatcacgtcccctggcctccagtgtcatctgctctgcatgatatctccagggggacctctctgctgggctccaggccgcatggctgtgggtgaccagcatcatgtcccaccgggtcccctgcagtcccagtgcacctgcctgctcatccagggacctgtcctcactgcctgctgcctgcactgtgtggaaggacagaggctaaacgacgaagcctcgagctctggtctcatggaaatggcagcctgcccaccacccacgcttgcccagcctttcttcacgcagtgcgtaaaacacttttaaaaatacaagtattatcctgtcctgtt

SEQ ID NO: 295811 - DNA, 1000 bp, Homo Sapiens
ggtggtatcaattaactatattatctataaagccatacttgcaattactaccacttcacaatttatcattaacgcatttggcagatttttttttctccaaagtaacatttatttaaaggttaatcaaaattcttagaacagcatttattataatgtgatttttgataattgactaaatcagtggctcttaaaaacaccctcgtctcagtcccgctcagtatacaccacagtgccatttggggaaaagaaatacatattagaaatgttcatttcagacctcgtcatggaagatcatatattaatgtaatcaggtggtacgtttacatgctcattagtaatccatcattagtccaaatgctcactattaggaataaatgtacaacgagttattcagaatacccagaaagagtatttcttatttaaacattcaggacaagctgactgaaataagtgcacaccttgaatttgaactttcaaggcacatcactaaagtcaatcagttatgtcaggacactcttctataataatctcaattataaaattcctgcctctccctaacacaggagttggagggagttccaatatctgaatctttctaattcactgtaactgcaaaaaaatcttgatgaagtgtgtatttaaatttcatgccttaatacatagcatgccactaaaaccacattagttatgctttatgctgcttaatcatacgtcaaaatctgtaaaatctgctcttgcatgctaaggtaatttaactgcaattaatcaattaagaaaaataaaatgtaataaatgccaaataatgtaacttcttttaaacagaccactatctacacatttattccccaaatacttattagccgacaccatataaggaaaacataataaaaagtagacttcactgagcctttctcccattagtagcttgctctaaacttacaaatgttttagagaattctttggcatgatctgactttccaactaaaatgtgagcaacttg

SEQ ID NO: 295812 - DNA, 1000 bp, Homo Sapiens
aggcactgtttgcagcatttgaggatctcacgtgagattcctgaggcatgattattcctgagggtttgctccaccttctctggttttggtccctgcactttgtggtgtgactccggtgcctcctggtgaaccacatgcctgtcccactgatgttgacttgaccactgatttgaattggctgaccgcatgtgactggatgcaaggggtacatcacatcccagaagaaacttcaagtcattgtgtttctgccaggactctgctctttccctctgccttgagaatagcatgtcccaagtaggggctgcccctttagtctaggaaccaggatgataagacacatggagcagagccacagaagctcacatgtaaccacaacggtcccacgtaatgttagagaaacaaatgctcttgtaacactgagattcttggtggtattattgcattaaagttgactaatgtacctcccaccaaccgtaagagataggaattgttattatcctgtgatattgtgaaatacatagttgatcttctccccgtttcctgacatacaacttctaaaatccttagaatctccaaagtgatgtctttttatatgctgatgagttgactgatgcctggcagcccctgggtagcttcaggatggggctggtcactggaaagaccacagcaggattagaaggatggcaatttcagctccaccccatcaacatctggggaggagggcaactgaaggtgaagtggatcaccaatggctgatggattaatcaatcatgcctgtgttacaaagtctccataaaagctcccaaaggactgggttcagagagcttctggatacctgaacacatggatgttactggagggtgccacctggggtcggggggtgcaaaggggaaggagtatggaagctccgcaccctttccttcatacctcactatatgcatttctttttctatatcctttggaatatcatttgtaataaaccaggaaatgtgtttcgctg

SEQ ID NO: 295813 - DNA, 1000 bp, Homo Sapiens
ctcacttcctcgcttgttcgctagctgctgcatctggcccctcaagggtaaagtcaaggggaaaaggagattgagaggaaggacagtctgtgaattgggtctcaccgtgtttcccaggctgaagtacagtgttgtgatatcagttcattgcaacttctgtcttctgagctcaagcaatcctcttgcctcagcctctcaagtagctgggactgactacaggcatgaaccaccacacctggctaattttttttgtatttttgtcgaaaagacagtttcgccatgttgtacagaactacttctcaaatcactattcacatcctggtagaagtcaagcaatgaagatggcacagaaacacatcccaaatactatgataccataaagtatactgtagcaatgcattggcacaccctcatttgaacatttgtctcagaagattttgacagaagataaaattgtctggtttttatttcattggtttcatgaaaatttatttcactggtttcatgtcacaggcccatgactgtataaagagtcataatctttacaaacacaacaatgactcacagcgacatgttgcaaagctgtaatcgaaaacactgatgttgatttcagaggccattaatggtgttaagaaggcgcttttgttaaccaaataattgaatactcgtaattacttttcagttctagttcagttcttgacaccaaaacaagccattttctttacatagtgaatgcagaacttgccagtaagaactttcatactaaacttctatgtaaaacaaaacatgtcaaaatcagtaactactttaatggaacggtaaagaatttacttaaacacaaaggaatgaaaatatctctgcaaatatgtctattgacttttcaaatttggtgacttctttcgaattaattcccttacgtctgttcctcatccacataaaaatgacaaaaatgaaagataattttccagcctataattaaatttctccattgttggtatat

SEQ ID NO: 295814 - DNA, 655 bp, Homo Sapiens
gcagattcttggcagacctctgttgtttttctagagttgtaggcaagtagttggacaaaaagcaagaagctgatcgatgttgctggctttggattctttgtgaacaaatgagacaaggctgcaaattcagaggatcctcccagaagataagatggagcaggtcaccaccttcttccctgcttcacaccctcaggccccgactcttgtctgctgagatcactctccaaaccaatcttcccttacaaagcccttgttgcaggctatgctttctgaggggaacccaggccaagacactaaaatgacacaccaacatgaagacatgaacacaattgcaaagggattggttggattgcatatctctgtgaatgggactcaagagaagtttgggaaatgctggaccagatgacccttgcaatcatggtgcacagaattaaaaccgtcaagttccccatccatctctgagatggatgagaatctgagtcttccacaagatgcccaagacttgttaaacccgtggaatgtctttgggtatgtgtgacatcaacaagaagcagcagacaaaacaaaatattttcacaaacattcagaaatccctaaatcttgtgagttgtcgtatcatttgtagatataattataaaatggcacatgatgctga

SEQ ID NO: 295815 - DNA, 1000 bp, Homo Sapiens
aacctgtaggatgcagcctaaataaatgatactttaaatcaagcttatccaacccgtgtcttgtaggccacaatgtggcctaggacatatttgaatgcggcccaacacaaattcgtaaactttcttaaaatattgtgagactttttttttttttttagttcatcagctatcattagtgttagtgtattttacgtgtggcccaagacaattcttcttcttctgatgtggcccagggaagccaaaagactggccacctctggttcaaataaacatttacagcctcagtcacatatattagaaaatgaaaaagactgaaaaatttgccagctacttgcttgacacagtacaacagaaaaacaacagcaaagcaagcagaaagaaggcagaagaaggaaggaaaccataaagataaggagagcaattaatgagctagaaaacaaagtaataatgcagaaatcaacccaactaaaagccggttccttgaaaagagtgataaagccatctctggcaagaatgaccaaggacgagagaagaaaaagcatgaaaaagaaacagagcataactactgatggagattttaaagcctgtaagagaatactatggacaagttcctgacaatacatttggaaacagagaaatcagacaatctcctagaaaaatattaattacaaaaactgatgaaagaaaaagctggaatatacctataatcaacaaaagaagtgaatcaagttaatgatctacagccttccttccccggatgcctccctctccaaaaaacaggccagacacagccaagtttacaaaatcttcaaagaacagataagcactactttgtataaactttttcaaagaatagaaaaaggacaacttcccacatcattttgtatgcataaccttgataataaaactgaacaaataaaatagagtgtagcaaaattataggtcattgttaattatgaaatgagtgtaatgatcttaaataaaatattagtaaaccaaa

SEQ ID NO: 295816 - DNA, 1000 bp, Homo Sapiens
gtttaattttgcatactagctaaaatttttctttttaaaataacttcaaggaaaaatggggtcaaccctgggctatgagattttgtactagtttattcaaacagattccttttctcctttgcaagtggagcacagtgtccatagacctagatggaaaataatctttgaggaaaaacaaggttttatttaaagaattacgcaggttgacatagtttaaactttggatgcccctctgaataaattgtatgtaaaataacgtagctatttaaaataacatgatttcccttatctcataatctaaaataagaatttctaagagtggttgagggaagggagtaggaaaagaaaagcattttttgtttgtttttgtcaaaattgttttaacattcacctcagaagctgtatatacatttcattcatataacccttaaagaaagcatttaactggccaaatctttgcatgtttatttaacatctatgaatacatccatatgttcatacagataatttccattttaatgtttgtttttactaaattacagcagtatggaatgtttaatcatttgagtcatgtttttgctttgcagtttcctcaagtgtctgataccacctatgtaagtggtttttcagaaaaagcttacaacatttctgaagatatttgtaaattttttaaaaaactggccgggcacagttggctcatgcctgtaatcccaacactttgggaggctgagacaggtggatcacctgaggccaggaatttgagaccagcccagacaacatggcgaaacctcatctctattaaaaatacaaaaattagccggatgtggtgacacacacctgtagtcccagctacttgagaggctgaggcaagaattactcaaacagggagacagacagaggttgcagtgagccgagattgcaccactgcactccagcctgggcgacagagtgagactctgtcttaaaaaaaaaaaaaaaaaaaaaaaacttagaacagaag

SEQ ID NO: 295817 - DNA, 1000 bp, Homo Sapiens
ttcatagagttaaatgcctacatcaaaacatctaaaagagtgcaaacagacagcctaaattcacacctcaaggaactgaagaaataagaacacactaaagccaaagcaggcagaagaatagaaataacaaaaatcagaacagaattaaattaaattgaaacaaaaaagtgtaaaagataaatgaaacaaaaagctggttctttgaaaagataagcaaaatttatagactattaatgagatttaccaagaaaaagagaaaaatcaaataagctctattagaaatgaaattgggacccccacattgaccagaatccgtggacgtggtgaaccaggttatcaagtacaagcctgcagttgcctggcagactggaaagcctctctccatagaggagatagaggtggcacccccaaaggctaatgaagttcgaatcacaatcattgccactgtggtttgccacaccgacacctataccctgagtggagctgatcctaagggttgttttccagtgatcttgggacatgaagttgcttggaattgtggaaagcgttggcgaggaagttactaagctgaagctgagcttcttccatgctccactaaaccatttcttgcatcacagtggagagtcgaagaattccatctcttggaatcactttcaagcagatgtctagcttggattcagccaatgggattcaataaagagagatttaaaagtcagaagaaaacaagaattccagtacagctgtagcaagatgcgcaggcatttggcagacatgacgttggcagcagcatccaagtgagttcctgtgaatcacccgctttgagaattcaagcaactagtgccattgcaggtggctttctcacattcttgaatttttagatctctgaggctagttaacaatctctttgacatatacaaatgcaactttacaagggagaaaaaagcatccaattctctgcattgattttttttcctactcaaaataaattcttagaatgctt

SEQ ID NO: 295818 - DNA, 1000 bp, Homo Sapiens
gtaaggtaaatacacaaaccagtgatatagtactttcctatcaggtattatatagtgctattttttttttttttgagaccgagtctcactctttacccagaatgcaggcagtggcatgatcttggctcacgacaacctctgcctctcggattcaaccgattcttgtgcctcagcctcccaagtagctgggaatataggtgtgagccaccacgcctggctaatttttgtatttttagtagagacagggtttcatcatgttggccaggctggtcttgaactcctgacctcaggtgatccacccgccttggcctcccaaagtgctgggattacaagcgtgagccaccacactaggcctttagtgctatacttttatatgactggcagtgcagtaagtttgtttacaccagtatcaccacaaacatataattgtgctatgatgtcactagttaataggcattttccagctccattataatcttatgtgatcactgtcatttctgcagtccattattgaccaaaatgtccttgtgtggttcataactgtactcaaatatctacaaagagcgtttcttctggtacccagtaaatatttcattacttaatatactctcccccctgctcctgcaaacctcactccatcctaagaacaatcttcgcatctgcctttctggactttctgctatgaactaaatatttattcaccagagaaactgctgtatactaggtgttatgaaatataaatttttttatatcaaagacattgtataattacatgaagaccaatggagtaattcatcttaattctaagtattagaaaagctttgttttccttgaagaatggacatatttttttccttctaaaacaatgtaagcaaatgaccttctcattttggttgccagaatgctcagtttgtatccctaactgactgcctgtgtaggttatcataacttgtcctgatctcctagtgctcatttgtatgtgttgttttctattttactg

SEQ ID NO: 295819 - DNA, 1000 bp, Homo Sapiens
gcttcatccatgtccctgcaaaggacatggtcttgtccttttttatggctgcatagtattccatggtgtatatgtaccaattttgctttattcagtctaccatcgatgggcatttaggttgattcaatgtctttgctattgtgaatagtgctgcaatgaacatacacgtgcaggtgtctttatcatagaattatttatattcctttgggtatatatccagtaatgggattgctgggttgaatggtagttctgtctgtaggtatttgaaggatcaccacactgtcttccgcagtggctgaactaatttacactcccaccggcagggtcaaagcattcctttttctccacaacctcgccagtgcctgttgttttttgactttttaataatagccattctgactggcgttagatggtatcttgtggttttgatttgcatttctctaatgaccagtgatgttgagctttttctcatgtgattttcagccacatacatgtcttcctttgaaaagtgttcatgtcctttgcccacttctttatgtggttgtttgtttttttcttgtaaatttatttaagttcattatagatgctggatgttagacctttgtcagatgcatagtttgcaaaaattttctcccattctgtaggttgtctgtttactctgttgatagtttcttttgctattccacaatgttttgtgcaagataagtgcttagcaaatgcttgtaaaggaatgcctgcaccaggaaagtccaatagctatgaataaagaaagaaaggacaagttccaggggaggtgatttttttttcattttcatttttttagacagcttttaaaggaatggagtagcatgttcttctggagcaggagttacaaattggacctctaagggccacattcagcctatccacatggttgcagcactgacagagtgttttgaaattttaaactctgaatacttgtagataacatatgcatgccacaataaactgcatttccatc

SEQ ID NO: 295820 - DNA, 1000 bp, Homo Sapiens; identical to SEQ ID NO: 225140

SEQ ID NO: 295821 - DNA, 1000 bp, Homo Sapiens
taaccctgagtaccacaagatatgaccttagttgaagataaggcatgatatattgtttgtgtgtatgtgtgtatgtatatatatacaccgtatattgtgtgtgtgtgtgtatattacacacacaatatactgtgtatatatatacgcacacacacacgatattgtgtatgtacatatacacccacacatacacacacgattatattgtgtatgtgtatacacacacacacacatgtttttgtccatggttcttagttcataactcccatagcccttattatttcctaaatgaccaaaacatatcttttgttaaaattatttgtccttttgtctttggttcctgaagtagcttcagaacagcttcagagccatgaaggtgaaaggcagtctttcgttataatgttgggggactttaggcctcagaagacagaactgctctctctgaccttcttcatctacctttcacctgcttctttttctccccaaggcaggctgtagaaatgaaagatatattctaatttccccccatctttctgtcttggagctagccataaagaaattctctgacttatctaattgcaggtcataaaatcctcatttcagaggggtcttgccccattccctggaggaaggactgctgcacggagaggctaagaagaatctgaacagacaggccttgctgggtttccccactcagtctattagtattagattataccctttttgtctaatcacatttctacacagttgtccttataccaatcatgtctatccgatgaagtctccataaaaggcctaagaggaggggtttggggagtttctggacagctgaactcataggaacatgaacaagaactcatccacgtgcccagagggtgttgtaccccaactcataagaatggaagctcctgttctcaggatacttccagacctcgcctgtataatcccttcatctggctatttatttgtattatttaaataaagatattacattaattaa

SEQ ID NO: 295822 - DNA, 1000 bp, Homo Sapiens
aaacttacagtgagcagtcaccaacagacagaagtgatgtgattggttactgatcatgacatgcatttgttattaatgtgatgatgtgtagactgaagagctagcagcctgcactttatgcgaaaactcagttaatatactgtgtacctgaaatttgagttgtgtcgttgggggactggtgttattaaatcatggtgactgaaattcgtgcatatcagaactgtaccaagcaagggctgcctgatgagtataatgctctcatgttttatgggaatttatataaatttaaaataatatgaataaatatttgaaagttgtatgttatgcacaaggtttgaaataatgcaattcttttaatattttaaaaaattgttaggactcagattttcttttatcttttcttttttttaaggtacggagtctcgctctgtcgcccaggctgaagtgtagagtgcagtggcatgatctcagctcattgcaacttccacctcctgggttgaagcaattcttctgcctcagcctccggagtagctgggaatacaggtgcaggctgccacgcccggctcatttttgtgttttagtagagatagggtttcaccatgttgcccaggctggtctcaactcctgagctcaggcaatcctcccgccttagcctcccaaagtggtaggattacaggcgtgagccactgcacctggccctcgactcacagattttcaaaatacttttgaacagtaagctgaggacagtgtttattatgactatactggtctcctttcactagctcacaaaatttaactacatcacttgtcagtctcctaaaaatgcagtgtatgtgctttgaaacttgtgaatgatctgctgatttgtgctattttatattcaatgttgttgaaagaatagtttttaaaccaagtaatgcaaaaatttagtgtaacatgaatgcttgtgctgtaaaacatactggaaaatcaatagctctggaataaactttggattttt

SEQ ID NO: 295823 - DNA, 1000 bp, Homo Sapiens
ggaggtgttgaaaatgggtttcctggctgggcgtggtggctcacgcttgtaatcccagcactttgggaagctgaggtgggcggatcacttgaggtcaggagtttgagaccagcctggccaacatggtgaaacaccgtctccactaaaaatagaaaaattaactgggtgtggtggagggcgcctgtaatcccagctaatcaggaagctgagacaggaggatcgcttgaacccaggaggcggaggttgcagtgagccgagattgctccattgcactccagcctgggcgatagagtgagactcagcctcaaaaaaaaaaaaaaaaaaaaattcgccaggtgtggtggtgtgcgcctataatcccagctactcaggaggcagaggcacaagaatggcttgaatcacttgaacctgggaggcagaggttacaatgagccgagatggcaccactgcactccagcctgggcgacagagcgagactccgacttcccatcttaaaaaaaaaaaaaaaaaaaaaaaagaagtgtaaagatgtgattatgtggcagggggtaagggttaaaaagaaaacaagaacaagttttcctctgcttagccagcttacttcaaggacagttataacactgaaaagtcgaggccaaaggaatgggctccagacagcctcctccggagcaaagttgaaaagaaaaattcctttactgtctctccttttctgaaccattaaatatgactgtttgccaatggttgtatttagtaagatttgtagactctgtttttcttttgacacagctgcaaggccaacagctgtgcaaagccacaagttatgctaagtcagcagttatgctatagattacatgacctgtgactgtatcattaactgcttttgttttgcttctgtaagtttgcctataaaaaccacactcagtctttgttcaatggtcagcttttcagatacaaatccactgagccggtgtacatctaaataaatcctcctgtttcccgt

SEQ ID NO: 295824 - DNA, 1000 bp, Homo Sapiens
cagaggaatccgtgtggcacagcagcaggagcccagggtccctacgcatgtcttacagaaatgccaagttaagaatttttcaccagctacaaagagagtgagccctctaagacctaatggaggagagcttggtggaggggatgcagggttggggacatcccaactcagaagaaagagccatgctattcataacaagacatcaagggagtcgcttgggagcaaatcttccccaaccttgaaaacacagcctcctcctgaaaaccttttcggaacattgatgaagacctttttgcagcagtctaataaacccatcataacatatggaaaacaagaaagttcctaggaaaagggtagctccttgtcatcatctgtgcagaatagaggtcgagttaaaagtagagctgtctttactgggactattgaagctcagaaaattaggaaagacactggggagttcatagaagagaagctggggcatagacattgaatagatatcacctgtccccaggagcccctttcctccccagtgcagcttgggaaatctcagaatgtgccagaactgcaggtcagagcagagcctgtccagggctatccctgcaactacatggctccctcctgcaaagtgacatgtaccaaatcttgcagccaacaagctatctttgtcggccagaattatcctgcaatgattagacagatcatagacaaggacagatagccccaggaagttggacatttaaggggaagatattgtgtcaaaggcatccccaatccatgccccacaggaagcctgtgccacagccaaaccccacttgcagtgtgaagtcaacctggtgcctccggtcatcctgaccagtgctaaaaacactgtgttcagtgatgtgcctttactaactggacagaaaatacttccaaagcatttgcagggaggaaaatttccccccaaaaaataattaactccttgttgagaatcttgactctccccaataaacgttctaataag

SEQ ID NO: 295825 - DNA, 1000 bp, Homo Sapiens; identical to SEQ ID NO: 119393

SEQ ID NO: 295826 - DNA, 1000 bp, Homo Sapiens
atgcatagcctatactgtggtcttaattgtgggcctttttggaaacctctctctcatcatcatcatctttaagaagcagagaaaagctcagaatttcaccagcatactgattgccaatctctccctctctgataccttggtgtgtgtcatgtgcatccattttactatcatctacactctgatggaccactggatatttggggataccatgtgcagactcacatcctatgtgcagagtgtctcaatctctgtgtccatattctcacttgtattcactgctgtcgaaagatatcagctaattgtgaacccccgtggctggaagcccagtgtgactcatgcctactggggcatcacactgatttggctgttttcccttctgctgtctattcccttcttcctgtcctaccacctcactgatgagcccttccgcaacctctctctccccactgacctctacacccaccaggtggcctgtgtggagaactggccctccaaaaaggaccggctgctcttcaccacctccctttttctgctgcagtattttgttcctctaggcttcatcctcatctgctacttgaagattgttatctgcctccgcaggagaaatgcaaaggtagataagaagaaggaaaatgagggccggctcaatgagaacaagaggatcaacacaatgttgatttccatcgtggtgacctttggagcctgctggctgcccccgaatatcttcaatgtcatctttgactggtatcatgaggtgctgatgagctgccaccacgacctggtatttgtagtttgccacttggttgctatggtttccacatgtataaaccctctcttttatggctttctcaacaaaaatttccaaaaggacctggtagtgcttattcaccactgctggtgcttcacacctcaggaaagatgtgaaaatattgccatctccactatgcacacagactccaagaggtctttaagattggctcgtataacaacaggtatatga

SEQ ID NO: 295827 - DNA, 1000 bp, Homo Sapiens
ctcttgcttgtcttacttgtcttatttattctccaacagcactccaggcagcccttgtccacgggctctccttgcatcagccaagcttcttgaaaggcctgtctacacttgctgtcttccttcctcacctccaatttcctcttcaacccactgcttcctgactcgctctactccgtggaagcacgctcacaaagggctaatctcgggccttgtcgaaggaagaggctgcagacgttaatgaggttagctgctggattccagtattcgtcgcataaggatccttctttgtctgcgaaggaaaaacacactgattatcataatgagttcctgacctggccatcccggggtgcccttgaccagccccgtgtctcctcagggtgtcccagcaccagcctggcacagagtggggctcagttagagtatgtgggatgttggtttcgccagtaaactgcaggcacgtgggccgtggcccggctgggtcggctgaagaactgcggatggaagctgcggaagaggccctgatggggcccaccatcccggacccaagtcttcttcctggcgggcctctcgtctccttcctggtttgggcggaagccatcacctggatgcctacgtgggaagggacctcgaatgtgggaccccagcccctctccagctcgaaatccctccacagccacggggacaccctgcacctattcccacgggacaggctggacccagagactctggacccggggcctccccttgagtagagacccgccctctgactgatggacgccgctgacctggggtcagacccgtgggctggacccctgcccaccccgcaggaaccctgaggcctaggggagctgttgagccttcagtgtctgcatgtgggaagtgggctccttcacctacctcacagggctgttgtgaggggcgctgtgatgcggttccaaagcacagggcttggcgcaccccactgtgctctcaataaatgtgtttcctgtcttaacaaaaa

SEQ ID NO: 295828 - DNA, 1000 bp, Homo Sapiens
gttccaccaccgcttcaatcccaatgcctccagctccttcaagcccagtgggaccaagtttgccattcagtatggaactgggcgggtagatggaatcctgagtgaggacaagctgactattggtggaatcaagggtgcatccgtgattttcggggaagctctgtgggaatccagcctggtcttcactgtttcccgccccgatgggatattgggcctcggttttcccattctgtctgtggaaggagttcggcccccgctggatgtactggtggagcaggggctattggataagcctgtcttctccttttacttcaacagggaccctgaagtggctgatggaggagagctggtcctggggggctcagacccggcacactacatcccacccctcaccttcgtgccagtcacagtccccgcctactggcagatccacatggagcgtgtgaaggtgggctcacggctgactctctgtgcccagggctgtgctgccatcctggatacaggcacacctgtcatcgtaggacccactgaggagatccgggccctgcatgcagccattgggggaatccccttgctggctggggagtacatcatccggtgctcagaaatcccaaagctccccgcagtctcactcctcattgggggggtctggtttaatctcacggcccaggattacgtcatccagtttgctcagggtgacgtccgcctctgcttgtccggcttccgggccttggacatcgcttcgcctccagtacctgtgtggatcctcggcgacgttttcttgggggcgtatgtgaccgtcttcgaccgcggggacatgaagagcggcgcacgagtgggactggcgcgcgctcgccctcgcggagcggacctgggaaggcgcgagaccgcgcaggcgcagtaccgcgggtgccgcccaggtgatgcgcatgcgcaccgggtagcagagctagcgctactcagtaaaaatccaatatttccattgaacgaacctgcctag

SEQ ID NO: 295829 - DNA, 1000 bp, Homo Sapiens
ttatgttttaaataacagaattgataactaaacaaggaaatataacttggattatgaaattcttggtttaataaaaattctttaaatggtttaaaaaaacctgaataggctcaaaaacataaggtgattatgcagtgtatgtacacatcaaaggaagatgtggctgggtgtggtggctcatgcctgtcatcccgtcactttgggaggctgaggtgggaggatcacgaggtcaggagttcaagaccagcctggccaacatagtgaaaccccatctctactaaaaatacaaaaaattagccgggcatggtggcaggtgcctgtaatcccagctattcaggaggctgagccagctgcctgggaggcagaggttgcagtgagctgagatcacgccattgcactccaacctgggcaacagtgcgagactctgtctcaaaaacaaacaacaaaaaaagagagatgtgtatgcattaatactaatatgtgaatcaaaggattactctaattttttccaaagtaattgcttatttaacctattcaaccattttgtttgtttcaaaccttaataggaatataaacacaatctaactctcaaacaggttaaatctaaactctctacacctttatctagcaagtgctatgttgtatagctttcttcactgtcacatcacagctatgattttgtaaagcatttatttttacctcattgggatttgtagctattagaatatcaaagctataggaatatttcaaatatcccaaatataaaaacgaatttgatttcaaagggaggttttacacatttaaatgcctgaaaataaggggtataataaagagcctggtagactgtttactctgacaatatcactgaaaatggctataaaatatgatggaaacactgaaaaattacctttgaggaggatgcagaatccgttttctttgtaaactgaccctgaagatgtgtcaaaacatttgtaatatccacaataaagagtcaacggca

SEQ ID NO: 295830 - DNA, 1000 bp, Homo Sapiens; identical to SEQ ID NO: 119394

SEQ ID NO: 295831 - DNA, 1000 bp, Homo Sapiens
tgaatgtaatgactgtgggaaacctttcagtttctgttcagccctaattcaacataagagaattcataccagaaagaagccctgactgtaccttcataccagtaaatgcactgactgtggaaaagccttcagtgattggttagcacttgttcaacatcagataactcaacactggagaaaaaccgtataaatgtactgaatgtggaaaagccttcagttggagtacagacctcaaaaatcaccagaaaactcatactagtgaaaaatcctataaatgtaatgaatgtagaaaggcctttagttactgctctggtcttattcaatgtcaggtcattcatactatagaaaaaccttatgaatacggtaaatgtggcaaagcctttaggcagaggacagaccttaaaaaacatcagaaaatgcataccgaagagaaaccctatgaatgtaatgaatgtgggaaagcctttagccagagcacatatcttacaaaacaccaaaaaattcatagtgaagagaaatcaaatatacatactgagtgtggggaaaccattagacaaaactcttcttttttacaacaataaaaacctcacactggagagattctctgaatgccttaagaatttggttaatatggagacccttcccagggaaacagaaggaggatcgtgaaaactgttgactacttagaatgatcacatggtttagtggagagagcatgattctgggttttaaaagtcatggatctcaatctcagctcctattactaactagatcttttactttggggtaagtcacttcatatctttaggccttaatttcctcatctgaaaaactggaaggcctgacttgttgagctttaagatcctcaattattatatttactaggaattcaagtttctatagatgtggttcagaattgtgacttatttattgtacatcaggtgtgattcacaagtgagcttgtagtagttattaaggagtcaataaagatatgatatag

SEQ ID NO: 295832 - DNA, 1000 bp, Homo Sapiens
ttttgtaatgtttgggcggggttgctttgttttcagtgaaattggttgcagtgaatgctaaaatgacacagcacactggtgattaattcctcccccatggagccttttttctgttatgcttaggatagaacatacttgtaattttccattaggttagtaacatacttttgtgaaagttgtttttagactgaagaaagtaattttgaatttctttgttacataatattcctttatgaaacttgtgatagtttccagagcaaaacatgtatttgccaaagtatataaatctcacaaggctttaagattacaagctaaaattgttttttaaaattaatgttccaatgtttctcatttggcccaagattctggcttcataaatttgtccaactggctatttttaagcttgtcctaaaagccaataacatgtttattcctaataactaatatgggcaagtgttatttacagatttattaactccatcccagatatgtctccactctttgttccctcctaatgctaatttaggaaagagaccactgtagtaaaactttagaagaagatggagaagtgccttgtctttttagaacaaagataacacattacgtgtaaggaagcataataaatgaattggtagatgattagattagaaatcatccttttcaactaggtctaagaatactttactagtgtattatcttttatttattatgtaaagcttctttccttccttttccccaatcatgatatattagtgacaaaatattacagaaccggactatcagtcacttaaaaaaacagtataattctaatgctagtaaacatgtaatttaatttagttctggaaggacagttgtctttgattaaagccccaccaaaacccatttaagtatttaatgtacatactattcatattattatggcctgtaaacactaatatctgagcaatcaaactgttttatctaccatttttgatgaaatttgaataaagtttaaaaacgt

SEQ ID NO: 295833 - DNA, 1000 bp, Homo Sapiens
tcttcaataccttgaagaaagattcaggggagagccgttgtgaacagcttgccccagggaaaggacaaggctgagagaattccagggcttccttgagaaaacagaattgaggaaatgcaaagtgaagaattctagcatcaggaacaagagaagaatgatggaaaacctgctactgagatatgttggatattttgcacaagtgaaacatctctacaactggaatctccctccaagacggatactctttataataagattcattatttattcgattcgtggtgttggaacaggcgatgtatgtgatctaaaattccaaatagtaatggagaaaaaggttgtcttttccagtacttcattaggaaattgttcaatactgcatgacattgaaacagctggtgtattaactaatgtatatgacagtccatctctgtacgatgatgtgaaagtgcagtttttctcttcgaatcttcctaaatactatgacaattgttcatttttcttctggttcaacacatcttttattcaaaataacagagagaaatttagatattttattaaacttggaagtcattaatgccatataaagcaatgctaagagagtcagcatgtgttactgatgtgttgctgaagattaaagtatttttaagtctcaccaaaaaggtggaaggagccaactgagacacaaaaaaggggctgaggttctattcacggctttatctaccaagaaatgaattggataatccacatcaacaaaaagcatggaaaatttatccaccagaatttgccgtggagatactttttggcgagaaatgacttccaatgacgtagctggatccgattaagtatagtttccccttccccttctgggaaagaattaatgttctttccaacccctgccatgtgcatgttcatatgtcctaagtcttccttgatgatgtatctatatttatatatgtttatatatgttcttcataaatctattaaatatatatagataaaa

SEQ ID NO: 295834 - DNA, 1000 bp, Homo Sapiens
gattcgcctgcttcttattcacctgccggggggtgtggattataggacgaatatccagactttcacagtagcagcagaagtgcaggaggagctgtgccggcaaatgggtatcacggagcctcaggaagtgcaggaattcgccctcttcctcatcaaagagaagagccagctggtgcggcccctgcagcccgccgaatacctcaacagcgtggtagtggaccaggacgtgagcctgcacagccggcggctccactgggagaccccactgcacttcgataactccacctacatcagcacccactacagccaggtcagcctgcctgcctccgagctgctgctgcagtttgagggcgcggcttcctgcctgggcgacctccaagcccctctccccacaagggtgctgtgggactaccttcaggggaagctgccagtcagcgccaaggcagacgcgcagctcgccaggctggccgccctgcagcacctcagcaaggccaacaggaataccccctcagggcaggacctgctagcttacgtgccaaagcagctgcaacggcaggtgaacacggcctccatcaagaacctgatgggtcaggagctgagacggctggaaggacacagcccccaggaagcacagatcagcttcattgaggccatgagccagctgcccctcttcggctacaccgtctatggggtgctgcgagtgagcatgcaggccctgtccggacccactctcctggggctcaaccgccagcatctcatcctcatggaccccagctcccagagcctgtactgccgcattgccctgaagagcctgcagcggctccacctgctaagccctctggaggagaaggggccccctggcctggaagtcaactatggctcagctgacaacccccagaccatctggtttgagctgccacaggcccaggagctgctatacaccactgtcttcctgatagacagcagtgcctcttgcactgagtggcccagcatcaactga

SEQ ID NO: 295835 - DNA, 1000 bp, Homo Sapiens
ggattacaggcatgtgacaccatgcctggctaattttgtacagctatgttgtccaggctggtctcgaactcttgacctcaagtgatactgcccgcactgacctcccaaagtgctgggattacaggcgtgagccaccatgccccgcctcaagtctggtttttaagtgttgtaaagccgatacaatgatgataacatagttcagcagactaacgctgatgagcaatattaagtctttcgctcctatctgatgtatctggcggtaacattctagtttatgccccgaaaaggggaatatagccattctataatgtttggagattttggattactcctaattgtatgcaagttgtcttactgtgtattgtcccttaatttcaggactcagaattcatgattgaagaaatgcaggttagtttaaactttgaaggaaatttttaaggtggcaaaaggttttggtggcatatacaccttaatctgtagatgggagtgattagctgtttaaaagttaaaatgtgactgagaaggaaattgagtagggcaaattttaaatgggtattatttttcatcttcaaacaggcagacctgttatcctaaactaggtgagtcagcttttggtacatgtgatgattttcagtgtaaccaatgatgtaatgattctgccaaatgaaatataatgatatcactgtaaaaccgttccattttgattctgaggttactctactaacaagcatcacacatttgtattttgccctgattaatatgttggcttcgctttcagggtttttaatgaccacaacaagcaagcatgcagcttactgcttgaaagggtcttgcctcacccaagctagagtgcagtggcctttgaagcttactacagcctcaaacttctgggctcaagtgatcctcagcctcccagtggtctttgtagactgcctgatggagtctcatggcacaagaagattaaaacagtgtctccaattttaataaatttttgcaatcc

SEQ ID NO: 295836 - DNA, 1000 bp, Homo Sapiens
tattttcatgtttggtgagacttctcgttacctagatgtcaaacagcatttaaagcctgctattactatacaatctctgataaatccagatagatatatcgttgtagtggaatatgatctaggtgtattagactatctctctgatttcatctgctgtttatatggtgtaccaagcacctatggagttgtcactgtgccttttagtgtaagaaagggcataaacatttttttggatggctatgttccaacagaaaacctgagattccaagatgcatcacttgtttttaaagtggctgagacagcaaatgaagaagaagtcaaaatgatgtgtatgtataaatattcaggaatgaatttaaaaatgggagagtttgagctagcaattgtagctggagagtttacagattctgaaatcatggtgatgatgctaggggaaaatggaatgggtaaaacgacatttatcagaatgcttgctggaagacttgaacctgatgaagaaggagaagtaccagttctaaatgtcagttataagttacagaaaattagtcctaaatcaactggaagtgttcgccagttactacgtgaaaagataagagatgcttatacacatccacaatttgtgactaatgtaatgaagcctctgcaaattgaaaacatcatcgatcaagaggtgcagacattatcgggtggtgaactacagcgagtagctttagccctttgtttgggcaaacctgctgatgtctatttaattgatgaaccatctgcatatttggattctgagcaaagactgatggcagctcgagttgtcaaacgtttcatacttcatgcaaaaaagacagcctttgttgtggaacatgacttcatcatggccacctatctagcggatcatgtcatcattttcgatggtgttccatctactaagaacacagttgcaaacagtcctcaaacccttttggctgggtttctgtatttacctggtttgccaagtatgccagtgtaa

SEQ ID NO: 295837 - DNA, 1000 bp, Homo Sapiens
gtcgctgctcctcaggggagcgggtggagagccggctcgcagcggagcgggtcacgcgccggacggaacgcctggcacagccaccgctcgcgcagcctcccaaccgctaggacgccggcccggcccggcgggatcctcccccgactcggaagggggaggcgcgggccacacagtaggtgacgagccgccctcggtccccaccgcggaggactctctcaagagagagtcgttgccaaccctttgtactttagccgacgaagactgggctcccaagagtctccccggagtcggggccttgggcaggttcacaaggatcctgatggcgacggttggtgatggtgatgtaagttggaagcctcggaccaaatcagagggagcaagggccttccccccgctccagcccagccaggctgcgcaggcagaaggaatctctcaacctgcccctgcacgcagggattttgtgttcgctgccctggctcctctggaagtaggactgtcccaccctcagactcctcggtggcctccgcaccctaacaaatgccaggaggaagaggacccgcagcacggcggcctgctgggcgcgtgctcagtgggacagcttgggccccctcaagctgagtcacaggggcaaggtgtgtttgcaccacccacgtcccaccggagtccacggtggggctggagccccggggtccccagggcggcgtgggaaaccgaagaccgggcacctccacctctgaagctcgcgaccccggaggcctccgcgtcaagcacatatgcaagccatccaggcacctcccaaccgctccaggagtcggggcgcttgtctacacacacccccagactgttagatgagctcctgccaaccccagagtttcagaaaaaggcacaatctttcctagatccggcgccactggggaagctgaaggaggtggaagagcccgctccgttggaaccactcctcagccaggaagaacaccgggctctgctggaggagctttag

SEQ ID NO: 295838 - DNA, 1000 bp, Homo Sapiens; identical to SEQ ID NO: 119396

SEQ ID NO: 295839 - DNA, 1000 bp, Homo Sapiens
tttctccttgctggatggagtcaagcctaatgtcatcatttttaagcagcaatgcgtggcagcccctttggtcatgctgaagcttcagcctgatggaggactcttacccatggtcatccagacctgggtccggagctctgatttccagctgcagcagttacagtcacatctgctgaggggacacttgattgctgaggttattgctgtggctacaatgagaagcttgcctagcctccatcctatctacaagctcctgatcccccacttccgctacaccatggcgatcaacacgctggcccagagtagtcttgtctccgaatggggaatttttgacctggtggtgagcactggtagtggaagccacgtggacattcttcagagagccatggcttgtttgacctatcattccctctgtcctcctgatgacctggctgaccggaataggtacgtggaggggatggttgggcttttctacaatagtgaccaagccatgaaggatgatctagagctgcaggcctggtgcagagagatgactgagactggactgcagagggcccaagaccaggggttcctcatctccttagagtcccgggctcagctctgccactttgtcaccatgtgcatcttcacatgcacaggtcagcatgcttctaaccacctgggccagctggactggtactcctggatccctaatggcccatgcaccatgcagaagcccccgcccatctctaaggatgtgacagagaaggatatagtggacttactgcccaatctccaccaggcacgtatgcaaaagaccttcacaaagttccttggcagacgccagcctgtcatgcatgaggagaaatatttctctggtcctgagccccaagctgtgctgagacaattccaggaggaactggcttccatggacaaggagattgaggtccggaatgcagtcctggacctgccctgtgagtacctttgacccagcatggtagagaacagcgtgaccatctga

SEQ ID NO: 295840 - DNA, 1000 bp, Homo Sapiens
tcgtgcctggagtgccttcgatcacacctgtcgtgtgcgtgaatcaggtcttctccatttctcagaggtacgtcatgcgttctagagagttctgtctctcatatgaagtgcttcctacagaaagaatgaatgtacagctcttcatgttgccaaagcaccaagacacactaaacccacacaggcacattccacagggcattttgagtggctggaggccatggcaccagagtccggggtggcacctgcaccctcccatgtgggaagtgggcatgaccagaggcagagaccagacttggcagcacgtggtgaggctgcacagccctgaggaagctgctaggccccgacactgggtggcctggacaatccagcctgacaaggagctgcattccacctgcgttggagatggatgctgacagacggccgcacagaagcttctgcagcctggtgcccaccaggcccacagaggaaaagggttctggagtgaaaagcctcatctggcactcaggaggtatctgcgtgagggcagggccctgtttgcccccgggtgtcagaagatatgaaggaccagatctgggcttggccactcctcagacaacttcaatggatcctgcacacagcattcccaggccaggctggagggactttgatggatcctgtacacagcatccctgggctgggctggagagacctcctgcctgcttgcacatactggaagagatattgttgtgtgaattgttttctgaacacaccattatccttacagaaactcctattcatccttcaatcccagctcacagtcacctcctccgggaagccctccaccctccatcgccggtcagtgttgggtggtgtgcctgtctcctctttggactgcgagctccccggggtccttgtgatgtcttttcattgctttcctccacttcccacctggttcttggcacacactgggtgcttattgaacacatggtcagtatatttgaaggatgagacgtactgaatt

SEQ ID NO: 295841 - DNA, 422 bp, Homo Sapiens
ttggggggttttcaattgctccacacccctgctaacacttgttattgtctgatcttgtggttatagctatcctaatggatgtgaagtggtgtatcactatggttttgattttcttttccctgatgactaatgatgctgagcatcatttcatgttcttgttagccatttgtttatcttctttgagaaaatgtctattcaaattatttgtacattttaaaattgttgtttgtctttctattattgagttgtaagagttcttatatattctagatacagtttccttatcagatatatgatttgcaaatattgatcaacaagcatttttcagtaaaggaattctaaaacttctatttaaaatttcagatgtttcttgcaaaagctaacagatacattccagcaaagtttgtttaaaagcgatcatc

SEQ ID NO: 295842 - DNA, 435 bp, Homo Sapiens
  misc_feature (285)..(331): n is a, c, g, or t
ttggctgaattctaaaatttttcctggctacaagtcttcaaaataatacttacaattttattttctttccttccccctcccaacttttcctgatttgaaatcaccaaaaattaacctgtgctttctttaagccctgcaaactgaagcgagaaaaggtaaacttcagaagaaaatgaaatggcagcaacctacttacatatataaaccacttgcatacctgcctactgatgtatgaacttcagagtaagatggcctatattgatttttcaggattgctcttcatannnnnnnnnnnnnnnnnnnnnnnnnnnnnnnnnnnnnnnnnnnnnnngtagaacgtaagaattcacaacctactaaaaatgacctttcctgataacgtgagacctacctgtctaggaaaaaaccatcctagccatgaggcaaatctggaac

SEQ ID NO: 295843 - DNA, 915 bp, Homo Sapiens
ttgggtggtgagagagggcatccctgtcttgtgccagttttcaaagggaatgcttccagtttttgcccattcagtatgatactggctgtgggtttgttatagatggcgcttatcattttgaggtgtgttccttcaatgactagtttattaagagtttttaacatgaaagggtgttaaattttatcaaaagacttttctgcatctattgagataatcatgtgttttttgtctttagttctgtttatgtgatgaatcacatttgttgatttgcatatgttgaaccaatgttacatcccagggataaagcctatgtgatcgtggtggataaggtttttgatttgctgctggatttgatttgccagtattttgttgaggatttttgcattgatgttcatcaagggtataggtctgaagttttgtggggatttcttgctgtgtctctgccaagttttggtatcaggatgatgctggtctcataggaagagttatagaggagtcctcctcctcaattttttggaaagtttcagcaggaatggtaccagctcctcttcgtctatgtgatcctgagcttttttcgtttggtaggctatatatttggtaggctgattcaattttgaagctcattattactatgttcagggattcagcttcttcttggctcagccttgggacagtgtaagtgtccaggaatttattcctttcttctagattttctagtttatgtgcatatgggtattcataatattccctgatgattatttgtatttctgttgggtcagtggtaatatcccctttgtaatttccaataatgtttatttggtttttctcttttttctcattagtctatcttaacagtctattttattaattttctcaaaacaaacttctgaattgttgaccttttgaatggttttt

SEQ ID NO: 295844 - DNA, 760 bp, Homo Sapiens
catacaaggcccactttgtacaagaaagttgtgccactatctctatgagtaaatgaaaattgaagttgaatgctaaggtaatgctgactcagacttcaaacatagaagctctgcattccattccaaacttccctttcagaccaactgagtttttataccacttggcaatacccagaattactatcactgtggaacttaaccactttttagtattttaagtagttaattgtattgaatggttttagaatgttctcatgtatttttgttcaataatataggtagggaaggcatgtcagcatatacttataaagtgaatataataacttatgatatattcattctcattgttataaaacatctttagtctctggctattcaagagacattaaaaaatttaaaaattccaaatatggcaacattagaattaagagcattagagtaatgctggagatgagaaaaaaagttagcaagtgaatgaaactaagaggagctgatgagtttgaagtatgcaaaagataggattaatagtgtgtagacaacttgaatagagaggtaaatagttgcaaggagtctaaaaaagttctttagcttcagcaactttctgtgtggtaatactataggtaatagggtgctgaaatataatttggagagatgcacaaaggaaatatacagcctatttttgtgtaattttgaagcgctcttgtgagctgtctaggcagaaatagctagtcagtagttagatatacaactgtaactcaag

SEQ ID NO: 295845 - DNA, 741 bp, Homo Sapiens
tcctgctaactttggagttagtttgctctgttttattggttgctgtatatgtgatgttaggctgttaatttgggatatttctatctttttgatatggacatttactgctatcaacattcctcagcactgctttagctatgtcctagatattctggtatgttgtatctttgttctcattagtttcaaagaacttcttgatttctgccttgatttatttatttgcccaaacgtcattcaggagcaggttgtttttccatgtaattgtatggtcttgagcaatcttcttagtatatagctctattttaattgtgctgtgttttgagagtgtggttggtatgacttctggtcttttgaatttgctgagtattattttatgtctcattctgtggtcagtttcaaggtggagagttctatagatgtttattatgtccatttggtcaactactgagttcagatcctgaatatatttgttaatttttttactccatgatctgtctgataattccatttgggtgttgaagactcttgatattattgtgtggttatctaagtctcttcatagatccctaagaacttgcattatgaatctgggtgttcctgtgttgggtgcatacacatttaaaatggttagatcttgttgaattgacctgtttaccattatgtagtgctcttgtgtctctcttttagactctgttgtcggctaaaagcctatgttgtcttaaattagaatagcaacgcatg

SEQ ID NO: 295846 - DNA, 440 bp, Homo Sapiens
ttggctaggtcttgtgagtttattcatccacccagcttccatcaaggaatgtctgtatgacatgatgaaatggctaggtgtcagagtttacagtaaattttttctgcactttggcaaaaatattgttagtaactcaaagtaatatattcatgtattagagttaaaatgtactttaacatcatcatggatcctatggattataatcttcattaatattgatatttcttgatattgatatttatgtcaacattaactaatgtaattgtctcagtgattataaaggtttttgtagggagatatatacataaagactcacattccataattaactggctcaagcggtaaattgtactgaccgctgggattttggtgaagcacagtttgtgtctgttcacgacccaagctttactagaaaagagacacctaaattgaataaattt

SEQ ID NO: 295847 - DNA, 161 bp, Homo Sapiens
gttcgttgcacaattgatgagcatgcttctatatgccactttgtacaaaagttggtggcttcattactcgtctctgtatgtggaagtgatcacacagctatcagctacataggttcagttaagaggtatatgtgttgagtgtttgggagatgaacatgaaa

SEQ ID NO: 295848 - DNA, 744 bp, Homo Sapiens
ttgggaaagcaggaatcaccaggacgccctgtgggttcacagagaaaatactctttcaagagaatcttgtttccttccttgataggattaagagaccggtagaaatgagggagatcaagagtttatgaattcagtagggcatttgataagttcaatggggttgacatgaatttggtgcatggaccattggatggcttggggactggttggatacggttcttcagaggctacaatttaatgttctcagagagaggttctgaattcaggacttcaagcctctatcctttgcaaagtcccattggacatttttatcactggcttgaatgaaaataaagaggccatgtttattgcattcgtggataggctgggaacaaagatgtcatgactcagggtcagaatcagcatccaaatcactctcactcctagactagaagcaatggcctggacccaagaatatgcaatggaaagggaaaggagctatttctggcacccaagagctacttgcccaggtacagaataaggaaggcatggcctagcagcagacgacttaaaaaggtgtgaggggcttttgttgacatgagtcaatggtgtgctgtgtgtgccaaccacccaaccccaactcacctcttccacaaaaagcttaactttgtctgaggttagagtacagaatcatatccacaagtttgaagtgaacatccactgtcttcagtgctaatctgatggttccagggaccacgttttaaa

SEQ ID NO: 295849 - DNA, 468 bp, Homo Sapiens
acacttctattttagttcatttattggcttttcagtttttcttttatgtgtttacactaggaattataaaatgtatcctttatgtattatggtctattatatattggtactatatgatttaatattaaatgtaagaactttacaaccatatatttccacttactgtttctcatattttgtgatatttgcttccattctgtaataagtctcacaatacattgttattatcttcactataaataatcaattatattttaaattaattaagacataggaaaaatctatattgcctgcatatttaccatttcttgcattattcattctgttgtatagatctgggtgtgtaaatggtttcattttctttcagactgaagatttttcttaaaatatttcaaatgtatgaagcaaatcttacaaatggaagacagaataacaattcacaattacagtggaaaattactttcacct

SEQ ID NO: 295850 - DNA, 554 bp, Homo Sapiens
ttggctgcaccttccttattctgtttctaatcctgtaaactatcactctttttaatttatttaactttccattctgtcttttgtaaaatattagtaaaggcacatatcttctctgttttcaccccctttcttagacaaaaggtattaatagtatgctatgaataactgttctacatctgactcttatcaggagaataatgtcttgtagatgactccatggctgtgtacagacatcttccttgtgcctttccacaactgtgtagccctccattctggggactgtgatggttggcagaatgctaaagatccccctgcccccaaagccccaccatcctggccattcaaacaccaatctagatacttccgctggtccccaacttacattaattcaacttgcaattttatgatattttagtttgcgatggtacaaaaacaatattcagtagaaaccatatatggaatactcgtacaaccattctggttttcactttcagggtggtattcaataaattacatgagatattccacactttattataaaaacaggctttgtg

SEQ ID NO: 295851 - DNA, 134 bp, Homo Sapiens
ttgcacaattgatgagcatgcttcttatatgccactttgtacaaaagtggatgatatttaatatacactgtctctatatatacatatatctacctactttgaaaatagaacacaatggttcatgatgaatcaaa

SEQ ID NO: 295852 - DNA, 403 bp, Homo Sapiens
  misc_feature (45)..(75): n is a, c, g, or t
  misc_feature (185)..(316): n is a, c, g, or t
ttggcaggttgcgagacaaagaagagctgagcctctagaaattcnnnnnnnnnnnnnnnnnnnnnnnnnnnnnnngaggcaaggtctcgctctgtcacccagtttggagagctgtggcatgattttggctcactgcagcttcaaactcccaggctcaagtgatcccacctcagcctacccagtannnnnnnnnnnnnnnnnnnnnnnnnnnnnnnnnnnnnnnnnnnnnnnnnnnnnnnnnnnnnnnnnnnnnnnnnnnnnnnnnnnnnnnnnnnnnnnnnnnnnnnnnnnnnnnnnnnnnnnnnnnnnnnnnnnnggtgagccaccatgcccagcctagaaattcttaaatagacattaactataccttgcttaaaagtgctgtatgataccatgttcaatt

SEQ ID NO: 295853 - DNA, 372 bp, Homo Sapiens
ttggtgcagcgtgcccagaagcaaaggcactggcgtggagcaccctcaccgcatggcgcgtccccctgcggtgccgtcacggaacagggttctgaccatctcagacacgcgttagctggttattatccttatttggagggtgtccatgaatatatgacttgaatttgcaattttgtgcaacaaaaatatgcttactttattgtctgcattttgaaaagattaatatgtagggtatagtgttaaactataggcatgaagaaattatataccctaacccggtgttgttttacacattaagaacttgaacacagagaagttaagttacttcttccatgttgttacaaatagtcaatgcgagggtaaaatgtcaat

SEQ ID NO: 295854 - DNA, 115 bp, Homo Sapiens
tatttggaagaggagaggagtgagataaggagagattgttggaggggcaataacagaccatcttcactagtgatgctgaagagtaaagctgacactgaaagagggtatggatgtg

SEQ ID NO: 295855 - DNA, 395 bp, Homo Sapiens
ttgggttggatttcttccactagattctcagttttgacagagaaggggtcgtgccttatttatccttctgtcttctttatggaaatagacatgtagtagacagtgtccttttgtgatagccgcctatgggtgtggcattttagaaacatatctagaagccatcttgatacccacatttgctccaaagaatttaatattgccgtatcagtaaactcttttattagggggtaaacacaagtgtgtaagacaagttcaactacctatctatgtgttcatctatatgacctttttttccctgatctctgaaaaagaaactcatatatgaactctttactgaaaaatatgtagttcattaatatgccgatgaatatcaaggttaagaacacaggttctca

SEQ ID NO: 295856 - DNA, 708 bp, Homo Sapiens
  misc_feature (47)..(55): n is a, c, g, or t
  misc_feature (242)..(267): n is a, c, g, or t
  misc_feature (421)..(457): n is a, c, g, or t
atgagccaccaggtctggctccagtgaagattttaatgaatattccnnnnnnnnnctttgaaacctctccagcacaaaagtaagataacttactttaatagtgaagacaccaacaattcacaaaggcctacaatagttgaaagacattttctatagtgtctatttttaaccagaattatcattcactagaattcttcaaaaattatttctatttcagtttcaatatcttcctttctgggtgnnnnnnnnnnnnnnnnnnnnnnnnnncatctacttttaaaaaataagtaatccataaagggaatcaaagtaagaaaaacaaaattatggctggatagcaagcaatgagcttgctatgtgagtcattttcttccttaaagaagaatgaaatctagacaaatttattctttccaactggttnnnnnnnnnnnnnnnnnnnnnnnnnnnnnnnnnnnnntcttcaatgtaaagtatttaataaaatgaatgaccatttacatgggtggaggctgaaactacccttgagaaaaaacttagttgtcacagtaactatacaagattctgggctcatcacaaaaactttattatctatgtagccattaagactgcctgggaaaagaagctagcatcacttaggaaatctgagggaaagtaagacagtttgcaaatgatccctctgtcaaagagatttgacacataaaaaatatg

SEQ ID NO: 295857 - DNA, 735 bp, Homo Sapiens
ttggggctcccaagtgtacatccacatacaacagtttgagtctgaaccacaataaacttaactagccatctgcattgattttttttacccttcttggcaaatcaatttacaagtgtcatggaagaaatattaagattacagaaatagctttcttcagcttttctccccatcttcaaggggtaagtagcattaggaaagactgatagccaaaatatttgcattcaatatcagaggcaaaatcaaaaaggacagctctgcattgtaattcttcctacatagacaagtgacaagagaaaccaagctagtctaatcagaggaatatttccactcaagtgtcaattcttatgatcaaaaaacataattttttaacttatttatggattcacattggtaattgctatcttggaaaagatcaccttcccagtataagtagtgtccttaaaataaaaggcattgttattttaacagaatacatcatctatgaccttgttgccctagaggctgcttgtggggcctgaaaagccagagcacagatgaagggtatatttccccaagtcatgctctttgacagttacacctgacccattgaacaagtgaacaggttttctcatttgcttgtttgatttcctgatcagaggcgtcattcataatatgtacatacagatgagcctatgagtatgtgtggcttgttcattaatcaacccagatgttgttaatttgcttaaatagggttat

SEQ ID NO: 295858 - DNA, 900 bp, Homo Sapiens
  misc_feature (147)..(156): n is a, c, g, or t
ttgggagaaaagctgcccctgttactgtgtttaaagtgctctgaacagcatggccgtccaggagccttaatttagattcccaaatttgatccaactttaaaactaaaataaaatcccttgagcaaacagaagttgaatgtacacaannnnnnnnnngacctttcaatctttttcatttgggtgtttttttaatttggatcattcacgattaggtttcaaagccaaatttgctcctttaaatgagaagagaagaataatttccactttgtaatggatgatggcgtttaaatattggagaccaacatattctgtctttcttaacatttaaggatacgtccataattctcttccctactggcatagtttctgatataacaagagtaatattacttctataattgttcttcagatttcttcccaaagagttttgacattagctgttatcaagggggtaaaatcacccagcctgtctgataaacatgttttcttatatccccaccccagcaagtgctgtgacactatacttttatcaccccgtgtgtgttcagaatgagcttagaacagcaattgccgggaataggcaggcgataaaccgcattgatttaacacatcttgttttcaatcatgcttggattttctgagcacgcatttttcctgtactctggcttgtagcttttatctgacgagctgatcccttttcactggaaaatgaaaaggtcgcacaataagacacggtttactggaacttgaacacgcaccagggaaagtattttagataaatactgtcagacatagtggagctgaatttcaacaacacaattgctaaacaacaatacttattactctcctagaacaagcctaccagtgacttatggctctcagcagggacagcaccgagtc

SEQ ID NO: 295859 - DNA, 358 bp, Homo Sapiens
  misc_feature (118)..(126): n is a, c, g, or t
  misc_feature (129)..(230): n is a, c, g, or t
  misc_feature (253)..(265): n is a, c, g, or t
ttgggggtggcaagaccattcaatgaggaaagaacagtctcctcaacaaatgatgttaggaaagctggatatccacatgcaaaagaataaagctggaccctcatcatacctcatattnnnnnnnnngcnnnnnnnnnnnnnnnnnnnnnnnnnnnnnnnnnnnnnnnnnnnnnnnnnnnnnnnnnnnnnnnnnnnnnnnnnnnnnnnnnnnnnnnnnnnnnnnnnnnnnntttagtacgtcattgaaagcatnnnnnnnnnnnnncagagaaattacacttcatcaaaattaaacctttttcactcaagagagtggaaagataatccacagaatggaagaaaatatttgcacgtgatg

SEQ ID NO: 295860 - DNA, 869 bp, Homo Sapiens
  misc_feature (235)..(284): n is a, c, g, or t
ttggctatgatgctggtcccaggaactatgttttgagtagccagctctggacaataaggaatagtttggggtgtgtttgttggttgatttgttttaacaattagaactgtcaaaagatggggaggagaatctgtcaaaagagacagaagtggtttctcagaaagtgccaaatatggcatgtagacggaataagatctttatcctaactctaccacttagtaactaaatgtcttgnnnnnnnnnnnnnnnnnnnnnnnnnnnnnnnnnnnnnnnnnnnnnnnnnnagtccaacttgtaagaatggtgataaaaatcaaatgcactaagggacctaaagtgtctctcacagattacgtgcaagtcaactactcaatataggtaagtttccctccctgacctcaaccaccccttccatcactggagatgttcaagcagtgtttctaacaccaggcatgggtcaatgaaacctgaagccagtcatttccaggatatcagccccagatagatacatcagtatcattcaaatctgttattattgtgaacacatctattttgcccttatgatagatcaatggtctggaattagaagctaatgacaactaataactgaataaacagttcaataatgaagtccgtgtgtgcataaagatgtttccatcaacattctttagaaagggcctttatactaataccttccattttatacagtcttttaagttttttgagagctttcagttctattatctcatttgagcctaacgggactctaggagtgaagattataatccccattttcaaacaaagaagctattttgtgatttgcccaagtccccacaccactgagcccaggaccaatcccagaaccccga

SEQ ID NO: 295861 - DNA, 837 bp, Homo Sapiens
ttggtaagttgcagtccaagtccaaggaccttagacctaagagtgtggttgtctaagggcaggataagttgtatgtacaagctcagacagggaacaagtttactcttccacttttttattctacttaggcctttaactgattggatgatgcctactcacaatggaaagggctattttctttattctgtctactgattcaaacgctaatgtcttccagaaataccctcacagaaacaccgagaagtgatgttttaccagttatttgggtattccttagcccagtgaggttgacacataaaattaataatcacccaatatgagaaaaaaattaattagatcacaaatttatatcatataaaggcatattactttgaatctataaatttctttgggaagcatgtccacttaaaaaatgttgattcttccaatccataagcatggaacgtttttccatttatttgtgttgtctctaatttctttcagcaatgttttatagctctcctcatagagatttgtcagcttcttggttagctgtattcctaggtatttcattttctttgtggctattgtacatgggattctgttcttaacttgactctcagccaggacattattgatgtatagaaatgctactgatttttgcagattgattttgtatcctaaaactttactaaaattttttatcagttctagtagcattttggcagattctttatggctttctaggtatggaactatattgccagtggagagaggtagtttgccttcttttcctatttggatgccttttacttccttcccttgcctgatctctctggctaggacttctggtactat

SEQ ID NO: 295862 - DNA, 476 bp, Homo Sapiens
tttaaatgagcatgaaacaactagaaatccttagacctattgtcggatcataggactcttaagtgtttaggctttagaaatcacccctaaggatgtgggggatattggccttcctggattcttaaacccagatcatgaaataatggggactgtctgaacattttaaccactctattaatacatatcttgaaaacctctaatttctcagaacccatttttaacattcttcatgcttattacaaccatcaatttaataaaaaaccaatttctgatattcatggtgctaattaacaaagctgctgtgtgctattaatcaatattagcaggacttatgatagctaccactctagtatgggctttacgtgagctactaattagggcaactgactgcactagtaatttaacctagcatgtaatatcgtgcttcttatgctggaatattttaatggtttataacaatggctaaagacagtagt

SEQ ID NO: 295863 - DNA, 921 bp, Homo Sapiens
  misc_feature (115)..(123): n is a, c, g, or t
  misc_feature (288)..(461): n is a, c, g, or t
ttgggggaaggtttctaagcctgtagcctgagtcatgacaaaataggagggtagctaacaattattgaacactttctctctgctgcatgctgcgtagaattatcataagcctgannnnnnnnncaaaagaaatcaattgtaatacaaaatagcaagtcatatgaattatcagtggtcatttagctaggaagtggcagaacaggattcaaacctggacagctttcattgcagagtctgtgtgctgacctccggcagggccatctgcaatggcgagtcactatagttggnnnnnnnnnnnnnnnnnnnnnnnnnnnnnnnnnnnnnnnnnnnnnnnnnnnnnnnnnnnnnnnnnnnnnnnnnnnnnnnnnnnnnnnnnnnnnnnnnnnnnnnnnnnnnnnnnnnnnnnnnnnnnnnnnnnnnnnnnnnnnnnnnnnnnnnnnnnnnnnnnnnnnnnnnnnnnnctcatgttttaaaaatcgtcacttcaagaaaatgctgtattaatcatagggctgactgattaaagctatcatgccataggcttctcaagcaccttcacaaagaccaacatcccttcacagaaatgatccacattcaacaaacattctagctgtagcttgacttaatgatcatggtctttcgcatttggcctggaatacaaattcactccatttcccaactctccagttggtctatgccttcagtttcctcatattaaaatatagataatgatggctggtctcctctctcacagaaatagtctaaggaattaatggagctaatataaactcattcagtcctggaagaaaggcagtatataaacactatatatatttaagcagtacttttccatgtgataaagcctttttctttggtcatcaacatgtgcttttctcaaagatttttgatcttaaaagtttc

SEQ ID NO: 295864 - DNA, 673 bp, Homo Sapiens
gtgtgagccactgtgcctggcctactttctatctttatagatttacctattctgcacatttcatgtaaatggaatcatacgatatgtattcctttgtgactggcttctttcacttagcacagtgttttcaaggttcaaccatgttgtaccatgtagaagtaaatttcttgtaatcaccaaataatgtttcattgtattgatataccacattttacttatccattaatcagttgatagacttttgggccattatgaatatgctgctataaatatttgaatataagtttttatgcagacttatgttttcatttctctttgttatatacgtaagagtagaaatgctggatcgtatggtaagtatgttgaaccatttgaggaactgccagcctgttttccaaagtggctgtattattttgcattcccaccagtgatctaagagggtttcaatttttcaacattcttgaaaatacttactgtcttttttattctagccatcctagtgggtgtgaagtggtaatttattgtgagctgagtcacatttttgatagcatcaactaagtcttgtgggatactgaagccctctgcacacctgattctcagtgagttcaagtctaagtccccaggctccctcctgctccccagacctcaatacaataaatgtgatcccccaccc

SEQ ID NO: 295865 - DNA, 441 bp, Homo Sapiens
ttggcacagaggcggctcccatattgaaaggagagccagcatcagtgggcacggctgccatgggagtcctccctgctgggggctcaggggatacccgcaaagtgccctctatggaagggtcagactagaaggggtgtgtccacccaggtgtgtctctggggtccctctgctgctggtcaccctgtaagcgtgtggcccagtgctgagccccctgacgcctggtcctctgtcggccttccctagggatccaagttcaccccgaaacagaactgatgacctgtggcctcatcagagcctggctcactgcaaacgtcatgctgctcctcacaggcctttacatgggccacacacaaccctgtgggccacagcacctcacagcacagaagactccctgacctcactacaggcctatttcctttgcctcattaaaaatgtattgga

SEQ ID NO: 295866 - DNA, 851 bp, Homo Sapiens
  misc_feature (302)..(332): n is a, c, g, or t
  misc_feature (391)..(409): n is a, c, g, or t
  misc_feature (416)..(676): n is a, c, g, or t
  misc_feature (702)..(766): n is a, c, g, or t
ttggcttctgtttacctttgttttctcatctcctgtcattgtccactttgcttttctgctgtagtcactcttttatgtttctcaaatttgccaagctctttctgatggtggttctttgaatttgtaccctttgcagaacttttatgtctaagatcttatgcacatttctaaacttcattctgcttttttgttattctccccttaatactttatctaaaatttctatttgattattccatatatatccatctcatttaacttttctcaagagcacataaagctgcatggcatgtatttgatannnnnnnnnnnnnnnnnnnnnnnnnnnnnnnatttgtattcttttttacactttattgtaaggtccagtagggtagagactttgtcttcnnnnnnnnnnnnnnnnnnngagacannnnnnnnnnnnnnnnnnnnnnnnnnnnnnnnnnnnnnnnnnnnnnnnnnnnnnnnnnnnnnnnnnnnnnnnnnnnnnnnnnnnnnnnnnnnnnnnnnnnnnnnnnnnnnnnnnnnnnnnnnnnnnnnnnnnnnnnnnnnnnnnnnnnnnnnnnnnnnnnnnnnnnnnnnnnnnnnnnnnnnnnnnnnnnnnnnnnnnnnnnnnnnnnnnnnnnnnnnnnnnnnnnnnnnnnnnnnnnnnnnnnnnnnnnnnnnnnnnnnncgcgcccggccgagactttgtcttcnnnnnnnnnnnnnnnnnnnnnnnnnnnnnnnnnnnnnnnnnnnnnnnnnnnnnnnnnnnnnnnnncctgattttacaaagcaagatttgttgaatgccgaatgaacacatgctgccagctgatggaagtgtaactttggattcatgggga

SEQ ID NO: 295867 - DNA, 860 bp, Homo Sapiens
ttgggaggaggaatgcattcttaacaaacagctctccattcctgcaatagcttcttcattctctgaaaacatctaaagctaagaaaagaattcatttttagtaaaactccaaaaatggaacaaacgatatggattttcagcatgttttaaacatgtaaaaccttgttatatatatcccaggtggagattttttaaaattacataatttacttttcattaaataaattaacatttcaaatgcacgatctgtacaataggaaactgtaccattattttaatcgggttattcaaacaagttcactggctaagattatacatttctcagtttcaatttcagatatacactttctgcacaaggttatatagttatttctgacaagtaacctttacatttttaagtaattatattcctaaaaagttatgtataagctgaaaatttataaatggactccactgcattaaagtctatttaaagaaagcttattgtatatcattttataaagaatgctctcctcgtgaccacacaattatttaaaaactcatttgtataaatttggatagccatagactgagtaaaagcaagaaaacctgtacaatctaccccctacaaaataggagccacttctcacctgatattttgctgtccctactcaaatctatgacatcttcaaacaaaatattaagatgttaactatctaaagtaactaaaatccagtcaccttcactgggaccagttgtcatgcaagagagaccaaagactgtgtcaccaacacttcaaaatatttccttacttctcacctaaaatatttgaagaccctctgagatagagctggagaaacgtaaaaacccatgtcttaaaa

SEQ ID NO: 295868 - DNA, 114 bp, Homo Sapiens
aaaaaagttggcacgtcccaaggtagagctggggttgtttccagggatcttacagaacttaggtgtgatactgagcatgagctacttgtgttgcattttggtgttcaaaagaaa

SEQ ID NO: 295869 - DNA, 558 bp, Homo Sapiens
ttgggaatctttgtcgtgttccagatcttcagagaaaggctttcagtttttccacatttaatatggtactaactgtgtgtctgtcgtctatggcttttattgtgttgagatattttccatctatacccagttttttgagagttgttatcatgaagaatgttgaattttatcaaatgcttttcaagcatcaattgaaatgatcagatgcttgttgcccttcattctgttgaatgatatatcacattgattgatttgcctatcacaaaccatccttgcatccctgggataaatcccctttagtcatgttgaatgtctttttaatatattattcaatttggcttgctagtattttgttgaggatttttgcatcaatgttcattggggatactggcctgtagtttcttttttttgatgtgtctttgtctgattttggtatcagggcaatactggccttgtagaatgagtttggaaattttccctcctcctctaatttttggaatagtttgaggaagattggtatcagttctttgttaaatgtttggtaacattctgcagtaa

SEQ ID NO: 295870 - DNA, 179 bp, Homo Sapiens
ctaactccgaaagaaaaaaccctctttgtaaaagctcatgatgtttgaggttaccccgacgaggatgggaggaactcatttcaaacagtcccccgtctgcaatatcttctacacccttatcaaggcactttttattttttaagctccaagcacgtggttgattttcattccccgccccc

SEQ ID NO: 295871 - DNA, 851 bp, Homo Sapiens
  misc_feature (49)..(58): n is a, c, g, or t
ttggggaatatgcttgtatgtttgacatgcaaacaaagcaagtcagtcnnnnnnnnnncttatgtcctgcctgcctcagtcactcatcttgggtgtcatgtgcactgacatctgtaaccactgatataggccctacgtgaatgactggcctagctatcgtgtattgaccagataggctaagttatgttgccataagaagcccaataataacaaatgttatctcttatttatccaacatatcctaagagtcagctgggggctgactgaggtctcttctctcttgctgatagaacaataatcatcccgaatattgccagtcacataaacagaacaaagctctgaagagttcacacataggcaactaaatgctccaatatgaaaatgatacataatatttctactcataactccttggccaaaattagtaaagtggccctaactcaaccacaaggaaacacagcccactttctgcctaaggacaaagggctggaaataagtgatgagcagcactgatggacaacccataaagccagcaataacctgaccttaagaaggctaaccctgcccttggagcatgacgaccaaccattggtggtcactttctgatgtgtggctttgctggatggccagagtccaacagagctgtcattcatgcaaagtgtttgcacaatagagagcccaaaactttgttgcttatttttgagtatttctagagaagtataaagaactgaataattcttcagatctgtggctaaccatgagtcctatatatcttaaccatcaatatcatatcaataagaatgatactctcctcatgaatttaagatactctgttatacctggggcaatgg

SEQ ID NO: 295872 - DNA, 856 bp, Homo Sapiens
ttgggcccagccgagcgtcacagtgcggcccacacgccggcctccaagcacccgcggatctgcctggagaccagactttgttagtaaacttcctagcgatggcccaggcacacagagaacgccgctggctgcaacagccacaccatggcttccagcagccctactctctgtggccaccgccgtctgcggaggagggaagagatgctatttgtcaaaggtctttatgtttgagttttccacgtggtggttgggagggaccctttcccagagcgtcccctgcctgccctagctcctcgccccttcccagggcaaacttgagtctcaagctgcaggcttgtggctgattctgcttttctggtcttcagttgtttggtgctgggaaatgaattcgctctcagcttctgcaggcgtggcaggcaggtggggtaggaggtcatttttggggtgagggtgctccgaggggctgatatttcaaagtgttctacatgacctgggggtagctgtcgtctgttgtgcgtggtggtgctggggtatctgtgggggtgggactgacttgacatgggcagcagagagacactagagtaaagggccactagtcagagtgcccccgggaggctcctgcaccattccacacaggcatgcagcttagcgcctgccagagtccacgtttgataaatatgtgtgcctggttatgttaatgccggggggtgggggcacgtggtgacatgaggattccacaggggccgctccccagaatgtgagcccgtgcgtagaggtgcctgcctccttccccatgggtggggacacatatgatggagcatccccatgtgcccacccacggggaactctccacctt

SEQ ID NO: 295873 - DNA, 205 bp, Homo Sapiens
  misc_feature (75)..(83): n is a, c, g, or t
caacttaaactgcaaaggtgtgaggcacctgctatcccaggaggccacgaagaagaggcaagacaatttctagannnnnnnnnctagagattttattgaatggaatagcggcatcttactcaggtcagagtggtaaagagaatgcaccaatcccttgtttttttggaaggtcttaaaaaagggtaaaagtttaaccccctccgcc

SEQ ID NO: 295874 - DNA, 941 bp, Homo Sapiens
  misc_feature (134)..(302): n is a, c, g, or t
ttgggtatctgtctagtagtttccacaggctaaattcataaaagaatagtcacaccaaagaatataaatattttaacgtttcagaaacctacaattcccatgttaggaggagtgctgttcagagctgtcagaannnnnnnnnnnnnnnnnnnnnnnnnnnnnnnnnnnnnnnnnnnnnnnnnnnnnnnnnnnnnnnnnnnnnnnnnnnnnnnnnnnnnnnnnnnnnnnnnnnnnnnnnnnnnnnnnnnnnnnnnnnnnnnnnnnnnnnnnnnnnnnnnnnnnnnnnnnnnnnnnnnnnnnnnattctagatcaagtcagtattacttgaacttttaagagtaaatgtgccatatcaagcatgccttttcttaattaatcccaaacgcaaccttgacattaaagaacatcatctttcctatcaaagagcttttaggtactctctctctcaagtggtcttcacagtaccttctgagaaaacaagggcaggcgttatttttttccatttcatacatgatgaaaactggagatcacagaggcaaagtaattcagagtaagttaaaagaggcaaatggcacacagtccatgttttcagctctttgtccaatgttctttgcttataaaattagtctacattacctgagccttacacagatggagttctgccaaaactgagctcaatttcttgccacctagcctttgcctatgtggttcccactgccagggatactggtcttgttcctactcctttgcctacctacctgctctttatcttccagaaatcagcttagatatcaccttgcttcctccagcaacctttctctgactatgcacccccaaggcctgtgttacgtatcccattctcaaaattctgtagcattctattctcaccctggcataatacatttcttccttcctcacaattgcctatttgtctttttaa

SEQ ID NO: 295875 - DNA, 383 bp, Homo Sapiens
ttggctttaaatatcctgcaccctgtgttaggccttcctggtggtaactgcaggcagtgatcatgataaagtcaagtcatctccttcgagtttagcatcctctggttgccactctgcattgcttgaacataggctcaggggacagtactctggggttctgccccaaccaccttagtctggtttatactcagctgcccaacagctgccaaaagcatgagtctcacccctgtgccctttgtgaactgcaggcaagtattcatgttttctgtaagtcaacaccaccaggcttccctgtgattttgattctatgggtagatagtgctaatgagtgtgaggatttctgaaactaatagttcatctcccaaattactaaaaaactaaag

SEQ ID NO: 295876 - DNA, 183 bp, Homo Sapiens
ttggggcagataaagaggcaatgaaatttggagtctttgaccaaggtcataaagttagattttgatatttaaaattgtactctataatccctgacttcaaggtcactgctctgtctacattaccatattttctctcagattaactccaaatgagaagttgtgtgtaaattattctttgtgtgg

SEQ ID NO: 295877 - DNA, 103 bp, Homo Sapiens
ttggataatatatccacactggtggactgtaatttcacaaatacatagtaataatcaaagcaataactaagaaaatatacaaggagatacctctaaaaactac

SEQ ID NO: 295878 - DNA, 815 bp, Homo Sapiens
ttgggactgatttgtttgcaaaataagcattagtcctatcatacttggcctggttatttgcataaagcacagcaagaataattatttgccatataggctcctttttaaattggctttgatgaaacttcattccataaggtatttcagataagacgttttaaatgccttgagcccagccatgggtttctgccatcaaatacctgtatgaattgggtaaattcctctcctcttgaggtcctaaataacctggggctcctaggcctgtcagaaagtgacattctttactccccatggatcaggaaccctgtacagggactgtgtagacaaggtatgagaccagttttcccaaggggtttttattggctctataagtcaaatttgattccttaaaggagagcatgccattccagtcaaacccttggtaaaataaccagtttctccaattgtgccttgttgcaaaagaaaacagattactattgcacttatgcaaataactgtattgccattagttaagaatacccacaaatagtttccaaattctggagaaatcaggtagagagaaatatgctccaaattttgtttacaggagtacttatttttaaaagctgtaaatagctcaaaagaaagttttcttgactttgaaaaacaaaggatcagcaatgtttcaagcaaaaagtcataaaaggattattttagtcttcttttagttcagtccatgcagttaactcctgttctgcctggtatttgtgaacatttcagctctccatgagagtcctgaaagttctttctctattctaatgttacaatctttaaag

SEQ ID NO: 295879 - DNA, 152 bp, Homo Sapiens
ttggcgcctcacccgccaggcaatggtggccgcagcctcctgacagggatgcagggagattgtgcacgcagcgctcatcttttccccaccatagtgttttcccgccttttggctatagaatcacctctgttttggggttttaacagggaaaa

SEQ ID NO: 295880 - DNA, 688 bp, Homo Sapiens
  misc_feature (158)..(217): n is a, c, g, or t
ttgggctctccataaggaaaatgttggattattttacctataggacttatagcatttcctgtaagtaaggagggttgtagatgaaaacatttcagatttaaaatgataaaaggattatcaattgctatgaagatggcaaatcccaaaatcaactctgnnnnnnnnnnnnnnnnnnnnnnnnnnnnnnnnnnnnnnnnnnnnnnnnnnnnnnnnnnnnttttttaacttaagaaacccctaaacaaaggctcatttgtttatggggcatttagaatgggaatatacggactgaagaagccagaagcaacgagagaatacattcaggaaaaagaaaaattacattttcttcctatctttcccccatatttgagctaatatatgtccttaatatacatctttattcccacaggagcagtagccttggcccaaggtatcattagtgtaatattaaggcagcatcaaagctatgctaagataaggaagtataaactagataggtcttgggcttttattcctctatttttctctcccctcaaagctaagactcaggacaatgccacctcccaaatagtgttaagagtatatgcctaaccgtgggaattgtcaggtacaatggcaaaattaagatagagtaatgtaacactggtactctgttatctgaagctctctacactttggcttgtcccat

SEQ ID NO: 295881 - DNA, 838 bp, Homo Sapiens
  misc_feature (451)..(459): n is a, c, g, or t
ttgggtcccactaagtgtgaaatctggaaccacagggctgcactacccagtgcctataaagggaagagaacgtgtggtacagacacacggtggcatataaaatttttatgactttttaatgaagcttcttcacagtgacctactaattgcctatttagccagatattcaaggaatacatttagtactttctatgactctaaaaatcaatgagaatatagtcgataaattttgtaagttaatggcaaacataattccaaccaactacaatgcaaaataaaaccaattaacatctgttcaccaatcttaatctaatacatgttttggccataagaaaacaaatatattcacaagagcaatggtatgtgtgttttatgttttggtggcagaagttacttcatggaagcttgcagtaataatcataaaaataatcctagtttcctaccactctgnnnnnnnnncaggacttactgattgtaaagaatgagatttattgtaggattattttactactgtctttaacagagattctcattttaaaaagtgctaaattatagttacataaagctattttaatgtgtttgaaaagtagtgtaggtatttctagcagggagaaagggataaatatgtagcttaagaggaaggatatcaacgattattaagaatcgatcatatttcagaggctgggcttctggttcttactctcattttctcacaagaaccctataggaaaggagcatcattctcatcttcttcagacaggaaaagccaggctcaaagagcttaagcaacttagcaaacttgcccagcaagacctggcagtgccatgatctaaactcc

SEQ ID NO: 295882 - DNA, 743 bp, Homo Sapiens
  misc_feature (581)..(592): n is a, c, g, or t
ttggcttagattgtatttgtagttaaaattgttatttaacattcttgcttccttattctcaagttactaatttacaaaaataatgaaataaatattactattctctggaaaaaagatttgataacacaagagatcaagggaaactccatcctgggactttgcctagcatttctgttacgccttagcagtaagtcagatactaactaaatcacaaacatattaacgattacaatgctcacttctagggagccttgtatcagttaaattgcgacaatgttgagtgacagagtcttgcatggattaaattataatttcgttgtatttgaggaaagtggaatactctgtggatcaatctggcctgacacaggcccatcatttggtttattgaacaagcgaaatgaagtacaatgggatatgtgatttcacattagaaacttaactttcctgtggaaaaatggaatttcagaaattgaaaatatgtgtgagtatgtttaccatggttcagtcaaaggaattctgggactcatatggcagaaagagacatgagggactctgaaccccaatgaatccacttatttccnnnnnnnnnnnncttgagacaaggacacactctgtcatccaggtgggagtgcagtggtgcaatcatgctcactgcaatcttgaaatcctggcctcaaccaatccttctccctcagccgccccagtggctaggaatacagatgtgagccaccatgcccagatag

SEQ ID NO: 295883 - DNA, 719 bp, Homo Sapiens
ttggcacactacgtgtagttgggtgccagaggcttcacgtggattacctcattttaatctttttatttatgggttaagggttggcatctccggtttccagagacaaggagaaggtaaatcgtttgctccatgtcacaccaggtttctctaacgccaagtctcttgctacactgtgggcatgccacactgcccacactcccactcctactctttagagacatcaggggcttctcttctgccttcaggcttcctgacagtagcagtgaaaagaaaatctcccgatcactgacagcaatgatgccaggccttttttggtaaaagggccaattcagtaaaagaaaacgtgtttatgggctgaatctttttttccattgaaagttaaaataactttaccgaggccctgagggaaagtggatgttcttacaacctaaagagtctgctttgttaattaaagatggttactaagaaaattgttattgtttttagcattaaaatattgctgctgagtatatttgaggaataacaacatggatgaatgtagctttataatcatttttcctgtgttaatttgtatatcactttaaagtttataatgaatgttctcatgctgctggtatcattaccatccactctttttaaaaaattcgtttaaagatagggtcttactctgtcctccaggctagattatagtggcttgatcataactcactgtatgtaac

SEQ ID NO: 295884 - DNA, 811 bp, Homo Sapiens
ttggctaagaacttcctatggccctgaccttgtgtcgagcgccccacatgctccactgcacatggccctcagcacagccttgtgcaatcagctactactgagcccattacagaggagacacctgaggctgggggaagggatgtcactagcccaggtcacaaatggtcgagccaggacttgaatttgtctgaaggctccagccctttatctgggtagtaataatacctgatgggtactgagtgattagtatttgctggcccccgtgctaagaccttcaccttctacttcacctcggaaaaccccatttcctgagaggccaaaagaacttgctcaaggcctcatagcacagccagaaggaggcaaagctgaaattcacatgcagccacccgccaggcccatctggggaaatggagatgaatactctctcccccaacccccgactctgggcttgtcctcacagcccccacctggcatgccaacccgccaacccctattgcacagggaaaggtcaggcctcacgcggcacattccctcacacaatggcccgtctgctgtgctcagttgcattccgcccctgcccacccaccctggccacacaatggcctttcatagcccatcagtggccaggagagaggacatggggaccccttaacactcccacagcacccacgccccccacagtgtaagagggcttctctctgcatctcctatggggtcctggtctctgtggccttccctgggatcccctgtgagccccctacaccttccaggctgtgccaggacttgaacttgtctaaaaactccagcacgg

SEQ ID NO: 295885 - DNA, 738 bp, Homo Sapiens
gttctatcagaaagggaaggaagaagtaaaaaagcttgttttccagaagaaattagaaaagagcgatgacatgatatatatatacccacatttgacccttaagacgaacacacaccaagcatacgggaagaagctagaaatttgaatcactttaataaatatatatggcatatcaattctgcacaaaactgcattaactggtacaatgacacccaaatgaatgtacaccatatactatccccagggcctcacagggataaagaagaggagtgtacatatgcttaatgatcaaaagaaaactagattctttgtcaactttgtcgatcaaagtaaagttctctctgcctgatgagtttaggaagaaggagataatccaacctgaacaacaactacagttgaaactaaggggaagagagtctgacatagataacaccacacagaagcaaaggaagtcaaggaactcacattcactgcttgcccactatttgccagtcactctgttggctggccaccttcatttcaatgctacagataagcagcagggtggggagagcacggatggacaagagtagaaaaatgctgatgaataatgaaataggtgatgagtacacaggtattcatcacactattcttttctgtatctgaattttcatgatacatcttaaaaattcctcagcacatcacataaataggacactccaaaacccggctctgacacacatcctctgctgtggctgc

SEQ ID NO: 295886 - DNA, 747 bp, Homo Sapiens
  misc_feature (235)..(277): n is a, c, g, or t
ttggccagcttaaaaataaaatgtattcaacatttttaaagcccttattttagaacatctaattttaaaagttttgaccatatatcttttcaaggtaataaaaattcctattgtttttaataaacattaccttattaatgttgtgaaattaacatgtgttcattatacagtcattcaaacacaatagaaaatttcaaaggaaaaataagaaccctattcaagctaccagcataannnnnnnnnnnnnnnnnnnnnnnnnnnnnnnnnnnnnnnnnnntacatatataacatattttcagtcagataggatacaaaactatatagaaccgtcctcattgaaggctaaaatcctgttttaggtgatcttaacacacacactaactggctgcttgcatcagatagggctcctcataaaatctagaaaaatcagtaaggacaaaaaaagagatacaactcaacaatgtgaggaatgaattagggaatattcaaacacagcctgcaaccatcacaaagatactaaagaaatactgtatgtaaaattaaattttaatattcaacaacttagaattccttgaaaaaatatgatatcaaaagtcacccaaggtaatataatgtgagtagctgtataaccatttaaaaattgaatttttaattaaagagttccaaaaaaggaaatctttatgccccgatggttttactagatgaatttagcaaacatttaggaaagaaattaacacaaatgtctac

SEQ ID NO: 295887 - DNA, 842 bp, Homo Sapiens
  misc_feature (363)..(643): n is a, c, g, or t
ttggatgatatttaatcttcagactgagacatgtttgagcatgaaagtggctgttaatataattactctgggaccaacgctgtaatctagaattgtctccagccagccaagacacatggtcacctctatgtttgtactcagtcagcatataaaatgtattatagacatttcaatagttgcccagctttgtccctggctttcacgctcccattcccccaatctgtcctccacacaacttcatgaactgtctgaaatataaagcttaccacactgcatccttacccagaactcttcaaggaagccccgtggcctacagcatcacattcactgtcatccaggggccttcaaaatccaggatcctcnnnnnnnnnnnnnnnnnnnnnnnnnnnnnnnnnnnnnnnnnnnnnnnnnnnnnnnnnnnnnnnnnnnnnnnnnnnnnnnnnnnnnnnnnnnnnnnnnnnnnnnnnnnnnnnnnnnnnnnnnnnnnnnnnnnnnnnnnnnnnnnnnnnnnnnnnnnnnnnnnnnnnnnnnnnnnnnnnnnnnnnnnnnnnnnnnnnnnnnnnnnnnnnnnnnnnnnnnnnnnnnnnnnnnnnnnnnnnnnnnnnnnnnnnnnnnnnnnnnnnnnnnnnnnnnnnnnnnnnnnctcaaagtatcctccagctttaccttctccttcctacctccagcccacctgactatcaagtgtttccatcaccacagcatctacattccttgactagagcattcaccttccaaagccagctcaagcatcacccattgaacagcccaagtcaagcactttcccttggtgtcaaacattgacaacagaaatttttgttagt

SEQ ID NO: 295888 - DNA, 221 bp, Homo Sapiens
ttggaaaatatatattagaaactaaaactcctaaataatccttgaatcaaagaggaaatagaaatggaaattacaaaatttttagaatgaaatttttatgtactatataaaaaatgtgtgtaataaagccaatgtacattcatagacataagtgcatgtattaaaacaaaacaatatgaaaaagaatttcaaaatatccagtgtattcaattcaaaaaact

SEQ ID NO: 295889 - DNA, 779 bp, Homo Sapiens
  misc_feature (418)..(504): n is a, c, g, or t
ttggcaaacaccaatactcccagcacctaaaaaatttagggcctcagttctgaaggagaactcaggatggcacagcacggcattcattgcagttagactcaattcatcagaactgtgcctttgcactctgctcgaacccttcaccaccctcagacccaaaccagggctaaggagctcttagcattcaggaattagtaactctatatgcatatctatctttatatgttacattaagtcttcttcactaagactgataaattcatgaggacaaatatttttgtttaaatcactttcaagtacccagtacctttatacattttactggtagcacataatagatttttattaaatatttaatctattaatacagaaatcttgttttcaatgttagctatgtaaatgctagtcagtggtgagnnnnnnnnnnnnnnnnnnnnnnnnnnnnnnnnnnnnnnnnnnnnnnnnnnnnnnnnnnnnnnnnnnnnnnnnnnnnnnnnnnnnnnnatcttagaaaaacaggtatatttgtaacaagctacctatttgagctacagtgcagcattgacccaagaaatttctactgggtttcagctttcatgactcctcacatattggaaataataattttcaattattgaatcgagtaatattcaattattcaaataaaggaaccaaagttcctttttatatcattgtcctccaaacaaaataatctttttcttagttttcttatttggttttctagttgtcgttccaacgtaaaagatttttttaaatgt

SEQ ID NO: 295890 - DNA, 529 bp, Homo Sapiens
ttggctgagatagcagagatgttaggatttcttagaaagatttttaaagcagcaatcataaatatgcttcagtgagcaattacaaacattcttgaaacaaatgaaaaataccacctctcagccaagaaatagaaaatataaaggagaaccaaatggaaattttagaagtgaaagatataataattgtaataataattcagtggatgggcccaacagcagaatggaggggacagaggaaggaatcagtgaactggagatagaataatagaaatgacaccatctggaaaacagaaaatagactgaaaaattgaagacctttgaactataacaaatgatctaatatttgtttcatgagtcttggaaaaacaggagaaaggggttggggctgaaaaatgattgaagaaatattggctgtaaaagccccaaatttagcaaaagacataaacctacatatttaagaaggtgagcaacctccagacacgataaacacacagaatcctcaccttaatacattatagtcaaacttctg

SEQ ID NO: 295891 - DNA, 120 bp, Homo Sapiens
cccgggaaaaaacaccaagggagaaaatcccttctttcaaacccaaaattcccctttaaaaatggggcctcaccaaaattcccatgaaagaaaaaacgcgggaaatattttttaaagggg

SEQ ID NO: 295892 - DNA, 412 bp, Homo Sapiens
ttggccttaaatagtattcttccaccaggtctctgttattgggagcacacaaaaagaaagaggtagaaaagagccaaagacaatcccattagtatgcctacatgtataaacacatatgaaaaaatagtactctttcctaaaagggagaattccaaaggcataaacttggggtatctacatgagttttcattttgttattcatttagcttttagatcattagatttctggtaatgtattcaggttgatattttcatgaaatagtggagcagtgtcctcactttaagcaacccatagttagaggagaatcttcttctttgagacatagttgaagtcatgggatgtaacacattctttatcataattataaaatataacagtgataagcacgatgcatcctttcatcatttgcta

SEQ ID NO: 295893 - DNA, 677 bp, Homo Sapiens
  misc_feature (66)..(347): n is a, c, g, or t
  misc_feature (349)..(366): n is a, c, g, or t
  misc_feature (372)..(632): n is a, c, g, or t
ttgggttaactatcaggggtgacatgccactagatctgcaatttaacttaaaatggttcagagaannnnnnnnnnnnnnnnnnnnnnnnnnnnnnnnnnnnnnnnnnnnnnnnnnnnnnnnnnnnnnnnnnnnnnnnnnnnnnnnnnnnnnnnnnnnnnnnnnnnnnnnnnnnnnnnnnnnnnnnnnnnnnnnnnnnnnnnnnnnnnnnnnnnnnnnnnnnnnnnnnnnnnnnnnnnnnnnnnnnnnnnnnnnnnnnnnnnnnnnnnnnnnnnnnnnnnnnnnnnnnnnnnnnnnnnnnnnnnnnnnnnnnnnnnnnnnnnnnnnnnnnnnnnnnnnnnnnnnnnnncnnnnnnnnnnnnnnnnnngatatnnnnnnnnnnnnnnnnnnnnnnnnnnnnnnnnnnnnnnnnnnnnnnnnnnnnnnnnnnnnnnnnnnnnnnnnnnnnnnnnnnnnnnnnnnnnnnnnnnnnnnnnnnnnnnnnnnnnnnnnnnnnnnnnnnnnnnnnnnnnnnnnnnnnnnnnnnnnnnnnnnnnnnnnnnnnnnnnnnnnnnnnnnnnnnnnnnnnnnnnnnnnnnnnnnnnnnnnnnnnnnnnnnnnnnnnnnnnnnnnnnnnnnnnnnnnnnnnnnnnnggaagaatgagaaagcaccttatgtcatgacatgacacaaacttc

SEQ ID NO: 295894 - DNA, 168 bp, Homo Sapiens
gttcgttgcacaaattgatgagcatgcttctatatgcactttgtacaaagtgggcttttcactactgatatatgtatgaacatctatctactatacaatgcagtttacaaatttgtattcttggggaatgttttataatattttaagactggttagcctaaatctaga

SEQ ID NO: 295895 - DNA, 174 bp, Homo Sapiens
cccgaatctcacaggtcgatgttgcaaagtgccaagattgccccctctcaatcccaccgtttgtcaataaaattggatcagacctcattataaagtccttttaccacaatcaccggccaatgagacctaagaacaccccggcctattgtttctcttgcccacaaaaatctccgt

SEQ ID NO: 295896 - DNA, 830 bp, Homo Sapiens
ttggtgcaggagcaatttgcctccttcagtgggtctgtgggttctctcagctttcctgatttattcctgcagtagttctagagcaaaagttcatgaagtgagcctccacatgctgctctgtccgtccgcgtgggagctgcaatccagtcctgcctcccgtccaccgtgatcctctctagtccccactatttgaatttaactgatgttttcctcatgataagacaggtttgtgagttattgggaggaagaccacagaggtaaagtgccattttcatctcgtcatatcaaggatacgtattataaacacagtttatggttgctgatgttcaccaaaatctccttatttatgtttgcagggactaggatatttattttatactttgagttataatccaatactactttatttatttttttgcttaattccttccatttttggctactgagagctctttcagtggctcctgttgttatagaactgaactggggtccacttgtctggcacagtaaaaacagatgcctacactgaggtttttgcagtgctagaaaggaagatgtttattgcatagtactacacaaggaagatcagacagctaaatgcccaagtctagactccccaatgagttttttaaggcaagggtaaatttcagaaaagcagaagttataggtaaaataataaatcaatatggtggttacatgttggtttgagcttaaaagggcaggatatcttgcagtggtggtttacacgttgtacgtagattcaagaacttctgatttgccattggttaagaagagaagctttgtttaaaaatttggggtccgtggaaaaa

SEQ ID NO: 295897 - DNA, 744 bp, Homo Sapiens
  misc_feature (401)..(549): n is a, c, g, or t
gaaacctttatcatttgaagtcactgagatttggagattgctcgctataacaacataacctagcttatcctgactattataattatcttacagttatttacatgttacagatggagagaacgtttataatgattcaagtttctagatcaaagcaaaataagttatttggccttaacaactggaataaattaccacattttcaatatgattgattatatgaaggcctaccattaatgtgtaccaaaacccaaattaacaaccaaacaatgaattcagtaaatatatcactcacttatttaccatttataaaggaactatgacgacagtatacttaacagatggtgtttggaataggttggcatgagttgtatatactgtttgtggcattggattttggaaannnnnnnnnnnnnnnnnnnnnnnnnnnnnnnnnnnnnnnnnnnnnnnnnnnnnnnnnnnnnnnnnnnnnnnnnnnnnnnnnnnnnnnnnnnnnnnnnnnnnnnnnnnnnnnnnnnnnnnnnnnnnnnnnnnnnnnnnnnnnnnnnnnnntccaaagagtgctgatcagagtctctagcacaaggaaactttcaatagactgatcattgatggaaattataatggtgggaatgccaccaaatagaaccttggtattagaatgttaaacttttaggattgctactctagttcccagctaagagaccttgaggatgtatttaacctgtaatttggttttctgatttg

SEQ ID NO: 295898 - DNA, 752 bp, Homo Sapiens
ttggcccatgaccaaatcactccccacaaggccccaccttcaacattggggattacaactaagcatgagatttggagggggacacagatccaaaccatgtgacttggtctcttagtaatcacacagctggctttttggggaagaaagttacttatttcatgtgaacccaagcataaggaatctgcagatttttttccagcaatatcgatttatgtaaatactttatattccattcttggaggagacaagcatttcatttagtcattgttttcaatcatataaggtaactagagatcaaagttctttgaagaagatggttataagaaaatacccttgaattttaaaatgccttacacttttattagcatcacacaatgaatatttgtcattctgtggactgtaagcatagttttctctctgaaaatcctggcaagggaaatccttttttattgattctcctggtcacaaattattatgagaaatgcccttttttagacattatctctgactctaagaaactaaatgacaaaaagtgagaggacagtactgttttcaagtccacttaagccacttgaaatttctctaggatgatgccaattcatagccccactctagtgttggaaacagtcattgaactgaactctcatcagcctccattttgtgttgaagatgtgcgtgcctgtaaactgagatgatttctcagcacaattatctcaccctttttcatatctcaccagatcaactgggatttc

SEQ ID NO: 295899 - DNA, 719 bp, Homo Sapiens
ttgggttgaacatcctggaggccaggacggaacactgtcttactctaggaagctgtgttcctgggcctcattatcttcctccgttaaaaacaaaagacttaaatctccacagcagctttcagcaacttcattttttggttctctgtatctgcctgataaagtcccactttgtagtggctcccacttatatttacctgaatggcttttgggttgacatatttggaaactggggctaacttccaaactgttggcaacttgtgtgtgggtgtgcgtgccacagcacagcagtcccacttgagagacttgatggtgtggtggtggttggggggcttctgaagctggcttagccccagccctatacacccaccccacagatggtgggaacaagcccagaagagagtgggtaactctgtccactgtggcctccacagccaaggttgccaggcagagctctcaaggcccaattccagtcttgtctttgaccgttgcccctttgtgttgggggggtgtatttagtcacctttctggaagcatgcttttctaattctagtcatcagtagtttgttgctttaagattttgaaaatggtatcctgttattttacttagagtttcgtattgaatggtgtacataatgtgattcaagtacctcaaaacagaacgacttcagttaagatttagctctatgcaacatacacttcttgcattttctcattcaatg

SEQ ID NO: 295900 - DNA, 922 bp, Homo Sapiens
ttggtaaatgtacacagagatctacagttcagtgggtctgaaccaacttcttcgaaacagctttttatttcagtgaatgagcacagctgtccatttactgaactttcattatttatttttatttttactttaagttctgggatacctatgcaggatgtgcagatttgttacataggtaaatgtgtatcatggttttttgctgcacctatgaacccatcacctaagtattaagctcagcatgcattagttatgttttctaatgctctccctcctccgccccatgccccatttactgaacttttaaaaccaataagtaagttctcattctttttcctcaccattcagaacaaataatcaatcactaagcacatttcataactatatctttagaatgtatcctgttttctctattttcattgccatcttactacttcaacacatcattcgttattgtgaggaattcttgactccctctctccatgtttactcacctctgatatcaactgtgactatagattgccctgtgcttatactttcaatgatttatgatttcatttaggatgagaaccagtcttcttaatacaatacttttcataaactgtctccaaattcctttccagattcatctgtcattactgctcactctacctgcgccagctcttcagcaggtttcttgatctccatgatccatccagtgactcataaccattacttctctaacctccaggactttgcatatacctctccctccaatctgtaataatttgtaccttctaaaatttacttctgcacatttactttacccctttcatagattaattttatatattattatttaggtctaagcttacatatcactaggaatctaggcattctcagaagcattccttatgcttctgaaatactcccccattgacctaat

SEQ ID NO: 295901 - DNA, 896 bp, Homo Sapiens
ttggggaaaaagtagaattactagaaagacattctgttgagttcaaaagattcaattaggaaaaaaaatcaacagatgattttaatcaaatttgtaagcatgattaaagattatctacaattttcacgtccttatttgctttagtataagctgctatcaaaaataaatttccagttatctattaaactattgaaagacattttatgaatagataagttattctgttgagcttatagcttctttattaatttttacatattcagtaagaaaaaaggcagttggttcatccaaagttatgtctaaataacagtttaatacataatgtacataaacacagatttttctcataagacatcaggattacccacagttctcaagtggcatgattcacatttttaagaaatatttaatgcttcccttttattaaatgctttccacaacattgtgggatgtattgtatttccgaccccttcctatcaaatgtcagagaacctaaaaatcattgtgacaatcatttccaaatgtccatacatttccaaatgtcctccaaaagacaggaacacccagtcccccagttaagaactactagactcacaatatgattcaggaaggaaaacatcttcacaaaattaaaaccactgaaacctctgcttaatttggaaaccataatgatgtgcttttgcaactgtagcattagagtattggaacaagttttgtggtctaatgtagattcatactacaggtgtgctaaatttgtaccatgtgtaaattttttgaagggagtaatttgcatttttggtaacacagaatgtctccagagaagccatgcttaagtctagtaactaaatgtgatggtctggttgtgaatcagctgggcctcagatacagttcttttt

SEQ ID NO: 295902 - DNA, 911 bp, Homo Sapiens
  misc_feature (96)..(146): n is a, c, g, or t
  misc_feature (209)..(256): n is a, c, g, or t
  misc_feature (709)..(779): n is a, c, g, or t
ttgggacatcacatcaaattaaagttaaaactaaattttcttcccaaaatataagcagccactttcagtagcttttctgtctacagatttcagcannnnnnnnnnnnnnnnnnnnnnnnnnnnnnnnnnnnnnnnnnnnnnnnnnnctttcctgtgtttgtcctgatatgcccttcaaactcatgggattattagtaagacttcgtaannnnnnnnnnnnnnnnnnnnnnnnnnnnnnnnnnnnnnnnnnnnnnnnttgtctgacacaaatttgatggcttcttgttggctatggccaccaatatccccctactattaactaggtcttgtttctctaatataacaaaacatctttttaggttatgtggtaggtggtgacatctcaacacaacattgtttattcattttatcattaagcacacttgcaaatgtatttgaaagaaaaattcctggaagtcaaagagctgattgaacaggtgtagacatttaaaattttgatagatgtggctaaatggcattccaaattgtactaattacatttacactaacaaaagacaggatgtttttaatctccatttaacaactacatgttactttgtaatattccatgtattattttaatcttttagatattttaaccagtaattgttttactagtttgttcaaatagcatataacattctatttattctgctccttcctatacggnnnnnnnnnnnnnnnnnnnnnnnnnnnnnnnnnnnnnnnnnnnnnnnnnnnnnnnnnnnnnnnnnnnnnnnatcattgactatacaaaatttatttttatagaaattgttctcatcaccattgactaaataatatgttttcttcaaaatgtattatgccatgtttattatatactaaattttcatgtgtattgagttcatttc

SEQ ID NO: 295903 - DNA, 883 bp, Homo Sapiens
  misc_feature (62)..(118): n is a, c, g, or t
ttggcagtttcatgattttgctctcaaaactttttaattattgatttctgtcaaatctgttnnnnnnnnnnnnnnnnnnnnnnnnnnnnnnnnnnnnnnnnnnnnnnnnnnnnnnnnnatatgtactgaatttgtaacaatttggaaagtcaagtaactcctgttttatctttttcttggtttatgagtgtttttaaagttttacgtttcttgaagatcacagctgtagccccaattccatggttctggctacttacatttatcatacttattaatatcatgaatgtaattggaatacccctttgattttactggtgacgtatacccactagtgtactgagacggaaaaaaaagtctttagaactcagataaatatacagttcatatttactatttatgtatgtgtgatctcattattaaattactctatcatgtttgtggaattagcagtttctctttgaatttggatgtttctagttatgtgtatttccaacgtatgtttttagccacatacactttattgaatatcatatttggtgtttaatttttgctaggattataggctggactccagatccaaacttgacatgtagcagacccattaaaaacatacattaagcccctagcactgttttaatctccatggcctggctgagcttctgccatctgtcttcctaggcaccatgaggtctggacatctcatttggcataactcagctgtggccattggtggatctcatccttagtactagtccctgctggcaggggtgacccaggcccacataagccattgctggcctccttggaggacttagagaatcctgagattgcccatgaggatggacatgcctttcagtctagcacccacctttagtgatgcctg

SEQ ID NO: 295904 - DNA, 236 bp, Homo Sapiens
gcagctcttgggattgtttctttatccttgacctttgggactttgattattaaatgtattgaggtagtcttgtttgggttaaatcttcttggtgctctataatgttcttgtacttgaatattaatatctttctctaggtataagttctctgttattattccttcaaataaactttctaccccggtctttctctctacttactcttttaggtcaatatctcttaaatttgccttttt

SEQ ID NO: 295905 - DNA, 928 bp, Homo Sapiens
ttggaataaatattatcagagatgtagtttgacttggatcagtcttacgttgttcatttaaattgcatatcataacaatttcagtactggctgatttagcatgaaaatctgccaaagaatttccttggcatttaattaattattgttctgcttgatgttggattagcagttttatgaaccagattcttcattagagttctggaaattcttacctagtttaatggtataatcttaaagttatcagaaacttgttagagtcctttctatgaatctccttgaagacaaaacaatttaagtgtacagtttcttaggaagataccagagtaaacaattttccttctgtgaatgacaaaaacacataatttaagtggccatttttaaagatctaatgagagttaattacaatgattatgcaattgacaaggaaatttggttattgctgcatacaacattttaagataacaactagaattaagactgatagtgttacaccaggactattagatttctatgaatttcatagaatttctgaagcacatattaataaaataatcatacaaatataactcaatggaggtttagcattatttgacaatgcttcccatataatttaatacataaaataagcccaattagtttaatatctctctctctacaaggagaagtttccagatggaaacttccaaagggtccatgtagaaattcccaaaatcacaggagaggaggccagaagtccatcatagactgactttgtcacaaaccaccatctattcttccaagggcctatccattctttcccaaaaacaaagtttgtgtctttttgctagaatattgagtgggtggagcccatggaagtctagggacaagcattttgtatgcctggactcaaatggatacttctaatcttgccttattgtagagactgctt

SEQ ID NO: 295906 - DNA, 856 bp, Homo Sapiens
ttgggtcaaatttcaacatgaggtttgtaggggacaaacatgcaaactatagcaggaaggtatctggaggtttaacaaccttttagctctttaatctatttaaacaactctcttattttcaataccatcttcattttcacttgcaaagttaactggttccaccaattcctgagtcttttggatggattctctgctttccctatttctgccttagaattcctctttctcagatcagcaaaataagttactacatgtcctgctttccagctttgaacatcttcctgctattgtctcctctgccatattttttgtccttgtttgtttatgcctttaaaaaatctcttaatggtggttttaaagggattttagaagtgattgtagattaatgcatgttcttgctctactatctttaatcagaagcttctgtatttgctttctgtgttagtcagctcaggctgccgtaacagaagactatagactagctgacttaaacaacagaaatttattttctcacagttctggaggctagaagtccaagatcaaggtgctgccaagatgggtttctggtgaggcctctcttcctggcttgtagacagccaccttcttgctctgccctcacatgacctctactctgtgtccccacagaaaaagagaaatctctggtgtcgcttccttttcttttaagaatagaagttcaattggattagggcccccactattctgatcttatttaaccttaatcactcccctaaaaagctctgcctccaagcacatagtcacattgggggttagagcttcaacaaatgaattatggagggacacaattcagtccattacacttttcattataactttc

SEQ ID NO: 295907 - DNA, 135 bp, Homo Sapiens
gttagtgagatcgccctgtttgtatatatgtcttgtaagattgtagcgacagacctcccctgtttgcatcataactttcaaacttgcctgtatttttttaagctggattcgccttgttggagaccagtccctccc

SEQ ID NO: 295908 - DNA, 850 bp, Homo Sapiens
  misc_feature (151)..(185): n is a, c, g, or t
  misc_feature (318)..(394): n is a, c, g, or t
ttggttttattatgtattttataaaattactaatccaccaaattctacattcaacttgaactaacttaatattttattcaggttaagattttaaataataagataggcctctgatttaatcttactacatttagaaagctcactgtacttnnnnnnnnnnnnnnnnnnnnnnnnnnnnnnnnnnnttgaatttctttatcatctagctgatatctttactttttcaattctaagtaaaaattcatagttatatttgattagatataaatagcttgaaattcttattgatgaattaaacactttctttaagtctatatnnnnnnnnnnnnnnnnnnnnnnnnnnnnnnnnnnnnnnnnnnnnnnnnnnnnnnnnnnnnnnnnnnnnnnnnnnnnnttataggaaatggtgtagtattttcaaataacctatgcacatcctcctgtataaatcatatctagattatttataatacctcatacaatgtaaatactatgtaaatagtattatactgtgttgtttaggaaataatgataaaaaagaaaagtctatagacatttagtatagttacaaccatctatgttgttttcaaatattttcaatcattggttggttggattcattgatgtggaaactacagacagatacagaggactaaatgaatgtgaatacttatctttttgcattattctttcatggataaaagtagcaacagatgtgtttatgggtcttccaaactgaagaaagaattctcattttgagacaatgacagatttcagctattcctcctataagttataggaataaatcaatggtgaatcaaggatggaacatgaaaaatagaaaaacgtc

SEQ ID NO: 295909 - DNA, 657 bp, Homo Sapiens
tcacttaatttctatatgcagtgatttcctttcactccttgtcctactagagcatttagtttgtcattttcccctgtacttcactgcatcacacttcacatcttccctctctctttatgtccacaacattcagctttttagttccctcccacttcttcccttcaacactctgctcagtatccttttctcttgtctccctggtctctcttttgaaaatcccagggctttgggttgcaacaggaagtaagttattgaattgatatttaccactgaaatcacagtgaagttggagaagtcagctggacagtatggcagcaacaggaggaagcaaaacagccagtcagcagccaaaatcttattctgatagcagcttcatgagggtggttgtttctgcttctgtgcttccaatgacacagcttacattttcaatggcattgttctagatgcaggatgcacatgataggatcttgatatttttgcttcaactgactttgcactatttttttctttattcgtgtgcatttgtctccatctatctccaaatcttggatggggttggtgggaaaatctacgtgagattatttgtctgctgacacagtcatgtagcaaaaagtgttccagattttatccatctcatgaatgacctttttacataac

SEQ ID NO: 295910 - DNA, 723 bp, Homo Sapiens
ttggcaattccccaggctttattctactggaatatttcttctcagctaaacttttctctcaccttctttcaccccagacctctgtggctgcttaaagctttccaacctttttcacatcttggcacatgtagaaaataattcatctgtagggtgtacagaggtaaatggagggggctactcctggccagggtgactggccccagggaggatgggtgagtcaggctctccagtttccaccatgtcattctaaaagccgaagggatcctatatgggcaccctgaatcctattctcagggcaccctgcttgggaaatgctggtgtcatggggtgtcacactcgcctaagctttgtgatttatctgctccttttcatacacgggtgtcccattcccatttcctccagtgcttgcactatggcaatcagcagatctcctggcctgggaaggtctcaaaatcccctctggcaggctagccagcgtcttcaaggttcaccttcatttcaggcatcccaccccgctcccctgcccaggctgcaggaagaacctggctcatctgagaagtagcagtggctgaatttgtgctggggtcttaccttgccccgaaggacataaaactatggttgctctcgacaaatgctatataaaaccatccagagcacatagttgaggcatctcaggctgcaaaagcatgctgtgctatgcacgcacgtataatatatacattt

SEQ ID NO: 295911 - DNA, 305 bp, Homo Sapiens
tgttaatgcatgtaggccattcaataaaggttagcaactcacattgctattatgaacaacgttttggccagttatatttgcctcaaaatgctgaagactatggacaggagcattacgtaacaagaaaagatccttttcgttccaaaaaagtaacgagaatatattttatgctatggaacctttctaaatgaaaaagactacaaggaccggataggactaggcaagtgatatccgcacccgacaaggactggaggcattgttgttttgtataagttagtactggttctcacaggtggaaccccccc

SEQ ID NO: 295912 - DNA, 169 bp, Homo Sapiens
ctttgtacaaaagttggtatatatatcactcttacatctatcccatgatcagatatacctagcttcatgtgtagagaagacttctaagaaaagaaactaaaaatttgtatagctgcttttggaagaagataattatctttctctgccaacagtgaaccaaataaaagtc

SEQ ID NO: 295913 - DNA, 674 bp, Homo Sapiens
  misc_feature (550)..(611): n is a, c, g, or t
ttgggtatatgcttagcatcacagcactgagctagatgggcccctcatctaaccacctgcatgtccatctagggaaaccacggcccagaggcgtcagactgaaccccagatctctgcacacccaacccaggctcacaacataatacaacttgctctcctgtgggcttaacagctacgctgattgcaaattctttcctattcaccacaaaacatcctttagggaaataaactttatttctttgacgatgggcagtaattcagaggtatccgaatttcagcgcaagacctgatctgtttccacggtacatgtgtttccactgactcctcctgggtgccccgtctattggaaaaggcatcagacgtatgagcaaaccacaaagacacgcaacaccacggtggaatctcgcaaggatgatgaaagaatctgaggtcacatggtagaattccatttatgtaaggttcaaaaggaggccacattctgaagccaggagatggaacggcggttatcgtggtgggtcagggagagtggtagtaactggaagggggtgannnnnnnnnnnnnnnnnnnnnnnnnnnnnnnnnnnnnnnnnnnnnnnnnnnnnnnnnnnnnnaacagttatcaaggtgtttctcttacaacaaataactttgttctcaatgaaaagtgtgcataa

SEQ ID NO: 295914 - DNA, 127 bp, Homo Sapiens
ttggatgttcttatctggttcatgcccccaaaggcctagagcatgggcatggtttttataaatctaaacaaattaaataaatgtttgcacttgtaactctgttaccttttagccaaaaaataaatta

SEQ ID NO: 295915 - DNA, 903 bp, Homo Sapiens
  misc_feature (111)..(254): n is a, c, g, or t
  misc_feature (269)..(373): n is a, c, g, or t
ttggctttcagccctggagtccctgacctcccgctacccagaccatcctgtcccctgtccccagccaaaaggcccccctccactggttgggggtggggagacctcagtgtnnnnnnnnnnnnnnnnnnnnnnnnnnnnnnnnnnnnnnnnnnnnnnnnnnnnnnnnnnnnnnnnnnnnnnnnnnnnnnnnnnnnnnnnnnnnnnnnnnnnnnnnnnnnnnnnnnnnnnnnnnnnnnnnnnnnnnnnnnnnnnnnccattaatttatttnnnnnnnnnnnnnnnnnnnnnnnnnnnnnnnnnnnnnnnnnnnnnnnnnnnnnnnnnnnnnnnnnnnnnnnnnnnnnnnnnnnnnnnnnnnnnnnnnnnnnnnnncctgccgccacgcccagcctgaattgttaattttattgtttatgtgtattgttatttatgtaaatatagagcatattcatatttacagaatttaattaatgcaaacgtaagtagcagcgtgcatctggtggctgtcgcagggtccacctgggcccaggcatggagaagaggacagctcgggtccctggtcctcttcttggcaggggcagcctagaggggctgggtggcagctgaggcctcaggcactgagctggggggtccctggagtcgctgtgttgatggggctgagctttgggtgttggtgcctgcggcccctccccagcggccagtcccttgttctgacccctgcttggtggtcagaatcacacactgagagctcctgaagacctgagctgaccttcaggtgggactgtccggctccaatgacaagaggtcgttttccccaggttcctctgtctgcatccgctccacggatgcgctctctaggaacagcttccccttcctggttctcctgggtctccctttccatt

SEQ ID NO: 295916 - DNA, 808 bp, Homo Sapiens
  misc_feature (71)..(96): n is a, c, g, or t
  misc_feature (252)..(266): n is a, c, g, or t
ttggattaatgataaaaagatacagcagatttggtaacaattttctgggagtaaagatcattaaatgtatnnnnnnnnnnnnnnnnnnnnnnnnnnaaaatgttggacaagagcatacatttatcctttcaataactttccactttcttacctagtgttacaatccacacttgagtttaccctttcaacatattgatagaccaaaaatcactttggacatttctagctatatatatcctaatgatcacacannnnnnnnnnnnnnnaccactcttgcttatgatcgtatcttacacacttttaagattgcgtacataattgtgaggcacgcggaagaatactggtgcttttttatttcctatttgttaaaatatgtatagtcatgcactgtgtcatgatgttttggtcaatgatggactgcatatagaaaagtgatcccgtaagattacaatggagctgaaaaactcctatcatctagtgacgttgtagctgtccattgtcgtaacatagcataaggcattgctcactttttgtagtgattctgttggaaacaaatctactgtgctgccagttatataaaagtgtagcatgtaaaattatgcacagtacatatgcttgatgataataacaaacgactatgttgctggtttatgtatttactatactatatattttatcattatttttgagtgtaatctttctgcttattaaaaaagagttaactgtaaagcagcctcagacaggcccttaaggaggtattccagaagaaagcattgttctcacaggagatgacagctctgtgcctgtt

SEQ ID NO: 295917 - DNA, 153 bp, Homo Sapiens
ttggctccaacaaaaccctaaaatccctttctgtataggcaaagacttcagtgatctgtgtttcatttttacctcttggagatacccttctagagcctcctgtcccctgtctaatgaagtctgctttgcatttagccctgctatacagatttc

SEQ ID NO: 295918 - DNA, 365 bp, Homo Sapiens
tcctggcaccaaaatctgtattagtcagggttctctaaatggatggactaatagatgaatatatttgaaggggtttgactcacatgatcacatggtggagtcccacaatatgctgtctgaaagctgaggagccaggaagccagtcccagtcccaaaacctcaaaattaaggaaaccaacagtacagacttcagtctgtggccaaaggcctgagagcccctggtaaatcaatgatataagtccaaaacctgaagagtccaaaacctgaagaacttggagtctgatgctcaagggcaggaagcatccagcactggagaaagagggaggccagagacgcagcaagtgtcctctttccatgcctgcttt

SEQ ID NO: 295919 - DNA, 118 bp, Homo Sapiens
aaaaaagttgggtttgatcaacttagaaagaattgggtagaagttagggtgctgtaaaataatttaaaaaatttggggttgcttgcacacagcttctaaaacccttataatatctgta

SEQ ID NO: 295920 - DNA, 812 bp, Homo Sapiens
  misc_feature (136)..(173): n is a, c, g, or t
  misc_feature (283)..(316): n is a, c, g, or t
  misc_feature (333)..(392): n is a, c, g, or t
  misc_feature (480)..(575): n is a, c, g, or t
tcatttcctccagacttccactacaagaaatgttaaaccaagttcttctggaagatacctaaggtatcttgatagaaattgaaatataaatagatagaaatttgaatataaataaagaataaatgcattgaaagtnnnnnnnnnnnnnnnnnnnnnnnnnnnnnnnnnnnnnnagacaggatagttgtatcatgttcggtgagattatgacattgttattgtctttatttggagattgtgtttaaggaaatgtgtgtgagtaccaagttgacaaggggtagannnnnnnnnnnnnnnnnnnnnnnnnnnnnnnnnnagacagggtctcattcnnnnnnnnnnnnnnnnnnnnnnnnnnnnnnnnnnnnnnnnnnnnnnnnnnnnnnnnnnnngttcaaacaatcctcccaacctcagcctcctcagcagctcggactacaggcacgcaccacaacaactggccaatttttaagtttctcnnnnnnnnnnnnnnnnnnnnnnnnnnnnnnnnnnnnnnnnnnnnnnnnnnnnnnnnnnnnnnnnnnnnnnnnnnnnnnnnnnnnnnnnnnnnnnnntcatgagctaccgtgcctagccaaaaatagttttttaaaatgcaaatattgaactatttttttctacttttaatgtaaaaggtaactaaagaaaatacagaggcaatacattgtgtgtttatagactattttaaagtaacatgtgtaacattaaaaccacaagatatgggagagaagaattggaagtacactgttgtaaggtggttacaagacatttgaggtagtgtgatattattt

SEQ ID NO: 295921 - DNA, 871 bp, Homo Sapiens
  misc_feature (92)..(187): n is a, c, g, or t
  misc_feature (546)..(787): n is a, c, g, or t
ttggctcaagtgagcaaatctcagagaagagatcacccatgtacctttcctaaaaaaaggtaccatgaaatccagcacacaagatgaataannnnnnnnnnnnnnnnnnnnnnnnnnnnnnnnnnnnnnnnnnnnnnnnnnnnnnnnnnnnnnnnnnnnnnnnnnnnnnnnnnnnnnnnnnnnnnnntaactggaagagtatattgaatacagagaacataattcatatgggacattttggttatcgaattgaatacaaatgccttaatccaggacgaaacataacattttcaaacaatatataagtaggtggagataggtggagtaagtactaattttctcatcactcttaactcttaatgttttgtgtatttaaaacatcttttagaaatccagatgatctcttctgatgaataaatgtttatttgagacttagcatttaattgtttcaccccagtttcttttaaagatatattgcaagtaaattcaatttaaacattttaaaattaaagttagtatgtttaggatgattccatcttaatacannnnnnnnnnnnnnnnnnnnnnnnnnnnnnnnnnnnnnnnnnnnnnnnnnnnnnnnnnnnnnnnnnnnnnnnnnnnnnnnnnnnnnnnnnnnnnnnnnnnnnnnnnnnnnnnnnnnnnnnnnnnnnnnnnnnnnnnnnnnnnnnnnnnnnnnnnnnnnnnnnnnnnnnnnnnnnnnnnnnnnnnnnnnnnnnnnnnnnnnnnnnnnnnnnnnnnnnnnnnnnnnnnnnnnnnnnnnnnnnnngtgaaggttatcagaatcaaaatagaatcactaatgttaagaaaacccctataaatagagacagggaaagccatgaagagaggg

SEQ ID NO: 295922 - DNA, 272 bp, Homo Sapiens
taaaatattataaaatatttttatccactcctttaattgatggggcgttggggctgggggctgggttccaaagatttgctattcgtgaatctgatacatagatttccttttcccccggggaacctttccaagaagtggagtgtcctggaatacaatgggaagttcaaccttttagttccaaaaaaggaaacacccacaaatgtttaccaaaaaaggggtgggaaaaaatttaaaatatcccccaaagatgggtaaaaaaggttttcattttt

SEQ ID NO: 295923 - DNA, 722 bp, Homo Sapiens
ttggaaagagagccagatggccaaactgcaaagttttccaatttagcttcatgatgggaaaacaccagagacagaaggcaaggcgaggcaagggaggctcacagcagtttccagcctcaggcttacagaagcaggagtcggcagaggtccatgtgctgtgtataacctttcaacacacagtgacctgatccactggtaagtgtggcccagtctacccactaagatccgtgttccctccccttgaagaacagcaaggaactagaacaggagctagaagaaggacaggcttctcaggtccccatcctgctcctctcccacctgccaaacactgcaaattatgttgagagcaaaaaagaacaaggaagagatgatcccacaaggactgcttggagcagttttctcatcctcacacaggctgtgtggctatctgctctctatacagacatctttcctatctttccaaggtgggactcatttctcatctacaagtaagaaggcagtaacccacagatcaagactgccaaccagatggacacacgaaatgctgctacacactctcctacacgtcagtaaattccttccatccaatgactccatgtgcttcagtgacggaccatgagtgagcctgaccaggctggagatgccaccacgcacgttacttcctccactcagccccaactgacaaagacacatttttatcccagcaaaacttctgtttttct

SEQ ID NO: 295924 - DNA, 272 bp, Homo Sapiens
gcatggatatatgttgagtgaatggaagggatggcttcttcggatggccctgccttcttagctgtgaatacatgatacatagaaggctgtctcttttggtggctttgttttttgggagaggaatgaagaaaagacaagtacgttgctgtgcgtgtctgataagatttccaagctgatcgggccacaggtccaattctgcccctcacatcgtcctgcacataaaaagggagtggccttccttatccttgacaggcaaggggaaatggaacttc

SEQ ID NO: 295925 - DNA, 930 bp, Homo Sapiens
  misc_feature (216)..(225): n is a, c, g, or t
ttgggaacattttagcaataagtgaatgtccaacagaaaccaagttgatcttgaagatgtgaactgcttaattaaaaattttaatgacacgggaaatttaatctcagtggggacctttatcatcctgctaactcttcagtcagttcaaattctggtaaagtatggaaacacatttgtatatactccttgaatatcttttcactgatagagatttcnnnnnnnnnncctggagattcctacttttctgttttcaatcactgttgcaccaataatcatttgctgctgcgttttattagtcaacctagtttttattttatactttacaaaagtcattaaattttggttcatatattcaaagttgttttaaatgtctttatactgctcaatatctatagtaagtgcctataaatatatgtctctttctttctgtccttaaaaatcacatgctaatttgactctttctaattatccattggattattgcaataatttcatacttaatccttccagtctcatttctttatgttgtagaacagacaaattttgctaaagtgtatcttttttcaaatcccttcaatgacactgccagtcaaattatgtctaaactgctcttctggagtgtaaaactgtgattatgtccaaacatactcccctagttatttttaagaagttctagaaagcaaggtgtggactctgtggctaaccaaggaaatggtctacaggaaagatagttaagctttggtttaatgagtggttgacctttgggcaagttagtgtggcctacaggaagggactgcaatctagacatttacctctctttcctatcatcttgttacccagcttgtgtcaatggaaaagtttctcaatcacgtggtgcctaaatgtagtaaatatgccagatcctaatcttctcaaatggactattataga

SEQ ID NO: 295926 - DNA, 727 bp, Homo Sapiens
  misc_feature (518)..(628): n is a, c, g, or t
ttgggcaatgtagtaacattactttttaactttagaatgagtttagacttatttctaaaatcttgactgggcctgtgtatatggcttagttttgtttgacaacttacacacttactaattcaattaagaagtgaactaaaggtagaggcaccatcatctttaagctggattgttagcaggtttctcactgaccatcaaattacccctctgcttgaagctgcccagtggcttcctagctcattcagtgtaaaatcaaagttcttatgatggcaaaccaggaacaccctatcccacagcctttgtgcatgctctttgctttgcctggaatactcttgccacatgtgtaagaagacctcactgcttcccctccaagactgcttaatgttaccttctcaatgtggccctctctgatgaacaccattctccatcctgatattccctattgtcctttcttgctttattcttacctacagcacattttatctccttatattctattacccttcacttatttaagnnnnnnnnnnnnnnnnnnnnnnnnnnnnnnnnnnnnnnnnnnnnnnnnnnnnnnnnnnnnnnnnnnnnnnnnnnnnnnnnnnnnnnnnnnnnnnnnnnnnnnnnnnnnnnnatttgataagtgaatttaaaaatggggaacaataatgatgaaagcaacaaaggactggagcatgtgtgatcactgaatagttatgggggagggtggtca

SEQ ID NO: 295927 - DNA, 924 bp, Homo Sapiens
ttgggcagagattgcgaagaaagtattgcattccatatttagtcagagactacagatgatgacaaatatattctgcctttgttgacctagaatgcatcatcaaatcaatcctccttagacttgaactcagcatcacactcacatattttggttaccatgtattcctaaaatgcagaaatgggtacgctgacaaattttgcaattcaagatttttaccagttcagctcagaggtcaaaagaagacagagaagcagatgcatcacaggggggatttttcactgcaagaatggcgtgtctccatttgttacaagttagacttggaaaaatcctttagttaaatgaaaaagacaaatgtgagacagactgcctcgagaatcatttaccaatatctcggaatgactgtgattatacaaaacacagatattaaaataattaagttcaaaaactaagtgcaaggttgtaagataaattgttagcaattctttaacataatttctgtcctctccctgcagcaaaccgggtcttcatcatgcccctggagttattctaaaattaatacacgattatttttctaactccgcttaaaattctttcatctctcctcttggcctacagattaaaacttctcaggactgcctttcctaagcccttttattatttgactattgcttatctatttagactaattgttctgttactcttctcttcctgaatgcaaattacttaaaaatttctgaatgtaatgtccacatcctggacattcatcatttttcctctcctatttttacattgtgaacacctactcatatgtatagattttgttcagatgtgttcatcattttaaaggccatagccttcataaccaccttttagcctagagaattgattacattctgctctgtcccataactatatcctgtgttt

SEQ ID NO: 295928 - DNA, 905 bp, Homo Sapiens
  misc_feature (349)..(434): n is a, c, g, or t
  misc_feature (446)..(482): n is a, c, g, or t
  misc_feature (494)..(564): n is a, c, g, or t
  misc_feature (613)..(712): n is a, c, g, or t
ttggatgtctgtcacattgatccagggaaaagacatttgcatcctgaacaatgaccatgccaatgggatggaaagactgcatggaattcagtgcgttttggaggaagtcttaatagtgctgggtgcttgattggatgaagacaaaaacctcaagattgattatttccttttcacaatttttgtcttgaattagggtaaactgtatccaggtgggaagaagcacatttgtcccagggcaaaggattttatgtgaggtcttcataagaacagtacaccctatgttcaatgtgttatttcagcaagaacccaatcttattaccaaactaggtgaacatcaacatgttaagannnnnnnnnnnnnnnnnnnnnnnnnnnnnnnnnnnnnnnnnnnnnnnnnnnnnnnnnnnnnnnnnnnnnnnnnnnnnnnnnnnnnnatgtgcccaaannnnnnnnnnnnnnnnnnnnnnnnnnnnnnnnnnnnnaataagtgcttnnnnnnnnnnnnnnnnnnnnnnnnnnnnnnnnnnnnnnnnnnnnnnnnnnnnnnnnnnnnnnnnnnnnnnncatatcgtggaaattggactgtaatcgtattgtgtttgcatagtactgnnnnnnnnnnnnnnnnnnnnnnnnnnnnnnnnnnnnnnnnnnnnnnnnnnnnnnnnnnnnnnnnnnnnnnnnnnnnnnnnnnnnnnnnnnnnnnnnnnnnaaaaataagaaactttgtgtttaaaaagaaaacagacacagcaagatgttgtgaagtctgcaccaagggttcatgggagatgttttcactcaccttcagtgtaggaaggatattactgaactgatgtcagtctggtgctagccatgcttaagcactaaaccatccagctcatctcaacctcagatgtctggaa

SEQ ID NO: 295929 - DNA, 908 bp, Homo Sapiens
ttggctgacacactggctgggtgacctcaagcaagtcacaacccaagtctatgaactaatgtgtaaaatggggttgtctccaccaaccctgcagggcttagtgggaactccataatcagtctcatttcctcccagaagacaggattttaaaagggagaggaggggaaattagtatcgcagtgccaggaagcttccatgcttgcctccctcccacctttgacctcattagaggactcacacacaaattccacacttttccttttgtgcccttccttcctatccacacttttgcttccttccatcttaattgaccatcctatttgcaagacgggatgcattcctctaggacaaacagcctagaggaatcccaagccccaagtttcttgcatatgtttgttatccatcagcctgggaaggctttaaggaaaaccaggaaaaagatagaggactccccaataaatataaagcatatttgcgaagagaggagactgaaacagttttcccaactgtaatatttgctctgtatagattttagacatggatgttaagattcaactaggaatggtactacagcaaaacaaaatatgcataaatccataatctcttggcatgattatgactgacatattctaatcatttacaaagtggtagaataaattatctaacctactcagatgttttttcaacttgtaaaactaaaagacaactataaagaatggataatctgttctttgcccatgagtggccagacacaatcaacagggttaggacattcacaatcagctcagccagtggaatcagatataaaaagcatgcgacttgaaagactggggagaagtgaacctgtctattccaatagacagctcccttacaggaaactaaatcattccacaaagcctcatctaaaa

SEQ ID NO: 295930 - DNA, 179 bp, Homo Sapiens
ttggatatagcattgagattatttaataaagtcgcataggtgcccttttgctcactgacgaagtaagatttaagctcatcacatgaagaagtttcaggtaaaatcgtgtgaagaaaggagctgagggaaggcaatgaaaagacaaataattatgggctggacttgttacaactgccctc

SEQ ID NO: 295931 - DNA, 148 bp, Homo Sapiens
gtccctaactagccttcctacagcactagggcagtggataagttggagacttcggggacatctggattttaagtactttcagctgctggcatggagctatgaaaggttgctggggcacacatttgtgaaacgctgccttcttttccta

SEQ ID NO: 295932 - DNA, 318 bp, Homo Sapiens
ttgggaaacagtttatgtgtcatttagaccttgtgttgccaattctatatgaccacacatctaatcatcaactgagcctttactctggcactataagctaaatggtgtattaaacattttactcctcctcaccctgatgtaataaaaggtttccagagaaaatttaatgataatgaaaaaaacggttattctctcccgtcctctttaaacttttcaagggcggaacataatcccgagcaaacatcacagataaacttgtgcttcctcttctactgcctggatgctagcgaataatactatgtttggggtgcttttaac

SEQ ID NO: 295933 - DNA, 409 bp, Homo Sapiens
attgacacgcgggctcactcaggctggcaggtcacccaggctggcctgttctggtctaatctcagatcggagcaacccccaactccgagggccctttgacgccccccctctccctccctagaacctgggactgccggtcctgcatgccagggattagatttgtttatctttttccaccacgggggccgtgaggatgccacgccgtgtagtccgattaggctctaaattcaggggtcccgtgaatgggccgttctaaggttcaccaagccctttctgtatctcccataacccctactttattgctggtaaagttgatgtttggctctccatctcctaaatcctttgtctatttcccaattggggcaaaacttaagcaacggaaggtagtccagttggttgggtttcccct

SEQ ID NO: 295934 - DNA, 375 bp, Homo Sapiens
ttggggctcggcctgacttttttacatgctcaagagcgttggcaatcctcctcatctctgatctgaacacagctgggtgctcccacttccttaccctagggtttgccacagtattgcctagggttgcccaagggagaccaagggtttgtttgcgtctaagggcaaatatttgcagttgtgcttgggcccatggtagagccacgaattcccgctcccctccccttcctacaacacttactctcccagattatttcaggagcagacggtttcttgctctgtctattaccatggcgcgctatatgtatttattttgacgtaatgggacccgtttcgttgcaataaagagaggccccaaaaccttttttgtgtttacac

SEQ ID NO: 295935 - DNA, 805 bp, Homo Sapiens
  misc_feature (225)..(300): n is a, c, g, or t
  misc_feature (331)..(392): n is a, c, g, or t
cctcctcatctctgatctgaacacagcaggatgctcccacttccttacccaaggggtttgccacaaccctgccaagggttgcccaagcaggaccatgggtttgtttgcttctcaagggcaaatagatgcagttgtgcttgggcccagggtagagccatgaattcctgctcacctccacttcctacaacacctactctcccaacgtggctctggtgcatctgctcnnnnnnnnnnnnnnnnnnnnnnnnnnnnnnnnnnnnnnnnnnnnnnnnnnnnnnnnnnnnnnnnnnnnnnnnnnnnctgattgaatacgtctggggtgctgtctgannnnnnnnnnnnnnnnnnnnnnnnnnnnnnnnnnnnnnnnnnnnnnnnnnnnnnnnnnnnnntggtgaagactgatgtgcaggactactcaaagtagcagctcaacatgactgggagagctcggcttttgctcccagcaggctctggcctgaggccgccttcagatgccttcttcctagtgccataacttcaggccagtggacccctgtggcatggacccacagatactatgttgcagaggggattccaacaaccaatgaagcccaggaccagggtctgtaagaactccctgaccaggaattctggggcttcatgcaaccatccatgtgtgtctagttcaaatgccttgtccctttcctgttccaagaaccaagactgggctgtagtggtgtgaaaagcgctgtggggaattgtgcctgcccatcctacctgactctatgctatggcctcacttaacggcagcaaacacaaatac

SEQ ID NO: 295936 - DNA, 328 bp, Homo Sapiens
ttggtgctaaaatgccactccaagatcttattatagttttgatctagcatactctactggcttttttaagggagttattctgactcatatctctttctgatccaatgaggtaatgtaatttttctaaagcctaattctcatctcatttactactttgatggccccttatagttgtgtaaaacaaacagtttattctagcattctagcttttgaggtctctcatattgtgactcaactgaccttctcaactttgtctcacttctctcatttacatgccctggactggtctatttgtgttctccaattcccatactgtaaagaaattcct

SEQ ID NO: 295937 - DNA, 921 bp, Homo Sapiens
ttgggtaaatgtttccattccaaaaggaagaaatctgtcaaaagaaaagggctacaggctccaagcaagtctgaaacccagcaagaaagtcattaaaccttaaagctccaaattaatctcctttgacttcatgtctcacatccggggaacattgaggcaaggggtgggctcccaagggcttgggcagctctgcctctgtggttctgcagggttcaggctctatagctgctctggagggctgctgttgagctcctgtgacttttccaggtacaggatgcaagctgccagtggatctaccattctttggggtttggagaacagtggccctcttctcacagcttcactaggcagtgcccccatggggactctgcatggggtctgcaaccccacatttccccctctgcactgccctagtagaggttctccatgagggttccacctctgcagcaggctgctgcctggacatcagggctttttgataaatcctctgaaatataggtggaggctcccaatcctcaacttttgcattctgtgcacccagatgcttaacaccatgtggaaaccaacaaggctcacaagctggcatcctctgaagcagtggcccaagctgtccctgggctcatttgagtcatggatggagctggaatgactgggatgtggggagcattgtcttgaagctgctcaggacagcacatcctcagcctggcccatggaactattcttacctcccaaacctctgggtctgtgatgggaggggttatcatgaaggtctctgaaatgctttcaaggcctatttcccagtgtcttttgtatcagcatttgcctttcttttaattatgcaaattaatgcagcctgcttcaaaccctccacctgaaaatgggcttttctttttaccacatggccaggttgcaaatttttca

SEQ ID NO: 295938 - DNA, 799 bp, Homo Sapiens
ttgggctcctaccctaccattacagcccccaggattttaggggattccatttatattcagtatgagattgtgatataccatgtggatactaattacctaattcatagacttggcttttcatggccccagtaatcaaatagtataaatttccaggtagtattctacttgtttccttaatgactcctcagcttttcttccctcctctgaatgtggacagacctgtgtggccagagagtctaacggaagccaggagcccagcacgtcttgccagccacagagccttactctgcccagacaggaatgctcgcggagatagagcagctactctccagaataagaggtttcttttagaactcatcctaagacgtcaatcactgaatgagacaacaacatgcacagtgataaaaatgcaggaaaaattttaagtgctctagttcctacctttttaataggcagtgcatataaaaatagtgataatcacagtggccaaaagtaatgctgttagtccaaataaaagatgatctgaatgtaagctttacttttcacagaagaccttataaatggcagagatgatgactgtcatgtgagataaccataaattatgttcccgagaggttctactgtagggatttgccctccctaataatcttttaatatccctaaattgatatcttataactgaaaagaaattttgtctgccttaggctaaatacttccttgaaatttactttcttttaaaagcgtccacatagtacatttaaaagcaaacaagaaaaaacttttcaaggctctataacat

SEQ ID NO: 295939 - DNA, 803 bp, Homo Sapiens
ttggggaaaataagctgcttttctgtatcagtaactttcatcaaattgaattagtgctgtattgcattagttctctttcccactattataacatgtgagttcttaataagacaattttgttctgtattaggcaaatttaatattcatgcattatgaagaaacattgctaatgtgatagaaaactgctaggaaaagcaaacgatttcattaaaacttaaataaagctcactttacattttctccctccttgaatacctgtctatactaatcagctggtagaaaaggcagatgaggccctagagaccaggcgatacataatcctcattctcagcacaatctgatgtcaccttttggactcaaaatcattctactggattgtagttggaatttttaagtgcagaatatttaggatgttttaatttaaaatgatcatgacttgctctactttgtcctggccttgctaattgatgtctatcataactgcaggaagaagacatttgtgagcagtgcaataactcgctgaatcttcataaactctgagtcaataaaataatgacacaaatttcacattcttttaatgcggcatctgcttcatcagttgaaataattacaacccttgctttgaagaagtcttaatgacacagaccaaatcttaatagataagtaactaagatgaacacactgttccttttcatgcataaaaataacactattttaattggaactgaattagagtgtatgttggattttgcagatcctcaaatactttatttaatttggacttaataaaattacacaattct

SEQ ID NO: 295940 - DNA, 792 bp, Homo Sapiens
ttgggttaactatagtctctctattgtgctactgaacaccagaccttattacttctgactgtatttttgtaaccgttaaccattccctttttatccccccatccccactacccttcccaggctctggcaaccatgattccactctctatgagttcaatttttttgttgtttttagctcccacatatgaattaaaacagacaggcaccatctgtctttctgtgcctggcttatttcacttaacataatagcctccattccattcatgttgttgcaaatgacaggattttatcctttttatggctgaatagcagtcggttgtgtatatgtaccacatttttttatccattcatccactgatggacacttaggttgattccaaatcttggctactgtgaataatgctgctttaaataaacacaggagagcagataactcttcgatacactgatttcctttcttttagatatatactcagcagtgggattgctggatcttgtggtaattctattttagtttttttgaggaatctccatactgttctctatagtggctgtactaatttacattcccaccaacagtgtgtaccaagtgctcccctttctcgacattctcacattattgcctatcttttggataaaagccattttaacagggataagataatatttcattgtagtttttagttgcatttctctgatgatcagtgatgttgagtcccttttcatatagctgtttgccgttcgtatgtcttcttttgagaaatgtctaaagatcttttgcccattttaaaa

SEQ ID NO: 295941 - DNA, 930 bp, Homo Sapiens
ttgggattaatgcggtaaattgctaagttatgaccctgatatcaccaggattcatttaagtaaaaggcaattcgaagcggtattgcactcccccatacctaatgctttaacgctgtttaatgatgggtctggtaaacatggacaagcggcagtttggtagagaccacataatccagtcactcaatctaagtttactatcactcagagctgagattactctgtattttattaaagcacttttacagcctcaattaagttcgctctggagcccactctgtgtgctctttttctccagcctcagcaattgctagaccaatgtacacatcttatttttattacacacattggagcccacagctcactgcctggcccattggcttatagcaatgatgatcaagcagaccttcaagttatgacattactacttgactaagccactcaatcgcatctgtttttccaccaaaattgaaaaaacttatctaaacaacttcaacttacccagaggctggctaaacaaattatctacaatatccagattgccagctcacaggcacatcccctccttcaacaagtgttaaccctagaggattggaacccaatcagttatggcaaacagatattacacacatccctgaatttggaaaactaagatatgtgcatgtatccattgataccaacactcatttaattaatgcacatgctttgcctggaaagtctactcaatatgtcattaaacatcttcttttaacttttgcatttataggacagcccacaaaaattaagactgataatggtccagcttataccagctcactttcaacaattttgtcacatgtggaatatcgaacattccacacgcatcccatataagcccaagacaggcaatagtagaagagcacagttcacccttaaaaatttgctcaaaaacag

SEQ ID NO: 295942 - DNA, 803 bp, Homo Sapiens
  misc_feature (185)..(318): n is a, c, g, or t
  misc_feature (320)..(364): n is a, c, g, or t
ttgggtgttattttatgattacaaaagtaatgcatggctgttgtcagacatttggaaaatgcatataagcaaaaacaaaaaacagtaataaaaatcaccccaatctcaccaccaagagataagcattgttaggaatctgtccctctagggttttcaatgcactgcattacaaagatgatattagnnnnnnnnnnnnnnnnnnnnnnnnnnnnnnnnnnnnnnnnnnnnnnnnnnnnnnnnnnnnnnnnnnnnnnnnnnnnnnnnnnnnnnnnnnnnnnnnnnnnnnnnnnnnnnnnnnnnnnnnnnnnnnnnnnnnnngnnnnnnnnnnnnnnnnnnnnnnnnnnnnnnnnnnnnnnnnnnnnntacatatttttctgagtgtatgttttacatagtgttttgaaacctgcttttttgctgactaggtcactggtggcctcctaagtacaaaatcctataatttcttatcaatctttagtctccttggtctccctgaatcacttggcattgccaaccattccatccttttagcttctcttctccttcattccacacagcacactctcttcgttcccctctgatctctctgtccactccttcccagtcaccttcattcttcctacatgaccccattgtttctaaagctttaactgccctctatatgtagatgaatcctggatctctatttctaacccctattttctgctgaactcaaaacccaaatttctaacatcccactggccaactccacctctacatttcacagacttttcaaaaccaacatatcaaaactaacattttc

SEQ ID NO: 295943 - DNA, 825 bp, Homo Sapiens
ttggctttcatgagcaatttggagataattaatgatagctacctgacgggttctgctgcgggtttatatatggaaagcatgtagagtctcacacatagcaaaggctcaatctctccactgtgtttaggccacagaaatatcattttctaataaacaggacagtcctaggttctacaaagtacagcaaagacagaaattttatcttcaggacacaggtctggtcttaggcttattaccactcctggaaaccctgtccccaagacttgatccacagcaggaaggaacagtcaagatttgtctgtgtgttctgaaaagccactctagacacacctccgaagaagatgtcatttgtgcacacttctgcatcaagctgtcaactgctgttggtggaagggaagaaatgaggggaccaacaggccatcacttggactgccaacaccagtcaccaccctacacccttcacagccctgggcaacacatatgccagtgaggctgcgagtgggaaaaaataacaaaggtgaagcatcctgactctacccagtagacaaagtagaagacgcttctcgtcaccgccctaacaccaacaggacacagaatccaggatgagctctgaccccagatgagcatgctcggggattcttcacctgcagtgaccgccactggcctcaccaatccagcacaagtctttgtgatctttcaggacaccacaaaagaggcatttcacatcacagaacggtaaaactccaattactcaagagttcctggtctattttgtcattttttaccctcttattccttttcatatttagttatttcaccgttcga

SEQ ID NO: 295944 - DNA, 729 bp, Homo Sapiens
ttggcaattttcttaactggaacttcttgataacttgctgctgcagcttctacatgagcacttgttgcttcaccttgtacttttatattatggagatgacttcttaaacctcatgaaccaacctttgctagcgtcaaactttttttctgcagcttcctttcctctctcagccttcatagaattgaaaagagttggggccttgctcactctggattaggttttggcttaagggaatgttgtggctggtttaattttctatccagacctctaaaactttctccatatcagcaataaggctgctttgctttcttatcatttgtgtgtccactagagtggcacttttaatttccttcaagtacttttcctttgcattcgcaacttggctaactctttggctcaggaggctagctttcagtttatctcagcttttgtcatgccttcctcactatgcttaatcatttccagtttttgatttaaagtgagagacatgagactcttcctttcacttgaacacttagaggccactgtagcattactaattggcctaatttcagtgttattgtatctcagggaatagggatccccaaggagagggagacagatagggaagggctggttggtggagcagtcagaacacacacaacatttattaagttcaccattttatatagatgtagtttgtggcctcaaaaaaatcacaatagtaacatcaaagatcactgatcacga

SEQ ID NO: 295945 - DNA, 740 bp, Homo Sapiens
  misc_feature (218)..(369): n is a, c, g, or t
  misc_feature (374)..(403): n is a, c, g, or t
ttggattttaaggaaccactgtcttggctccggaaggtattcagttcagtcttgactcacaagccagggttattatagaatatagaattgtactaggttcttgtttatatatcatggtagattctattcaatcactaatacatcctcttatacctgtattaataccttgaggcaggtggagaagtcagttaaaaacaacaatttaagtgtagacaaannnnnnnnnnnnnnnnnnnnnnnnnnnnnnnnnnnnnnnnnnnnnnnnnnnnnnnnnnnnnnnnnnnnnnnnnnnnnnnnnnnnnnnnnnnnnnnnnnnnnnnnnnnnnnnnnnnnnnnnnnnnnnnnnnnnnnnnnnnnnnnnnnnnnnnngcccnnnnnnnnnnnnnnnnnnnnnnnnnnnnnngagacagaatctcactctatcacccaagcctgagatgcgagtggtgcaatcttcgggcttgctgcacctctccctctcaagctctcagagcgagatctctcactctcacctctccagtagcgcggtgtcttattaaagaacggtgtttcctgtgcgtacccagagaggctccatatcccttaatccggatacaccccgctgccccgcgctaattttatttacatcacagggggtactggtgcagggttatacatgggtaaattgtttgtctcgggtgtttggtgtacatacaattttgtcacccaggtaaccagcatatctggcaatttttaaaagc

SEQ ID NO: 295946 - DNA, 741 bp, Homo Sapiens
ttagccacagcacccggacttgctagcatttcttccgatttgggcagtttgtctggtggagatccagatcctcaaccctgaagggtccaagccccaggttactgtgccctgcttaagccatggctgctttacttgtccatgtaccaataaagccaggcacagtagcaccagaagaccccccagtgcatcgcctgagcatgactcatattcatctctgttcctattatttagccacataccctacctcctactgatgaccggggtaattatcgccaacattatggtgattcctttccttgctgatggtctcttagctcaatacattcaaaagaatcaagaagcagtcatagtgtaaaattcaaaggaacttctactgtgtccccaatggaaatattccccctctcggagctctagatctgcagagctttgtgttgcagggataggaagctccccttaaagatggtataactttggataaagtcattccctgcagccaaaggcaattcccagggaacaatgctcctgtgaactgttagcagccaatacttccagaagctgatgagcgtgttggccctagagaggacatcttggtgaattacaaccccagtatccactgcaacatctgagattcactttcctaaccataaatgggaataacaatggcttattggcatggtactgggaaggaaatgagataaatgataaatgagataatgtatgttaaaaattctggaaaaaaat

SEQ ID NO: 295947 - DNA, 705 bp, Homo Sapiens
ttggcttgctcggcctgctcagaaggcctcacgggatccttctgcttccacctcccaaagtgctaggataacagacatgagccactgtgcctggcagctctctgttttatctacttcagtgcaccaggctggggacacagcggttagcaaaacagctgctcacagaaatcatggtctaaattcaggttttctcagcctcagcactgttgacatttggggccagataactcttagttgtgaggggctgtcccgtgtattgtaggatgttaggcagcatccctggcatctgcccacacaatgccagtagcacccccaccccaagtgacaaccaaaatggactccagacattgcccgctgtcccctgggagggggcaaaatcaccaagattgagaaccactggactatgggagaggagatactaagcgcacttgattgtaaaaagtcttgatctacactggttctcatcctaacaaagagggtcatggagtgaatctactcccagctctcgaggagatggatctggacaggacctttggcatcccattggtatttgaaaaaccagctgcaagaatgttggaatattgaatcgagccctgaatctgaggagagaaatgagtgaaaaaaatagcgagccccgacaggtaatgatgccatttgaatacggcctcttgctccgaaccatcaaaccatcgctgctgttttgtt

SEQ ID NO: 295948 - DNA, 452 bp, Homo Sapiens
ttggtggagccagccttggaggagctggcatctcctgcagcattggtcaaggggatgtttgccttgcctctcaaaatatttcttagaaaaggggagtttcaaataaatttggaaaactctacattctgcctctctctcggatgtttatgatgctctttatcatgttaaggtcctcagaattcctaagggaaagaaaccatttaactgtgttcagctcagaatgttctagcatgtttatcatgggaccgaatttacatagacgctaggaaacagcctctaggaaacccccttttaaaagtgaaatacttctctggtttggtttttgtttctgcaggggtgagtaaaacatttagggaggggactgtatcactgtatgagacacagtccctactctcctcttgttgaagaggcaacacacagctccccatacccccagataaccaaccagcctt

SEQ ID NO: 295949 - DNA, 229 bp, Homo Sapiens
ttggcttcattcataagtttacagaaagatgtagaggaattataaaaggagcattatatgcacttttaaaacaatgaaacatcctaaatataaattaagaggtaaacgtataaatagattctgacatttttatggagatatcatatagcattgataaaggaggcacagatgtacacctatcactatggagaaatcgcacaaataaattgtgaagggaataatgcaagtt

SEQ ID NO: 295950 - DNA, 334 bp, Homo Sapiens
  misc_feature (143)..(159): n is a, c, g, or t
  misc_feature (251)..(273): n is a, c, g, or t
ttgggtcattttaagagggtgtgtagagggatcaagaaagtgccttctagaactcacatccctgtccctcttttctctagccaccaaatacattattgctgtccagaagtggtaaaccaaaccatcgaatcacatcaaaggcnnnnnnnnnnnnnnnnngccacattaaaaacaaacacaaataacttataaatgcattttttaaacatttaattcccaactggtttcctctacctatcttataacacaannnnnnnnnnnnnnnnnnnnnnngatgtattctatgaaagcaaagattaaatgaagaatgtgaagaacaatgggctggtgcttg

SEQ ID NO: 295951 - DNA, 564 bp, Homo Sapiens
gagaatggtagaatagtgtaaccaggtagtgttgggagcccagtttagtctggagaccatgaatgtatagtgatacctgtaccctgtacccttaattgctgggaaaatctatgaagacgatgtaggtggaattcctcaaattgcttttttattaaaggtgagtgtggaagatggacaaggtatgggaatttatatgacatagaaaaggagtgtttgaaatagtagaacatggaatctgagctggagagaatgggaagtgaagatagcagggctttaatagattaagaaggaggatagttatcaatcttgatcaaggaagtcctgatgaggtgagagaacacttgaagaggaggtactttacaaagcaagttggaaagttagaaagttgttgtcagagagggaaatgcttaaattaataacttcagaggtagagtcacagcaatgacaagttccacagtgaaactttgaaagaagtggctaccgtagaatagaaggaacagaacttggagatgagaaggtcaagggactcagaaacaaggaggctgagtaagttgcctacatgta

SEQ ID NO: 295952 - DNA, 369 bp, Homo Sapiens
ttgtacaaaaaagttggcccaggcaatgctgtcagtgcggatttaggatcttcctggggacagagcacagagtggctagtttgtgcaggtatcccctcactcccctcaagcctgagctgagaggacagacaccatactggttgtgcattcattgtgggctactaccctgcatggggaatctcagcccaagttgttgcaatcaccagtaccctgcaaacatagcccagaacctgctctgacttgacaaccacaggggaccagcagtccctggggagctgtgggatttccagacattcagccctaagcacaggctgcccctagaagagggggaagtgcggcccactaagaacccccttgggacaaaggaaa

SEQ ID NO: 295953 - DNA, 148 bp, Homo Sapiens
tgtacaaaaagttggggagggacaaaccttttccatgacatagtgctggtctgattcagttctctacctgataccccattttcattagtatttgctagggttcccttttacccagctttgttcttttctgtttctttaatacttgccc

SEQ ID NO: 295954 - DNA, 121 bp, Homo Sapiens
ttggcctgacatctataattatttgttaatgtgttatcatctcctcttctcatattcctagtacctaatatctggcacatagatggtattcaatacgtttttaataaagtgaatgggtagg

SEQ ID NO: 295955 - DNA, 264 bp, Homo Sapiens
tgtacaaaagttgggccatcttgctctgcccttttctattctcacttttagatctttttgtgtttgttataatgtcctcacatggatattttttgaatgggttcatagaagggagactttgagtatgagttcttgcatgtccggaagtgtctaatttgtactcaaatttgatggataatttagtatagaattataggttcagaataattttccttagaacttcagcttgatttcttattgtcttctggcatctagtgtttctga

SEQ ID NO: 295956 - DNA, 936 bp, Homo Sapiens
  misc_feature (201)..(209): n is a, c, g, or t
ttgggtaacaataaaaatgggcaaccagcagccctggtcctgttctgtctatggaatagccattcttttattcctttactttcttaataaacttgctttcagtttagggactagcctcgaattcttgatagcccaagatccaagaacttgctcttggtgtctggattggaacccctatctggtaacagtcttgtctagggnnnnnnnnncacataaatgaacagcatgtggaatatgaacaagaacataactattaatagacagatgaaggagagtgaaaacctaagagaatacaatatttgtaaatgtgtaagaatgttatcaaaatgcttctggaaaaatgcttagtaactggcaggcacatgtgaaagaagtctactgataataaggaatccataccatttaatttgggcacatttatctcaagatcaagaacctaggtgtagccctgggccaggggagtcagggtgatgcagagaggaggtggtacctcttgtgtggaggccaaggactgcagacagttcagccacatcaggtgggttgttcatgtgaattagatggaccttgatgttctctttaatgctcatgttgtattacattgaaaccctagcttcaacactttaaaaagttcttattagcaagtaaattacagattgaacttctgaattgtttgcagccattttttattccaaacatgtatgtttttgtaaacctgacatttcccaaacagtgcaagtgaatcagaagtgactgcttagactttaatacacgtgacattgtgaggcagcacaacctccccccacccaccaaaattcctcagtggaaatgtacatggatgcatcagtaaagttctggaaatgcagatagcgtggtgcctgccagcataatcactcgtaaagctttaactcactctgcagtcacaccgtgcacatagat

SEQ ID NO: 295957 - DNA, 579 bp, Homo Sapiens
ttgggggtgaacattttttgggtggtggtggtgatttttccttagacgattgaagcaatcacttttggtgcctgattggcagttttcattttgctctgcagtctcctttcattgcctccaatctcccagtaaagcctgctattctcttccagccttgtgggacactgttgtgaggagactaagaggtgagttagtaaaggcactgtagggcctttcctacctcacccttctaccagatcagtggcacaaatggcagcattgccctgggaaggacagtaggcctgagttccaggcactgacaagaagaagaaagagctatggcaagaacagagcagggagtgggggagaaggacaccatagggagacggggagcaggacactatagggagagggggctgccaaatggatgactccaaagtgcactgagaccaggggcttcctttccaaatagattaaacagagatttgacctcaggttgttcattagaacaatctggagctcttaaatgcagctaatgcctgggaccagccttgtaacaattgaatctgaatgtctgtggatggggtctgggcatcaatg

SEQ ID NO: 295958 - DNA, 926 bp, Homo Sapiens
ttggacttacagcttccactgcacaagaggaatgtcaaatactatcagttaaattagcaagcacattttcagggaaattgatttttggagtctgaaatccctgaaatcactcaaagtccttgttgcttttcaggtgccccattaatctttataggactctattgacactggtgtcggctgcattcccttgcagggcttagggcagatgtgagcagaacatcacagcccagggattcagttctaattcaacagaactcacattactcctttaaactaaacagaaaatgatatagaagggatttgtaaagacaagggtgtaaattacaacaatggtgctgaactattccttgataaagatggtttcagggaagagcttgtttcttgaattatctccattgccactttatgtggcttgaaatttaataagagtgggtctcaaagccaagggagtgcttctcatccaaatgctgcctcctctggtgcatatttaggagtataggaagcagctaggactggaagttttgataggaaaaaaagaatagagtgaattcaaatatgtaaaccccatctatagagacataaagagctatcaataaaactgaagcttaaaataataaataagacaaaatcattaagaaaacactataatgtgaccatgttttattccacatccaactggagctaaactgggtagtctgagccctaatttaacgaggagtctatgaaagtgtccttcttccctgaaagaaaaacaaagataaaaaggtgctgtggatttttcagaattttcaacaatagctatagttctcttacaggtaaaaagaataaaattgaaaaacactgacgaagaagtagttttccaaattgttagcattatttctaggagacaaaactgttgttggtttcctctctggcatatcacttgc

SEQ ID NO: 295959 - DNA, 180 bp, Homo Sapiens
ttgggggaaatactgagttaaacagttaatataggaagtctcaaagctttatgtcactgtagatcactgaaaaggccatctgtaatttgctgtattcctcaagtgtatttgaccagtatatcttttgagttgcatcttgaaggaccagaagtcttggattaaatcaagcaatatatgcgt

SEQ ID NO: 295960 - DNA, 235 bp, Homo Sapiens
ttgggttgccattaggctactaaaatgctccactgtgaagcttattctcttgcacctgaaaatccacattatgtgctctgtgttttctctgtagttaagctaagtgagtaatattgaggggaagttaatcatgatcagtaatttctgggttactctagagaactaagggaaaataactccatatgaagaatagaaaaacacatttataaaagtttaggtttaaaaactattcacc

SEQ ID NO: 295961 - DNA, 933 bp, Homo Sapiens
  misc_feature (121)..(171): n is a, c, g, or t
ttggctgagatttatatttattgtacaatccaagaacattggagattaacaaagacaggtgagaaaatcttggtaataacacaaatacatcctatgggttgaattggctaccctcgttccnnnnnnnnnnnnnnnnnnnnnnnnnnnnnnnnnnnnnnnnnnnnnnnnnnnttcaggttccttatttgtaaaacaggaatgctggaattacctcaggtattacagaatcgcaattgggatgctgaattaaattcaatttagaagatttgcattttgtttgtatctctgcaatagcagtactaagtataccatgattatgtttacatgtcattaacaggtaaactttggagctactccaagcctaagactatgtcagatttacctttttatttccacctggcacaatgcttgagcataatgggtgttcaaaagtacactaaatggatttgtaaataactatatcagtggttctcaagcctttatgcctgggaaccaaaaaagcttttacttacattgatatttatagtactgaaaattaaaactgagaattttttaaatactaatttattgagtaattaaaatgacttaataaataaacttactatacagtaacatactaacatatttttattaacacttatattttccaaagcaaaaaaatttgtaagaaaagaagcagttttaaattttgtaaatttctttagcatctatcttaatagaagacagcaagattttaatgtctgcatctgcagacatgtggtgtggggacttcaaagacctcctaaaatcgtcacagggatctcagagttccccaaccacactttgagaaccacaatgagtctctaaaaggcagaatccagaaaatccagtatgttggcacttatgtactgcaatccaagtgcattttgagagcacaaagggataacaaaatca

SEQ ID NO: 295962 - DNA, 379 bp, Homo Sapiens
aattgtattagtctgttctcacactgctatgaaaaagatgcctgagacttgggaatttataaaggaaaaagttttaattgacccacagttccacattgttggagaggcctcaggaaacttaaaatcatggcagaaggcaaaggataaacagacaccttcttcacagggcagcaggatggggtgagtgcaagcaggggaaatgtcagatacttatgaaaccatcagatcttgtgagactcactcactagcacaagaacaacagggagaaaaccacccccatgatccagttacctccacctggtcccacccttgggcatggggattatgaggattacaattcaagatgacattttgggtagggacatagcaaaaccatatc

SEQ ID NO: 295963 - DNA, 372 bp, Homo Sapiens
ttggtttaaagcgtggtctctgagaacattagcccgtttttttaacgtctttaatttcacggcttcaacatgtacggttgtttgacaatttcatgaggcagctgtggggagaaaacaaaacgtggctgccaattagcgctgtctcacttgtctgtccaactgctccgtcttttctgaagccttacatgcatttttccaagccacttggcttcttcggtgctggatatttaatttgcctggaacattctcacagatcagcatttcatgagagcctcgtggaaggcctgtctgacggtgtggtgcttggctggagggcagcacctgtaccttcctggtcagttctcatcagagaaaaggtgtcacttgctgtct

SEQ ID NO: 295964 - DNA, 148 bp, Homo Sapiens
ctttgtacaaaagttgggttgattgcttattatcacattgctctatgtgtattccatttgttaactttgacagatactatttatattcatggtaataataatcttacattatataacattttcacaatatggagtttactgaaaacaa

SEQ ID NO: 295965 - DNA, 133 bp, Homo Sapiens
ttgggattaaagaaattcttcatctgaagaaaatgctgcttacttaagcacccagttaacggctgtcagttgacaagccatgtcaacaaggactttcataatcaaattttggtacaagactcttcaatgtgaa

SEQ ID NO: 295966 - DNA, 263 bp, Homo Sapiens
ttggcagactgagaccagaaacagatagtatctgcttctggaactcactgaggacagaagagttatccctgacaaaggagaacaacacaagtagaagagagaaacaaataacatatgaacaaatcaatttatgatttgaaggaggcttcaataagaaaagtagaccagaatgttgctttgaggaatcctagcaaaccacacataaattttctattttgcctccaatgagaacatgtttttatgtagtttcaaaaatatttatc

SEQ ID NO: 295967 - DNA, 794 bp, Homo Sapiens
ttggggcttatagtcccatccacgttgctgcaaatgacgagatctcattctttttcatggctgaagagtactctgttgtctatatgtaccacattttctttattcattcatctgttgatggacacttaggttgctttcaaatcttggctactgtgaatagtgctgcaataaacatgagggtgcagatatctcttcaatatactgatttactttatttggggtatatacccagcagtggaattgctgaatcatatggcagttctacttttagttttccgaaaaatgtccaaactgtgcttctccatagtgcttctactaatttacattcccaccagttatgtatgaaaattcccttttctccacatcctcaccagcattcattattgcatgtcttttggataaatgccattttaactaggatgagatgatatctcattgtactttttatttgcatttatttgataatgaatgatgttgagcatcttttcatatacctgtttgtcatttgtatgtcttcttttgagaaatgtctattcagatcttttacccactcattatcagattattggatttttgtcttatagacttgattgaacagctcatatattctggttattaatcctttgtcagatggatagtttgcaaatattttctcccattctgtgggttgtgtcttcactatgttaactgttacctttgggcagaagctttttaacttgatatgctctcacttgtctatttatgccttgattgcccaagcttcaggactctctgatgtcctagagagtttctcc

SEQ ID NO: 295968 - DNA, 810 bp, Homo Sapiens
  misc_feature (552)..(628): n is a, c, g, or t
ttggtaagaaagtgctatcctgtgtatcattttgtgcaagcaagagatacacaaaaacactgaattttccaataggatgtgtgtggattaagcctttaatgattaagaattgaggtcagtagctacctcggaaagtgtaataatgatgtcttgaaaataagagtagtggttgaaagtgtgtttaagatgagtcccattcagtcaagtaactgcttattcatttatatttactgaatgtctgggaaaacacaaccaaataacaagagatgacccacagaatgattaaataaattgctgaggtttgatcagttcttctggtcttctatatgagctaagggactctatttgaagagaatgaaaattagtaaataattgccatcaatttagtacatttactcctttatctgaatgtgaatcaagctatttccagaaatgtgttaccatgtttccatctctgaatgtactcatccacatactactgaggagtagctctctttatatgttataaagaaacaagagccagcatttggcagctacatgaagatatgaagnnnnnnnnnnnnnnnnnnnnnnnnnnnnnnnnnnnnnnnnnnnnnnnnnnnnnnnnnnnnnnnnnnnnnnnnnnnnnttatgtaactatcaagaatcttgggctgtttgtctatggcaggtttatttttatatttctacagaggaattaagagacaaagataagaactctggtaacctcagtattgtatgtgtggttgtagctaatatccctgacagaagataaggaaaattacaagtttaaccacaaaatagagatat

SEQ ID NO: 295969 - DNA, 677 bp, Homo Sapiens
  misc_feature (42)..(271): n is a, c, g, or t
atataatgatacaagcggagttccagaggagagacgttgctnnnnnnnnnnnnnnnnnnnnnnnnnnnnnnnnnnnnnnnnnnnnnnnnnnnnnnnnnnnnnnnnnnnnnnnnnnnnnnnnnnnnnnnnnnnnnnnnnnnnnnnnnnnnnnnnnnnnnnnnnnnnnnnnnnnnnnnnnnnnnnnnnnnnnnnnnnnnnnnnnnnnnnnnnnnnnnnnnnnnnnnnnnnnnnnnnnnnnnnnnnnnnnnnnnnnnnnnnnnnnnnnnnnnnnttgaagaaatctgatgtgacccagcatttctcactgaaagccctagaaacataaattgggatgtctcatagttctccttttggacaagggtaggaagtttgttacccatctgtaccttgacagtttggaaactgtgatgatgtattggagaaatgtgtagcaaacacaaacacagccttagtctattttgttacatatgcagattaatgtttcttaaaacaaagatcccatgtaaatacaacctggagttttagatgtctataatcatctgcaaaatctcgtttgcaattcaggtgagctatttgacagagcggattccctcaaaccttataaggtctcagagagatagagaacttggtctagcagctccctactgttcctgatctccaaggcaatatggaaatgc

SEQ ID NO: 295970 - DNA, 888 bp, Homo Sapiens
  misc_feature (98)..(115): n is a, c, g, or t
ttgggtatttttcctaaattctaaatacaggtttttcgtaagtggcctacactggttccactttagaaacaggaaacactccattacttcttctttannnnnnnnnnnnnnnnnnctgtttctgtgctctaaattaacctttcctggaacttgagataaaatatgaggtttgggttattttctatgtggtataaagaagctatatctaggcctttgtcttaactgagcaaggactatttaaccagacaagggaatggaagtattcctatgatacgtatgtcatgttacatgtgggtagtagtaaaaaatgcatgtgaacacaatgcttgcctggctttgttctctgttcgtgtagctgctgaaggagtcccctttttaacacaaactacatttgagaactataactttggacagtttgtaaaatctataattcacagaagttctaatatgatgaatgcattgagacttctgtagctgattacgtaaatatttgcaaacttaaaaatgaattatttcaaaagttcatgaattctgtatttaatcataatactttaattgttcccttacagagtaaatcagatagcattatatatgcaatgattcatacaaggcatcccagtagaaaagacacacatttaatttaagctatctctgatctcatgtgaaatgtatataatcgaatatgaaattattctcttcctttttagcatctaatgtaagtaaatgtatttgagaatatagaggtaaaatatttttgcttcatggttatttcaaatttaaaatatttacttattataatatagtatttagaaaatacatggactcattattaaaggcaacgctttggtaatatggtgtattgttgaactttgctttaagaactaatta

SEQ ID NO: 295971 - DNA, 486 bp, Homo Sapiens
ttggtcaagattcaactgcggttatgtgatgtatgtaggaaaaccacaagtcaactgctattttgacatatttatcaaaagtatatgattaatatgacttatcactgttgttaacttcatcacctagctgaggctgtatctagtcagttttctcaactataaatttcctctttcttgtttccctttcatttctttggaaggaaatcatgatggacagcacacacttaaagaatgggtagtaattttattagaaatgtaaattgtttatatttatctgaagaatgtttgtcataggacagaagaaaataatattggacctaagtcatttccatgaagaacatccattgtcaagggtggtggtggtagcatcattcattatgacagaatctggaaatgtttttactttcacagcatttagttattattttgaagaactattatgcttttctgcctttttgaattctattttgtacaacattgacaagt

SEQ ID NO: 295972 - DNA, 182 bp, Homo Sapiens
tgttcgttgcacaattgatgagcatgctttcttatatgccactttgtacaaaagtggatttggatttacagtcatctgactatctaatctgctctgtggactatctcatctacagaggtgtcagattcttatcagtttcacaccaggccggccagccctgttctttgcccgaattgctcttt

SEQ ID NO: 295973 - DNA, 434 bp, Homo Sapiens
ttggattatttttgtagtagtttgagactcataggcacacaggatatatatttaaaatttatgtatttatatatatttaacattttcaactgtattgatgtataactgataaaattgtgtgtttacggtgtacaatgtgatgattcgatttgcatatattttgtgaaatgactcccacaatcaagttagttaacacaactgttgtctccgataaaagaaaaacttcaactgaattagatttaaaggagtttaattgagcaatgaacaatttgcgaatcagacagcccccagaatcacagcagattcacagagaatccagaacagccatgtggtgaaagaggatttacagacaaagaagaaaaatgacgtatgtaaattggcagtgaggtacaaaacagctggattggttacaggttgttgtttgccttatttga

SEQ ID NO: 295974 - DNA, 222 bp, Homo Sapiens
ttggaatacggagagaaagcagaggaattggctcctaatgcttcactgtacttaatgaaatagatactccatccttacagacataattggaagtaagtcaagttcaacttctttgttttatatggagatagaacagtttcaatcacgtgagtattataagtgtgaattatctaaagtaaagctataaatccagaatatataccagtatctctagaatttttc

SEQ ID NO: 295975 - DNA, 289 bp, Homo Sapiens
ttggaaactttgtaaagtacctttgtaaggtgaggcagaaaggccgatttcatcagttagcccaggtactcaaagaaaatgtaggcatttatttgtaaaacaattgtatatgtttaggaaggtaacttttggatacagttactgtcgacctcaaacaatacttgcctgaaatctcgttgcatattgactacagggaatcagacactccaaagtttgggagatgatggtcctgaactctaacaggaatgatttaggttggtgtcattttctgtctttgttgcagacagtt

SEQ ID NO: 295976 - DNA, 185 bp, Homo Sapiens
ttggctggcttctataattgttaacgtttggttatatttgccttattatttatgtatctaaatatccattcatcagttcatctttctttttcatgtatttcagagtaaactgcagacatcagtacacttcacctctaaaactccagcatgtatatcattaactaaagtttaatatttggttttgg

SEQ ID NO: 295977 - DNA, 314 bp, Homo Sapiens
ggcacacaactttcaaatagaatggaaaattttaggcaaagaaatatggaaatgttagaagtaatatgtagaaatcctagatctggtgaaacattctcatgaatatttcatgagaatagaatggctcattggtaaaggaccaatggagagtcccagtccagtggagacagaaccacaaagaatgtggcagaaaagagaataaaatggcctattcagtttaggcccaggaagtttccctgctccgtttctcatggcaagactgagacattgttgaacatgcggaacaagatatgcattaagatagcatttatgtg

SEQ ID NO: 295978 - DNA, 789 bp, Homo Sapiens
tcaatcctcacaaacaattctatgggatgggacctattgttatctccattttacaggtgagaaactgagtcatggagcagtcaaggctttcccaagatgacacggttagtaggaggcagagtagggtacaaacccaggcaatatgactctggagatcacgcctgtatggcagatgcacctgacagcggtaacttaagtataacctgagaatgaccctgtgtggcagacacacctgaatgtgtgtctagtgttccaagcgtggccaacccagagattattccttatgtatgaggaacatctgagcccctggcccagcccttggaacatgggccatacagggggctgaggccctttgttttggggtaaatgaaggttgccaggtggaggttgttagcgggagggtgttagatgagagtgccatgtaaactgcgtgctttctgcaggcagtggtggttctcctgtccagcctgttgccaccggatccctcttatgtaagttcccctcaacaaaccctatgtcgcatttgttggctcttggtctctggcctcttgaatctggtgctatccctcctgaagtcaataggggtctggcatgacaatgcccttaaccactgtgatatgctgcctccacttacctaaaaattcctgcacgtttgcactgtattctgctgtattcacaactcctatctcagtgaagggcattaaaaatttagagggaaaaaagggaattttatatttaaaaacataactgcctgttatgtgctagtcacatgttagccacaggatacag

SEQ ID NO: 295979 - DNA, 277 bp, Homo Sapiens
ttggggaatgcaaaagaactaaaacggttaaacaattttgaaaagaataataaagttggaagaatcactcgatctaattttaacacttactgtacagtaatcaaggcagagtggtactggcagagggatagacacttaaagggaccaagatagagcctgagatgtagattcacacaggtatgcacaactgatttttgacaaaggtacaaaagcagttaagtagaggaacgatagtcttttcagcaaatggtgttggaatagttggatattcataggc

SEQ ID NO: 295980 - DNA, 760 bp, Homo Sapiens
  misc_feature (58)..(99): n is a, c, g, or t
  misc_feature (412)..(507): n is a, c, g, or t
gattctcactaaatgttaataatggttattttaagagtagttagaatttgtggtgggnnnnnnnnnnnnnnnnnnnnnnnnnnnnnnnnnnnnnnnnnncaaaacaaagatgtataatttatagaacaatagcaaagtcgttactccaagatcaataaaggaagagaccactaacaggaaaaacaacggaaaagcaagtgtggaatatatgggaccaaagaattttctagcctgtctcctgtatctgcagctggcttctttcaaactgtgtgagtgcctttataatgcaaataaaaggattaattcccctgatgttttgctactgagccagacctttacatgttcaagaatatggtcactatattgctgactatgtccacttaagttggaaataaaatgcgcaagtataatnnnnnnnnnnnnnnnnnnnnnnnnnnnnnnnnnnnnnnnnnnnnnnnnnnnnnnnnnnnnnnnnnnnnnnnnnnnnnnnnnnnnnnnnnnnnnnnnttttcatggtgacaagatcccctgaatgatctgtataaacatttaagcttgaaaagcactgctttaaaagatctaatggctcaattttccaataaggatattgaacagcggcttacataaaggctacagagattaattctaatagtgggtttgcagaaaggagaaaaaagattttttccgtgcacatgaaattattcattccacaatttagctgtgttttatagctatggggtccatctttggtgtggctggg

SEQ ID NO: 295981 - DNA, 686 bp, Homo Sapiens
ttggcacaatttttgaactggcaaagtctgaatttatgcgatgaattaaatttgacatagacaaaccactgatgttcatagtgcagattttgtaaacataggtaaacacataagaaaagggaggtcacatctagttgatgccaacttctgatatggcaagtctagagaaaatattggctattagagataaaaaaaacactgactaccaaaattacgtggcccactagtattgagcattcgctctaccatggttcaacagggcaattatagtaatttaccatatgtattggcttagacgtctttcttcactgctagactgagagctccttgcgaattaggatcaagtctttgtgtcttaatgcctaatagagtaacacaactttggtatataatacagatttaatcaacactatatatttaattggttggttcaacaattaaaatcactaatcattatgcaaatgtgaatggctgagggaagacagctatctttgatttgtacactctttgtatccagagcacctaaaacatttaatatgcttctattgaatgaattagtatggtcactcatgtatattggaaaagacatggtctttacagataaaactcctattgacagagtgaggcatcctgtagagagactgcttgaatcataatgttcatatcttgggttagagaaaaacgga

SEQ ID NO: 295982 - DNA, 828 bp, Homo Sapiens
  misc_feature (604)..(707): n is a, c, g, or t
ttggcacagtctaagatgatttaccttttatgacgtctttaaaacattccatcatgctcattcattcagcagttattattgcctttgttaggccgcgtgcaagatatcaagataaaaagaaaaatgagacacagcctatggcttcaaggagcttataacccagttgaatgaggcacatatataataagtaaacaagtattaggtgtgccaaattaagttcagcccaaagctgcctccttacatagtgaaagctcggcctaaagttttctctgtacatagcaaactgtaacctagctggatgtgtaaacaggctgtaacctactcttgtgccaatcactgagattcggccaaaggtggccaactgttcaaactatgttcagataaggcaaacactgaaatgtaaccaatacggctgtttctgtccctcacttttcgtgtacctcactttccttttgctgtccatcggttgtcttcaaccacacggcagtgcagagtctctctgaacctgttttgcaaattgctctttactcaaagtctgttcagtttaatctgtctaaggtttctcttttaacaggtggtagtgtggtacaggggagagtgtctnnnnnnnnnnnnnnnnnnnnnnnnnnnnnnnnnnnnnnnnnnnnnnnnnnnnnnnnnnnnnnnnnnnnnnnnnnnnnnnnnnnnnnnnnnnnnnnnnnnnnnnnataaaatgtagggagggatgtttaatgaacaatgtatacagagcttgttatgtatatagagtaactcttatcattatgcccccgtttcatggactgtatgaaagtatgcgtggggtcccac

SEQ ID NO: 295983 - DNA, 845 bp, Homo Sapiens
  misc_feature (302)..(310): n is a, c, g, or t
accacttcttccagtaatttataatgtactagagactcattttcctagctcttgattatatttcatattcctatgcaaggcaaaataatttaatattccctcatcaaaatatccaaagtttctcttagcttttctgataaaaagtttgaagcctacatcttttaaatggtactcaaaattcatgttaaacgttatgaaaacttcaattaaattaactgttttgtaaatggatggaataaaaattcccaagaggataattataaaatcaagaattccagaatagtctttttcttgtgccattnnnnnnnnntagcatgcatattacataagtggtcttttttctaatttaacttgattttttccatagtctgtgcatatttttaatatataacatgaggaaattttaacaaattgatatatgaagttttttccttgcagtgcaaatatactgaagtggtggtccccaaccacttggcaccagggactggttttgtggaagacaatttttccatgaatggggagacgatgatttcaggatgaaactgttccacctcatatcatcagacattagattttcataaagagcacataacccagatccctcgcacacgcagttcacaataggggttcccctcctatgagaatctaatgctgccactgatctgacaggaggcagagctcaggtggtaatgcttgctcacctgcttctcacctcttgctgtgtggccggcttcctaacaggccacggaagagtactggtccatggctggggacccctgcgctgaagaatactcacgagagtaaaagtggctgacatagaaaatccctttgatcctggacccaca

SEQ ID NO: 295984 - DNA, 440 bp, Homo Sapiens
tttctttatccattcatccattcatgaacacttaggttgattccatatgttcgctattgtgaatagtgctgcaataaacatgacagtgcagatatctcttctatttactgatttcctttcttttggatataaacccagcagtgaagttgctgtaccatatggtagttctctttttagtttttttgacgaacctccatattgttttccataatggctgtactactttacaatcccaccaacagtgtacaaacattcccctttctctgcacctttgcttgcactttcatatttttgataatagccattctaactggaatgagatgatatctcttgtggtttcgattttcatttccccaatgattagtgatgttgagcagtttttaatatagctattcaccatttgtatgtcttcttttgacatatctgttcagatattctgc

SEQ ID NO: 295985 - DNA, 777 bp, Homo Sapiens
tatatatggtttgtagagctctgaagtctggaggctagacttcctaagagaaagccaagaatatagagcacattgcaggagttaagaatggcctttggaacctattatatattcctacagtggagcaactgtcaaatattccacattgtctcatttttctccattttagtaatgtaatgaactaagataaagaaaaaatatagtataactgcatcagtgacaagaagactcaaaaaacaaacagaagtgccaatccatgtctgaattttcaagttccctattggatgaccagactggcaaccatttcaaatcctgtttaatcggtttaaataaaatctatttcatttaaatttcatggttaagtttagtttcttctaggggcatgatctcacaaaaaatactctttaagtctttgtcttcatatgaaatcattaaaactgctatttgtcataaccactacctataagcctgagtttgagacttaattcaggtggttcagtcagtggtggtagcatgacaaaaagtgcggaaaaatgccacagtttgttgccttgaaacctgttctaaaagaaattcttggttttgctggtaggagattatttttctgaactaataaatctaccgagcaagttttatccacttaaatctcataataacgttaggagagtcatccaactcacaactttatttatgtgacttggcaaaattcacgatactattatgtagctctgaatttgtcttgataagctaaattacttttacaactcattaaaaaaa

SEQ ID NO: 295986 - DNA, 925 bp, Homo Sapiens
ttggggcctcattggccgtcttgtgacccgaacaatccctgctgtcccaaagtcattcatgcattcaacaaagctttcagtgtccaccgtatgtgaagcactgggaatacaacagtgaacaaaaattagtgaaaactacctgccatctcagagttaacgttcaagaagggagagaccagcaaaataagtaaattgagataaactaaggagataagtactacaaagaaaagggaagcagggaaggggatgggagagctgaggttccagaggtgtctcttaatatccaccactgagtgtgagccttcctaactgcacccagggactcccacagtctggctggttccgccttgtctttctcttgcagttgcccacaggttccactaagtgagcaggggcagctgggctggaggcagtgggggctgagagcagccagaggaaggcacccccttactatcctcaaacacctgggggaggcaccaaccctacagggatggttcggctcacaccactaaaatgattgtagctaacatttaagaatacagagatatcacatgaaacctaatattctgacttctctttttttaatttatatttttctaacttttaagttcaggggcacatatgcaggtttgttacataggtgaacttgggtcatgggggtctgttgtacagattctttcatcacccaagtattaaacccagtacccattagttgtttttcctgatcttctccctcctcccaccttccaccctccaaaaggccccactgagtgttcccctctgtgtccatgtgttctcatcatttagctcccacttataagtgagaacatgtggcatttggttttctgttctgcattcgtttgctaagattatggcctccagctccatccatgtcccagcagaggacatgatctctttctttttt

SEQ ID NO: 295987 - DNA, 127 bp, Homo Sapiens
ttggttcctttcagccactgatagcaattaatttagtcatcactgacaaatattaacaaaaagccatcaagaatctttccaatgtgtccagtgagccaacaacaaaaaccggggtcaaacaaatgta

SEQ ID NO: 295988 - DNA, 189 bp, Homo Sapiens
tttgtacaaaaaagttggtctcttcacacccttccagcatctgagtaagtatctaggacctgccttcccatctatgaccaagaatgaactggccacactcccatctcaaggcagtgcctctacttgtacccgtatcccatcctcgtgtacactcaggacatctctttggcaattacaccctcttctatg

SEQ ID NO: 295989 - DNA, 864 bp, Homo Sapiens
ttggtgggagtctaaactatatcaagaaagatatttggttgtgaaggtgacagcatctctgtgtagtaaacagaaggcaaataaagctcttggatttggaaaatgtttattatattttctaacattactccctaggacaactcaagttattattgcagtttcaattattccagacagttagtcctgcttcctgatagtatgtaaatttcccagcttggtgccatctctaaggttctaaatttcattttgcactaacagcttttccgaaaactctgccactcggagacccctgtgtcctaaatgctgtttctttgtggagtacaatgtttttaatcgggtgaaacagtgatggagagcgtgtcagatttccatgcaggatacactcatttgtgaagcatgcaatcccgctgttaagactgcagtgaaccaagagagcaacaagctatttctacctagtgggctgatagcattacagcctctggatctgaaatgagatctattttaaatttaattcattttctgagggatacgtaacaagagcctcttctgtatgcacctgaaccaaagaccataagccatactgacagcgaggcagggaatgtgaggacgcagaggcagcttcctcaggactccctgttgccaggctgccatctcttcccagcaaaaacatcttgctgttttttatggcccacttgaagtaccagagacataacaaagagtgcatcatgtgtcgaagctgcaccaaccggatcatctgctcttaaagtggctctgtaaattcttttctctccgttatccacctttcctctctgtggtggaaccttcctatcagcactgaaacatgttcaagtccctcttatcttt

SEQ ID NO: 295990 - DNA, 283 bp, Homo Sapiens
tgtacaaaagttggcattccaatggctactattcattttgaggtccatatactattcttttaataatgtattgttctaaacctaaatcactatgtttcagtttttagccctaaaatacagttgagtagatggtagaaaggatgttaagaccaagaagaagaacttttagctgactcatcctagaattgaccaggtttgtgattctactctataatgaaagacactaagaaacctcatacaatatacacctttcgtaatagtttgctctgagtaagaaactttg

SEQ ID NO: 295991 - DNA, 883 bp, Homo Sapiens
  misc_feature (447)..(729): n is a, c, g, or t
  misc_feature (731)..(747): n is a, c, g, or t
ttgggactatatcttagtgacccttatagtttctgctttgcatagtgcttagcagatactctcttcttagtaaaaatttgtggagtcacttagtaagtgttgacaggtcagtttagatagtagagagtatggaggcctgaagaggacagatttcaataatttatacatttagtagaaataggtgaaaagatgctgttgaatggcaatgaagaacacagaaactgaactaagtccagggtccataaaatctgttaatgaagatagctctggtgatggggaaattgagtgctctaattttggaggtagtggttatgtgatactcacttagcaattttggttaattatattgcatatgctgtcgaatgggtaagaatgaacagttcccagtaattgtgctaaagtgtggaaagccgtcataatcattgctttaaaaaactgtatatttannnnnnnnnnnnnnnnnnnnnnnnnnnnnnnnnnnnnnnnnnnnnnnnnnnnnnnnnnnnnnnnnnnnnnnnnnnnnnnnnnnnnnnnnnnnnnnnnnnnnnnnnnnnnnnnnnnnnnnnnnnnnnnnnnnnnnnnnnnnnnnnnnnnnnnnnnnnnnnnnnnnnnnnnnnnnnnnnnnnnnnnnnnnnnnnnnnnnnnnnnnnnnnnnnnnnnnnnnnnnnnnnnnnnnnnnnnnnnnnnnnnnnnnnnnnnnnnnnnnnnnnnnnnnnnnnnnnnnnnnnntnnnnnnnnnnnnnnnnnctatatatttatttgagctttttctctaatcaaagcacatggctaaatctgttggagggtgtgtcaggctcaaccaaaaactatagagaatttaaaccagggaattgggttatgcaagtgatgggaactctgagaa

SEQ ID NO: 295992 - DNA, 805 bp, Homo Sapiens
ttggtgaaattgtgttaccatctcataattatttcttaaagtaattttcttggactgccagggcttcacttcaatatctaaatttgatagttaattcctgtcatcatgatgggcatggggtagagaatagagtattaaatccatatatcatacttagagttgagaaaccagccaaatggcaatggacaattcaaaaatgttttcaatctagtgattttgtgcataaacattatttaaaagaacattatcttcaacttgatatttgctctctggttgtatttagatttaaatttcatgtttcaacaaggcccagaaatttcattgcaaatctacaaaggttctgctcattaagaaagaagcagggacccccatatctttgatgaccttctccaacccatgcctatcaccatcacccttctcgctttagctaacaaaggattgtaagaaactacccagggtcttccttatggatgaaaggagatctttccagctcactaagaacctatgattttaaacatgacatgtaattgaatttagcctgcattttattaacgatacaagagtcactaccgttaccggtggagggtgtccaggttcttggcatcttgaacaaagaattggacaaaatgcacaaacaaagcaaggaaagaacgaaacaacaaaagcagagatttattgaaaatgaaagtatgccccacagggtgggagccacctgagcacagcggttcaagagcctccgttacaaaattttctggggcttaaataccctctagaggtttctattggttacttggtgtatgctcta

SEQ ID NO: 295993 - DNA, 652 bp, Homo Sapiens
  misc_feature (511)..(532): n is a, c, g, or t
gccagtgtgcatctacagcccacagcaacaccgccagcacagggaatatatggacatgagcagtaaatactttttgatgaggaaaagagaaacagcaaaatgatgagcagcaaaatagcaacatgatacagtttatgaaaggaagaactcaaaaactaagaatcagacagaagcaaattaagttgttgcttaaagcataataattaaggcttttaaattcaccaaaccattctgctatcacagactgaaaaggcttgtttatcccttctctgtcctgggggaataaattatctcatgagtctttctattttaccaaattgctatttaaaagctggtgaaatgtttaagcaattcattacattaatataaagatcttttataggacaaaagcattatcaaaaccaagtatgaacagcattatgagtaaagtggaaaggatattgtttacttaaaacccattgaactcaaccacaaaattgattctaatttaagacgctaatcttttagcagnnnnnnnnnnnnnnnnnnnnnnatcaaaatgaactgtatacaagattttctggggaaaaaagttccatcttatttttattcctctcaagttatttactctaattatctcgccttattttattgaaatactttgttaattagg

SEQ ID NO: 295994 - DNA, 730 bp, Homo Sapiens
aaagtagagtttccataattcaacaaaaacctccaatagttgatagatagttgttatagggagttcccatcccagagaagtaaatcctactgaccagggtagcagacactgaatacccaccactaaataccctctggcttttagtttacagaatcatgactttgtttggaaatatgatgttcccagctcttcagaacaggccatgttttgttggcacgagttggcaaattacccctgggtcaaatccagcccagctcttggtattataaacaaagttttattggcatacagatgtgcccattcatttactcattttctatagctgcttttgcaccgcaagggcatattttagtagttgtgacagagaccatatggcctgcaaagcctacagtatttactatttggccctttacagaaaacatttgccaagtcccagtccaagccaatgccagccagtttcccagcctcccttgcagctaggaagatgttgaattgtatacagtaggtaaggaagaaggtgtggccaagggctactcttggataacagaatagatggtagaaacattgactaaaatagcagccatagaggagcaccacatttggggggtggagtaaagagaggaagatgtaagttcacgacattagaatatatgatttgctttgctgaccactttggtgcccaaaaaaagagagagagaagaagaatatatgatttgaggtacctttggga

SEQ ID NO: 295995 - DNA, 787 bp, Homo Sapiens
ttggcaatggccttttgtttctgtttacatatctcatcctctagtccctgggaactctgttaaacaaaatgttgcagaagccatcaacataacccgaactaccggatccaaagtaggttgagaaggaaggaattgggataacctaatttcagtgtctttcttcatgccctgacctgaatatgtgagatcctggagagtagaaagcacaatctctggctagtcttccccaagtgttccctaaacagactctgaaggactagctattgatggaagtgcaaattgtgcatttatgcagcactttggctccaggatccgaatatcttggatttaatcctgagagggtacattttcacattttaccttagcaagagacaatgaagtatagtcagtgctcctcagattgttccacagaaagaaactaagtggtggagatctatgaatatagcctggaggaaactaacacataccaaatatatttaaagtcttctgttgtatgctaaaaatggtaagttaatttgtgtcctattacatattggtttgtttcaattataaatggtatatttccctcaaagtatttgaggaacaactgtgctaaagcaagatggaccatatctcgctgttcagacccacttgggttcttgtcctcatatgtgaatgtggataagtcacataaacataaagaactttagttccttcatgggtaaagtggtaataattccaaattctcaaggttcctgggtgattacataagatttgaatgcacaaactttcctttggaacaaaaaaa

SEQ ID NO: 295996 - DNA, 904 bp, Homo Sapiens
  misc_feature (62)..(109): n is a, c, g, or t
  misc_feature (416)..(432): n is a, c, g, or t
  misc_feature (454)..(462): n is a, c, g, or t
ttggctttaacacacattgctacttttattgtgaaagtcaccagccattgggtaaagaagannnnnnnnnnnnnnnnnnnnnnnnnnnnnnnnnnnnnnnnnnnnnnnngaatgaagacaatctcaatctggaatacagaataatacttggtaactctaactaaacactttgattggataccaacattgcaactttcacaattaagataaaatgcagaagataaaaaagcaaggcatataaaaacaaacatcttgccctgatacatagttctaactatttaaattataagagaattttaaaaggaaagaaaaaaataaaggccaagtcctgatccaggtagacaagacagagattttttatgctgagtaaatgggatgtgattgaaatagtttaaacatagaagtgacatcatgannnnnnnnnnnnnnnnnatcactttttacaaaaaacacnnnnnnnnncagttagaaaagagaggttggaaggcataggattctactactatagttaaataagataatatttaatgttggtttagggtagaattttgacagtgagaatgaggatatgcaagaatgagttaaatacatttttatataaaagtgaaggaaccaataaaacattagattagatggatgttaatggtgaagaagtaatcaaagaagattctgagatgtctagcttgatcaactgggtggatgatggggccattacttatgtggaaatagaatatggaaggtatagatgagatattggccagtaaagcaacttcattttagatacattaatgagaaagtgttaagagagtagtctaatagaatggatttatttatggaaataaaaaatataaaattggtgttaatagataacacttttgatagaatctctgttaatgggattatt

SEQ ID NO: 295997 - DNA, 836 bp, Homo Sapiens
ttggctgactttaaaaataataaatcctaaatctgagtagtgctacaggcaggaaactggtatttctcctattcacgccattatattttcaatgcattttgaccaaaatcatttttgcacagtgaaagacctgggaatgcattttaatagcgatgaaagcatgagtaatgaggagtgctgcctgaagcagtctgagctcgcatctcctcagctgctctcttccattttgacaggtagcatctatatcccagccctgagacccttctcattcccaactctgttgaattatcccactcagaaactatgctctcctcaaatcttgtttttttgaaaggtgagagaccttactgccttgtttctgacctccatttgataactccaaagtaatcatgggaggcatttcagatcgacataccaaaataatttcacattcgccagacccatgactgaaaggacagggtcacttgcaaccatagccacatggaaatcttcgagagaagaggggagctttcctcgtgattaaatttgagggagtgattaactcaacttctgcctgctcatatctgttcattttcatgtgtccaactcataagcacagtcaattttcttttttctccccaaagttatgggggtagcccacgagcaatttattctcaaaatgagagtgcaggagaaatttctaatccagtgatcaaaaagccctgtggatcaagatagctcaggaaacaagatcttctacacaatcatgtagatgacatggatggatgcgagagtagtttccttccttttttgggaagtccgcgacaaagtcaaatgttcattctttccttgtttat

SEQ ID NO: 295998 - DNA, 916 bp, Homo Sapiens
ttggcaaatcctccatcgtcagagatcagcggcttagtagacagagcctctggttctcccttcggctgctaggaaactgagcctcccagcagcacattaggttgcatattaaacagatgggatgcagatttgagacctgttaaaggttgggctttccttttttttataggctgctgtcaaggtgtgttagtatctctttatttaaacaagctccttagtcttggttacacagtgcagagactcgggaaaaaaagtgagtagaataaataatctatcatgctagcaacataattataagaacatatgttagctcgaactagctatattctagtcatattaagggtatgtgtgggagagagaaggatggcaggagtgtctcaaaatagttcaggcggagtaagagtgatatcgggctacctggaaacccaaactgctttcctggagcctccattctggcatccacagcatcccagagggctgcccgttggtggcttcctgctgctaaatgcaccacctgagtctggagagccacagggcaccttgccgctctgctcagcggccccaccttcgcgcgcagggagatgagcccattcctacttcgttgggtgcatctctgccaggtgcagagagcacaggtccaaagagaaagacccccagaggtcaagggcaatgggtcttggctttcacaaatgcctcaagctctgaggcactaagaaaaacaaaattcacatattttgagggccttcagtgaagggaatcaatgcggaggaaacgtcgtgttgcaccaccgtttcccacatgcttatttggattgtactcaccgttcaaggctcttctcagggaaagtgcccccactcacttccagcaccgccccgcccttccccagggagcttcagactctcatcgacatccctcc

SEQ ID NO: 295999 - DNA, 750 bp, Homo Sapiens
ttggctgagacaccaacattccatgcatatggagtaagatggtaatcctctgaaagccacttaggtgcttttggctaactggtgtggaaggtttgagggctatttagagttacatacttggtgcagtactggcaagaacctaacaataagctccctggaaataagagtcctaatttgtagcctttaccagtctctgtgatataaattctccaaccatggccaatttcaagctaccaatatggtattaaccagtttgcaaaattcctgaaaatttaacaattggctcttgcaagctagtatgagccagctccagacagctctgtaaatggtctctatttgttcaggacctagtatacccttacaaggagacttgaatcctttctacatttggagttctgacatgtattgagatgtctaaacactggaaatctcttgacagaaggcagatagcagagagatacaaagaggtctctgaagggggaagaacaccgtaggtttgtcataaatctggtgggatggggctgataatttctgaagaaacaatggtttggggtgctactcttgaacttgcttggtctctggcccctgtgtcaactatgagccctacgaaggagagacaaacttttagtgattcaagacactttgctgggagaggcccttatcacaggtaggtgagtaataaagctgaaaaaacactatgactaaggttccaagtcactctgtggaataaaccctattctttgtgctatc

SEQ ID NO: 296000 - DNA, 882 bp, Homo Sapiens
  misc_feature (501)..(509): n is a, c, g, or t
ttggcagttaatgagggaaagaatgacaggagatgaaatgagatgggatatagggattgggggaggaggcagggggcagaggaactaaggcaataaagcctgggaaaggtgacagacagtagtttgcattagagtggtagctgtagaggtgtcagaaaagcagctactttgaaataaaaaagaagggacttaaaagggcagaggtgtggtctcagggtactgctttggggagaaaagggcaactcgaaagaggaaagtgccctgtggagacttgggagtaaagggaaagaaggaagaggtggaaattagggggtcatatagaaacaaaagaaaaatcataaaatcggaagacacaccagcctcttccccattgcttaaagaagtcaactgtatatcaaactggtaatgttatcctcacagaaaggggaaaaaaagaattagtcaaagtaattctaaacataatatgttggtgtattcttagcgggatatagtctaagaacnnnnnnnnngctactaggaaatccgaaaatagctatagtatttgttttgtttgtttggagggactgtttctttatttccaaaaagatacctgttaatattcagtatcacaatggttgcactattggtttctctttctcccaattggccccaaagagactacatcaaagaagagtacattttaagccaataagcttcaggatgtaaacctaacagaccttacacaaaaaccttaccaaaaagtggggattgagtgggaaagaatctttaaacgatcagcaaactgccagcccacagactagagagctctcacagtcaaacacagtgtgtctgagatgccacacacccaaagaagcaaagttccaaaataatataaaatttaaa

SEQ ID NO: 296001 - DNA, 715 bp, Homo Sapiens
  misc_feature (69)..(124): n is a, c, g, or t
  misc_feature (211)..(642): n is a, c, g, or t
gtgtgcatcagacattccttgcctagaaacataaatcccaaacatttgttcaccagaagacagtcctcnnnnnnnnnnnnnnnnnnnnnnnnnnnnnnnnnnnnnnnnnnnnnnnnnnnnnnnngggtgtttgtacgttcacaccacggagagtgaacaacctacaactgtacacaacgcgcacggagaatgaacaatctacagctatacnnnnnnnnnnnnnnnnnnnnnnnnnnnnnnnnnnnnnnnnnnnnnnnnnnnnnnnnnnnnnnnnnnnnnnnnnnnnnnnnnnnnnnnnnnnnnnnnnnnnnnnnnnnnnnnnnnnnnnnnnnnnnnnnnnnnnnnnnnnnnnnnnnnnnnnnnnnnnnnnnnnnnnnnnnnnnnnnnnnnnnnnnnnnnnnnnnnnnnnnnnnnnnnnnnnnnnnnnnnnnnnnnnnnnnnnnnnnnnnnnnnnnnnnnnnnnnnnnnnnnnnnnnnnnnnnnnnnnnnnnnnnnnnnnnnnnnnnnnnnnnnnnnnnnnnnnnnnnnnnnnnnnnnnnnnnnnnnnnnnnnnnnnnnnnnnnnnnnnnnnnnnnnnnnnnnnnnnnnnnnnnnnnnnnnnnnnnnnnnnnnnnnnnnnnnnnnnnnnnnnnnnnnnnnnnnctgtcgtgttggaatcaggagagtgggtacccttacggggaatagtgactagaaagggaaggtgatgaggcga

SEQ ID NO: 296002 - DNA, 814 bp, Homo Sapiens
  misc_feature (167)..(276): n is a, c, g, or t
  misc_feature (333)..(356): n is a, c, g, or t
  misc_feature (419)..(749): n is a, c, g, or t
ttggagcctttcttgtgactcaggtctcagcccactgaatctaaagtagttcccagacactctctattgtgtatgtttcttctcttcccgccacttgtcaccatcacagtttccatatttatgtatatgtttattgttggtttccaacatgaaagatatacttcttnnnnnnnnnnnnnnnnnnnnnnnnnnnnnnnnnnnnnnnnnnnnnnnnnnnnnnnnnnnnnnnnnnnnnnnnnnnnnnnnnnnnnnnnnnnnnnnnnnnnnnnnnnnnnnaaatacacgggtgagtgaggacagtcattgggaaacttgccctcctctccattctannnnnnnnnnnnnnnnnnnnnnnnaaaaagtaattgcaaaagtaattgtaccaatctaatagaatggaggggagagcaggtttgctnnnnnnnnnnnnnnnnnnnnnnnnnnnnnnnnnnnnnnnnnnnnnnnnnnnnnnnnnnnnnnnnnnnnnnnnnnnnnnnnnnnnnnnnnnnnnnnnnnnnnnnnnnnnnnnnnnnnnnnnnnnnnnnnnnnnnnnnnnnnnnnnnnnnnnnnnnnnnnnnnnnnnnnnnnnnnnnnnnnnnnnnnnnnnnnnnnnnnnnnnnnnnnnnnnnnnnnnnnnnnnnnnnnnnnnnnnnnnnnnnnnnnnnnnnnnnnnnnnnnnnnnnnnnnnnnnnnnnnnnnnnnnnnnnnnnnnnnnnnnnnnnnnnnnnnnnnnnnnnnnnnnnnnnnnntaatatcatgctattaacagaggaggcggcgtggggtgaggaaatgccactaagaaagtctcaga

SEQ ID NO: 296003 - DNA, 557 bp, Homo Sapiens
aagctacactatgtatataggtatatatacagttgccctcaatattcatggatcttggtcccaggatctcacttggataccaaaatccttggatgctcaagtccctgatataaaatggtatagtctctgatataaaatggttatatttgcatataaccactgtgcatcctcttgtatgcttcatatcatcttcagattacttataatacctagtaaaatgtagatgctatgtaaatagttgttatactagattatttagggaataatgaccaggaaaaaagtctgctcgtgttcagtacaagtattttctgtcagtggttggttgaatccaggaatgtagaacccaccaataccaatggccaactatatgtgtttgtgtgtttcttttcattccttacctttctctcactttctgctacttcttctcaataggggattcatataatttgtagtgtgctttggaataataactgaatgcactatcccagttttccttctcatatctttttcacatcatactgattttatttatgatttgttttttaaaattttgtttc

SEQ ID NO: 296004 - DNA, 318 bp, Homo Sapiens
  misc_feature (119)..(147): n is a, c, g, or t
  misc_feature (149)..(191): n is a, c, g, or t
ttgggtcactctcagcttggggattctcaggattgtgtcctttctaacttgcaaaaattctcacaattttctaccggctgatgacattctttctctcttgccaacactattctgaattnnnnnnnnnnnnnnnnnnnnnnnnnnnnnannnnnnnnnnnnnnnnnnnnnnnnnnnnnnnnnnnnnnnnnnnaatcttttttaggtcacataaggaatttagggcaggaggagagctagatgtgtgttcagttcaatctcctcctacaataccctctcttagattactcccatattaaaccagtgacacatttaaccgg

SEQ ID NO: 296005 - DNA, 927 bp, Homo Sapiens
ttggctcaatattgcaaatactactacaatcgctatagtttcccatgtacaagttctattttgctggctaagaaccatcactttcttgcatcttcccactttcttttcattgccatcacaagcactagcagttgcatcttttggggtaattttttttccacaaaaaacccgataagttttatgacttctgagggaggtcctaagcacaggaggaaaagggaactatgaagacacactgatggtaggtatgtacttctctgagtagacaagtaacaaaaatgggcatctcacaggtataaatgctgagactaatcttatttttcataaatctataatataatgtttgctaactatatgctgactgaaactagatggaaaaatgagtctacaatacatctaccaagtcgggagttaacaccatagtctttaaaggagtgaaatgttaagtcaaaagtggtaaaacagaggaaaagacattctctgtgagatttctaactttctgtaatgcaaaaagatgaattcaatcagggactctgtgggaccacttttaacatttccttgactcaaatgaactggaagatgtgtcatactgataaaagaatatgggtttttaaaggtgagtgggcagaaaaatcatgagtaagatttagagtaggatacagcatgcatttgaggaaaataatctaaattatactcataggccaatgggtttctagtttatcagtctatctagcttacatctatagagaggagctgtgagtctgtctaaattagcctctctggggacccaagtactatatattacagccacttatgttattttctttatagcatttgccatgcatgctgtatgctttttgtttattatctatgtccacctctttcacctttaaaacagatgcaaactccataagagtagggaccatg

SEQ ID NO: 296006 - DNA, 741 bp, Homo Sapiens
  misc_feature (54)..(62): n is a, c, g, or t
  misc_feature (342)..(359): n is a, c, g, or t
  misc_feature (369)..(440): n is a, c, g, or t
  misc_feature (509)..(659): n is a, c, g, or t
atggtttgctaatcagctgagttgataatgtgtccatctttttacccagcaggnnnnnnnnntatctacccctaaggaaactggaaactaggtagaggttttattacaaaacaccttaaaattcttcatggcttataaacacaagcatttatttttctcatgaattggctaggttcacagatctaggctgggctcagctaggccaggttagaacccaaacttatggttgggttccacatatcttaattccggggcccaagctgatagggcattagcaacctggggtatgctttcttctagtggctcccaagaacatagcactgaataaaaatatgatgtccnnnnnnnnnnnnnnnnnngaaacaaaannnnnnnnnnnnnnnnnnnnnnnnnnnnnnnnnnnnnnnnnnnnnnnnnnnnnnnnnnnnnnnnnnnnnnnnaagcaattatcttgcctcaacctgccaagtacctgaaactacaggtgttcaccaccatggctggctaannnnnnnnnnnnnnnnnnnnnnnnnnnnnnnnnnnnnnnnnnnnnnnnnnnnnnnnnnnnnnnnnnnnnnnnnnnnnnnnnnnnnnnnnnnnnnnnnnnnnnnnnnnnnnnnnnnnnnnnnnnnnnnnnnnnnnnnnnnnnnnnnnnnnnnaaagctaccgtatcccccacccactggtgcactgtaacttcggtccacattacattgggccaaaacaagttctatgtccaaa

SEQ ID NO: 296007 - DNA, 956 bp, Homo Sapiens
  misc_feature (113)..(123): n is a, c, g, or t
  misc_feature (145)..(787): n is a, c, g, or t
ttggtgatttcaccactaagaacacaggtcgactgaaagttaagggatgcaaaaagatgtcatgcaaacggaaaccaaaagtgagtgggagtagctatacttacaccagaagnnnnnnnnnnngacttgaagtgaaaaactcttnnnnnnnnnnnnnnnnnnnnnnnnnnnnnnnnnnnnnnnnnnnnnnnnnnnnnnnnnnnnnnnnnnnnnnnnnnnnnnnnnnnnnnnnnnnnnnnnnnnnnnnnnnnnnnnnnnnnnnnnnnnnnnnnnnnnnnnnnnnnnnnnnnnnnnnnnnnnnnnnnnnnnnnnnnnnnnnnnnnnnnnnnnnnnnnnnnnnnnnnnnnnnnnnnnnnnnnnnnnnnnnnnnnnnnnnnnnnnnnnnnnnnnnnnnnnnnnnnnnnnnnnnnnnnnnnnnnnnnnnnnnnnnnnnnnnnnnnnnnnnnnnnnnnnnnnnnnnnnnnnnnnnnnnnnnnnnnnnnnnnnnnnnnnnnnnnnnnnnnnnnnnnnnnnnnnnnnnnnnnnnnnnnnnnnnnnnnnnnnnnnnnnnnnnnnnnnnnnnnnnnnnnnnnnnnnnnnnnnnnnnnnnnnnnnnnnnnnnnnnnnnnnnnnnnnnnnnnnnnnnnnnnnnnnnnnnnnnnnnnnnnnnnnnnnnnnnnnnnnnnnnnnnnnnnnnnnnnnnnnnnnnnnnnnnnnnnnnnnnnnnnnnnnnnnnnnnnnnnnnnnnnnnnnnnnnnnnnnnnnnnnnnnnnnnnnnnnnnnnnnnnnnnnnnnnnnnnnnnnnnnntgcctgtatcaaaaaagactaaagatctcaaataaacagcataatattacacctcaaggtgtaatacaagaggaagaacaagaaggacaaggtaagcccaaacatagcagaacgagaaaataacaaagatcaaactagaaatgacaagtagaactagaaagcatatttt

SEQ ID NO: 296008 - DNA, 322 bp, Homo Sapiens
cagactctgaagatgggattgcaatgatcatctctgactaataatacctgaccatatgatcactaaaacctaccttggcctgataaatttgaatttgatcttttgtactctgagaaattagattaacaaatttctccacatcacatacacttgcaccgaaagactgaatccatctccctgaatagttcttcctcccttttcctcatgttgtccaacattgggatggctttttcccaagcggttaaaattatatagatctacacatataaatatacacataaatctaacgaattcaacccatctctactcataaggtttgttc

SEQ ID NO: 296009 - DNA, 916 bp, Homo Sapiens
ttggaaatggatttttcttttctactgcatcatcaggctgcaagttttctgaacttttatgttgtttcccttctaaaatggaatgcttttaacagcacccaagtcatgttttcaatgctttgctgcttaaaatttttttctgccagatatcctaaatcatctctctcaggttcaaagttccacacatctctaggacagggtcaaaatgccgccagtctctttgctaaaacataacaagagtcacctttgctccagttcccaacaagttcctcatctccatctgcgaccgccttagccaggaccttactgtcatatcattatcagcatttttgtcaaacccatttaacaagtttctaggcggtatcaaactttcccacattttcctgtcttcttctgagccctccaaactgttcaaacctcaccctgttacccagtttcaaatcacgtccacatttttgggtatcttttcagcaactccccactcctggtaccaatttactctattagtctgttttcatgctgctgctaaagacatacctgagactgggaagaaaaggaggtttaatttgacttacagttccacatggctggggaggtctcacaattatggcagatggaaaaatacacttcttacatggtggtggcaagactgaatgaagaagcagcaaaagtggaaacccctgataaaaccatcagatctcgtgagacttaagtcactatcatgagatagcaagggaaagaactgcccccgttatttaattaccttcacctgggtccttcccacaacatgtggaattttgggagacacaattcaagctgagacttgggtgtggacatagctaaaccatatcagaaacacaatatgtcaaacttaacggatgcatcaaaagcagtttcatgagggaattttatagca

SEQ ID NO: 296010 - DNA, 238 bp, Homo Sapiens
ttgggatgagaaaaataaattatataaagaacataagagaacttttaaaatattctaaatagtaccctcaggaatagaagagaatatttaatccataaaacaagaaaactttgcaatcagagtaggagaaagagttctctgaaatgaaatgtataattactgaaataaaaacatccaaagatggaccaaattctcaaaaggacagggttgaggattagattagtaatttggaaaatga

SEQ ID NO: 296011 - DNA, 583 bp, Homo Sapiens
  misc_feature (452)..(529): n is a, c, g, or t
ttggcacaaagatcatcacatcctagtgagtgataggaaagataaactgatgccttcagcaaaaatatagttcagctcacttgatgagatatctgttatataactaaagagtttcctaaaacttaatccaaactggcaatgggagaataataagctcaatatttgtgctgatactaggaaagtgaaaggctggttaccactaaatcataaaatgaaaccagatgagaggtatgtaatatctgtattttagttctacttttgatatttttatttgaatattgtagaaattaaattaagtgagaagaacatgatttagaatccacttacaataaacattaagaactagattgggtcttctgcttcagaccccgatgtagaaacagggacaagatgtaccctcctgcctgaaacaaagaatttaaaatgaaaaccgaactttcttggacaaagannnnnnnnnnnnnnnnnnnnnnnnnnnnnnnnnnnnnnnnnnnnnnnnnnnnnnnnnnnnnnnnnnnnnnnnnnnnnnccatccagctgatatccactatagtgagtcggattacatggtcatagctgtttc

SEQ ID NO: 296012 - DNA, 187 bp, Homo Sapiens
tgtacaaaatagttggcacgacttaagaacaaaatcataagttgggatataggcagtctgggaggaggggtctaggtggccagagcagcagagacagggtcatgcttgttgagggactcagaatagtggctatttttcaaacaatatggaaatagttccatattttaaccattggtatggctgtaag

SEQ ID NO: 296013 - DNA, 900 bp, Homo Sapiens
ttggagcaggggaagtgtcaaaccagcagcccaaaagtggcaatgaagatagaggtacaacttagaaaatacaaaggagatggttcctgtcttcaaggaatatatatacaatctatcaagcatttcaaaacatacctgaagcacaactgaagctcaagctggagtctttgctatacacttaatgtcttttcaggatggtgtttttcctgtgataaacccagtgatcagagatctgtcaaagtaaataggaagccagagagtaaccaggtagttagtgctgtgtttcataactggccaggtgattgaagacctgtcttgagtgaataactggccaggaagtggccagtgagggataatgttttcagaaggtctgactgaacgggagctgtatggtcccttgtttggtaggatgcccaatatctgccaatcattacacatggatcagtaagagaggctgttcagccagttcagcacaccggtgtgatagtattctaattcctgaccaaacagagtccacttgctttacaggaacgaagtgttactctttcatcttcctgattttattccttgttccttagagtcaaataagcacttgctaaatgggtaacattttctgaaatacacaccgagctgagaattcaaataaccgctagattctgactgtaaatagaaaaggtcgtaaagaaaagacatcttaacaatggacagtagaaatatgtaatcagagttcggaatatagatgtagagatggacaagactttgtcaaaaaggaatctttcaggcacccttgtaatctacttagatatttcagtgtttgaccttgaagcaacttctggcaagttggatggcataatttcctagaatatcatagtggataaatccattagcctggtgaccctc

SEQ ID NO: 296014 - DNA, 112 bp, Homo Sapiens
ctggtatacagtaaataatcaatgttaactgttattattattaactcctgattaacagaaaataaaaagtgaacgagctattgagatgcaagtaaactgaacaccagtattc

SEQ ID NO: 296015 - DNA, 676 bp, Homo Sapiens
  misc_feature (461)..(475): n is a, c, g, or t
ttggggctagcttcttaaaaatgcatctgctttttagagaattactctgttggattatatttgttttcttatacatttgtcttctccactagattgagtttcttgaatataaaaaaaggtctatccacttatttttatccccagtatacagctggggttaaaaaaaactaatggaatatgacagaacatccagtaccattccaatgagtaaacatatcttgtaactaaaagttactgttttgcctaacaaagtacataaatgacctctcttcataaattttggtacaatttttaatctgtttctttcaagatgtgtaaccacaaaggggaaaaacaggtaagaaagaacttatgtaagtatttgtcaaaactatccctgttgtcaattcattcatctccatcatagaagtagctggaaattgaactgctgaatctaatttcaaccattacctacaattccnnnnnnnnnnnnnnnaatgaaacgcttcacaaatttgcgtgtcattcttgtacaggggccatgtaatctctgtatcattccagttttagtatacttgctgccgaagcaagcactaattctcaaagagttcattttcacatgggtaatgaaaacctttttctgctcctttactattagcaatcattcctattgcttattctaaattaagcctttatt

SEQ ID NO: 296016 - DNA, 911 bp, Homo Sapiens
  misc_feature (116)..(125): n is a, c, g, or t
ttggctatgttgatggttcacagttcaaactgagagaattggctgataccacattcttcacctcaaactcaggtctaaaaatcccactaccctgaaccttgaccttgctaatcaannnnnnnnnnaaatagagagggtgataggagaagctgctcataagataaattaaaaccttgatgtgcattattatttccttactctggggtgttatgagaaatgctctaaaacaatatttttatacttttaaaatgccaatatgctctgggaatgattcagagaacaaacacttgaagggtaagtaaagaagcatccgctatttcttagttgcaggttaaatacatggagttcacaagagacttctgggtccaatatgaaagaacaattccataagaaatctgattttcatttttatctgtgcaccaaacactacaacacttactgggtgtaggaaagcaaatcagaaagacatgttatattacataacatgttatgttacagcaggaacaggagaatacagatgcagtagttgatttcttatgaaaatgtatggggtcaggaaaagctttacaggtggtatgatattttgcggatgattgggagatagccatggggatgggggtggggccaatagaagtgtcagtaaatgtattccaggtaaagcgattagtatatgtctcatttaaatctgagcctgacagattaaaaggcctggaaaaagtcaagtatgtcaggagcaaaaagtgcaagatagaatggcctgagctgatgctaggagaattagtactgaaagtctcttataagggattctcttaagttatggtatgagcttgtattatattccaaggcctatgaaaaagcactgattcattttaagcaagaatgtaacatgatcagttcttattaaatatttc

SEQ ID NO: 296017 - DNA, 155 bp, Homo Sapiens
tgggtttgactttgcccatcaagattttctacttatatcgtcaaacgtagcttaagaaattaataactgctgtgtagctataaaacagtctcctatgaacccttgtttattgctagattagatacaatcacgtaggtggaatccactttataagt

SEQ ID NO: 296018 - DNA, 803 bp, Homo Sapiens
agttggatgaaacctggtcctttctttgtgtttatgtaacaaatctaagttcgatgtctctgccttaatggagctcatagtgtagtaggggaagcagacatttacacttctgtgtaatagtgctacagtgcaggtcagcatggaattctttaaaggaggccctacggaggagacagttcctgggccaaagctttaaatataagtgataattgccagatgaaacacagcgggaaggctagtgcaacctgggaacatgccaaggcatggacgcaagctggaatacatacgctccattcagcatcatggttttgttatatgaaattaaaatcacctgaatgttggtgccgaacgcttcttgtgtgaagcttcatagcaccaaggcgcgtatgaaaagcccgttgatgatgtccagatagagttatgcagactggaggagaaggtgccccaggggccctcctaggtcacggcatgtgccaacttgctgggcaggagtcctgtcacctcacccaagcctgcgacctgtcaactgccaccagcaaaacttcttggacccaaccttcctgctccttacgtcaactcgtgcagggtgtacatcataaggaggatttcccttatgctgaactgaaatctttctttgagcaacttctgcccattggttcccctctgtcttctgcgtaagctgttttcgtacacatatatagctgtcacactatttgaatgtcacaaagatatctaactggacttgactatgataggaggaacacatgccttggttctctctgtgtggctcacacgatgagaca

SEQ ID NO: 296019 - DNA, 913 bp, Homo Sapiens
ttggataggatcatgtcatttctgtgcttaaaactttccaattgcatataaaataatatccaatttcctcagcatatcatgcaaggcccccataaccattcctctacctattttaccaacttttatcactaccaccagtaccaccaccccagcccatccacttcaggtttctctctctcaacctatcctctactaacatcctatttacaataagacagccatgagcctcacatatctgtgttatccttatactattttctaagctgccaatgctttctctccatcctactacagagctacactatgtcttatttatttttatggccccagtgcataatactgtgcctgtcatatagtatttattaaacatgtaatcagtgagtaaacttacataggtctcatagaaagtggacacaatttcctgaccagcagttcacacaatttgtatgcttcacatctcaaaaacactaaagaaagttggtgagttttcttattgctaaacattattggatgttttccaaaagtaattacaatcttgctttgcttttttgttccaaacatagtatttttcacaagtcccacttactgcagtttagtctcactgacaccattagtaatctatacaacatttttgcattatttgtccttgttatgatccttctcatgtatttagctgattcatgcttcaaacatcatcaagatcacaaaaaatccctttatgctcctagcaggtattgaggaaaaaaagagccattctaaatatgccaagagcattataattctccctaataagtgaaatatttttatgacagcctaacttactagggcttcaccaaagcctaactgactacaggaaactttagactctgacagtagatcttgaaattatacttgtcattttgtcactaaaatc

SEQ ID NO: 296020 - DNA, 588 bp, Homo Sapiens
  misc_feature (322)..(369): n is a, c, g, or t
ttggttttttttcccaacccaagttcccaggcagaactatgagggtcttggcagaaccgtgggggtcttgggctctgcgactgaggaaagatagagtcttcaggtgaaggaagagctctgcctccaaagaaagagtgcagccactgggaatcacaagctgcagaggaacgcaggtaccagatgtcctggtgtgcccacgatggaggcggcaggctttcgccctttatctaatgctatgagcgtgggcctcatcagctgccacagctgcgctctggctgaggcatcactcagcaaatactgctttctcaggaagacctattcnnnnnnnnnnnnnnnnnnnnnnnnnnnnnnnnnnnnnnnnnnnnnnnnacagtatttcctgtttaataacctgcctccagagagtagggatggtgttccccagcttgttcaccactgaacccagcctgtgcccaagaagcatttgttgaatggctgtgtggacaaataaataaatgaagggcatttgatgagaattcataaactattcatagaactttctctgtgactgcaatcctttcatctaagtaatgttttcctcagatattc

SEQ ID NO: 296021 - DNA, 920 bp, Homo Sapiens
ttggaataaaaatacaggggtaaaactagggcatagttatattttggctggtctctttacctctgaggttcttttgctttttatgtaattggattttaacctcagaagactgtaaggttaaagatgataatgtataaaatcagtactctgagtaatgatcaaaattttctgttgccatccacacatttgagtgagatgtagtgagtgctagaaaataaagcagttcgtatcaaaaagggtgtgttgaaagaaataaactaatccttgagaaacactgtcatgcaatctcatatctagaaattgtgcctatgttctgtctataaattgatgaattggcagggtgttacatttaggacacacattgacactacatatgacatttgtaaaaacacttgctaattcagctaacagctcgcttctccccttctccccactactcactgtggagagagcttccagctaatagcttagaatctcccagactaaccaaccattgatggaaccaggtgctatgtgattgtaggaatttatttgttgctctgaatgttaactaaaagtaatgggcttcttattttgtccttttccttttgtgttatagacggcaaagactgtttctcatcagtctcatatagctaaattagatttatctctcatgctgactgattaaaagggttaaattctgggcacgttgtcccctgagtcctctgaaatccatgtcagaatagaagtgctcattaccagactcgatgaggagctccttttccagaacttctctctgctacactctaaggaccaagcacctctgcctaaattccaagcaaccatggcctgtggcagtcttggaacttttgccctctggcatgggtagaactagcgtcaattgggtaattcaatccctgagttccttcttcaatgaatga

SEQ ID NO: 296022 - DNA, 761 bp, Homo Sapiens
ttgggccgggagggactctgtctggaatttctttatttgactaagaaagcatctttccaaaagaaatgcaattgtcttaagaccccctccttaggaatctcatcaaataaccaggaaagattaaccactggagaactgaagagactgggagtcatcacaaggctcagacaggctttttttctatttcctgagggaagctaggagccataatctgggaagctttaagacaacctctgttcacagtaaatttctctcccttcccttcttgatactgttacagtaggtagctactcagacatgatcagggtaggggagggctccacctgaccgggaatatcaggtgatcatcaggtgatgatcaagtggcttttaactgtttctctaaaataataattggttgcagccagtgccgggtaaaggcagtcttcctaaagatagcaaaaacctgaaactggttatcggcagcttcccaataagatctcaggagttgcgcaagtgggctcaagcatgtgcattaagaggcaaaatggcagagtttaattggcaaatgacctcctaggagcatttggctggtaagggaagaatacctcaagtgagcatggttacaactccagtaaacatactatgcatgctcacctcccaagtaagtgctggcaggccactacacatgtggacaacccaccccaagggaagaatcaagggagaagtaacgcaagaccccagaagtatgccaacgtaaaaaaacccaactttcttgtaca

SEQ ID NO: 296023 - DNA, 539 bp, Homo Sapiens
  misc_feature (92)..(244): n is a, c, g, or t
ttggctcaattctgctagcacagtccaccaccccattcacttggtgtttgtacatggtctggattgctactttattcttaaaaactgttttnnnnnnnnnnnnnnnnnnnnnnnnnnnnnnnnnnnnnnnnnnnnnnnnnnnnnnnnnnnnnnnnnnnnnnnnnnnnnnnnnnnnnnnnnnnnnnnnnnnnnnnnnnnnnnnnnnnnnnnnnnnnnnnnnnnnnnnnnnnnnnnnnnnnnnnnntctgttgagattttatgcgctgtagggcaattaagatggcattctgacatttgaccaaagccacatgccccaattttgccttaccatagtcacctctgcccaagaagtccttgaagctagcatggagcaggcagggttttctaagctcaaactctagtgcagaagtgtgtaacaaagtctggaaaactttgctgtttcctctttttcctttcgacctcaaatcaaagtaggtaagcctgttccatttatgtctgcaccaaagtctgaattttatttcaatttagcattttgatgg

SEQ ID NO: 296024 - DNA, 214 bp, Homo Sapiens
ttggctgctcttacaatctaaaaccccatcaacagggacctggtttaacacatgatggtccacccatgagcagaatactaagcccaccattacaagaactgaacaactctacatgagccaacagagaaccatctgcaggatttatgtattgtgaagtcaaaaaagcagatgcacaacaataggcagccatttgtgtttagctttgtttttaagt

SEQ ID NO: 296025 - DNA, 843 bp, Homo Sapiens
ttgggtcttctcagaaagattcctaaccatccaaccattcatttgttctccagcaaagtagatttgtggcaggagatcctaatttatttagataatcatatctcgctaccaaatatttgacaacattatccattctgcttaattatgctttctgaaggtatctgttatctttaatggggtagaatcagaaaagaaggctgaacaggagagcaataaaatgaaatgaggcaaattttatgaatcatattttcccaagaaagggtcatttcaacaaacacacggtctagccatgtataaggcactgtatagaattatgcataggaatgagatacacatcccaacttcaacaagcagataagcgtgtatctggaggagacagatatatacataatttgtgatggtaaaaggtggaattattgtcatcatttattgaacacttaatacatcctatgcattgtgctaagtaattatcattttaaaattttataccaattccaattattactcccatttaaaagatgtaaaagcaaaggataagaaagctgtttaatattgcaccattcctaatgggtgaatcctgccttcaatctaaggtatgcttttatggtaaggcactggtcccatatggctatgctgccatgccctggggtgggcactgtgacaagtgctaaaagaaggtagaaggttgaattccacacatcaaaaactgtgatataagcatcaatcccaaccaaaaataagttatcttgatgttatccattagtctccacagtttgctagagtaaaaaaccgactaaaaatgtacattgcacttttccaaaaacattatgagcatgaaccatg

SEQ ID NO: 296026 - DNA, 184 bp, Homo Sapiens
tgtacaaaaaagttggatgaagaacccactaataaatctaattaggcaattagatatagaagaaccaaggattaaaaaatggaaagttgggtcattacttagaaaacaaggatggaaaatgcagtaaaaagcataacatacatatgtgatatggtaaaaaggttaatatacattattggatttc

SEQ ID NO: 296027 - DNA, 938 bp, Homo Sapiens
ttggctctgaatgtgctttgtccactgttcagtcctaaatacaggcagtgaattattacagtgctctctcctacccaaacagacgtcacccacccctttgtaaaacactctgccattttgggcatggagatttaaaaatcctggaagaaaagaattaaggcttgtgctctggtataagccttcttgtacagagctgttcaagaagtatatgtttactaagtatatgctgataaattgactgaatgcatgtaaattcttaattcactctctgaggacctgaggaattgtaattttctttaggtcagagacctgtagctcttgctgggaagccttgaatcactgtctttctgcctcacatcccccaccaatggctcccagcatcatgctttgcagagtgcaaggtcacaaatagtgagaacggactgccaggaaatgggatctggccccccgtggggactcaagacacctaagggcaccatagacttcccctcttctggtttcttcaaggtgttcgatattggatatctcttttcctccttagcattataaaatactaaattgctttgacaagacagaaatccacatttgttttattagaacttacttaacatattaaagggaaatgtttaagctaaaatttcaagatttcactcagaccttctttgggtaattaaatgtcactggtaaacaggaggctgcactgaatgtcctgatctctgttaatacctaaacttttgctgttgtttaatgagcttcatttataacacacatgcccactacagcccccctctcagccacagtccagtcacttccatggcaattgggatgatttgttcctagtctgtttattcatttaaaaatactcagaatacttcctgaaaatccttattctcatcgaaatatgtaaccctgaaaagcccttgtccaaattcgtgccc

SEQ ID NO: 296028 - DNA, 733 bp, Homo Sapiens
  misc_feature (162)..(184): n is a, c, g, or t
  misc_feature (194)..(439): n is a, c, g, or t
ttggtagcaatttagactggtgtcaggtggtatcttattgctcttttgatttgtatttttctgatgattagtgatgtagaacattttttcaggtttgttggctccttttatgtgttcttttgagaagtatctgttcatatgtttgatgtgtttgggccaggnnnnnnnnnnnnnnnnnnnnnnnacagagtgtnnnnnnnnnnnnnnnnnnnnnnnnnnnnnnnnnnnnnnnnnnnnnnnnnnnnnnnnnnnnnnnnnnnnnnnnnnnnnnnnnnnnnnnnnnnnnnnnnnnnnnnnnnnnnnnnnnnnnnnnnnnnnnnnnnnnnnnnnnnnnnnnnnnnnnnnnnnnnnnnnnnnnnnnnnnnnnnnnnnnnnnnnnnnnnnnnnnnnnnnnnnnnnnnnnnnnnnnnnnnnnnnnnnnnnnnnnnnnnnnnnnnnngtatgcatcactgcgcctggcctggcacagtttttaatgagattatttgttcgttatttgttggatactctaagttctttataggttctgaatattagacctctgtgtgatgcatagattgtgaatattttctctgatcctttaggttgtatctttactctattgatggttatttttgctgtgcagaagctgtttagtttaattagatcttacttgttaatttttgtttttgattcaattgcgtttgaggacttagtcataaaccctttcccaaggccgatgtccagaatagtg

SEQ ID NO: 296029 - DNA, 744 bp, Homo Sapiens
ttggattctgtagtaaaggagacatcagatattatattttctatttgtcaaaagctggtaaagcagtaaataatgtgtatacattttaatagagccaagtaagctattcagcactttctttgtgcaatatggttcagtcaccaggtgtcattcaaatattcaccacgagccatttcaagtttaacttgtgctttgatagtctattctcataagctgctaggaactctataaaaatagaaagtccacataggcagtaatctccagtccgtgcttttctccacagtattcaaagccacttcccatcctctaacctttaatttaacagagaaagcctgttacaatagagccatctttgtccagctctgcaggcagcttcccctttgggtcacagaatgccaaattctgtaacagacaggtacatcggttattgttgctctgggattgtacaaaagacagtctatttaccagctggaagaaaagggtgtgcatttacactgtcatgaaaactttctccttgagactgcagtgacaaaagtactggttatgacagtaaggtggggcacatataatcctgttttttaaaaagtctttaaaaatctttcattcatagagtctaagaaaaataaatagcccttgcatgtgaatccacaccttacgaaaacagcataataaactgcaacctagctctcttgtaatacaggtagtgggtttttatggtttcatgtgagcaacagcttttgactt

SEQ ID NO: 296030 - DNA, 870 bp, Homo Sapiens
ttgggagattcagaacacgatgatttacatagtgcattggtagagaatcttcaccacgctggtactgccctgtgatgcaaacccacctctgcatactattggcagcagaggtcctgaaggcaggacacagggcacgctgtgttaagagctttcctctgtctgtacatttacagtgcttgcttctgtcttctgctgtgatctcaatgaaactttcacatgtccctttctttaactagagagcgtttgctttctatatttgagaagacggtctttgcttgaagttgaataacttaacttttgagtcctcaaataatatatttaggtaaacatttaacccaacattcccactttaactcgtagctactggttttgtaaatagtatttgaacatagtttgtaagcacaatattttgtgcatagcttgtatccacccagaaaatgtcaaatgcatgaaaaatgtagctattgacttctgtgtttattggtctgttaacattgctcttatgaggctgattgcaatgaatgtttttacaatatacatgtgggcaagaccactattcagtcttatacatttccaacaaatcgtttttgatcattttaaagtggattcagtctttgaggtgagattgacaattaaaggaagtgaaaaatgatgagttcaatgagtaaaacattcaattctaatatctcttgcttttggtaattttaatgagagttttcttactgttttttgtgctttttagtttttgactctgtaaaactgagtccacttggacttgggccattggcctattttgtgtttccagtttttgcaaattggaacatatattgagtttcatagttcataatccaaaagtctattaaaactccc

SEQ ID NO: 296031 - DNA, 908 bp, Homo Sapiens
ttggaatgatcgcattttaaagctgcgctaatttccatgtctagcttctgttacaggctcactttaaactttttgtctttctttggactactagaaattatcagaaggaaattttcttttaactcctttgtctgggtactcttaaatgctgactttaaatagaatgacattatttgatacaagtgaattatgtatatagaaatgtagctttctctctaaagctttaagtttattgtacattttattatgccattccatgaaatatgattgattaattaataattatgaacaagtcctgggtatacttagcagtactttacttctttcaaatatggcatttttacagacttcaaagacttctttgtattgcatagagatcacgtcacacagtgttatggctgatattcattgatcttcacagtgttatggctgatattgattgattcatcgtcttcatcactggtgactttagaatattcttattcaacagctcaatttttctaaagaacattatttagaaaatttatttaattaaactatatacatggatgagataatatgatgataaaagagctctgaatataaagttagaaggcttaggtaacattttatttttttacttcataatgttgtgatttcaaatattaggctttcaaatcttggtttcctcaactttaaaatgtaaataataggatatgccatttacacatggcacaaatattgaaataattagaatagacatcaagtaacggtgggtaaatgcattttgttataaagcaccctatataaatatgagattctatatgttatttaatataaaatcatcaataaaaattatagcaataccagaaaatgtatattgacaatgacaaacacttagccgctataagtataattatttttatttt

SEQ ID NO: 296032 - DNA, 664 bp, Homo Sapiens
  misc_feature (72)..(104): n is a, c, g, or t
ttggactaatttcatgcaccccaggagataggtacaaaaatttatcagactataagaagaaaaacattagannnnnnnnnnnnnnnnnnnnnnnnnnnnnnnnngcttaaattgtctaatgttcttaatagattagcacagtagtacatggacataaaatacatacacttacggtgaggttgtgtacacagcttttttaccaacaggatagatggcgtacagtttggataatatttccataaaaaagcaaaatcattttcctttaatcagaataatatttcccttttcatttcattacacaattattcaataaatatttaaaacccactatgtaccaataatacactatatgattgtatgtataccatatatgataaaacagaacaaaacgaaactaaaacatcacaaatctctagcttcagcagcattctgagaggttccacagatgtgtttcttgctttaacagtattttgacagagcatacctggggactccctctcttccagcctttgaccaacctccaatctcctctccacttgcaaactccaagactatcttctcagccatctcctgcttctgagaccagccaacactgctttgcggccttcttgatgaccaaccatgagacaattagctcccagattcatgagaattattcaaccca

SEQ ID NO: 296033 - DNA, 657 bp, Homo Sapiens
ttgggtaaaatagcacaaaagccagaggaaggtttggagtctgagaagaaggcttgtggcagtaactgtaattagccttgaggcatctgcatcagtatatggttgatgcatgggggattgccatctggcacacatggaggatgctagcagccccacaaccagcatttcagaccatgggaatgtccaaaatgtcatttcagaccacggtctgaagctctcctattgaaggacttgaaatggaccacaaaacattaatctgtacttgccagtatcaaaagaaagggatgttttcctagcatatcgtaactaaatttatatctattgacagaatgaggagagagtcagaaggctcaaatgcacgcaggtagtagtggacaatcctggtttaccttggattctactgatagttttagttgtttcatagggctgtaaaccatgtgtggaattccagttctagaagcctctgctctgaaaccctttcttttaaaagaacaaataagttagtagtgtgtgccaggcgggcacagccacaccacataccttaggttcagggtgaaaaatgatagtgtgtactttccaaacaagttacccaaaagaagcaacaaaacagaaagagaaaaatatgtgacagagaaaataagagtctaatatctagca

SEQ ID NO: 296034 - DNA, 161 bp, Homo Sapiens
gatgtccgcttgtcagtttctataaaaaagccagctaggattttgagaggaattgcattaaatttatagatcaatttggaaagtatttccatttaacaatatagcatctttgattcatgaacataggctatctctccattttcagaggtcttagtttcttt

SEQ ID NO: 296035 - DNA, 565 bp, Homo Sapiens
gaattttagaaaaagaaagtggtaattacactaaagactagaactaggttttgttaacattttataagctatgctttaacattctatttaaagttcattttagcctttgtgggcacacaaaatccatccagttgaagttttcacgtgaaacagagattcccaagtgaggattctgaaagctagtctgaggccaggtttatactcaacccatgagtctcttctatagatctcaaattgtcactgaaaatggtgttggaggtttttggggagacataaatccaggctggctctgtaactacccaaatatgttactaataaatacagaaagatcatcaggacatagaacactggctgctcttgagtcttgagtatgggagctgaccagctggaaaggccacaggctgaagaatggaaacagaattctaggaccctagtagacagtgaggcacttccagtctcatgaatcaaatttaacaacattaaacgcagagaaatggcaagtacgtgatgagagaatagatcagtgagaccttagaagctcaaatgttggcttctagtttagaaa

SEQ ID NO: 296036 - DNA, 124 bp, Homo Sapiens
ctgatagtgactgttcgttgcacaatgatgagcatgcttattcatatgcactttgtacacagtcgtgatattagtctttactcactcatctagctcagtctgtatcacagcatcactatgcttg

SEQ ID NO: 296037 - DNA, 957 bp, Homo Sapiens
ttggatccgaagaatagtctctcaacttgtgggataaatgatgtataatttttaaccttcttgagggcagatattatgagaaaatttttaatcataagaaaaacattgcagaattatagccacagttttaaaaataagcacattataatgataataaaattgtaatacaactaattataatgaacatataaaagaagtctccccatggagattagtatcataaaacaatttatataatttcaccagctatagattcactgttggcatgttacttttaatacatacttgactttcaattcgaaatcattttttcattaaatcctgtacctcaactttgagattaatgtggtaatgtgatgcagcttctagtgaagcctcagacacacattgtttattgagatcagccaattttttttgaagttgtctcacagtgacctgacatgtttgttattgatttgtaaatcaccttatcaaattaacaatatttactttcaaaaatatcaccaaatatattggttcagcttattttctttatgtgtacacattcctgcttattactgaatccacttaaggacacaagaaggtattatcttcctgccaaactggtactctcttactagacaccagattcatcccactagtcatttgtcccctaatgaatctgtaatgcttcacaacttactgaagtctcaagaaaatatgtgggcaggactagtggtggtaaattctatgctgtggaatgctttccttcttttttattgaagcacaaatcaacatcaaagttcctcacatactcaatcacctggtgaaatttttccaacagtttctatctcagaataaaagtatttttgtttcaaaggctttagaggccctaggtaacctggtctcacatccctcctgaccgcagctgctaagtttctctcctctactcactttttttgtactatacatgaaccc

SEQ ID NO: 296038 - DNA, 852 bp, Homo Sapiens
ttggatcttagcacatgagtgcattggtgtagaatcatgacaacacaaatcttctccattcaactgggagatctttcagacaggggccaatgccttccttatctcttcatttttccttcagtccaacccccagcatctatccagtgcttggactgtaacagctgcatgctaaacacctgttgaccaaatgaaagaagtagggtagatttgccttcttaagctttgaagtaacagcaaatataattttggccactgggccccaggatatatgtactacatagttagccaataagtaggtgggaaagatgaggtttctaactaaggcattttggaagttacaataaacaaaagccttcgagaaaaggccttagtcatggtcagagagtgcagagagattagcaaaggagaacacaaaatagactactcaggaggacaaaaaactggacttaagctgtctaatagctaatgcccatccagtaagtgaagggcagaatcctcccacagccacctgcattattttctaaagaccatcccttagagctgtttttagaggtattttgagcattgtgggtgaatgtggcagtgtagtcttagatatagatgagaaggagtggctataaaaactgcaccttccaactataaaaacttcctggagtaacaattccctcccacaatgtaattgaaaagtgcaattgatcttatctttaaagagtgttctacaaaatcttagagtcattctgttagaataacttgaatgcttttaaaaaacctaattcctgggtctcatctaagatgccctggaatcagatctttgcagtagtgtactagaatttgcactggcaataagctccc

SEQ ID NO: 296039 - DNA, 759 bp, Homo Sapiens
ttgggggtattcgtatgcttattgcctagctttaattttatgatgtaatttgtttctgcaacttattaagaatggaaggaccgaatgaaagataactatatttgccttatttagattgactgtagcagtaagacatttcagcatataaaggcattttcccaattatgtggtgcagcctgaagcctccctcctcccactccatctaccaccatcacatgatgctttattcagctccaaagcatcaatcacaagtgggtgttcagttctccctgaaaacaatgtttcttgaatggtccatttcacatttggtaacattcattgtgagatattctgtagtatgaaagacgctgaatggaagttaacatgagtcaatttcaaggcttactcctgatctttttggtagcagttcagaaacatgcagagaagtcttcagctcctccttttcttctcccttcctgccctttcgctgtccctataacctacaattgggagaattggggcccaaactaatatcatgtcaaaatccctggtgccctctctgatatatgagaggcctagataaagagaattaatatatctctgaaaacctgataagccccctgtcccgtttctctctttctgcgcgagaaggatgatttggagaaaaaatgctaaatgtaatttgatcccgagttgcaaacctgctctctctctaaaggtgaacagatatggaaattggatcatatatgacagagatcatgttgcagtgatcagtaactc

SEQ ID NO: 296040 - DNA, 114 bp, Homo Sapiens
gatgagcatgcttttctatatgcactttgtacaaagtggatcatacatcatgatgtgctttcactgatgctgatcactgcatgtagtatttgaatccatttatgtacacatatc

SEQ ID NO: 296041 - DNA, 599 bp, Homo Sapiens
aatccaaagaaaagaaaatgcattgttcagctgtctgacgggatggtagactagaaatgttgaatatccagttaacctcatttgatctaggagaggttgggaaagttaagattactaacaaattttcagtgctaggtaattttctattgtgaatgtactaggaaggaagccatagaagggaagcacctagaagcctctcccaaccctgagaatctgcctcttatagacaggagagctgaaagtctgagagagccattttcggactcatagccacaggacaggctttggagatggcctactctagacactttgatttgacacttaggaaagtgaggtacagatggagcagtcatttattcaaggtcatgtagctgatggcaaagcactttggattcctgatctcggagggggggttagtgaggaagaacatgccgttctgtcattggacaacacagtctgttttgtgcaaatattcacagacaatagcgttcaggagaaaaaatagtcatatgaaggaagaagttgactctgggagaagaatattcctatctaggaaggaatagactctccaacaaatgcacagaaaggcaaattggtca

SEQ ID NO: 296042 - DNA, 545 bp, Homo Sapiens
ttggctgcttttatttttaaatttcagagtttaattttgaaatgcaagtttgtcttctcttggaacgagaatggccacaaaccagcataaaggaggaactgctggatgattccagctgccccagccttgtagcagaaatctaaaacgttaaattggcatttatttcacgcacatatagaggttctttaagccaaaaaaagcaagaaattgcatagtctcacaatgccaacattatccagatgaggataatgaggctttgttttaagccttttttctcccttaacaaataaaattcgagtattagaaagaataataatgaggacaagaaacataagtcaaacaatcaccttcagggaacaaaagaattactctaagagccagatctttaatcaccttttggttccctacctgtcattttccacaacacagggctttactgagcccctactggtggaggagctgagaacataggaaagaatcctctcacccatgcccccaaatttaatttttatttattaggtgaatccaaagaagtaagccagtaa

SEQ ID NO: 296043 - DNA, 154 bp, Homo Sapiens
ctatatgccactttgtacaaagttggcataatctataaacaacagaaccatatagccaagaacggtaacagaagcattttgcccatgaagataatgtcattcctaaaccttattgatttatctatttatatttctcctgtgagtataagttttt

SEQ ID NO: 296044 - DNA, 190 bp, Homo Sapiens
ttggccttcctccatgaagtaggcagcaaagtcatctgctgctagatggtagagtgtttgaggagagtggtaaaatcctggaagagtcacacaggggattaagagagggaacaatttaggggcctggctgaaattagtaataatacatttgtgattcttctctatgtggtactcatgaggcaataaatgg

SEQ ID NO: 296045 - DNA, 114 bp, Homo Sapiens
gcgataaaaggacaactttgtacaaaaaagttggtgtgacttagtctataataaatttgtaaatgccaaaaaatgagactgtaacttaccaaaaaggaaatgaatatgcattaa

SEQ ID NO: 296046 - DNA, 182 bp, Homo Sapiens
ctctcctgacataagggcacactttgtacaaaaaagttggcttggatcaagtcattgcaaaaatctccacattccatctatactccccgctagccagcagcgagagacaaaaatgaggtcctcaccctcgcactggctgatttaatttcttctctttaaaacactaaatccttagtgttgcc

SEQ ID NO: 296047 - DNA, 929 bp, Homo Sapiens
ttggcttttaaaactgaatgcctttaacagcacccaagtcacctcttgaatgttttgctgcttggaaatttcttctgccagataccataaatcatctctctgaagtttaaatttccacaaatctctagggcaggggcaaaaatgccgacagtctctttgctaaaacataacaagagtcacccctgttccagttcccaataagttcctcatcttcatctgagaccaccttggcatggacattattgttcatatcactatcagcattttttgtcaaagccattcaacaaatctctaggaagtttcccacattttcctgtcttcttctgagccctccaaattgttccagcctctgcctgttacccagtacctaagttgcttccacattttcaggtatcttttcagcagcacccctctcccagtaccaatgtactgtactagtctgttttcacattgctgataaagacgtgcccaagactgggcaatttactaaagaaagagaaatggactcacaattcaccatgactagggaggccccacattcatggcagaaggcaaggaggagcaaatcagatcttatgtggatggcaggaagcaaaatgagagaacttgtgcaggggaattcctctttacaaaatcatcagatctcttgagacttattcactatcacaagaacagcaggggaaagacctgcccccgtgattcaattacctcccacctggtcctcccacaacatgtggatattcaagatgagattttggtggggacacagctaaaccatatcaatgggtctggaacttacgcagataaaggaacttgggcttctttgggagagatattgtgtgtgtggtgggggagatgattagagaccttgagggtttttcagttcagcatttcaacaccatattttgacatatttgtttctgagcccc

SEQ ID NO: 296048 - DNA, 416 bp, Homo Sapiens
tttctaagttgccttttttgctgttttggagaacactgagttttcttaaaactgctattttgaagttatttatcagagagctcacctatcattgtctcattagggttggtcactgattccttgctttttatttttggtgaggtcatgtttccctatttgctattgttccttgtgaatgtacatcctttgtctttacattgaagaataaataatttcagtcttctctacatggcctggttttggtttttattcaattatggtttgcttagaggatttctttgcaacatatctggtttaatatcatttctgccaaggtcactggccgccttttaagtacctggatggtgccctatgcccaaggtttgcctttggctctggcaaacctttgggacccctgtctgtcctggataagggga

SEQ ID NO: 296049 - DNA, 269 bp, Homo Sapiens
ttggatttgcatgcataggtgaagaaaatatcaatacttccaagtttatcttcctccctcttccattgtctccctcaaactgctatgcaaaaagaattcatgggacgagaaaaagaattataaaaaataatggtaagttactgttacaatctttaaatttcaggaaatgtaagatagaaaaagaaagccttaaaaacccatgttgttttacttagaaattgtactgaatgaacagaatttatcagagcaggaattcaaagaatactcct

SEQ ID NO: 296050 - DNA, 852 bp, Homo Sapiens
  misc_feature (121)..(297): n is a, c, g, or t
ttggcaaaaaccacggatatagactgcatgcttccttcaaccagagttcaagaagagagggtaaattaatagaaagtaagtaggctttggagttaaaacaaaataataatgataattaaannnnnnnnnnnnnnnnnnnnnnnnnnnnnnnnnnnnnnnnnnnnnnnnnnnnnnnnnnnnnnnnnnnnnnnnnnnnnnnnnnnnnnnnnnnnnnnnnnnnnnnnnnnnnnnnnnnnnnnnnnnnnnnnnnnnnnnnnnnnnnnnnnnnnnnnnnnnnnnnnnnnnnnnnnnnnnnnnaaacagcctagggctgtttctatctaactaaatctagaaatcaaggttcagagtaccttctcccttgcgcattgcacacccctgacacatcccatacactgcacttatatgatccactgcagtgagtttcattggcattaaaatttttcctgctagtgattcattatgacatccatattatagctcattttgcattaatcataatttaaagaaggtttttttcttttacctaatgtcagatatgctttttatctcacatcaacggactgttctaggcctaagttcctcccatctaatgttccttgaactaggccaacctgtctgtgttcttggccaggcatttgctatcttgatcatatcagacttggataataacaggattttcagtagcagagtttccaggaacaagcacctcaaacaatgcttataaaagcccaactgtctattacaggagtaagtaaagcagttcaatttgatagttgtctttggttgtccactgagcacgaaaaacataaacgtacaggtcctaatgagggaattgctagcccttgctac

SEQ ID NO: 296051 - DNA, 635 bp, Homo Sapiens
tgacaggcactaagatttctgatgtcagaatgaagtatttcttacaaactcatcctccaagaatgaaaggtagaccaggtggaaaactactctggggaggcactagatgaccaagaaacagaagggggagtatggagcataaacaagagcagggtggatctcgtcctaagtgaggagacaacagaaaaaagacatgaagcataattgatctattgttcacacactattaagcacctgtagtacacaaaattgtacactagaagttttaaggaacacaggacaggtaaactcaattcattttcttatgtgtagagtccagttaaagaaggacaatagcaatacaagacagcagtatgcaaatgtgataattgtagaaacataagcgtaatttaaataatataaactatgagttctctgagtcaacatatgaaagtatttgaccaaagaatagtagtaagcataggaatgtgcagaggtaaaagacacgcctacaagttggacatggtaaactgcagagtgaatgaaaagatcctaacccccacttgccactgcaactagagaatttcagtgctgatagtttgtacacatgggactctcatgaaagttttctttgtaaaaaagatgtaaactctttt

SEQ ID NO: 296052 - DNA, 526 bp, Homo Sapiens
  misc_feature (308)..(352): n is a, c, g, or t
ttggctcaccctaagcttgtacaacttatgaggaagagaggcttcttgggaggtgtggggactctctggaatggtctacctcaggaatatctcttgaaagcacatttgcctcttggaagaaaaaacctggaagtctttgacttctttgtatttacagatgttctcttactttcactctgcaacctcactctacagcacgctgtttcctaagagtgcccttgaggtgacccaagtccttagctttctttcatataagacagtccaccatgaactcaactgataaattaaaggctatactttgaagagannnnnnnnnnnnnnnnnnnnnnnnnnnnnnnnnnnnnnnnnnnnnccagattgttttgaatgaatcagaacataaaaatcctccagaaatatttgcaaattatccaacttagtggggtgtgaggattaaaagcaaagttatcttgaaaaagatatagaatatgttaatcaactacctaataatgtgataataatatatgtataagatctttaaaatttt

SEQ ID NO: 296053 - DNA, 736 bp, Homo Sapiens
ttggccctaaatcatctttatcaacttcaaatttccataaatctctagggtaggggcatctttgttaaaacataacaagaatcatctttgctccagtttccagcaagtttctcatctccatctgagactacttcgacctggggcttattattcatatcactatcagcgtttttgtcaaaaccattcaacaagtctctaaggaagttccaaactttcccatattttcctgtcttcttctgagccctccaaactgttccaacctctgtctgttacccagttacaagtcacttccacattttcaagtatcttttcagcagcaccccactctgctggtaccaatttactgtattagttgattttcacactgctgataatgacatacctgggactgggcaatttacacaggaaaaagggatttattggagttccagttccacatggctgaggaggcctcataatcatggcagaagacatgaaggagcaagtcacatcttacagggatggcagcaggcagaaaggagagcttgtgcagggaaactcccatttttaacatcatcagatcttgtgagacgtaatcactatcatgagaacagcatgggaaagacctgcctctgtgattcattcatctcccacggggtctgtcttacaacacatgggaattatgggagctacaagatgagatttgggtggagacacagagccaaaccatatcaggacataaacagatacttctcag

SEQ ID NO: 296054 - DNA, 827 bp, Homo Sapiens
ttggttgtttttgtgaataggagatggtctgttattaatttaaccccagaaaagtattaaaataagcattaccatcaccctaggaaatataaaaagatagagtgaagataaagtgtataaaacccacagtattactagtggggtgctagaaataagttttataatcactgttgtacagttgtattttaaaacatgtttgaaagtcttaggagaatctagtttaacagatttataagtgttgatttattcagtttattattgtacaaatgcttatattaatgatatagttgttaattttgtaagtttgttctttaaagtgattacatctttaaaacatctgatacattaagctttatcatcaatgcttaaatgtttaaaataacgtatttgctgtgttagcagtgtgctttaaagtttaagggaaaacaatttgtttaccaaattaacaagaaattaatttgatcattgactaaataaggtataataatagaaaaaattgttctctgtttatgaaaattcctgcctccggaatgaaaatcttacagactaaataaacctgcactcaccagcagggggaaactgtgggaggatgagaaatggggagtgatagattacctcactatgtggttgagcactaccgaagaaattactggaagagctctgagtgatctgtagaatatttggtggggaggggaatttgccatagatttttaaaaagtgaaaacaagaaaagaggggaacgccatagtgacatatagggaaaacagacgtgttaaaaaagcaatgcatccattattgattaattggcttagcagcgatactattta

SEQ ID NO: 296055 - DNA, 349 bp, Homo Sapiens
ttggaaaaactacaccctcttcataatctcaatttcatgcatcaccagttaccaccatcaatcttgctagcttcttttctttagtatcccagtttcaataattcttttacccactaggaatttttgtcttactgtgtaagacaaaatgtgttttcactctgatagcctcattttcctcctcatccacgttagagtccttggtaactcattacaatcactcctttgcatacacacttaactccctctttgtctttgatacactgatggaaaaactctaaacttagttcattccagctctaattacttggtacacttgcacagctgaatatggctggagagaaacaaccat

SEQ ID NO: 296056 - DNA, 119 bp, Homo Sapiens
gatgagcatgcttatcatatgcactttgtacatagtagcatatgtatcatactagtatatagtatcactgtgacactgtcacatcagactgattcaaattattgttctctttcacattg

SEQ ID NO: 296057 - DNA, 886 bp, Homo Sapiens
  misc_feature (275)..(283): n is a, c, g, or t
ttggggtatatttaatgttctagatgctggatggaaatattcaaatacaagagtcattgatgacctcaggatgtctttcagagaaagaaatttaagatggaattttaataaagtatttttccactttctgtttttgattgtctcaaggtgtcaacagcagcaactaaaatgtgatagtactggactaaacaagaaggcactgaatcattctctcaaccataattaccggctaattctgccctctagagaaatgcttcaaatttagttttaaattnnnnnnnnngttgtcaatggtgtttaaattttaaaaatgtctttaacctttgtcttagtccatttgtgttgctataaagaatacctgaggctgggtatataaagaaaaaaaaggtttattttgctcctaattccactggctgaaagattgggcatctgatgaaagcttcaggctgcttccactcatggcagaagactaaggggagccagatgtgcagaaattctctcttcatatggtgagagagaaagcaagagagaagggagcaaggtgccaggttatttttaatgaccagttctcaccgcagttcacttccatccctgcgacttgcctcagggagggcactaatctattcatgagggatccacctctgtggcttcaaagcctcccattaagccccatctccaacagtggacatcaaatttcaccatgagatttgagagaacaaacatccaaactatagcactctgttcttgggctcctagaaataatgtcctcctcacattgcaagatataataattccttttcaatcccccaaagtcttaacttgttctagcaaaagtccaaagtccaaagtttcatctgagacaagtctcttccagctatgttcacgt

SEQ ID NO: 296058 - DNA, 190 bp, Homo Sapiens
ttggcatacagtgacctaggtccaagttgctgagctggcctttacattctcttgagccaacaccttaggatatagtggtctctgccagaatgatacgtaggaggttcattcttcaccattccttaccatatcctggggttaagagacgtggatccttaagatcctctgtttggcatggcagacaggcaca

SEQ ID NO: 296059 - DNA, 101 bp, Homo Sapiens
tgtacaaaaagttggttatcctgttaacgtctgcctttcctgtgagatttagctttgaagtacaagagcattgtctgtctttttcatgatcatatccccaa

SEQ ID NO: 296060 - DNA, 266 bp, Homo Sapiens
  misc_feature (53)..(71): n is a, c, g, or t
gcgattaagggaactttgtacaaaaaagttggctttgtacaagacttttgggnnnnnnnnnnnnnnnnnnnaaacatgaaagtggttttaagatttattttgtagtgagtttctctcttttaatgttcctctccttgtgattacacgtatttccaaaagattcagttgtttttatgcaactataggagttttcaatataggaaataaaatctcttgatgttttattaattcatgctttccttagggtttggtaaaaaagcttttgc

SEQ ID NO: 296061 - DNA, 958 bp, Homo Sapiens
ttgggggctctatcacaagctgaattgacaagcatattaaactaaaacactgggaacttaaaatgattcaacctgggaattagggatgaacaaattcataatccatttatttattgctttcagatccagaaatgatttcatcacattttgtctcaacattcaggtatgatttgcagatgactgataacaaccatcatgttgtggaaaagaacacatctctcagaaagttacacatgcgcatcaagtttttgtttgcccactaagcccaggtattttatctactacattgaattcaatttcggtctcaaaataataggttaaaactcttcaagaaatagattatattactgaaatgttccatttgtttaatatacaagaaatcacataaatggtctttagtagcattaatatcaacaaaaaatgttattttatccattatttgcaatgattattttagtacgttgactctttgctgttggtttattaaaaaatggtaaagcaaagtttttcgcttactgaccatttctccaaagagtgcactgaaaactattattgctctatggctgaggttttactgtatttacaatttacattattatctttaatatagaaccaagatgcggtagaattttgttatcttcctactattttctgtgaataaagcagtgagtgcacgggcacttaggtgtaaacttttattcatgtcccagcaccctctcttgcatcatcgctccatcagccttgattccaataaaaccatgtatatctacatcaaggcttacaaataataaatatgtagtactcactatatacataccaagaatggattcatacattgcacaattgtagccaaatttaagtttaaatgtctgcaagtctgcacacatgatagtacttgcgtttccaattaaggacttaatatgtgattttcaatgatggcatttgataaaatatttgg

SEQ ID NO: 296062 - DNA, 826 bp, Homo Sapiens
ttggaaattagagagtgagaaatgcaacactacggaggaaaaagattgaaggcagtgaggagtgcaagtatagtcttgtttttccataaaacatcgatttttaattttgtaattaacgtgacatagcaaaataagaatgtttttatttctaacttaaatattttagtcaaagttgcatcagaaatcaaatatttctttgaccttttccaagacttattaactaccattatagttgttagtattatatagtaacacattgcttaaaatacattataaaccttttttctttctctttatatatgacatataaaattatgaattttgtaacatgattcatatttgaaaacattttaaatggcatgacaactttcacagaaaatgccactggaatcacataaaacgttcaaatgcttgaaatgtttcaaattttttaaagtgccaagcacaatgcttgacacatattaggtactgcactttgttcactcattctctcatttattcatgtacttattctaagaaattcaggattaaggagaaattgtaccataacaagaattacaagcacaatcttttatcaacactttggcattttgacaaagactttggcaatggagtgtggagaagatgagaggctgatgatcaagatttcaaactgcttggctaaattctaccaagtaaagccctggttaaatactcattgcatttctaagtccaaagccttcatggcagaaacaagatttgatttcttatgtagaaaggaagggaattgtcaccagaatgaaatcagcaacggagaaagtagctgaagtgaaattagtgaaatatc

SEQ ID NO: 296063 - DNA, 102 bp, Homo Sapiens
gctataaaagccgactttgtacaaaaaagttgggaatgtagtatatagggaaactggtgttcactctattttttttgtattcgcaatagatgcaaatacagc

SEQ ID NO: 296064 - DNA, 891 bp, Homo Sapiens
ttgggtgcagagggcacacaggcacaatgaccctgtgcattgccactcgtgtctttgacccaaacaccaatgggcttagcaagcttaattggactatgagtggaccacaagaatttcttgacccatcaagtttaaagcctagaggagaaataggccaagtaatcacttcaaccctctccccctagatctcgtgggcgtagctagccttctggatccaattattctgacaatgagagagatataccagtgtagagccaaaattattataaatgaatcaaattaggcagttatttggagcctcaccatgaaagaataaagctagatttcagatctagagtaaaataactaccaacatcttcaataacgcagattgtcatccctgaacatgtttttactccactcctcaagtggagtttatgttaattatgcaataaatatgcatacttgctgcaaattgagggttgaaatggatttgagaccttaccaaataaaacaggccaaataaaaacattctgtatactacgtaaaatataaaatgtgcaataatacaggaaacaattaaaaaattaaattttcacttttgtgaaagttggtatctaactaacatttagcccaactgaaccctgttttcgtttggaattccatgttgcttcaattagcagaaaacccagctaatcgttgcttacagataaataattttattggtctcacataacaaaaagtgaaagagcaggaggcccagcattgcacagctcttctagaatgttctgctatcacatgctcattcttctttttgcttagctgtcatcatcagtacctggctttcacccatgggtgacagagggctaatgtattccttggcatagtgtctatgttgcaggggatggggga

SEQ ID NO: 296065 - DNA, 302 bp, Homo Sapiens
ccatatatagccaactttgtacaaaaaagttggctccttcataagctctgaaatagaggtctggccttcctctgttcctggccacttggtcttaaactggccagagaaaaatgagcactctctgcttgaattaggaatcaaagccattttaaacaaatgagaaaatcagttcaggctagtcttgacgaaattaatgtgtaataagaagtctttcactgtaactagaattgactatatttctgctttggaaagaagaatagaatattccatcactacagaatattcttgtgctaccctactta

SEQ ID NO: 296066 - DNA, 296 bp, Homo Sapiens
  misc_feature (81)..(250): n is a, c, g, or t
ttggcaaatggtctcagggcttttaatctttatttctaacagtgggccttagaaagctataatttgtcatttcttttatannnnnnnnnnnnnnnnnnnnnnnnnnnnnnnnnnnnnnnnnnnnnnnnnnnnnnnnnnnnnnnnnnnnnnnnnnnnnnnnnnnnnnnnnnnnnnnnnnnnnnnnnnnnnnnnnnnnnnnnnnnnnnnnnnnnnnnnnnnnnnnnnnnnnnnnnnnnnnnnnnnnnnnnnnccatccttttgaacttgggaagcgggaggctgccttgtatctaaat

SEQ ID NO: 296067 - DNA, 185 bp, Homo Sapiens
tgttcgttgcacaattgatgagcatgcttatctatatgccactttgtacaaaagttggcatcatttctcttagagtgaatcaaacacagcacaaatagtgataaactcaatatatgatcgtatatgctttttgcatcatgatgtgatttatgatgattataatgtttaccacgaagcactcttga

SEQ ID NO: 296068 - DNA, 174 bp, Homo Sapiens
caattgatgagcatgctagctatatgccacttgtacataagttggctctgttgtcagtttctgatcagcagatcacttcattctctgtatgtgatgcttttagatcaatatcaggcctgctgctaagtcttccttctccattccaatcagtttttcacagactgccctggcact

SEQ ID NO: 296069 - DNA, 183 bp, Homo Sapiens
tgttcgttgcacaaattgatgagcatgcttatctatatgccactttgtacagaagtgggatagactacgtaaactttagcgtcactcctcagctgtctacactctacatgcacatgtatgctatgtcatcattgatttaatgtattgccttatggatccaggctgcaggggccaacatttgct

SEQ ID NO: 296070 - DNA, 930 bp, Homo Sapiens
ttggatcttcgattgctgaatgaaaagcaccctgcctttctccaatctcctccaatctgctcagttttctcttccccagaacttcccactattaaacctctgcaacttttcatctttcgctgttaacaatcttcccaagtcttcaaccattccacagataatgtgaataggctacaacccaaggacatggtgtcccctgcagcagcaatccccactccagtgggacgtggtcctccacatcccatgccagggccagccatagccagcctgtgacagagtccccgctctacagaaaacccaccacctggctgtaccttctttctccctacccttgctgtcattgccgacttcctggtcacctccaccaccatgcactgaaaaccctggggactgcctcagtcttctccccaccctgacgcctgccatagccctacatgccaataggtgtgtggacaagcccatcccactcctgagccttccatttctgggtgtcttcaacactgatgacctacctgtccactgcagccccaccctacattatcatggcatccctagaactgtcctccttggaaaactttcacctcctacctcccttcctctgaccttggtctttttctcttccatctatatccctaccatcacccctcaaatactctgtgacctcagagagccaccgagccttcacctccattttctccctgttctgcctctttccagcctgggcctcttttctctgagcctctctcaccagctcccttcacaattccctgcatccgacttccacagccccaggccagcacgtgccctggaccaaagcccccgctcctttctcttcctctctggatggagtcacccccaccctgggaaatcgggcacctgacatggacagtcgaggtccccatccatttaattccttctccctttcagtga

SEQ ID NO: 296071 - DNA, 172 bp, Homo Sapiens
ttggtttgggtttaatccatcagcttccaccgcaaattaaagaaattgttaaaaaaagaacattattatgattaatgtttattgtttggagtccagaagagttgagttttcattccacctctgccatctattagccataagactttaaggctaatatacagaatttaaaagg

SEQ ID NO: 296072 - DNA, 927 bp, Homo Sapiens
  misc_feature (262)..(270): n is a, c, g, or t
ttgggaaggggcattcaagcaacaaatagacataaaagatctcagataacatcaccgcaaaaatctagccaaagaatgagccaaaataaggagaaagtaaatagagacattttatgaaatgacagatgaaaaataagtcctataaatacagcacatagattaagcaactaaagaaaactgactatagaataaaaggcataaattttggtaaaacaagaataatgcaagttacaaaactctagaggttgcagaagagaatttnnnnnnnnnctgtcctcacatgatctcttataaaaagatgtagactggagcagtctaaaagtaaaatctgaaggcaaaatagaaaccacaggaacttctaccagtaactgcagatttgtaattgataccaactctcccatggaatacaacaacaaaattttcttcgagacactaagtgttaacaaagcaatggaaaattgcaaagcccagatccaagagatgagcttggcattgagcatcacttttcagctcaagatttttactgatactaggaagttaaaaattagattgcaaaactaaggaatatttttggcagccaaatgcatgtaactgtgtcagtgtgcaagggaatgtggtggggagaattggagcacagtaccctccaggctttgagttgggggcaaagactacactcgataaagaccagcccactcagggacataaaactactgtctgattatctgtacacttatggatgcattaaagtaacctgctagtgtccttagcttactgcaaagagcaaatgtaattcctctctagagaatgttaacatttccagggcctcaaattactttcagtttttcatatataatgcctagaactcaatttaaaaatacatgtaaataaatacatgatgagatatgatgaagaaattattgaaaaaaa

SEQ ID NO: 296073 - DNA, 377 bp, Homo Sapiens
ttggtgaagattctccccaaacatttcctatttaagaagtaaaaagggagcagggggaggttggcatcatgaatgcaaagtgtaaccccagatacacaagacagactatacacatttgaggcttgcctactacttggttaattccagcacaagcactctggagttctaccataactgcatggaactgtccaagctactggactcctgtaggcagtatacttatctataaaatgagagagctggaccagaaaaattgaatccttctaaatcctgttgtaaaagccaaccttattttttaagaaaacctatcttattacacatggacacatctggtgggtacgtttaaattctttctgagctattagattatctcacag

SEQ ID NO: 296074 - DNA, 204 bp, Homo Sapiens
ctatatatagcgcaactttgtacaaaagttggcttctctacaggccctgctcaagacgccctgagggagataatgagaacctcctccagcagacggcagagcaaaggcctcaggaggagggctgcagctgtggcggtctccagaaacagacattgctcacagcaacgtccagtgggccaaacagcccatttaaaatgccagttg

SEQ ID NO: 296075 - DNA, 130 bp, Homo Sapiens
ctgttcgttgcacaattgatgagcatgcttatcatatgcactttgtacaaagtggggacgttcttttactgtgctgcagtataatcagctctcactctcatgtatgacttttgacaattctatcatgttt

SEQ ID NO: 296076 - DNA, 169 bp, Homo Sapiens
cactattgccaactttgtacaaaagttggggcatcacccacccatgtaatgcacatccagctttgagaagaagtctctgttggtgcatagctggacacacaaagccagaaattcgctcatttccagtcagcttcaggacccacattcctttactttaaaagtgggaaga

SEQ ID NO: 296077 - DNA, 841 bp, Homo Sapiens
  misc_feature (380)..(722): n is a, c, g, or t
agttggcatgtcctgatgataatatttagtttcacactgttgaaaatgttcaggtgctgatttgttggcatgcacactggagtgcagacgctgctgccactgcctcaatggaaagctttggctggcacctcccattggagtgtttttgtcagcagaccaggaatacctcagcccctccagtgcagcaggtgcttaaccttgaggggccaaagaacaaagcactgggcctaataccagttccctagggctagagcatgcagcccaggagtgctgaggtgagtcttgagcccctgaaaatctatcagaaataaagccagtcaactgaagttagcttataccacagtcaaatcctcaagggccttaaataatgtaaaagcaannnnnnnnnnnnnnnnnnnnnnnnnnnnnnnnnnnnnnnnnnnnnnnnnnnnnnnnnnnnnnnnnnnnnnnnnnnnnnnnnnnnnnnnnnnnnnnnnnnnnnnnnnnnnnnnnnnnnnnnnnnnnnnnnnnnnnnnnnnnnnnnnnnnnnnnnnnnnnnnnnnnnnnnnnnnnnnnnnnnnnnnnnnnnnnnnnnnnnnnnnnnnnnnnnnnnnnnnnnnnnnnnnnnnnnnnnnnnnnnnnnnnnnnnnnnnnnnnnnnnnnnnnnnnnnnnnnnnnnnnnnnnnnnnnnnnnnnnnnnnnnnnnnnnnnnnnnnnnnnnnnnnnnnnnnnnnnnnnnnnnnactcactatatgaatttcagatacaatcacaaatattaatagcagtatagaccaaagtgaggaaagaatctgagagctcaaacactggttcttcaaatcaactcagtcagacaaaataa

SEQ ID NO: 296078 - DNA, 240 bp, Homo Sapiens
tgtacaaaagttggatttaatatgttcgggaagaatatttattaaacaacttttatgattgagtaatgtgttgttcgatgaattagtcgttcaatatttgatattttgggaaatgggtttttggtaaaattggcttttgtcaaattgattttgggtgggtcaacttgcttctctatagtagagaccattccgtcaaatataatagagtagtgtaaaaccaagatttatttaagatagagc

SEQ ID NO: 296079 - DNA, 709 bp, Homo Sapiens
  misc_feature (268)..(538): n is a, c, g, or t
  misc_feature (540)..(557): n is a, c, g, or t
ttggctgatttaagatatgctagactgagtgaaaaaagctgtaaaattcagagaccaatcccatttgcatcaaaaaagaaaaagcaggggagttctcatttttgtaaagtttaaggttttaaaatagacacaatccagcatttatgagactataatatggcacagcatttctgaaaggcaatttggtgacatgcatcaaaagtctttaagaaatacattatactgagttactcaactttagtaatttatcctacaggagtaacttcannnnnnnnnnnnnnnnnnnnnnnnnnnnnnnnnnnnnnnnnnnnnnnnnnnnnnnnnnnnnnnnnnnnnnnnnnnnnnnnnnnnnnnnnnnnnnnnnnnnnnnnnnnnnnnnnnnnnnnnnnnnnnnnnnnnnnnnnnnnnnnnnnnnnnnnnnnnnnnnnnnnnnnnnnnnnnnnnnnnnnnnnnnnnnnnnnnnnnnnnnnnnnnnnnnnnnnnnnnnnnnnnnnnnnnnnnnnnnnnnnnnnnnnnnnnnnnnnnnnnnnnnnnnnnncnnnnnnnnnnnnnnnnnncagtaacttcaatggacacagagatgtatacataaggagtttactacagagttgtttataacaggggaaaagcacaaactgcctaaatatcaaatagtagggaattaaactattatgcctcaatataatagagtactacatgatacatcatt

SEQ ID NO: 296080 - DNA, 157 bp, Homo Sapiens
aatgtccaaatcgctgctgttgagtaacctaccgcaggatcttactgggcttcataggtcccttgcgtttgatctggcttctgtagatatataagaggatacactgcccagtcgctccctcagcatcccgagccagggctcaatgcaattcaatcac

SEQ ID NO: 296081 - DNA, 222 bp, Homo Sapiens
ttcgttgcacaattgatgagcatgcttttactatgccacttgtacataagttggcactgtacttctgtacagtgtcttcgttgcagcacatcgtcttataaagtagagcgggtcagtctgtgctgatttatggatcatttttaaacttgtatgatataaggaagagatgattctaatttctttaaacaatttccatacaatgctatttattctcatcacttt

SEQ ID NO: 296082 - DNA, 191 bp, Homo Sapiens
atattgccaactttgtacagaagttggatttgactcacttctcacttccactgccttgaagcagtgattactgttttctactctcacgagtagaaaagtaagacccttttctactgaatagctaagaaagacccttctgtcctgcagttcaaagtactgtcaatttaacaaatcaaatagtgatttatccc

SEQ ID NO: 296083 - DNA, 819 bp, Homo Sapiens
ttggtttcgtatgagtcgtatgacttagagcccaaataaatgagtagtctatatatttagaggtgggtgaaaaaatcactctgaactaaaatggtccaggaaggtgacagggtttgaaagtgtggcttgaagtggaagtgtggtaaaagctggatggagagcatccaagggaaagaaacaatgaggtggagcacaaggttgggttggagctggattggttggactggattggagctatgaagttgtcatcaggttgtggagggccctgagtgtctggctaagaggaccggagattatcgtagaaacattcaagagatcttaaaggttttgagtatggaagctgcagaatgcaagggagtttagggaaggagaatattggagcaggtcataggataggttgggatgggacaacttggagatgttgacgccccgtggaaggtgtttggacagagattgaagagagaggtaagaagagcctcaatgaggctgatatcagtaagggagatgaagggggtgttttaatatactcaagttggtgccatcaacatgtatagatattatacacactaacaagtagattaagtaaagtaaatatctgttaatcgtagaaagtgaaggttaaagcataaacaggtgattgggagggcagtagttctaagttcatgttctagctggtcagctctttgaagaatctgatgtggcttcaacgccctgtcgtgggtcatgtttttatgaagaacttaaaacactaagacgaaattggaaaggcaaatgctcttgttattttgcaagtgctagcattaatcatgggcattttgg

SEQ ID NO: 296084 - DNA, 296 bp, Homo Sapiens
ttgggtgtgatatgtgttctaggagagtgtgtcccacaatcctgtaggagttcagagggaggagtggctgaagtagggaaaggctcctagaggaggtgacactggagctgggttttgaaggccgatggtgtatttcaggcagagggatgaaagagaacacagtggtgcaagggagacagtaccatgtgccgggggcggcgagagatgtgacctggaatatgagttagatctgaattatgaaaagcaaaggacttggattttatcccatgaaaaatgaagaacctttggatattttt

SEQ ID NO: 296085 - DNA, 175 bp, Homo Sapiens
ctataatgccactttgtacaaaagttggagtagagtacagtccaatttgcacagttgataagcagcaagcagactaatccagagctgctcaagttgatctaacatgatgtgcactgcctctccatcttggagagcatcccaccgctgtgcatgaataacttactcattaaaaaaa

SEQ ID NO: 296086 - DNA, 848 bp, Homo Sapiens
acacattatgagatatcttggggataggacccaggtctcaacataaaattcacttatgtttctttcatatacactttatatatacatagccggaaagtaattgtatataatatttttaataattttgcatatgtagcagttttgattgtgttgggaccgtgacccataaggtcaggtgtggaatttcccgcttgacgtgtcatgtcaatgctcaaaagttattccctagtatcactcttgtactactccaaacctttaatggctttaaacaagagaatcacagcagtacagcaaacccctcctccccttttcccttgggtaaggcattatttcgcctagaacacatccaccactgccaggacttaataggctaccacaacccttggagttggaaaaaatggactctcattgcgtttactcagaaactactccgattttgaagcatttcagatttttggattaggaatacttcatctgtactgttagctcctgttgcacgttataacagaagaatagggagcaaacctccatgaaccgaactcctcaagggcagggtgttatcttattcattcttgtactctaacaatgctttgtacctagaatatggaaaatgtcaacagatgcttttgaatgaacatttactattgaggatcctataaattcatttgtaagtttacttttagagctcagagcacacatcagaaacatcattataaagggcagtcagagtacctggccatcctataaaaaccaggttaacttacagccattattctaataaataaatgaactgtccttcataacatagtatcttagtatgaaaaaatgcgttctgaatggtaaaagcc

SEQ ID NO: 296087 - DNA, 827 bp, Homo Sapiens
  misc_feature (159)..(191): n is a, c, g, or t
tagaaccaccataaatggggagacaagtttaacatggctaagtctgtgcaaactcatctctgtgagagaccaagtaattgaaaagtgcatgagctactgatctgaaagcaatcatcttatcttcatataggaagaaatatattttctgtttagcttacnnnnnnnnnnnnnnnnnnnnnnnnnnnnnnnnntaaatttgaagtgttcctcttctttaggcaattcatacacaaaaaatttgagcttcagagaaaagccttcatgagttggcagcaatgaggtatgctaaccttgggcctgctgggccatctttgcagattggcattagaagaggggcagagcagacagagtgaaatgaaacctgttgcccctggagtctttgccacagtcgggggtgcttatgtaagtggagaaacccgcagccctttcgatgaggtctgtgttagctgccctgaaagacctgtggccagagagtacttattattccccgacttctttcttccccctgacttctcaatgcctcaagattgatgactagtctcagtggctgagccagtgagcaaacttcaggattattggctcccatccaaaattcatccagctaccattttatgtgttgttcgtgttctgctctgagacctttccaggaaaagcacccttctgagacatatttttggttgcatgaagatttgctcccatgggacgtgaagggccctttacagacatctgcttatttaggtttacagcctcactctgaagaatgtggggaggttttggcagcctctgagggctgtgagtttattagtttgcctgggccccttggtaaa

SEQ ID NO: 296088 - DNA, 660 bp, Homo Sapiens
ttgggtgaaataaaagtttaaagccagcatttcatttaaaaagagcaactcataattatggcaaaattggcaacaggttggctactgatctagtttaacaactcacatgaataaaaaccagaacttttagctgaatgatcaatgtcagcaatctatgtatcagaacttcaaaaagagcaaatagggctgcttttccccctggagatgactgatgattccagtggagacagctaagaagctgagcaaacttaaaacacttgcggagctaagaagggaaaaactagctctaagcttcttgacagggtctggtaagccaccagattttggattgcggccacaaagggctaccactaggattaaagacgaaatcaaagaattataagaaaatcttcccaaaactgaaattctgcttcacaattcctcattaaaataaaacgttctgggattactagtgtcctctgccaagctacctacctagaagtaaacatataaaccatcatcctagatctaattaatctacattatttttcatatgcaatgtccaccactcaatgaaatataaccaggcaaatattgacaagataacttgactaaaaaccacaagggaaaacagacaatccccacagggatctaaacaacggaattatcagacacaaacct

SEQ ID NO: 296089 - DNA, 556 bp, Homo Sapiens
taaaagcccactggaagtgactgctggaaatatcaggtgcccacaggctgatctgcccaccacttttcatgagtggggcaaactgaagacagttgtcagcatgctaagaccattggcacagcagcaggtatttcatttgtaaaatctcatcaaaaatctggaaaattgctagtggaataatccagagcattacttgtgttgtccctctgcaaatggaagtggaaggagtctatccttctgtcttgatttgtcttcagggtcacagaggtaggagcacttcactaacaccagagaagctgtgcctctcataggaatcagggctttggacaagcccacagatatagctgttcagtacatggtatttcataaagtgctcactgaggtctaattagtgcaaagctcttttagggttgcaaagatgaatccaattacagcacatcagtatatagaagagaaagaccatacacaaaatagccctgacacaaggcagaaaaggatgcatcctgtaagagcacgttagtaaaatatggcagagcacagaggagggacagatttc

SEQ ID NO: 296090 - DNA, 838 bp, Homo Sapiens
  misc_feature (99)..(139): n is a, c, g, or t
aaaaaatcttcttattgatattttcattttgttcatatgtcattttattgacttataccatgtctttattttgatatttgaggatctttaagattggtnnnnnnnnnnnnnnnnnnnnnnnnnnnnnnnnnnnnnnnnngttgtgggtacataggtatatatatttatggggtacatgagatattttgacacaggtatacaaggtatgtaatcacaccagggtaaataaggtatccatcaccttaagcaactgtcctttgtttgtgttgcaaacaatccagttataatcttttaattatttttaaatgtacaataaattattgttggctatagtcatcctgttgtgccagcaaatactcgatcttattaattctatctaactatacttttgtacctgtcaactatcccctcatttcccatcaccaactaccctttccagcctctcataaacattctactccctatctccatgagttcaattgttttagtttcagttcattaaaataagtgaaaaatgcaaagtttccctttctgttcctggcttatttcatttaacctaataacttccagttccattcatgttcttgcaaataacaagatctcattcttttttatggctgaatagtattccactgtgtatatgtgccactttttctttatctattagtctatttatggataaataagttgcttcaaattttggctattgctaatagtgctacaataaatatgagagtgcagatattgctttgatatatgatttgtttttctttggggcatatacttagcagtgggattgctgatcatattctgagaaacctccaaactggtctccata

SEQ ID NO: 296091 - DNA, 532 bp, Homo Sapiens
tagataaccaggagttaaattgctaagtcttaaggtatgtgaaggtctaacagggcttatttcaaaagccagatggtgccatagaaaaccacatggtgaaattactgcacaaatgtgtgaccaatgaaaatagagttgtataaagaagagtttggacaaattcatcttgtcctgtgattaaaccatccctcttgtcttttatgccagcttatgctgcaacctttaaaaattccttgatgggctcctctttgtcagcttcccttctggctctgcactggatcctgtgttacatcatggactattcctgtctgccaagtgtggcctctccagttcccagaagatacccaggttctatttctgcttgctcttttgttcccagttcaaatcagatgcaatattctaagctggaagaaatctggtagatcttagcattccacacctttgttttactttgagaaagctaaagttcacggaggttagctgacatacctagcacttggtagaataagatttccatcccgagtctgtcttc

SEQ ID NO: 296092 - DNA, 796 bp, Homo Sapiens
  misc_feature (68)..(192): n is a, c, g, or t
gttcaagtgattctcctgcccagtctcctgagtagctgggattacaggggcgtgccaccacgcccagnnnnnnnnnnnnnnnnnnnnnnnnnnnnnnnnnnnnnnnnnnnnnnnnnnnnnnnnnnnnnnnnnnnnnnnnnnnnnnnnnnnnnnnnnnnnnnnnnnnnnnnnnnnnnnnnnnnnnnnnnnnnnggcctcacactttcttcatatcagcaataagactgttttactttcttatcattggtgtgttcactggagtagcacttttaatttccttcaagacctttgtctttgtatttgcaacttggctgttggtgtaagggcctagcttttggcctatctcaactttcagcattacttcctcactaaacttggtcatttctagcttttgatttaagtcagagatgtgtgattcttcctttcacttgaatactagaggctgttgtagggttattaattagtctgatttcagtatcattgtgtctcagggaatagggagccctgaggagtgggaaagggtaggaaatgaccagttggtggaacagttagaagacacacaatatttattaaatttgctgtctgacaagggcacagtttgagatacctcaaaacaattaaaatggtaacattaaagatcactaatcacagatcaccataacagatataatgaagaagtttgaaatattgcaagaatgacaaaaatgtaatacagagacataaagggagcccatgccgttggaaaaatggcattgattggcttgcttgacacagtgttgcacagaccttcatttgt

SEQ ID NO: 296093 - DNA, 508 bp, Homo Sapiens
ttgggggcagacctagagccaaatccttacttcatagaagagcagattctggaaccccagggtttctgggaagtggagagagaacaggattgggctagagggtattttgggcctcttaatgtagcactatgggcttgtgcctgtctctgtaggaatgtgactcagtatatgtgtgtgtgattgtgagggtcatgactgtatataatgggtttgagtgggtcgtgtgtgagagagactatatctgtgcctgtctgtatggagatctgattatgtacgtgtgtatgtgtcctggggtgagtcccgtggcctctaagattccatagatgtctgtgtaccctctggacagggatatggggtgcggggccaggaagaaagatgtaagaccactttctctaggatatcaaagtaagtggggtgggacatatgtcaaactctgttatacttgtaattcatttactgactctatattacctgagacagagacccagcctcagtttcctcatgtctg

SEQ ID NO: 296094 - DNA, 756 bp, Homo Sapiens
  misc_feature (344)..(374): n is a, c, g, or t
  misc_feature (412)..(661): n is a, c, g, or t
actttaaaaaagccaactttgtacaaaaaagttgggaaaaagacgtttaatggcattccagtttcaaatggatagggcggcctcacaatcatggtggaaggcaaggaggagcaagtcacatcttacatggatgatggcaggcaaagaaagagagcttgtgcgggggaagtcctctttcaaaagtcatcagatctagtgagacttattcactgttgtgagaacagcatgagaaagacctgaatccatgattcatttaccttccactgagtccctcccaaaacatgtgggaattgtgggagttacaattcaagatgagatttgggtggggatgcagccaaaccttnnnnnnnnnnnnnnnnnnnnnnnnnnnnnnnagcacattaataatggttgctgaatttagtgccacacnnnnnnnnnnnnnnnnnnnnnnnnnnnnnnnnnnnnnnnnnnnnnnnnnnnnnnnnnnnnnnnnnnnnnnnnnnnnnnnnnnnnnnnnnnnnnnnnnnnnnnnnnnnnnnnnnnnnnnnnnnnnnnnnnnnnnnnnnnnnnnnnnnnnnnnnnnnnnnnnnnnnnnnnnnnnnnnnnnnnnnnnnnnnnnnnnnnnnnnnnnnnnnnnnnnnnnnnnnnnnnnnnnnnnnnnnnnnnnnnnnnnnnnnnncaaggactacaagggagagttacacaacttttattaatgacttcatgcaatgcacatatttctagaaatacaagctaccaaaatttactcatcat

SEQ ID NO: 296095 - DNA, 900 bp, Homo Sapiens
  misc_feature (133)..(180): n is a, c, g, or t
  misc_feature (574)..(632): n is a, c, g, or t
ttgggttgaaatatgtggaattgtatagcaacagccaggttctatgttgccataatttatgacaaaggctcaaataaatccccagacatggattttctataaaatccttcattgtgaaactttgttgcactgnnnnnnnnnnnnnnnnnnnnnnnnnnnnnnnnnnnnnnnnnnnnnnnntccgcaagacgtatataaacctctgaggatgccgtttccattcatcacctttactgtaaagacagggattttatttggatggaaaaggaatgaatcatagggttttagaatctaatgcgaagtttgctggaagcattttcctctgatctttctgcttcctcaagatcatctgaatatggagagagaatgagtgcaaagaattctatcagccacagaaggttctgtgctgggatgggtatcagaggatggagagagatctctttttttgtgacttttacctgggacgttcattggcctgtgaaggtttagggatacaatatagtgacatcagaagcatgtgttagtgatttaaattatacaatatgaggtgagcagatgcaagaacaagagaaannnnnnnnnnnnnnnnnnnnnnnnnnnnnnnnnnnnnnnnnnnnnnnnnnnnnnnnnnnacgaaagtttccaatcatatagtttatttcatccaccctcccactcatagcctgagaaaatctgattctagagatcccttcctttgctcttttgtccctcatactatgagcatctactcttgctaaggtgccagacagctgtttttattcagtatgatcccttaaacacaaatcaacctcttcatcagatgctcttcccaaaacacagtggtttgttcagatagacgaaaatggactgtgttggacacattgagagactatctgcttc

SEQ ID NO: 296096 - DNA, 513 bp, Homo Sapiens
ttgggcccattttttggtaacagattttcttcctcccgactcctgggtctttatagcttgtggctaaatctgtagctccaatctcagtgttttctaaaacatgtcctcaaaggctaaatggctaggtggggttgcccaaggcactagtcaggaggtgtgagtacagggaggcagcttctcttccaacatgtggaagccagggcccaccaaggagcagaccatgctgctccaacaggagtgtggctcactgtcacaccggtcactttcaccattttgcagagtaaatgtcaactgtttcagcagagaatacatttgaatatacttaaagccaaataagaccacaactggcaaagaaatggctccaggtccaattccaaatgttggttaatccccagtatggattaggcgcatgaagaattggaaggaaaaagagacgcaattaattatcaaactttaatcgattgactaatcttacaggataaacaataagacagctattcaaggttacacttg

SEQ ID NO: 296097 - DNA, 187 bp, Homo Sapiens
ctttgtacaaaagttgggaatacactagcttacgtaatgataagcagacatttgtattgtatcatagcattgcatatcactgtgtatactggtttttaaatcaatagactcttttttcagtgatgtaatatttacagacaaatcgaacagaaaatacaaagagttccaatatactccggacccctgc

SEQ ID NO: 296098 - DNA, 690 bp, Homo Sapiens
  misc_feature (387)..(429): n is a, c, g, or t
gctttcttaagattcatttacttactaaaatatatacacttaaaataattgaaataagaatctgtataaccaacattgtcaaaatgccccgttaaagcaacttccgcactggctgattcaaagtgtttgactttagtcccagagaatgaaagcttttctgagtcaccagatcatgttcctgtaggttctacttggataatacattttaaatgctgtgttcaggagtaactgatgcttaaatatagatttagtgtcatcactttttattataaaatgctaaatggaagtagaaacatctcatgacccacattttcagtttaatagtcctaaaccatcattttctatcctaaacatataagtcaataacttaaaaacaattaacagtcnnnnnnnnnnnnnnnnnnnnnnnnnnnnnnnnnnnnnnnnnnncatcataacttacacaactcctcaaaagcaataatttaaataagtactagatttatgcattattgaaagaactttggttaagaaaatattccaaatttttcatgagatttgagaaagtaaatgtcatatacatgtcagttcattttttcatatacatgtttttttacacatattctatcagtgtttcaaaatataatatgcagacccagaagaaaggtacagaccccatttttaaaccatactctggacaggactattttc

SEQ ID NO: 296099 - DNA, 881 bp, Homo Sapiens
ttgggtgaaactagatcacttctctcttaaaggaggtatataatttggccaccaaattgggggattattttaagtgatgttaatagtgaatgattcaaactcattaaacctatgtgtggggtttttggttgtcattacaaagcaaaatggtacactgcagaaggaggaactgcatttggtttgatgtcagcaatcttagcttccattaataaaaactgatttcacagggaggtgattccattagtaaattgaatgcaattaaattattgtacctttcatctcttcagtgttgatggtagaacttaatgataggaataggaatatatacatcatgggtttttccagaagcagctttgaagactatggcctagggtactacaaccagctatttaataatgtaatatagttccatatgtaagggtttgtgatacccctagtgtccatggactattaaaaatgggtcctttatttcttgaatgcctactaatatcacagtttatgtatatggcaagattactgtaagaacaagcagctacctgttgaaaaaaattaattcaagagatatcccttaatatctactctgcaaggcgtggtgcttgacttcatagaaattttcaccaatgccaatagtttgcaactgtgttttatatgaccatgcctgtttatattaactttgccacaattatagatgtggaatccttgaaaataatttcaattttaaattgaagaaccaacaatttacttttgtagtacatacttattttgtccagtcaagaaattaatttaaaaccactcatttgtagacctggggctaccatacttttctgtacaggccagatagtaaactttgtagctttgtaagccatatggtctctatagca

SEQ ID NO: 296100 - DNA, 686 bp, Homo Sapiens
  misc_feature (112)..(317): n is a, c, g, or t
  misc_feature (414)..(505): n is a, c, g, or t
ttggggagttatttgcagtatttatataactatctttgtgtaatccttacagtgagtgtgttacttttctgtctcttgggatatataattcctaccattaatttccattgannnnnnnnnnnnnnnnnnnnnnnnnnnnnnnnnnnnnnnnnnnnnnnnnnnnnnnnnnnnnnnnnnnnnnnnnnnnnnnnnnnnnnnnnnnnnnnnnnnnnnnnnnnnnnnnnnnnnnnnnnnnnnnnnnnnnnnnnnnnnnnnnnnnnnnnnnnnnnnnnnnnnnnnnnnnnnnnnnnnnnnnnnnnnnnnnnnnnnnnnnnnnnaatgcccagtatatagtaaatgctatagaagtaatttccaagtaagaataaatgtgtttttggaaatgataatgtaaaaaaccaacagaatatcatnnnnnnnnnnnnnnnnnnnnnnnnnnnnnnnnnnnnnnnnnnnnnnnnnnnnnnnnnnnnnnnnnnnnnnnnnnnnnnnnnnnnnnnnnnnnacagtctctctatcttatgcaaacatcaaccctatatagagcagcataggagtatagtattatattaatttgttcaatttaagacaaaaatgagcctcttttttaagtcagaagctgatcctcagtttgaaatttcttatccactctaaggaactgtcttattggttagaaacattctggg

SEQ ID NO: 296101 - DNA, 109 bp, Homo Sapiens
tttgtacaaaaaagttggtgcatttctccttgatattcacaagaacagctatggtccaggaaaagatggcgaagtacgctgtctaattttagtttaaagaacctataaa

SEQ ID NO: 296102 - DNA, 101 bp, Homo Sapiens
caaaaggaaaagatttcaggagggccttttgaggggggagacccccggaatatactccgactttttgcccttcccctcaacccctgggggaaatttccccc

SEQ ID NO: 296103 - DNA, 128 bp, Homo Sapiens
ttggacgatggtggctttaacatatctgaacacatagtaaataagaccaatggtgggatttaataccccactatgcttacccctccctctcagagattacatcaacaatgctgctcgcaaaaatacta

SEQ ID NO: 296104 - DNA, 261 bp, Homo Sapiens
ggaagaagcaaacattattgcatgtattttttcagtctctactgctgtctcaagaggatgctttgaactgttgattgggtaatgttttaacataaacggaactctccactccaccgaaaaagaaagaagaggaagaaacagatttatctgaacagactgagaagaaaattggaggtgaaaagttgagtgactggggaggattaagagaggcccatcgagttgtttgtttgcggagatgagttagcagtagtataaacttta

SEQ ID NO: 296105 - DNA, 862 bp, Homo Sapiens
ttgggacaaaattattttatatccgcagtaaatacaatgtagcactggctttaaatcactatactataacttgcctctgaaattataatctgctacatgtcatgttttacatcctcctcagttaaaaagtcaatttgacagagagacaacataacagcatgttatgaaagtgaaaatttttaacatagatgaaaatttggcagtttacctataaatgtgttttggtctatcaacttacctttgcttttttatacagggatagaactgattgattaaatataggttgaccaagcagacaataaggcaaaagacaagactaacgtatgattatgtaggtaaaattagaaatgctggcagatatgcccccacctccatctttcagacctacagaagtttttggacaattaatgctctaataatgaggttggtgcacagtgaaaagagatttggagggtagcagttgcattgtgtcaataacaactgccagacatgagttctctgggcataagttgtacttatagaaataggcagccatatgtcaaattttctagaaatctcagtctctctcaatggagatgcctcttgagatacagggaattcttccagctctaaatgtatgctatagttttaagaaatacattacactttgagggtcatgtcactaccaagagaactataatttagaccacagaaagcttaggagaacaagagcaaggcttttttccttatatcaaaaactaatcaattcctacatagaaatttctcataattgaaatgaagtcttgatctatcccatacctcattactccaatgtggagatacaaaaggaagctggaggaaaaaaacccaactttcttgtaca

SEQ ID NO: 296106 - DNA, 459 bp, Homo Sapiens
agatacagatgaaaataacaagctccacaagcaattaaataaaaaaacaaaagaggattagtttcctttgaacctaggcacacttttcctagcatacatgttcctagcataaatattagagccttgaacctggttcgagaaaatacctacctactgatgacaaggaagccataaatataatttatgaccaaaaattagtcactgtttattattgctggtgacacatgatacatagggggagatttggcagtgtttcagacatctccagccagccatttatcatatcatagaagaagaggaggtatttctatattaatggcctctataaaaggaagtgagtagaggaatgtctgatatgttttgtcattgagaatcaaagggacattgacaatgttaaaaatgtgctgagtggattacaggttttgtataagtagttcttcaaaataacaatgctctatt

SEQ ID NO: 296107 - DNA, 885 bp, Homo Sapiens
  misc_feature (332)..(372): n is a, c, g, or t
ttggaagaaaagctatcaaacattgtttggtgaaataaaataaaaatccagtgtttcaacagatacagagcatctcaggagaccagacagatagagaaacatatgtaagcaatcttccagagcatgcgagtaatatatttcaaagggagctgtcatggagagcaaaatcaatcatttttacaacgaaacctagaaattgccacagttatatggcacagcaggaattcttcacacgtaaatcatgtgggaacagcattagaaaaaaatatcataaattctaatctaagaaacatcatcaaatatatgtggctatttttacggcccagagaatnnnnnnnnnnnnnnnnnnnnnnnnnnnnnnnnnnnnnnnnngagttcacatttaatctcagtcgctgcttctacaaagactgctgtatattgtttttcatgattacttacatggtaggcttactataaaaagaatagtaagtggtattatgtaagtgtattattgctgtaacaaattatcacagacgttgtggcttaaaacaacataaattgactatcttacagttctagacgtcagaggtctgagacagttcactggaacagaaatcaaggtgtccactgggctgcactcctttctggaggctccaggggaaaatctgttttcttgccttttctagtttctagaggcagcctgcattcctttgcctgtggcacccttccaacatcaaagctagccaatggccacttgagtctttctcacagtgcatcatgtcactctgacacttcctttttctacctccttcttccacatctgaagaagccttgtgactgcattgggccgtggatgaggataatctaatgtttaggtcagctgattaggatgaggataattaa

SEQ ID NO: 296108 - DNA, 834 bp, Homo Sapiens
ttgggtcttttttctgtggccatttccttagtatttcgttagccatcgtgttttccagagtctgtgtccctgtagtaagcactcaatatttttttctagtcttattttgtgttgccattttctcccatccctagaaacataccatcatgttcaaaggccccaatatggtccaagtaccttttctttcttttaaggcagtttaccttgatgttaggataaagaagccgaagcaaagcaccacaaaaccaattcggatgcggtgctcaaatgcttctgcccgtaggaactctccaagagagaggcgaagccagaccaaagcaagcctgtctggtctgtctctctggtggctggcccaacttaattgctttcatcctctgctcacagcacatcctgagggcaccaagaactatttttgcagaacaagattcaaaaatgctatcggctctccaaaaagtgcattaagccacctctctccactttctgaatagtgaaattactcttcgaaatactttattgggtgtcctgtttcccccaacagaccctaacacagacatgctgtgattcagaagagaatgcatatggattaacaagatagcacctagacacaataaagtcatcatttatactctctcttcggcaccatattcagtatagatcatctttctcgtgtttcacatggcacccttctttttgaacacttgagaagcattagtttacaatgtcgttctttacataccatcagccctcatttaatgatgaaaagcccatgacgcattgcaaggtgaaatattgtaaagaaacagagtcattgagatctagctctctttatctcga

SEQ ID NO: 296109 - DNA, 625 bp, Homo Sapiens
ttgggggcagcgaggtcggggtccctgtctgcatggctcctgagggccttggacaggagaggccagtggctctcggggaaggggggaaccttctggagggcaaagtagaggccctggtatgaatgacagctgtggtctttgagctccgcgcattgccgcatgccttcagcttcttgggaatgagatggggatccagcaatgtaagaaaggataaaattaaaaagataacacagcatgcagcgtgcgatcgataccaaccctcactgcagacttacgggaggggcacccttttttaacggggctgctgtggctttgagattaagggtcgcactgtggtcacaccaggcagggatatggacactgggttttctcttctccagccatgtctaacctcgctcatcgagacccagcccacactctctctctctgagcctcacctgggctcatcctgtccctcttggggcccagcataggctgctccttccagacctcgacctgtcctggggtctctgcccagctttgagggagccaggccccttgagcctctgcccggctcatccccatgaacaggaaaatatggtctgatgcagatcgggctcccgcgggaaggctgaagcgtgaccct

SEQ ID NO: 296110 - DNA, 587 bp, Homo Sapiens
ttggaaaattgtaaaaacagaaagcattgctatactttaattcctagcatttttaaaatctgatacagtatacaaaatactgttgcatcttacagtattaaatgaacatgtcatggtaaatacaaggacacacttaaaatatgatgacattttgtatatcaaaatcaaaaactgtgtctactttatatagacagtatcttctctgtttatatgtcaagctaatgttaagaagtctgatccatatggcctgttacaacagtgtatcatgctaagaaaacagccaagttatttccagtacacttaaagaattaatttgtgttctaaatgatttggttagttaagttacttgaactactaagaagtctctgtcaataattctcaggcttaactaggtgaaatagaaaagaaagaatttgggtgtaataagatggtatgaattggttagtagagttgaatttagagtttcattcctttgtttctaaaaatttttaaagaaaacttttctaaccttatgtattttaaaagttaggaaaaatataagcttctactacattttaagagaatgcaatggatccatcaaaactggc

SEQ ID NO: 296111 - DNA, 940 bp, Homo Sapiens
  misc_feature (724)..(734): n is a, c, g, or t
ttggatcactttttgctcaaaattatgtcttcaagatatatccatgctaacacattggtctagtttattcgttttaactgttgaatactatcatactgtaggattatacaacaatttatttgaacatttatttaattggcagatacagaaggtttccagttattcactcatgagagcaatgctgcaataaacattattttgcatatgtccttgtataaaatgagaatgtttctttaggtaattaaaagttacgttctgtggtgtaagatatacatgactgtgttattaaatgttattaacttgttctccaaagcagttgtgccaatttgcaaacccacacacacagcatgagaatctctttgccctctgtttctcctttttgggttataatcttgtcaataagatggtaggagaattgaaagttactgttgtttaatttgaatttctcactctagaaattagaatagataaaaatagttatgatggcaatcaaaagaacacttgaaaacagtgattacataattcagatttagttttctcacataagaagtgtggagttagataggtgctagcattggttttgcagatcattaatgtaatcaagaaaattaggcccagctatctttctgctgaattatcctaagtatattatcttttcctcctctagcttatcgtcttatggttgcaacatgactgccactacattacttaaatgttcaatgtnnnnnnnnnnnggaaggaagatggttcttacattctccttctaaatttgttctcttttatcaaatttagcaaagaaaaagtccctaatctctaccccagcagactttttcaaatgaagtttttcccggaactgtgctaatttgccaatgttgacacactgttcttgtatctttaaataaatgacataaaagacagtatagccctcatatttattttt

SEQ ID NO: 296112 - DNA, 907 bp, Homo Sapiens
  misc_feature (75)..(132): n is a, c, g, or t
ttggggcaaggagcataaaaagtttctgggtcctctcctagcctctcccctccaagctgggtggctttggggagnnnnnnnnnnnnnnnnnnnnnnnnnnnnnnnnnnnnnnnnnnnnnnnnnnnnnnnnnnctggactttgagcagaacagctgggacagagctgttggacatggagcagagcattgcttttgtttgagcaagagctagtgacccaccagaaggctgtgacaagggtcagctcagctaacacagcagggctgcgctggacaagcagggctcacaggatcctaggggcctccctggattccctatgggatttctttatctgccatggaatgcagcctcggcagcaacgggagtgttctcacactcaacatcagcagcccttactgggcattgagctcatacatcaaccacccactttaaacaagttttaaaacaacagtgtatttctaaaatcatttttgaaatgcaactgtgtaaaagtaacatgaaggataattgttacatatcagggagggtgatgataccttctgaaaatttccgccagtacgtctgcgccctgtgtgacagtaggagccataaggagttttcatatcctgtcagtttcttttcttattccttatttgtaccaaattagaaaaatcctaaaccacaattataggtcattagaaatggcagcaaatgtttggtggctctgacagatggttctggattcagaccaaacaagaattcagaaatcacagacctctttcttcctaaagactgctctcccctctctcggacattaggtcaacaggtacaaagctttcaaaagccagaagactaagtatttcacccagggagaggggggcggcggtgggggggagcaagcagagtcataatcctttctttggttgaattt

SEQ ID NO: 296113 - DNA, 576 bp, Homo Sapiens
ttgggaagggcagggacttgaacttccttgtcataatgaattcaaaaaagactcagagaacccatttgtgggattgataaaaatcactaaaaaatgtgtatattagttcctgagtctcagcctccaaaatttggtgggtaaataaacttcagaaaagtttaaaatttaagtagagagataaattaatcccacaatattaaaactttaacgtatatgaataaattttgagttatgagataatcttgtgtatttattatgtttgaaatattaaagagatttcagccagttagagaatgtgagagatttcctttgggctttcaacttaaatttgagtaaactgattttagatttgtgattattaagtttataagtttaaggtagtttgactaagttcaaaaatataattggaatatttaagagaacttgagattcctccaaatttaatttatttgctttatcaaagttaagaacttgagaatgttttgcttgttagggttataaatacttaaaggggaagtacttaaaggggaacaaaatatattcaaaatataaatgcactttaaaatatatgaaggg

SEQ ID NO: 296114 - DNA, 855 bp, Homo Sapiens
  misc_feature (151)..(533): n is a, c, g, or t
  misc_feature (715)..(743): n is a, c, g, or t
ttgggtatgaaactgcccatagtcatgtatcatagtttactacaatttcaggtatgtagtggaaattcatgatttggggctgacactgtctgaggtgaagatttggactaggaatcaaagacaaagagaatgtcagcatgtcattacattnnnnnnnnnnnnnnnnnnnnnnnnnnnnnnnnnnnnnnnnnnnnnnnnnnnnnnnnnnnnnnnnnnnnnnnnnnnnnnnnnnnnnnnnnnnnnnnnnnnnnnnnnnnnnnnnnnnnnnnnnnnnnnnnnnnnnnnnnnnnnnnnnnnnnnnnnnnnnnnnnnnnnnnnnnnnnnnnnnnnnnnnnnnnnnnnnnnnnnnnnnnnnnnnnnnnnnnnnnnnnnnnnnnnnnnnnnnnnnnnnnnnnnnnnnnnnnnnnnnnnnnnnnnnnnnnnnnnnnnnnnnnnnnnnnnnnnnnnnnnnnnnnnnnnnnnnnnnnnnnnnnnnnnnnnnnnnnnnnnnnnnnnnnnnnnnnnnnnnnnnnnnnnnnnnnnnnnnnnnnnnnttatttaaagtcagaatacattctgacacatgtctcttctctcctcaccttctccaggcttctgtacaaaaaatgatactaattttcagccatgtttataccttccactcaattttgaatctgtctacatgcattaagcatttctatccagtatttgaaaatgttattgaatgcatctgaannnnnnnnnnnnnnnnnnnnnnnnnnnnnatgtaaggatttgggagtggtgctggcagggtgtgaggattgcacttaaaatgatttggagaagctcgtctgttttaagtgggaagtgaggtttttgtatatacactgatga

SEQ ID NO: 296115 - DNA, 633 bp, Homo Sapiens
  misc_feature (95)..(139): n is a, c, g, or t
  misc_feature (141)..(174): n is a, c, g, or t
atccctaccgtgactttgagcatcaactgctgcagggattcttagtgtcccagcctgcctgggaaattttgaacaagcctccccataacataccnnnnnnnnnnnnnnnnnnnnnnnnnnnnnnnnnnnnnnnnnnnnngnnnnnnnnnnnnnnnnnnnnnnnnnnnnnnnnnntgagtgggatatggttctggagagtaaaaaacacatgcttatggattggagacatcttcacttcctaatacatgtacaaacacctcagctcttccagaaaataaataatttagctttagtgcaaaatggtcacttgacatcatattgagataatattgtacttcaggtacaaattgtttaaatgtatgcaataacaaaaatagtgaataaattgtacttatgtccaaacttcaaaagatacatttatatgtctgaaattctgagaaaatttttctaaatatgacccaaattgaccaatatgaataatacacccatatcaccctgaatacactcttctgatacctcatcccaaagaacggcaaaccagtagaacatgtactggcagagtcttcccaacctgccctcctttgcaagagagaccgatgagctacgtacgggcagagggaatcatttattttt

SEQ ID NO: 296116 - DNA, 623 bp, Homo Sapiens
  misc_feature (155)..(213): n is a, c, g, or t
ttgggtgggagcccactgcccacactcccaaagacccaggaggacagagctttgctttttgcagggagaggccgttgtttgtttgggtttgggggaaaatctgttttgtttactactgtattctcatcacctatttttagcttctaaatgggcannnnnnnnnnnnnnnnnnnnnnnnnnnnnnnnnnnnnnnnnnnnnnnnnnnnnnnnnnngtgccaagaagctaattaaggctccccaggtcacacaactctcaggggtggcgactggccccagctcctgctgtggccgctgtgaatgcactcttgcacctgctgcgtccgatggcccgggatgctcggtgtcccgagaactcagagggctggagaattttcacaagaagtaggctttgcagtatcgcatccccaccaaaggggaaaaagacaacaacaccccctaaactctccatttcccccgattctagggccacatacctggccctagaataatgtgagtttgcaaagcgtgttggggcttattaaacaggaatgcaggtctcagatcaagcctgagaaaaccaacagcgctggaggtttagctcagcccctacccggaggggagcccgttaaagaaagaaagaaag

SEQ ID NO: 296117 - DNA, 896 bp, Homo Sapiens
ttgggaattaagcaaagtcaccctctttgggattcagtttaataacacacccttctcagcctccttcccttcaacttctctaaacccctttgagtttttcctgagaatgcctccccgaaaagccactttcacatgaatccttttctcaggatgtgtgaccagggaacaataagaaaagtcttagggttactatggtccaaggttccccaaacaagaatcactcatacacaattcttgctacatctagagaacactaataccagtatcagtttatttatgatgtttattttaacttaaagatagagaaaactttagagcactacctatactgtttgtttaagtagaaggagatagcataattaaaaaataaaagggattcaattctgattatttgaggtataaagtcctaagctgaagatcttaaaagcacacaagcacaaaactgaaaatttctccgtgacaaaatcctaaggttccaaagacagtaacaatgaattcagcactatgtgactcactggtattggatgccgcatccctgcgttacctaaactcatctcgtgtactgccaatggatgtgtcccgtgctctgggcagcactgtttcaacagccattttgcaaagttaagcatgtatctggcacacagcataatccctgatacatgatagatgtacaatgaatgttaaacagagtttagtaaggaaactgagtctcttccctaaagccatgctgttgatcagtgggccagaaacaggcacaactgaaccttttctctgcataccatctgcctgcatctagaacagagatgtgattcactcctaaaaatccactacgattcttcctagatgacttcatctacagcagtaaatctacacatttatatagatttttactctct

SEQ ID NO: 296118 - DNA, 892 bp, Homo Sapiens
  misc_feature (82)..(91): n is a, c, g, or t
  misc_feature (187)..(197): n is a, c, g, or t
  misc_feature (510)..(547): n is a, c, g, or t
ttgggtcagagcaatggctgaaagtgacaacctggaatttacaggaagaaaggacgtgaggaagctaactttacctttaccnnnnnnnnnncctaaagaagcagtgcaagcagtgcaaaatttcctctttatggccctttccttggtcttctaatgttcttacttcacaatagtctggttgaagtgnnnnnnnnnnnaacaagttaatgtttaatttggttcctttggtttcatttttaagtaaagctagttgacttgtgaacctagagggaaacacttggacaccttgaggtggctgcaccttgttctgagtttctcccctcgcagaatctcataaaagccctaggaaatgtttggaagaaactttagcacttgcgcacgttattgaagacatttgctcttaccataactataacaacttacagggtgaaagatctgggagctgtcctacgacagtaccgtgtagtgagatcatggacatgggaatccaggagacctgaggctctctgnnnnnnnnnnnnnnnnnnnnnnnnnnnnnnnnnnnnnnggatttttgtgggactttaaacaaaatataggggaaaaatagaaataatcttagaactattaaaatagacaatggagtatcagtgagaactttttttaaaagtgatgctttgaggtgagatgtttcttttttaaaggaataattactgagagttttggacagttttagactaaacaatgacttacccacctttagcgtgttgtctcaatggagaaattgaaggctttgtcttgaactactagtatcagatatttatttgcttaacgtttagtatgcaacaactacataacagccactgtgctaggggccagcaatgcaaacgaaggagatagttgctaccccaaa

SEQ ID NO: 296119 - DNA, 721 bp, Homo Sapiens
  misc_feature (141)..(272): n is a, c, g, or t
gagacagggtcttgctatctcgcctaggttggagtgtagtggtgcaattatagttcactgcagcctccatctcctgggctcaagctatcgtcccacctcagccacttgagtagctgggactacaggtgtgtttcaccagtnnnnnnnnnnnnnnnnnnnnnnnnnnnnnnnnnnnnnnnnnnnnnnnnnnnnnnnnnnnnnnnnnnnnnnnnnnnnnnnnnnnnnnnnnnnnnnnnnnnnnnnnnnnnnnnnnnnnnnnnnnnnnnnnnnnntgtgcctggccaaaattatttctattataacttcagagatgtttatttgtacttgtaatcagccttttgctttaaaatgttctttcttcaggcctttctgtagaataatgatcaacaaacccttaggtgcactaagaagctacaaatgattttaatgaaataaaccattattttgtgaagcaaatagggctctctgatgtggctgattgatattcttcaagacagacctattgaagaacaaatggattctagcaaatcaaaatttaaattgtcctagtagtaataatgttgaaacctggatgatttacttggatttattatttcataatttatattgctaaatgtaactgagaataaataatggctaaacaacttatttaatccaaaaaatgttacttttttaatatttgatgaaacattaagttaacatgcttctctgccattctgcc

SEQ ID NO: 296120 - DNA, 804 bp, Homo Sapiens
gttgttgttttacatttctctttctttcctccatccaatctatatcaaatgcattgacaggcaacccttccctataaatatcactgttaataacacctactcaatgcctcccgcattaatttctattattaaccaatttttaaggggctatgtaatcagcttcattttgcaccatacactctggtctcctcaacatcttagttcttcttctcaatcctcaacacaaataaagtatcataatcgtttactcagaacgcttgggtaatccatattataagtatggcacaccaaagtggaagaataaatttaacccaatgatgctgggctctatgtgtctaaacatggctgtttagggatcagatgtagaaaagatttcagaaatctttagatcttggaaagatactaatggaggcatatctgtaaactatgtagcaatcctagttagatccaaggcagcatccttaaatcaacatattaatatttttcagctaaataggtaaagactcacactaattgtgatacatatagactattaaaatctttacgtcagttcaggtcctattttatcaataagtgtgttacaaaaactttcatttttcagaactttgtggatttcagggctgaatattaggaattgaggaattaataacactttcattatcttaaggtcatcatgttatctaaaatgtaaacttattcccacactcacaaatagaaaccttataattgctttaatacacagcttaagtcaaaccctgcaacccccacagtgaaacttgggtcgcagaacacaacccaatccaa

SEQ ID NO: 296121 - DNA, 439 bp, Homo Sapiens
ttgggccagatttctgtactagctgatataagtgccagcgaacctctgaataaatattagaggaagagtccttgatctagtagtgctatgcttgatagattgatgttccagggatgtcagatagtttagggaaaataaaattgttgtgtaaggggaatagtgatttaaaaagcaaactcttgaagcccaatatatgtgcacttcataagttattggcataaaactcttgttcactaaaaacacccaaagtaaggcattatgtgagagatgtttgtgtctctaatctcttaaaagaaatgtactgataaaaattttgtctctgatttttttctctcacgcctgtatccccccccttttggagacctaaaaccgggggatatccctgggggtcgggagtttcgaccaccccgggtaaaaaattgaaaacccatctctctct

SEQ ID NO: 296122 - DNA, 424 bp, Homo Sapiens
ttggatttaagtctcttagtttattttgagctgaattttgtagatggtgagagataagggtctaatttgattcttctgaatatggatattcagtttttccgatactatttattgaaaaatctccttttcctcattgtgtgttattggcatctttgttgaaaatcatagattttaaatgaatagatttatttctgagctccctattctgctccagtggtctatatgcctgtttttatgccagtaccgtactgttttgattattatggctttgtagcatagtttaaaataaggaagtgtgatgccttcatttttgttttctttctcaagattgctgtggctattcagtatcttttggggttccatatgaattttagaattttctatttctgtgaagactgtcgttggtactttgaaagagattgca

SEQ ID NO: 296123 - DNA, 397 bp, Homo Sapiens
ggaataaaaagggccaactttgtacaaaaaagttggaaagctgacacctctggaaaagagtagaacataagtggatcttatgttccactctcagcttgtgggtgtgtctaaggaggccaaatcatggggcatatggccattcagagagagagatgtgaatgtgatccactaggaaatacaccacttgtcattttagaccctgaaacaaggggaagcagcaatcaaagcagtttttgaggatgaatcacccagtgccggggttggaggaaaggtgggttgggctgcaggaaggcgcagatgagaagagtgctcaagggaagaagcccaggctcagtcaccaggcacgctctttagggaagttgctctaggatgcccgagtctcaatctctatattttg

SEQ ID NO: 296124 - DNA, 888 bp, Homo Sapiens
ttggattaaggaaattcttaacatcctcctgccctctcatcaagttcttccagactaaagaattaagaaaacatcaatacctgggcctgagaaatgatcctatccctgcctcatcctgcatgaaagcagttaatcaaaatggggtgtgcgcaacaagtggctttccttccctactttggtcaccccagcagagccactgccccaacgccctctggctggctgctccagcccagccctggtgtatgactctcccataagggacattcaacctcccactctcatgcaggaaggaccaactgccacggattatacaaacattaccccagccactctgacaatctccctcagttccagcaatgcctagagacatgccccctgccctctccacaacgctggctccccaaatcaagcctttgttctggaaaccccagagagggttggggcttgactcatctcagagaatattggccctgggccctggcttaagcctacactcctgacctctctgatcatcctgagagccatcttgaagcccacagcctactcggaggcttataggaggtaccatgcttcttattctgggtcctgtccaggccaagcagtctcccagctcccaacagcctggggaagctctacacagagcatcctgagaccaagtacaggtctctcaatgtctgaccaggtacctgtagctcaatcaatgtcttttcaattacataagcagtaaggtcttaataaagtgttctagggtgtacagtggttcctacaaccacacacacacaaaagtgctactcatttccctagcacctgtctccaatgccctaatttcctagggcctaaacataaaaagactggtcagtagtcaattggctgaagtcatatatcctt

SEQ ID NO: 296125 - DNA, 918 bp, Homo Sapiens
ttggccaaaaggggcccagggcttttctagggatctgtcctcaagttggaagccaggggttctctgggctgaaagtcttttttgatcagagaagccaagcagggtgacaccccagtcccctgaagaggccacagaacttcagatatatatttcacatcatagcactcaagtttaggcagtgtttcggacaacaaatgtctggggtggaaattgcgtgtatgctgaccgtgaaaatgaaattagagtgttcctctgtccttgagagcaggaattccattgtttggccccatgtgacctaaatttgactctgaatatctttggataccactaataaccatgactattgaatggtgggaaggtgatgacatgaatttcctcaaactcagagggacattccagagggaaactgggtgactccagtgttagctctttttctgcttagctatcaggggagtgaattgtacctcaactggttctggagccttcattccttatctccattagacgtcaggaaatgtctctaagccctaatcacccgatggtattttataaagcactatgcctaagcttcccttttcagttgaaatgttgaggactgaagtgggcaatgaagaccttgtttctttggctactagccaacctggattaaagaagaaaaacagctttgacagaatttcttttgaggtggtccaaagactgttttctggaacataaaaagcatctatattccactgtgattttgttaactgtttgcagtaaagtttgaagtgtttggcccaatctgaataccagttaacccacgatctctgtttgatacatctatccccagctggtgacatgctcttattaatcctttgatctagttgggtatctagtgtgtgtgctgaaacaaattttaccctgtgcacgaatctcgct

SEQ ID NO: 296126 - DNA, 429 bp, Homo Sapiens
ttggcaataatgagaatgtacacaaacacataccaaaagcaaaatacgtatatccctttgattcgttcgaataccacctaaactctgacccactaagagaaattcaggtataaagggcatttttggtaagctgtagtcatgttcatccatccatttttccatttagtcctttacttgataagtaaattattaattagtaaacaaagttaggtatcaatctaaaaattactgcaacagtttctaatatcaaagtagtagcaagccagatagataaatagatatatagttcaaatataatgtaacgaatgaaaagaaaaatacatcatgttttgtgtgaacaccaaagagacataaatacctgagaaaaatttaaaaagataaaaagcgcctagaaaaagagccccaactttcttgtcaaaagttggattt

SEQ ID NO: 296127 - DNA, 915 bp, Homo Sapiens
  misc_feature (660)..(819): n is a, c, g, or t
ttggcagagtcatctggctcccaagaagcacagggtgggtgcaggggtgggttagggactcgggatcctgccagggtaaacatctgccctctctagcctcacctggtcacagggagcaaacactcaaaccccgcagccctggagcagcccaggaaggcagcctagctctgaatcaggcgttgtgcagagagaaagggtttgactgcggtctgaacaagctctgagtctgcaacagccccagcctccttgggccagtggagcccttggccttccaggctgggcccaccggctgcttcagcctggcctggccgcttccagggacacgaggtcccccatggcattggcacctccttggtaaatagcagatgggcagcaaagccccaagtgggaaatagctctaggaatggaggcttctgtgggtcctttgctcttggaaacacctccttcctgccaccttccccagtgccacacgtggcaccttgcagggccagccaggaagtctcagcacccagttaggccagcccagcagccctggcccagtgtccagcactagctttttgagcaacttttacctctctgaggacttagtttccccaacttaacagactgccctggtgcctcctggggatgtttttggacactgagtaaaatggtgatagnnnnnnnnnnnnnnnnnnnnnnnnnnnnnnnnnnnnnnnnnnnnnnnnnnnnnnnnnnnnnnnnnnnnnnnnnnnnnnnnnnnnnnnnnnnnnnnnnnnnnnnnnnnnnnnnnnnnnnnnnnnnnnnnnnnnnnnnnnnnnnnnnnnnnnnnnnnnnnnnacagtggtgtgtgtgccattcttgtcattcacgagactgaggcgggaggaagacaacctcctgagtattttgctgccaccgatgagctgtcaaccc

SEQ ID NO: 296128 - DNA, 456 bp, Homo Sapiens
  misc_feature (269)..(303): n is a, c, g, or t
ttggagctgactgcgtgtttttatttatttatttatctaattttaagttcagaggtgcatgcacaggtttgttatataggtaaacttgtgtcatggtggtgtgttgaacagattatttcatcacccaggcactaagcctaatacccatgagttattttttctgatcctctccttcttcccaccctccaccctccaataggccccagtgtgtgttgttcccctcaatgtgtgttcatgtgttctcatcatttagctgccacttaaaagtnnnnnnnnnnnnnnnnnnnnnnnnnnnnnnnnnnnatcctccacttttatagagacggccaaggagaagaaagtctcctctcaaattacttgtatttattttctcctccaaaaggcagcctgagtcctgctatgtcatagttttctttctcagaagaaacacggaccgtgttccctaggaaggaaaaa

SEQ ID NO: 296129 - DNA, 898 bp, Homo Sapiens
ttgggtcattctaacgtgtacgaagtggtatctcataatggttttgatttgcattcctgtaattattactgtttataaaattgtataagtatttatgtgttggaaattataaattagttttcaatatttcaatattgagaagtgttaaaataatatgaacttactcaacttacctttcaaaattggaagatctagcactccccttatgacagtgattaactggggatgaacaagaactgcctcttttactttgccacactttctattctgtactttggtggttcaagctatctcttccaatgaaaattacccaaacaataaagaggggaaaaacataggatggaaaagataaattgtctcagtccatttgggctgctataacaaaataccttaggctgggtgatttataaacaacagaaatttatttctcataattctggaggtcgggaagtccaagatcaaggtgccagcggattcagtgtctggagagaattatttgcttcccagatagtatcttttcgtggtatcctcacatggcagaagaggaaaacacacttccttctgtttcttttatgagaacactaatcccattcatgaaggatggcaccattatgggttaatcactttccaaaaagccccaaccttttaataccatcaccttgaggtttaagatttcaacatataaattttgggaagacacacatttctattatagcataaataaagtatatcaagagttaaagcatatagaaaaaaagcaaatattgcactctctttgctacatgcacttagggaaattaaaagaaaaacacctgaagtttataaaagttaaattcatgaaaaagaatgaagaaattataaaagcagcaagacataaacagatattgccttaaatgga

SEQ ID NO: 296130 - DNA, 741 bp, Homo Sapiens
  misc_feature (574)..(586): n is a, c, g, or t
acttatttttatttttaccttccttgattttagtcatttaaaaactgaggatgtataccatatgccttttggctgagcctgttttattaggcgtgatgtatttcaagggtgataaatcttttatttggtctggcctcagatcactgtgtttcttatcgctatagttaaagggaggtggtattcagaagcagaaagctagctagacttcaatcaagaggctcaggaagcagactcccaccttttctatcagctaatgataccttttcttgagtccaatagtcaagcataactacctcaggggaatagtgaaagaaacctgaatatgctacagtgcactgcagtcctttaaacctcccgatgggagtacaaacttccagtaatcacatacctggagaaaacatgagagttgtaggagagagagagatccaatccagcacctcctgtacttccttccaccatttctaataaaacactggctgggaagcagaatggttacaaattgttcattctgggaatcttgtataataacatacttcatatactttaagtgaactttgcaactaatttcagggannnnnnnnnnnnnacttgctacagtccatagataaattctcatttgattttatacaaagcctagaaggcaccaatcaaatcaaataccaaccaaagttaaaattatgtggacatgaaagcatttggagtggagcattctctgcccccttgctttgcattctcttaatc

SEQ ID NO: 296131 - DNA, 867 bp, Homo Sapiens
  misc_feature (108)..(151): n is a, c, g, or t
ttggtcccatttcacttctaattgagcttttttgaatcttctctcttcttttcttggttaatctcactaatggtctatcaattttgtttatcatttcaaagaaccaannnnnnnnnnnnnnnnnnnnnnnnnnnnnnnnnnnnnnnnnnnncaatttcatctagtttcgccctgacctttgttatttcttttcttctgctgggtttgggtttggtttgttcttgtttctctagtttcttgaggtgtgaccttagagtgtctatttgtgctctttcagactttttgatgtagtcaaaagtttgatgaactttcctcttagcaccacttttgctgtgtgccagagggtttgataagttgtgtcactattatcgttcaaagaatttttttaatttccattttgatttcattgttgttccaaagatcatttaatgtccaaagatcattcaggagtagattatttaatgtccattatttgtatagttttgagggttccttttggagttaattttcagttttatttcactgtggtttgagagggtacttgatataattttgactttttaaaatttattgagacctgttttgtggcctatcatatggtctatcttggagaatgttccatgggctgatgacaaaaatgaatattctgcagttgttgggtataatgttctgtaaatatctatctggggtatagtttcagtccattgtttctttgttgactttctgtcttgatgatctgtctaatgcagtcagtggagtattgaagtccccactattattgtgttaccatctatctcatttcttcgtctagtaatacatgttttataaatttgggagctccagtgttaggtgagtatatacttacga

SEQ ID NO: 296132 - DNA, 620 bp, Homo Sapiens
acataaaaagccaactttgtacaaaaaagttggaaggcttttgttccataagagagatggagaaaacgagtctgcggaaaggggcacttcatgccttccaacaatggtggccacccccctcttccaagtgtgtaccactgatggaagccttctcgggtttctgggtctgccctgaatctttcttgtgagcacatggtgaggttcatggagaagagtctgtgagccagtgtgaactcgccttatatctgagactcccagggattctatgctgttgtgtgagcttatactcaacctttagcaatttatttaaacttttggctgaaatcttctgaactatatcaggggtagtgtctcctttctctctcacaggtaagccagggttatgatggctccttacaagtgcttgttttttgtcttaaatttcaggtatttgattgccctatgacctcatatctctgataaattcaagaaaattatgatttgggaggttatctaactctttcttgttattagaagaagagaggctctctttcgaggtttttacatcctcagcagaagccagaggtccacgacaagtttctgtaagcctcctcaaatgcttttggaataaaacataatac

SEQ ID NO: 296133 - DNA, 787 bp, Homo Sapiens
ttggtcattttccaaaataatttctttcctttatcagaattgtgacaaaaaccattaactggaagaaatcaaaattattggtatgaatataatttatatttggtatagagattaattttaggtaagcttatgaatttatgcatctgtcattggctaaaccaggccattttttaacactctcttaaattaatacccaatatttaaataatccaatacttgtttagcacaaagcatgcttgtttagtatgaggtttttaattggagaataaaaagtaaattcttacagaatactttctatgactgcgtataagtaagtgaagttgttttacaatcttcctagttcctcattccagggtaaaatttaatataatatatacaatatgatggaataatttcctttcgaaacattttgtgcttggattaatatttttgagtgcttattcaagggttacacattgatcagaagctgttggctgttgtgctgaaatgttctgtctccaggttctaattcacctggcaaatggtcagtcatgcaacagtcgtacagtgagtcatgcttcttccttccaagtactgaagtccatttctaaggtttacctttgctatagtcctatacacaaggaaagttcatccttagtaaacaggattcattaatatactctataaagaactaaaactaagtaaatgacgctatgcatagctaaggactcattgaacatgagcaattcacatacgatttaaagagattatacagtttgtcttaaaaaaatggtctttaattctggct

SEQ ID NO: 296134 - DNA, 282 bp, Homo Sapiens
catgaatagccaactttgtacaaaaaagttgggtcttatgaccaccggatcttccagattccccttccagtatgttggtgccttcaagtgagagagataaagttctctcagcttcttctcttgtggctgagtttgccacaaccagcagccctgacacacactattggtaaacagagcagaagtaatgtcacaaggcatgggcttgccgagaagggtgcccaaaatagcaaacctcatagcttaatttagaagaatctttacaatgtcaagcttacaaaggtt

SEQ ID NO: 296135 - DNA, 816 bp, Homo Sapiens
ttggctcaggtttcatttcttgtccaagatctgaaatcataaagttaagacaagtgccaggccttctgcttccaagcctggtgaaggaacagcaggagatgccagcatttgttcattcatcaggcaaggactgggggccttctgcctgcccggcacagagctaggcaaggaggacaatcggaaaggcagtgccagccccgcctgccctgccacctttggaaatgtttgttctcactggagctagaggtgctcacaggactctaagtaccatggctgaggagcaacagcaggggactgaggccaagtgagcgtgggagtttcaggaagaggcagaaagaggcgaacaggagctggaggagtttggagcagcacctgggagacacagaacttgagtagtgtggacaaaccgtgagagaaggaggtgctcgtgtcaggagacgccagcatccctgggttactacaatgggtgccggttgtgaccagataccggctgctggtgatatggtcctaaataagacaggaagatcctggcccccacgtgtagaagcagaactaaataatagtgcaagtgtgggtggatccagttttgatgcgtgctttcaagggaaagtaaggtcaaacagattccactggggaagttgggacccagagaatgagtggaggtagccagggcagggggatgccaaaggaatggtccctgcggctccatccaaggaccttgtgtctggaggatctgaaagaaggtccacgtggccaagaggacactggggcgagatcaagtatgggcgtttagctctcttagggacttgcattttc

SEQ ID NO: 296136 - DNA, 409 bp, Homo Sapiens
  misc_feature (318)..(346): n is a, c, g, or t
ttgggagaagttgacatttgaattgggtcttgaaagataaatggaatattaacaagcagtcagaaagagcagcatatccaagccaagagcaataacatacaaaataggtgccaggtttcctgttataatcaggaaataattttgggtctagtttcattgaatgataagttgcatatggacattgagaagttcatgatagagatgatgggaaaatgtaaattgaagtgattataattaatgatctgcatttatgtcagttttagtttacatagcaatgtaaattcatacaacttaaactttctgagcttaattgcttgnnnnnnnnnnnnnnnnnnnnnnnnnnnnnaacatgtatttatcaagtcttaccaggaggcaagcactggtctaatcactgggatacaacctc

SEQ ID NO: 296137 - DNA, 485 bp, Homo Sapiens
ttggctgaaccacataagagatacagtgctttcttctctgcactaacagatctgcctggatttaaaactgtgtctgtataaatctgcagtgtcagccaaacgactgatgctgtccttgactgtttaactctcactgcttcccattctcccatagattataatttgtgagccaacttcagttgtcatctggtacttcttgaagctaaattatatcagtttcatctattttggattttattccttataaatattgccaaagaattgaaattcaaaattttgtcctatttctccaatgcatttccaaaaatcaagttttatattctctaattaggagccaaaacctctaactcattgatatttctatatatagtaaaaaaatagtttggaaatgaaatccacttgtttgtcaataagcctgaccagttgtcgtctacggatgtctatttcgtgtttccatgttttattagttactactgatcagaagg

SEQ ID NO: 296138 - DNA, 599 bp, Homo Sapiens
ttggtttcctttgatctaggagacaagggcagtcatctgtcaagctccttgacgtatttttgcttgttcacatatccagacattgtgaacccagaaaatctgaggcaggtctcagttaatttagaaagtttattttgccaaggttgaggatgtgcctgcgcccgtgacacagcctcaggaagtcctgacgacatgcgcccaaggtggtcggggcacagcctggctttatacattttagggagacatgagacattaattgctttatgtaagaagtacattggttcggtctggaaaggcgggacaacttgaagcaaaggcaggaagactcaaagcagagaagttacattcttttgagtttctgattagtttttccaaaggaggcaatcagatatgcatctatctcagtgagcagaggggtgactttgaatagaatggggggcaagtttgccctaagcagtttccagcttgaggtttccttagtgattttgggggctgaagatattttactttcacaatatcataagactgcttcttaagatccatggtcctctcgaagaggccagtatgaatcaacatcggtgggtgttcatactcacttt

SEQ ID NO: 296139 - DNA, 931 bp, Homo Sapiens
ttggatatagtttcacttatgaaactggctcttactacaaaaatgaagtataccttgttgcagtaatattgctttattttgagatttgagtgggaggaaagggtaatatttctatcttattaatactgtgtttaccagtttttaattctgatttaagattctttccataaaacaagttataatgggaaagggggaaagaagttcttgtgtacctgattttcagggtgaggaaagcaaaaatgttaagctcagttactaaaaacagtttttacttattgcatatacctgcttaagaaaggtcttagaaaaatcatactttggagacaaaatcaagtttagagacatctaacccagtcctctcatttcacaaatcaaaggaggctcaaagaagccatgtggctgaacctggatcacacagttactggaaaagctggaaattgaagctaggacttcagtactctaccatcccgtagttttaaccaactgaaggaaaatgtaaaaatgcagaatggtgaaatagttcacaagaaagagtaatccaccaagagtctggcatcccaaagtaaatccaagttacattattgatgatttgcttaataatattatatccctaccaactctcctcattgaccttgtccctttctaaatttattcttttcccagtttcagcttttgcttcatctcttgggccctaggctaacctggaattactagcctttgttggacaagacatgaatagggctgtttcttaagccagaaagtatagtgatttcccttgatccccataaacatgtacaagtctccccaacaattgaagtacttctttgactttttgtctccctctgaaaaatgtttcctctcctaaagtcagaatcaagcccccccacacgccccgcccgcacacacatacacaaaatctagtttcataaaa

SEQ ID NO: 296140 - DNA, 343 bp, Homo Sapiens
ccttgtgagatttaaatgatcaccttcattatacaaatggagaagggataaataatctctccaagttcatacaattggtaagtgatttcttgatttcaaaggccacattatttataccattgagaagtttcttcaggcatggaagtaatatctcagagaaactgtgtaggctgctctgcttatggattaggagagatgaatatgtcaaggcatagagggacaaaataatctttatctctaattaaactatcagatttaaaaacctaattggcatttccattattgatgttgttgcttgtatcatactatctccctacagataaccattattaaaactggacta

SEQ ID NO: 296141 - DNA, 123 bp, Homo Sapiens
ttggggaactatgaatgaaaaaggagtgttttgcaagtatttatgatttcatgtatgaggctatacccttctaaaacttctcatttatattgcacaattgcaagatgtagttataaagatata

SEQ ID NO: 296142 - DNA, 919 bp, Homo Sapiens
ttggagcccaactagttagtagcaaggctggtattgaaagtggatgggtttgactgacaaaatcaattgacctccccaactgcaagacgatctgaacagaaacagtaggttatcttgtccccagcatccttactcttccacaacctccttcaaccaggctttaaccttcttccttcctgagtatttactgggatgttaataccagaacactaaggtatttacataatgtaatttaccatctaaagtggaaggcattcagagagagaatatgaataaaataagaactaaaatatacagggatttaggcaaatttatattaatactaattgggaatattggagactaacacaataaagaaaatatgtaaaatttggttgaactgtataaaaatagtactaattacagttatttacataaattgctcaacattcagcctaattactgtgaattacaataattcttaggtaaatgtttaaatgtggctttgattaacctgtgtagattgtgcatctcagagcaagcttggcccaagactactcagtctctggatgtgttgcccgtggagcttggacgagaaggcacagaagcaggaatcttgctcagaaggtagaaattaattcatgtcatcaaaagagaaaccataaggaatagacttttcctcaatccctgcttcccttttcctttcccactaagttttaatatttttgttaaaaaagaaaagctgaaaacacaagtcctacagcaatattttcaacagaattatcctttaatgtgaaggaacagtcttctctctctgtttctgctaattggactagtagcttttccttaaaaatccaaccaatttcacaagactttagaggtatgtttccaactgtctagtggccttttttaaatgacttcatagtaggcataaagcctc

SEQ ID NO: 296143 - DNA, 755 bp, Homo Sapiens
  misc_feature (417)..(479): n is a, c, g, or t
  misc_feature (509)..(636): n is a, c, g, or t
ttgggtgctgtttcccactgccactccatgctgtttcccccgcctccatgctgttccctcctccgtgctgtgaaaactaaagggagagtggcctgactcagctccccaagcccagccttcccctcctatgagatcaggttctgccatggtgatgacccctgacgccaggctctggggctccctgcatggtttcagaggactgctcagaccctgtggtgcctccaggggtcccagccccatccccaggtgagaaagcctcaggccatcgtgggtcagggaccccccgctaaggtatcctgagcaccaacaccatgttccctcccccgtgctgttcccccaacccgtgctgttccctccctcatgctgttccctctcccctgtgctgttcccccaacccatgctgttccttccctcatnnnnnnnnnnnnnnnnnnnnnnnnnnnnnnnnnnnnnnnnnnnnnnnnnnnnnnnnnnnnnnnaacccgtgctgttccctccctcatgctgtnnnnnnnnnnnnnnnnnnnnnnnnnnnnnnnnnnnnnnnnnnnnnnnnnnnnnnnnnnnnnnnnnnnnnnnnnnnnnnnnnnnnnnnnnnnnnnnnnnnnnnnnnnnnnnnnnnnnnnnnnnnnnnnnctcccctatgctgttccctctcaaagctgttacatacactctgtttcctcccccgtgctgttccttggccccctcgtatccacaccctcccctcctcaccctccaggtctcggccaaca

SEQ ID NO: 296144 - DNA, 875 bp, Homo Sapiens
ttgggtatttcaaaggcgatattttcctccagataaaggtaatcatgtaattcataaaactcagttacacagaacttttaaaaaatataatccacaaaaatgtcctgcaccttacagattgggttgggtctcttccaatttttttattttaagggaagcttacattgaagaaggagaaaaatcaaagcagaatttcttcagcctccatttttccttctatttacagattctctggtttgtgtcaaccatctagcagcctgttagaaaaaggacagtatggtggcagcaggctgcaataatggaagtgtcaccagtacctacatatccaaaggaggttggggatagagtcactaatcctcctaatctcaattgctgtaccatccttacttgttatcatctactagcctcctaggcaagtcttcttgttcgatgaagatatcagcacctaattcagtcttcctttctacttccaccaccactggaggtgacatgatgtccaagtgggcttggacttctcaggttcttgagctgctcaactccaacgacctcctcttccttccacctctaccactcttaacttggttacaccacctactgtatcaacatctggaattgctcttcttctgaggtattaaatgaagacatcctgctcttggatgtccatttcctacaatttccagcctgcttgttctttgttcatctgctcctgggatacctgtttctcaaccttctcaagaactctagtgcactgattctgcttcccctgtatcaactcttccgactgttcctgtccttccctctgaattccagattggttccatagaccatcttctcatcactctcttgccaatattgtaaactaccttgtccctttg

SEQ ID NO: 296145 - DNA, 331 bp, Homo Sapiens
ttgggaaacatctgtaggaaaacactagagagcatccctcactaagatatcaaagtaactactaaactcagaggacagctgaagcacaagcagtataaatcatctgggtacctccaaaaaacatcttgcacattctcaaatgattgaccgatggactgcctgacgtgtgaataaatgaatgaagcctttgacagtgaatcaaaggcatgaccactttaagtgccagtaagaccaatagtattagtctgcaaaagagattgtgagatgattctctcttaaggcagtttaaaaattggcactggtacaaaacataaatttatgggaagcatta

SEQ ID NO: 296146 - DNA, 922 bp, Homo Sapiens
ttggtaaaattctttacttcaactttattctccaaacatatttttcctggacatagaattctgggttgactccgctaatacacatgaagtttttagaactttaaatgtttcactgtcttctagctgctatgtcatctgatgagaagtttacagtcattaaatcatgtaacgtcttatttttgtctttgattttcagcagttttactatgtgtctaggcatagttttctttaaatttagcctgtttaggctctctgagcttcttgacaatgtaaatttatgtcttctattaatttagaaaggtcttgtttactatttcttaaaatatctttctgtaccattctttctcctcttctcttttaatactccagttaaaccctacagacagatacactgagcgaagtacatacactacagttaacagacaatccctgacttatgatggtttgatttagaatttttcaactttatgatggatttatcagggtattaaatgcattttcaatttagtaatatgtttgactttcaatgcgtttataggaacataacctcaccataagttgagtagtatctctattttctacccatctgtgctgttgatgagatcacaaggttccatgttagtgtctatggatgaactcgagtgagctattgtaatgaggaataaatcagctataatgttcttattaaatttcagcttatgtattatcaaggcacatcagatatcaagagattagttcaaaatgtctgttgtgaggtgcttttttgatgatacaggaaaagaatgagtaggaatgaacatcacttgaagagagatacacatacaaaattacacaccaagaatgatgacagaacaggatagagggaaatacaccatattagagcccccaactttaatgaatgagagcatgactcaaagttttg

SEQ ID NO: 296147 - DNA, 954 bp, Homo Sapiens
  misc_feature (576)..(589): n is a, c, g, or t
ttgggaatgtgacctgatacatagtaacacatattaacagctgttgtttttgttgtcttgctgttcctgcttgctgctaatgttactgttaggacaatcgagatgctaagagtaaaagcacaagctaacagctcttcttgcattgtttcccactgcaatccaacatctagttgatagggtgccacatgagaccttgagaaaagtgtcataaaattatgattatgagctgcaactctcctatgaataggattataagccattcactgtgcctatacactggtaggcctagatttacaaaaaacttgtaagactatgggcaaagtggattgttaaatcttgaatccaaattcactaagagtctgctattttataaagactattttaccttttatcttctgtgtaaacctagattttcatatattgagtttaagtggggttatacttttcagtacacaagaaaaaacaggtaacaatgctataacacagtgttctaaatagaacaactgatataatacttttgttgcctgaaaaccccttccttggcattgttccatgtaaactttacttccatgtaannnnnnnnnnnnnntcaagtcttgggtgtgaagaatattaagacaatataacaaatgatgatgaaagtagcattatattctaaatgtgcttttattctaccaaggttctgtccctaataaaacctagtaatggcaatagtatgtaaaaatacatatgatgctatgcttctctacacataaccaattgctgtattcatagaacatgtgtagtggttgaaaatgaattttcctaccacgtgagattcttgcagccctgtatgtaagagtatgttgatgctgttcccacacttccttctctgcaagtccacagtgtttagggaaactatggatcatctgaagtgcatggagaaatttttactttgtgccacacattttctgg

SEQ ID NO: 296148 - DNA, 927 bp, Homo Sapiens
  misc_feature (67)..(195): n is a, c, g, or t
  misc_feature (351)..(379): n is a, c, g, or t
  misc_feature (399)..(735): n is a, c, g, or t
ttggaccttgcctcccttttcctcatcactgcccaacaccacattgcacatattctttgtgaatccnnnnnnnnnnnnnnnnnnnnnnnnnnnnnnnnnnnnnnnnnnnnnnnnnnnnnnnnnnnnnnnnnnnnnnnnnnnnnnnnnnnnnnnnnnnnnnnnnnnnnnnnnnnnnnnnnnnnnnnnnnnnnnnnngtgagttcatcagtcaatccaccagtcagcgcagaatatactccctaaggcattaccagaagtaaatccaaggaccacttgggtcagaattccttagaggacttatacatgcagattcctggctaggaaggaaatggcattttcatggttctgtgnnnnnnnnnnnnnnnnnnnnnnnnnnnnntatgcccaatttctgcctcnnnnnnnnnnnnnnnnnnnnnnnnnnnnnnnnnnnnnnnnnnnnnnnnnnnnnnnnnnnnnnnnnnnnnnnnnnnnnnnnnnnnnnnnnnnnnnnnnnnnnnnnnnnnnnnnnnnnnnnnnnnnnnnnnnnnnnnnnnnnnnnnnnnnnnnnnnnnnnnnnnnnnnnnnnnnnnnnnnnnnnnnnnnnnnnnnnnnnnnnnnnnnnnnnnnnnnnnnnnnnnnnnnnnnnnnnnnnnnnnnnnnnnnnnnnnnnnnnnnnnnnnnnnnnnnnnnnnnnnnnnnnnnnnnnnnnnnnnnnnnnnnnnnnnnnnnnnnnnnnnnnnnnnnnnnnnnnnnagctcctgtcaaataaagccctttccttcctcaactcagtgtctgagggtttcatctgcagctcatcctactacatttcttggttctctgaccgggaagtgaggtgattggtggatggtcgaggcagccccttagtcggcttagcctgccctgtggagcatccctgcaggggactccagccagctttagtga

SEQ ID NO: 296149 - DNA, 863 bp, Homo Sapiens
ttggcttgatttttcaggctgttcttttgtttgaaagaatttaaccaaggacccaccctaactgatgcctgaaaggtttcttcctttctcctctctcagtatcttcccttgtggactacaccaatgtcgaaatgttcttgctaaaaatgatgcagggagaaagacaaagttacaaagttggcatccacaatttttccatcttgccccacttcccaattaaaatgaaggaaaaaaaattggtgaggtctccatccctgtctgaagcaggcatccattatcctgcccaggtcagttgctgcaatgggaagcatgacttcatgttttgtcagatgcaccaaattttcaagagaaaagccagagagctgaatatttgtgtgaaatttcctgatttttaaaagttggcaattgtatcaaattaggattatactccactaaatataacataaaatcgaaaagaacatgcagcataaatgagagaaatgttttccttcattagaggcagttcagtggctccacagagatcagggacccaggttccttccagctttctgctctatcattcctagggggtgacctttatcttcatggcccagtgtgactgcaagagctctagcatccaagttcccagcagaaggatggaggactggctggaaaaacaaggagacacagggtatgcatcaggtatgtttcaagggagctgccacaaaccacatctgcttacatcttattggctagaacttagctgcatggtgacagctaattgcaagggaagctgggaaatgtagtctctatttcagaggcacttactatagggaataaaggagaaaggctcttggggtcagcaattaatagtctgtgtcata

SEQ ID NO: 296150 - DNA, 331 bp, Homo Sapiens
cagttaacagagtcacccattggaacataaatccatcccagattaaattaattttataaaacagtctgacaaagactttgaaagaattatgtttagaaaactccaagagactaataaggcacagtttctattttaaaagggcaagaaattatgaaactacagaaactgagtggaaatgaagaggtcccaatttaaaaccttataaatgagagagatcattaaatttaaatttcacataatggtataaacactaccatggacattcaaaaggatgattcatatatgaaaacttgtatgaaaaattcactcagaatatatcacagagaaaata

SEQ ID NO: 296151 - DNA, 334 bp, Homo Sapiens
catcaatggcccactttgtacaaaaaagttggattctgctgactctatatagagaataagacattttgtctttttactcttccacgtgacttctgtatttcaggagagaggaagtgtgattcccatggggatgacgtgtttcttctcaaccaccaactcagtctttctctaaggccacacacttttgctgacctaaagagtggactgatctgatttttctcctgggttttaagagaggcagagtatttattctatgaatgaacccttgaccccttcccaggatattagtcctttcaactttcactcatttttgtcatgccctttctttggactg

SEQ ID NO: 296152 - DNA, 100 bp, Homo Sapiens
gttcgttgcacaattgatgagcatgctgctcatgcactttgtacataagtggcaaacaactgatctgatgaagtgtgtaaagactgatcatagtttcaag

SEQ ID NO: 296153 - DNA, 557 bp, Homo Sapiens
tatacataataaatatttcaatgtggtagtacaagttaactctttggtggtttccagatggttaaaatttagaatatagcacattcgtgtatgtatgacacttttggttatggttttcataatgtttagatttttttaagttgcaacttgcagaaacccaactcaaattaataggaatgtattggcttacattaccaaaagcccaggaataaaattctgttttatctattttgggatgtaagtatgctaacatgaggtaaagatttttttctgtatctattcttactgctgctccttctgcttttctttctatttttggcttcattcactcttattgcaggcaggctctatctatgtgccaggtgggatggtcatgactgtccacatgcatatagcttccaacctgagcatgagagagcctttagatagttccagcaagtaattctgattggattgaatttgtctttgtgtggcaagggggagcagtagaatgcaagcaacacagaactatgattgaccactctcatcaagacaacagcagtcagaaatattttccc

SEQ ID NO: 296154 - DNA, 706 bp, Homo Sapiens
  misc_feature (260)..(369): n is a, c, g, or t
  misc_feature (382)..(438): n is a, c, g, or t
  misc_feature (483)..(600): n is a, c, g, or t
tatatacccagtctcacagttcattgaccatcccatataattctcctttctatctcagcagtttacttcccaagtcttggtcttctactgtacacagaatgacccactttcaaacatttaaattttgatattcctggatcctactatacctgctatgcttttatctttcttcctccctaaccttggtctccaacaactttggaattttctgttcacataaacaaagttaaaagagaaaaaacagattgagggaagatacnnnnnnnnnnnnnnnnnnnnnnnnnnnnnnnnnnnnnnnnnnnnnnnnnnnnnnnnnnnnnnnnnnnnnnnnnnnnnnnnnnnnnnnnnnnnnnnnnnnnnnnnnnnnnnaagaaaattcatnnnnnnnnnnnnnnnnnnnnnnnnnnnnnnnnnnnnnnnnnnnnnnnnnnnnnnnnntgaaacatttcatactttataaaactggcaataatgtgatacctnnnnnnnnnnnnnnnnnnnnnnnnnnnnnnnnnnnnnnnnnnnnnnnnnnnnnnnnnnnnnnnnnnnnnnnnnnnnnnnnnnnnnnnnnnnnnnnnnnnnnnnnnnnnnnnnnnnnnngtttgagcattggataccgttggatgcctactagtatcttttctcaatcccgtacctttttatagaaagctgattttgtttgcctagccattccttccccagtaca

SEQ ID NO: 296155 - DNA, 548 bp, Homo Sapiens
  misc_feature (42)..(63): n is a, c, g, or t
  misc_feature (72)..(235): n is a, c, g, or t
ttgggagccaccatgcccgacctttataaacttttcaattgnnnnnnnnnnnnnnnnnnnnnngtcagaacnnnnnnnnnnnnnnnnnnnnnnnnnnnnnnnnnnnnnnnnnnnnnnnnnnnnnnnnnnnnnnnnnnnnnnnnnnnnnnnnnnnnnnnnnnnnnnnnnnnnnnnnnnnnnnnnnnnnnnnnnnnnnnnnnnnnnnnnnnnnnnnnnnnnnnnnnnnnnnnnnnnntaggaagccagatatagccttctgactcagaagaccaccatagtccttatgagaggacaaatatttcaaagtagaggtataaccccagggggatgatgactaactgtagagcagccaggcagactctagaaggggagaaaaggtagattccctggcctaacatcctcttactgatcttattcttgatttctttcctgacttactcctctttgttcaccacactgaagtctgcagggtcatttaaaatacaaaatgatttcttcaatgtattcccactgaacagagaataaaataccattcatttccatgcttt

SEQ ID NO: 296156 - DNA, 589 bp, Homo Sapiens
caggtgcaaatttaattttgatttttctcagatggttaaacagttgttctcactccatttatgaaaaagtcaatttttgtagtggtgacttgagatgccatttttatcatatactgaagtttaatatgtacttgagtctatttttaaaacttctgtttgactagtctgcgtatttatgtacaataccacattattttaattatagcagttctatagtgtttcaatgcctggtagggttagtcatcccttcctccatcagtttttattttttgtgttgtgctgtgtattctatatgttcatttttctacatgaagttcaatattgtatagtctatcaatagttacatagtaagcttgttggtatttttattgagatcacattaaatttatagatcaacttagggacagctgacatttcaagatgttgagtcatcatatttttctatttatttagctatattttatatcttcagaagtgttttaaagtttttctaatgtaggttttgcatatttctcagtaaatttccccaagtatattaacttcttggttggtattataaatgagcttttctctttatttttttgagaga

SEQ ID NO: 296157 - DNA, 278 bp, Homo Sapiens
ttgggtaatacttagagaaaatgtgttagtagcatctgtgggaaatacccacttaccacttctcttttccactgtggactcaagtcgtcttattatagacaaaaagtctataataagtaacacaaagataacctacttttgcttgacagtacaaattaaataggtaatgtttgtgtagcatgatttattaacatcttctaggtactccatattaatatactaaatgatttattatatgcctaatatgtttatccacatcagtgttttcttggatataa

SEQ ID NO: 296158 - DNA, 869 bp, Homo Sapiens
  misc_feature (668)..(690): n is a, c, g, or t
ttggtttttctcaaggagtcccatgcaccccagagttaccttagagcctcacgtgcatgcatcaagagtggcaagacaaaatggagaaaaagaattcggccaactgagaaaaaaccctttttccagcaaaacaaaatccaagggggaaaaaaattaaataaataaaggcctttcaaatatgcctataacttggatatacacttttaattaagctgtgtgctctttaagaaaattgttttaaatcccttgttatctggttttagttatgccgagcagccaatatttctggctttcaaactttactaaaggctcagggaaagaaaaatccaaggctgttgaggggaaaagaatcaacaaattgcaaaggtcatccagatatcaaatcagaaggagtttattccttaagccaggattgaacccagctgccactgtaaaatggtggaggctaaacgaaacattgccatgaggttacaggtcacacttgaaagacgtaaaactagatggagacctgcggcaaagttgctactgaccatacagaaagccatgcaaagcacactagattggctacagattaaaatcaacctcatgaatcatttttaataattaaaactttacagagaatataaacagtgatccttataattcctggcctagtaaaatgtcttctnnnnnnnnnnnnnnnnnnnnnnnctctcacttaaaagttaactgctggcagggtagagaaaggcagaaaagtttaaagtgcagagttggaaagatgcctgcaggaagaaaatcttattcttatggaaatgggttcctccagcaggcgaggaacttaagaggggagcaggagcctctggttcacctgtctatcccttaaaaac

SEQ ID NO: 296159 - DNA, 214 bp, Homo Sapiens
gttcgttgcacaattgatgagcaatgcttctatatgccactttgtacaaaagttgggagatggatatgtgatgagagaagactagatctcagactctcatgactctgtatcgtggaatcctggttcataaaaatgatctgggagcagtgatatttcccaacactgcagaattctgccccagaactgactggagcattctttttcttgtcacaac

SEQ ID NO: 296160 - DNA, 819 bp, Homo Sapiens
  misc_feature (644)..(692): n is a, c, g, or t
cttacaagggccaactttgtacaaaaaagttggggccttttacctatttgatatatctattgacacggttggaatacacaactctttggagactaactcatttttctcataatatcatggggcttcaaaactgtcttcccttgttttttggtattaatgaagcagaatattgcattggaaaattatgtgtcctagaaaagacaaactctccatacatgtaaaatttgaaattgaagacatcatatgcagatatcaactgagaatattactgcaaaagcatttgttgttatgactgggggcacattttctaaattaaagagatgcaggtctgtagagggaaggattctggagaatagctagcacacaaggagttcatatgaggtagagttgaagaacagggacagaggagactaaggcagatgggatattgagaaccatctggtcctaaatgctgcagaaaatttttaaagcctgattataagacacaggacacttttcaaattttatttgaaattatctcagtctttatatacaaaccataaaattactaggaaatgtacttatcctgcgtccaaatcacataatgtttcctgttttgttaataacccattgtaccagttcgaattcagtcagagaagcagaannnnnnnnnnnnnnnnnnnnnnnnnnnnnnnnnnnnnnnnnnnnnnnnnatttgttatagggagttgtccttattcaattatggtacctgagtaagcagctcctgtatggctgttgtcttgtgccagatgttggagctttaagtcagttggaggcctggccattgcttcaccaaca

SEQ ID NO: 296161 - DNA, 204 bp, Homo Sapiens
acaataaaagagcccactttgtacaaaaaagttgggagatgattccacttttcatagtctctaacaataatccatgacttcttattctccttgaaaaaaagccctgaaaagcttccaattgaagccaatttttccaggcaagtgctgcccaatttccctatgctgcaggaggttggactcacccatacaagagatctgtttgtt

SEQ ID NO: 296162 - DNA, 372 bp, Homo Sapiens
ttgggttagaggctatgttagacagtttttctcatctgagatatcaggagattccaaacacatggcagcatgtagagagaagaactgtgaataaggctgacatctaggagactggaatctagaagcaagcaggtaaatctaggtggttgcctaaatgaaggggtatgatgcagttagggggagaaatgagcaaccccagaacaagggaaaagaacaattgtaagtagacagaatgcacagggagcattgagttaactttctggacaagacagtatttgtctgagatttactttaatgtgtggaccataaacctgccaggttctgacgtggatgggctctgaagcagactgaattttgtttgcccccagattc

SEQ ID NO: 296163 - DNA, 604 bp, Homo Sapiens
ttggttttttccagcaaaaatgcagagtcgcatatgaatatatcacttttttacacaaatgtttcttatttaccactgtaaaaattaggctataggtgtaacttactttgcctcacaaattgttgcaacttcccagcccatcttaccaggtggtatattgtttctaattggggaggattgcatatttttaactaatactttttaaatttctaaaaccttaaaaaaaagagactataaagcagtggatcatttacagagagttgtaattctgaagactgatagtaaggacaatcgattttcccacttctggttttattgactagaagagttacaaacatgaggataaaatgcctcacaatatactgaaaaaacaatgtgttttcatctactctgagtttctttatagaagaatttggggtttagtttgtgtgttgaagaaaaagccatcatggagttttctatttgctgttttgacagcaatatgtttttcctttctcttctgagacataagtgaactgttaagaagagttgttcccctcaccttatcttgcaaaattgttttctgaagcaactaaacagtgaaaatcaccagttaattaaggat

SEQ ID NO: 296164 - DNA, 898 bp, Homo Sapiens
  misc_feature (352)..(516): n is a, c, g, or t
ttggaccaagcaatattgccattgtatctagcaatagtaccggattcgcccccaaccatccagattttcttatttagcttcctgataatcacaagattattaatgtgcaagactgctgattagaatcactaaaatgattggctttgcttatatcccaagagttcatctatacagcaggtaaatcgacatcactccaaatataggctcagaaacagacacattctggctggggtggagcaaataaagatgagaagttctaaaatataacgttcaatacataatatgccataatagtcctactgggctctctctgaagccctttctaatttttagccatcagatcttggaacannnnnnnnnnnnnnnnnnnnnnnnnnnnnnnnnnnnnnnnnnnnnnnnnnnnnnnnnnnnnnnnnnnnnnnnnnnnnnnnnnnnnnnnnnnnnnnnnnnnnnnnnnnnnnnnnnnnnnnnnnnnnnnnnnnnnnnnnnnnnnnnnnnnnnnnnnnnnnnnnnnnnaccatgatcactattatccttgctgttgtaactctattgccttgacagttggttcgccaattttctcagggcagcttctcccaggagatgctgagctaaggattcaaattcaagtgacttattaagggactgctcctaggagaaaccaggacaggagtcaggaaaccaggataagatggaaagaagtcaaggaatggtgtgatttcacgtcaatttcagactcagcctggtctcagaagaactgtaaagtgtaaacggtacctcagagtttgtcccatctgaaagcaacaaagccggatttttatacttctgcacccgcctgtcattggttaaaggatgggaggggtgtgcaactgtccctagaggtgtaacttctgaactt

SEQ ID NO: 296165 - DNA, 249 bp, Homo Sapiens
ttggctaaacggtacccaggaatgctaccaaattcttttagtttagtacaaacctgaaagaacattgcaatcggggctcttgagctgcttgcttgagcccgcttacactctgtggagtgtacttttgcttcagtaaacctgcactttcgttgttttgttcttttattgctttgtttgtgcattttgttcaattctttgtttaatgtgccaagaactgggacaactcatagtcaagactttccatctggc

SEQ ID NO: 296166 - DNA, 322 bp, Homo Sapiens
  misc_feature (209)..(237): n is a, c, g, or t
ttggggcagagacagaaaaatgggcacaaggaagagcaaccagaccaagctaagcaggttgccttggtaacaccagtttcaagggttttgttcttttaaaaagcctcacatttctgacaggataccgagcaccatctagtggtgatatttcaaattcaaacaatccacactttcacgctcaatttcaaacaaaactaaaatgtggtacnnnnnnnnnnnnnnnnnnnnnnnnnnnnnagtaagatgcaacccaccagttctgaaatacacacatagagactcagtgacagagacagaaattgttttgtgtgcatgtgcaaaa

SEQ ID NO: 296167 - DNA, 146 bp, Homo Sapiens
ttgggaaagataatagatggcaatatttgaagggcaatggcattctgcaatagggctctcattgtcccctcataaagctatcatatttactaatcagaggaaactccaaggtagcactgggtttggaaaagattcggaaaagctgt

SEQ ID NO: 296168 - DNA, 371 bp, Homo Sapiens
ttgggcaaactccttgaaagcaagagatgtggcttttgtttccttagcaagacaagcagatctggacagagtatgctttatttacatggtagtaatttaccagtgctggcagacccaaatgttctggtttcctgggataatccaaatctcattggtgacattgccttggtttttgaacataggcttagaaacaattgctgaagtagctccaatcctaggaagcagatggcagtccttgaaactgcctctggctgccactgcagagcaattcctcttttctggcccaagatttcttagcagtcttagcctttatccaagactttttactctttccctcaggctgctgtagtttaagtcatcctctagaaagc

SEQ ID NO: 296169 - DNA, 890 bp, Homo Sapiens
ttggggataaatgaatgaactctcagcacaaacttttcagcacaaaactctgttttgtgcttcaattgaggtctatattctctgatttatgtatttggaggagcatcctaggatcctaggatgttggaactgcatccatccacaaatatccattgaatattttcttgaaagtggttttcaggctttataatatatcagaatcatgtggaggatttgttaggacagattgttaggcctcacccccagaatttctgattcagttggtctgaggtaggccctgagaatatgcatttctaacaagttcccaagtgatgctgatatactctggaggttccagagggagcacacttcaacagccattgccctagctttatgctgtggtgtatagtagatatgacctcgtcacagcagtgaatacagtgttattgataagctcttctagggagacaaaacgacatgaagtaagaacacatgttcaaccttagaaataatttgtaaaatgctaattaaaaaataatgagaatcctttcatcctccagcagaatggtaaagaaaaaggagactatttattccatatcagcaagagagtgggcatttcctgctgtacttgtgggagtctagtttggtgcagccttcccttcactggctatttctttctcatccttcagatctcagcttaattactccttccttagagagccctttcctgattgtctaatctaaagaaagactgttcttatctttcacagtgtttgatatttaataaatctctacaaatatacatgaaagtgttcacttgtttaatgcccgctgtttctactagactatcaacttctggagggttgagtccacatctattttgttcatttctctatctctagcacccagta

SEQ ID NO: 296170 - DNA, 864 bp, Homo Sapiens
  misc_feature (257)..(350): n is a, c, g, or t
ttgggactaaatgagttagtgcataaaataatcaatcacaatggatggtatgcaggtgtccgataaatgttggtggaatccaaatttatctttttagatctctgtctcgagctttcagaactggggcatcatttttccctgaatactagtgtaaatataataatcttagatttttctagaccaccagatagttcacccttttgctgattcataattttctccagctgttggatgagattgcaccttttttcattcannnnnnnnnnnnnnnnnnnnnnnnnnnnnnnnnnnnnnnnnnnnnnnnnnnnnnnnnnnnnnnnnnnnnnnnnnnnnnnnnnnnnnnnnnnnnngataggcatgagccaccacacctgacctcaagtagatattctttaaatatttatttaatatctatttagtggggacaggaacaggcctaactttaattttttaatacataatttcaactcttattttagattcgggggtacatgtgcaggtttgttaaaggggcatattgcaggatgctgaagtttgggtatgactggtcccatcaaccagatagtgcacatggcacacaataggtgtctttcagcccttgacccccctccctctttagctgtcctcagtgtttattgttcccaactttatgtccatatgtacccaatgtttagcttccatttattagtgagaatatggggtatttggttttctcttcctgcattaatttgcttaggataacaggttccagctgaatccatgttgctgcataggacattattctgttcttttttatggcttcatagtatatcccatagtgtatatttaccatattttctttatccagtcctccactgatgggca

SEQ ID NO: 296171 - DNA, 241 bp, Homo Sapiens
  misc_feature (56)..(69): n is a, c, g, or t
  misc_feature (77)..(125): n is a, c, g, or t
ttgggcttagcacgcatgaaagtctgtgtgaaatagagcccataacgcgcgctcgnnnnnnnnnnnnnntttaaagnnnnnnnnnnnnnnnnnnnnnnnnnnnnnnnnnnnnnnnnnnnnnnnnnagagcccataactctctatcttcacttcaactgccccacaccttctcttcactttagtcatgggatctattatacatacagtatttggcatgcgtcacggaattttatacttttat

SEQ ID NO: 296172 - DNA, 830 bp, Homo Sapiens
ttggacaaaatatttcagaggtcaatattgagaaaagtataactacctttatatctataaaaataaatactttgcaactgagtgtgaacatctaatacaatttagtttcctttgtagattttagggaaaatatagtgtttctttggaagatgtatgtgactacttaactatttttatatagtatttattcaattaatagttagaaaatggatttctttcccaagtatagacaatgagagacattatatatatctaaaaaatactaaaatactaaggcttcaaataatggaaaagtgaaatttcagcaggtcaatctgttcacagcagttctgtttggctcattgtcattttttttctacaaaaaaataactagtcagctcattgtcattttgaatatgtaagttggattatgtatgcaccattgcagtcccctactccaatattttatcttcttatttttgaaaagccaatacttcaatgatttaatgctgttttaaaatagtttatcaaaatataatgaagtgtgtatactaatatttacttaatacttctatatgtaattttctctatttttgattttagcctatttctgtcagggcagtgaaaatgataggaaaatggaaagacattatttattcacaattgacaaaaatgattattgcaataataaaataattcgctatgtcttaggtaaattcactattggagatttttttacctattgagaaaacccacctcattccttaccattagatttaatatgaatattatgaagaaaaactaggactttacagataatcatgtaacaaagcaataattcacgtatctga

SEQ ID NO: 296173 - DNA, 696 bp, Homo Sapiens
  misc_feature (134)..(364): n is a, c, g, or t
  misc_feature (389)..(398): n is a, c, g, or t
  misc_feature (423)..(611): n is a, c, g, or t
ttggcacatatatattaatatggaagcttataatttgtgtaaatagtcattttcattgacaagtaaatttccaacaccaaaattatatagggccttttgagatttggaattttatttttcaagaagattttctnnnnnnnnnnnnnnnnnnnnnnnnnnnnnnnnnnnnnnnnnnnnnnnnnnnnnnnnnnnnnnnnnnnnnnnnnnnnnnnnnnnnnnnnnnnnnnnnnnnnnnnnnnnnnnnnnnnnnnnnnnnnnnnnnnnnnnnnnnnnnnnnnnnnnnnnnnnnnnnnnnnnnnnnnnnnnnnnnnnnnnnnnnnnnnnnnnnnnnnnnnnnnnnnnnnnnnnnnnnnnnnnnnnnnnnatgggcgacggtcccccgacctccnnnnnnnnnnttgttttttaaaaaacgtattttgnnnnnnnnnnnnnnnnnnnnnnnnnnnnnnnnnnnnnnnnnnnnnnnnnnnnnnnnnnnnnnnnnnnnnnnnnnnnnnnnnnnnnnnnnnnnnnnnnnnnnnnnnnnnnnnnnnnnnnnnnnnnnnnnnnnnnnnnnnnnnnnnnnnnnnnnnnnnnnnnnnnnnnnnnnnnnnnnnnnnnnnnnnnnngtattttggattacattatcagtaagtcacgaccacaaacaaaaaggatccataagttgtacttttatatgttaaagccattttt

SEQ ID NO: 296174 - DNA, 944 bp, Homo Sapiens
ttgggtgcctctgaaagtgcaccctcacctgagaccaggaaaatgccttgacccagagggggattaaaaacaagacaaccctctcaaaaggaaagaaggggtgaaatatgatacgggttgcccgtgcttcgcgtgtgtttgtaaaactgacgccaaagttttggtaacatctgcatcttgtcataaccacaaaactgaaaactcaaaagcaatgataacatgttgggtttgcaatttgaagagattcacgtctctcaggagttacaaaaccgtactcagacccatatgcacagaaaacctgcagcaatgccaactgccgatggatccttctggaagggggactcggatcttgcctgggctggagagtgctacttcccagaggatcctaaggccttccctagaggtgctcaagcattagggtctgccagaatcccctggcatccccaggttctggtcctgtaggtctcccatggggccctgcaatcgagagacctctctagccagcacccacagtaattctgatgcagagggcccaggtcaccctcaaacgctcctccactgttgcctgtgaagatcccactttacggaaagcaacaggttcaaggggctgtgactcgtcaggccttgctggaatcgcattccagtagtggctcttaccccacacaagcaggagagacacctgaacatgatatccccggctgcccaccggagtcctcttgactgggaagtacaatgtagctaaaagtttaaaaacaaatgataaataactagcgattatttattgcatttcaacatataatgccccatctccttctctgccctgagattcattcactctcttcacccacctaaatatctctgacatcccgtgccagattgcctgatccgtcaataagcaagcgctttctaaacctctacgcatatgactcaatttgtcagtaaaa

SEQ ID NO: 296175 - DNA, 447 bp, Homo Sapiens
  misc_feature (49)..(151): n is a, c, g, or t
ctcaaacacaagtacacaagttagcctaggcagggtcaggatcacaagnnnnnnnnnnnnnnnnnnnnnnnnnnnnnnnnnnnnnnnnnnnnnnnnnnnnnnnnnnnnnnnnnnnnnnnnnnnnnnnnnnnnnnnnnnnnnnnnnnnnnnntatgtatctattgtttaaggctgcttttatgttactatgttaggattgagtaattgtgacagatttatggtttgcaaagccttcaatatttactgatgggaactttacaggaaaatgtttgccaacttctaacataaaataacaacaaagattctaagctttgctgatttatatgggtttacatgggtctcctttgtaggtctgaatgctagatagttacaactcatatatattctaaatgagattccttggaaaagtgtcagcctttctaacttggggtgatggacagtgagccc

SEQ ID NO: 296176 - DNA, 316 bp, Homo Sapiens
tcctaatttttttaaaagataaaacgtggctttccctttaaacatttattgactactggacaatgtaacatatatactcttcactgaaatgagctatacctaaagactttctagtaaaaaaatcaatgtaggtcatgtttggccattacttgaccttgatacgaaaattaatttctatccgtaccatttgactgtgcccttcttggtcaccgtcaatacctggctgtccaagaatgatgctaacaacgggacactggtctatattgctttttctaacccacattctgcaactacggccatgttctgactgctttca

SEQ ID NO: 296177 - DNA, 134 bp, Homo Sapiens
ggaagacgacacctggcagaaaatgcctgtggaatcatcaagcagcatttcactgctgcactgttaagacaaatacaattgagaagatcatctatggaatttgtcagatggtgaaatctcgctttagaaaaaaa

SEQ ID NO: 296178 - DNA, 523 bp, Homo Sapiens
tcctggtgagagaccgcggtgcgcggtggactggacgtagagaccaatggtgttggaggggtgttcactgacaactttgacattgatcagtgttacatttagagagccactcactttgaagatcccttcctcaaggtgggtgtaacagtctacctggggtaaggaaacccctcagagggagtggtatcagtactgaattcagtttagcaaacctgctttagaaccctgtgcctgttcaggggtaggtataaaacatgccagtcctcaaggacttcctgtggggagacatggggcacattattcccatttcactgatgcaggcctctgtggcattgtgaggcgtttgccaggcagcagtggcaaagcaggaatttgaactcccttccaacttgcaactagtgaatatttgggttcaggttaagccgtagagaagcaacagaggaaggtgggtttcagttgggtgtggaagggataaattgaacgagccttcccggaggagcagatagaagggagggagccagcc

SEQ ID NO: 296179 - DNA, 810 bp, Homo Sapiens
ttggggtacacagaggagggaatctgaggaacctgcagagctgatgggataagggaggcaatgggagcatatcctttgttgtagattggcttcctccaaagcagactctgaaacaaggatacgagttgcagtagtttgtttgggagatatcccaagaagcaccattaaggaagtagagaactaagagaggaaagggaaagaagccagtcaagagaatattatgaagcatgataccactatgggcaaatgggggctcaatcatctgagggaatacaggaaagcagtgtagaacacaccttggatttttcccacctggagagcaagggggcttggtgtttacccatcaagtccctcggtcccaagggctatacttcctctgtacttagccttacttccaacctgtcctgcccttgggctgagagatcttccacagccagaggaaactctaagcaaagagtcacaggtccttgcagatagaagccataggataggcaggcacaggaatggtgggtgcccagcagatgtggctgggctctggaagcatctgccataacctcagtcccttctcaagcatactgtgaggccccttggataggaaagacctttttgttgtctgaactgcaaggtgattttctccagtcggtgacaacccctgggaatgctacatgtgataatgcccactgactacaccaccaggggccccataaaaagatccttccagaatggcaaaaagtgtgggcacaacatctctactcacacctgcagacaactcatagtcctggcctccttttggaccagttcctggttttt

SEQ ID NO: 296180 - DNA, 403 bp, Homo Sapiens
ttgggttcagttttagacacactgaatatgaatcctcttggagatgctcaagtggagatttaaagtgtacaattagggcacttttgagttctaagtgctctgacattttggatggtaatggagccgtgtgcattgagactgcccagggaagagacacagggtaataaaatgaaagcttaggatggagtccttgaaggaaaataaaatgggtatgtagaggaatgggagcctgcaatgtggtaggaaaggcccagccagaggattaggattagggcaactacttaaggcagtgccacaccatggaagccaagggggagggatgactgtttaagatgagggggtgtcactggcactgaaggctgatgagaagctttttctgatgagggctcaataatatctgtga

SEQ ID NO: 296181 - DNA, 913 bp, Homo Sapiens
  misc_feature (576)..(592): n is a, c, g, or t
ttgggtgcttttgaaatgcattcagaacaggggtcagctgtcttgaaaacttttattattgatgcaatttgcaagaattccttcaaaaagacttttaatgttaaatcttgacagtttttgtggaatttcttctccttcaattattctttattcactatttcatagacattaaatacctttttggaaaagcatccttcctcattaatggatttagctttcttgtttatcaaaaaaattaaaactttctctatggggggtcattaataattctttaaattctactatgctctttagttatactcccaaatcaattacaccatacttttctctcatttaattttttttcatagatattccattatttgttcaaaacattcctcggcaaaatcatatttatgcattgtttccaatcatgagtagaggaaatctagttttctgcttatgggtcagccatcatattttcttattggtgttgattatcgcattggctgaaaactgtaaccagcttgtcacaacactgtattcattattggttagaaactttacatgctcacgttgtccatgtgcatggagtgnnnnnnnnnnnnnnnnnatgtagaagctgacaataagaaagtctttaaaacttgggttcacaagtaaaattccctctaattatcattcacttcttaaacatgtgttattatacagtgttcataagtgttttgtctactaaaaagaattattcaaacagtattcttcataaaatacttccttgatttttagtactctcttcaatatctatttttctttcttgtaaattccactttattatttttctgtattaactccacatggaacgttaaagcaagctcagccttccactttattcatttctaaatcatctttgaatgtaatgaatttgtcattggaa

SEQ ID NO: 296182 - DNA, 828 bp, Homo Sapiens
ttggctgaagcataccctgagaatgaccctatggtctaagaagaatgtgtgtttggagtcctgagctaagggatccaggagtagacaacccagagtttcactccttgtctatgaaggacatctgaatccccagccattcccttggaatgcaggccatacaagggatccaggccctttgctttgcgttaaatggagattgctaggtgaaggttgctaggtggagggtgctaagtgaaattgctatataaactgcatgtgttttacaaatggtggtggttctctggtacagtctgctcctcctggattgtccctgtatgtaagttccttcaataaatcctatgtctcttttgctatctccagtttcctttttcagcctccagggcacactgtcatccttagtggagtcaataggggtctggcacaacaattagttagagtgggattaaatgtggagcagttttgtttcagggtgagacatggctcaaaaactttgcgctttagagaggggaaggggaggtctagtttggaatggagtatggggaaactgactaggttgttttaatggtgccagagggggacaggcagtgaaggtctacaaaagatattcttcagatggtgtgaagaaaatcaaaacattttaccccaaaatacatttctatgacacatttttgaaatggttgccacagggtcagcagactgaattggtcctgcaaagatgtcttttgtaggggaaattggcgtctgtgaagatgccccactaaccaggccttccctttcaaggcttgtcctggatctaggggagattaactgagagtctgatacctttaa

SEQ ID NO: 296183 - DNA, 394 bp, Homo Sapiens
  misc_feature (142)..(320): n is a, c, g, or t
caattcatcgtactttactgttggtaatgttaggtgctctaatcactagggaaaattatttgacttaaaatctagcaattgcactctcagatatttataccagggaagtgaagacttattttcaagcagaaatttgcacatnnnnnnnnnnnnnnnnnnnnnnnnnnnnnnnnnnnnnnnnnnnnnnnnnnnnnnnnnnnnnnnnnnnnnnnnnnnnnnnnnnnnnnnnnnnnnnnnnnnnnnnnnnnnnnnnnnnnnnnnnnnnnnnnnnnnnnnnnnnnnnnnnnnnnnnnnnnnnnnnnnnnnnnnnnnnnnnnnnntgattaaaaatataaatttcaaaagaatagacactgtgtgtataatcctatttatagaatatttgtgaaataag

SEQ ID NO: 296184 - DNA, 702 bp, Homo Sapiens
  misc_feature (79)..(243): n is a, c, g, or t
cacattcaatagcacattaaaaggacatacaccatgatgactaagtgggatttagtcacttataagagactggagagtnnnnnnnnnnnnnnnnnnnnnnnnnnnnnnnnnnnnnnnnnnnnnnnnnnnnnnnnnnnnnnnnnnnnnnnnnnnnnnnnnnnnnnnnnnnnnnnnnnnnnnnnnnnnnnnnnnnnnnnnnnnnnnnnnnnnnnnnnnnnnnnnnnnnnnnnnnnnnnnnnnnnnattagtccattttgtgttgctataaagaaatacttgagattggataatttattttggctttcagttctgtggactgtgaagcatggtgccagcatatgcttctggtaaggcctcatgaagcttttagtcatggtggaagagaagggcagccagtgtgtcatatggcaagggaggtaacaagagaaatgccaggctcttctcaacaaccagctcttaaatgaactaagagtgagaactcactcattactgtagggagggcaccaagccattcatgagggatctgcccccatgacccaaacatctcccactagtccctacctccaacactgggaatcacatttcaatatgagatctggaagggatgactatccaaatcatatcactaggaataacaaggaaattacctcaacataataaaggcccatatatgaaaacacgacagttaacatattcaaaggt

SEQ ID NO: 296185 - DNA, 967 bp, Homo Sapiens
  misc_feature (50)..(165): n is a, c, g, or t
ttggtttcagtctcctgagtagctgggattacaggcaatcaccaccacannnnnnnnnnnnnnnnnnnnnnnnnnnnnnnnnnnnnnnnnnnnnnnnnnnnnnnnnnnnnnnnnnnnnnnnnnnnnnnnnnnnnnnnnnnnnnnnnnnnnnnnnnnnnnnnnnnnatacgtgtgagccaccacgcccggctcacaaaatatttctctgaagcatgcagtgttgtttgacagcattttacccacggtagaacttctatcaaaactgaagtcaatcctctcaaactctgctgctgctttatcaactaagtttatggagtactctaaatgctttgttatcatttcaacggtgttcaatgcatcttcaccaggagaagattctatctcaagaaaccagtttctttgctcatctgttaaagttctatcatgagattacagcaattcagtcacatctccaggctctacctctaattctagttcgcttgctatttccatgacatttgcagttacttcctccactgaagacttaaattcctcaaagtcatctatgagggttggaatcagctttttccaaactcctgttaatgttgatattttgacctcctcccgtgaatcacgaatgttttcactggcatctagaatggtgaattcttttctgaaggtcttcaatgtactttgcccagatccatcaaaggaatcactatctatgatagctatagccttgcaaaatacatttattaaataataaaacttgaaagtcaaaattactccttgatccacgggttacagaatgaatattattagcacgcataaaagtaacattaacctccttgtacctctccatcagagctcttgggtgaccaggtgcattgtcaatgaacagtaatattttgaaaggaatctttttttctgattaataggtcttaataatgggctcaaatattcaagacgccatgctgtaaagagattt

SEQ ID NO: 296186 - DNA, 917 bp, Homo Sapiens
  misc_feature (125)..(174): n is a, c, g, or t
ttgggtctgtgaatgccattagttcattcctttttatagctgcgtagtattccatcgtatatacataccgcagtttatccacttgttgattgatgggcatttgggttggttccacatttttgcannnnnnnnnnnnnnnnnnnnnnnnnnnnnnnnnnnnnnnnnnnnnnnnnntaatgacttatcttcctctgggtagatacccagtagtgagattgctagatcaaatggtagttctacttttagttcattaaggattccccacactgtttttccatagcggttgtactagtttacattcccaccagcagtatagaactgttccctgttcaccgcatccacgccaacatctattattttttgattttttgattatggccagtcttgcaggagtaatgtattattgcattgtggttttgatttgtatttccctgatcattattgattttgagcatttttcatatgtttcttggccattgctctacatatataaaatcatctaattagaacagcaacactatgaaactgatattggtttttatacctatttattatatgtggaaattgaggcagtgagaagctaaggaatttgctcaagttcacatgtcaatagttgtgaggtggtgattaaagctcaggtaatctgactccacagcccaggttcacaaaagtgctatagttcttcatttgacagcatccatttttatagaataatttgtacccatgaaacaaatgcttcaagacatttgttttgataatatgagaaaatgtatgtgatattggtaagtgaaataaaattttgctttgcaagatatataaacatataaaatcaagattggaatgtcataaacaaaagatgttttcagaatgggaagaatagattattcaaattgttgttatattttgtgtttgccaac

SEQ ID NO: 296187 - DNA, 902 bp, Homo Sapiens
  misc_feature (757)..(770): n is a, c, g, or t
ttggaaaaaataacttttgttttccttttactgaaatgaattgtttcacacaattacatcttaggctggtgcatataaagtgacaactcctactttaaataagagataaataaagagggtttttgaagcccacttctccttatataatttagatcccattttgaattttaaatggtaaaatattctattttgtaaagagaaaaactttgaggtccagataaactcattatttgacagaccaggcgaaaatgacccacatatgagatcagtaggttttcatactgggaacaggtaaaatttactctgtggtttgcttcagtattcactgtttccacagatactgctgttaatggctttgaacataagttattacaaaattctgaatcatggtatacaattataataaagaagattagaaagcatattttaagctactactttagataagctatcctgaaaagcactgtgcagaggaaacattggggatagaataatagtccttgctttaaaagaacaaagaatagaaaccttcagttgatgagataatgtgcccaaacagcagaagaccacttagaatgcatgtaaaaattttgttatataagctgagtgaagtacaaaaaggcttcacctttattttccccaaagattatttttttcatctaattgtttttaatgcaaaaactcttcttatttttagaattggtattctaaataatagtttttcacgaaagatctctttaacgtgtcatggaaatgnnnnnnnnnnnnnntattatgacagtgacattaaaactttttaaaatcagataagaagcaacaattttttattaatattactattttgaatgtgtgaagtaaaggacattaagatagctagaaagaataatagtgtatgtatggac

SEQ ID NO: 296188 - DNA, 851 bp, Homo Sapiens
ttggggagaatcatgtattcttataaagactgacatgaataatcagagttcatattttggaggtctgttaagtcactgaaatctagttttgtgttttcagtctctattaaagtagagaagatagcaaccaaatgagaaaagagcagagttcagtgatgaaaggaggacatggcatactcaatctatttgggaaatatgccatgaaatacaaaaaattaacgacaaaaaacattaagttccaaactaaaagctaagaaagctctgacttgttaaaaggaaacaattaaaagtaaccagtaagtaataaacaattaatagtcatattacacagttacaagattgaagagatagaaaaagacagaactatctgtctcaagtttagaatgaaagtagcaaagaaaattgaaaaggtaaagtcctcaagggttctcaggggctcacttgtcagaaatttttaccacaatccacagttacatatttacatatgatcagatatgataaagaatagataattctcaatgtagaaataaaaggaaactatcctaaataagaagctgatctagctaaaaatagagtggcaagttcagagttgaaaagggaagagaaggacaagtgatttggaaggatctttttgttttattaaggccgatcctagctgagcatctttccaacactgaccatgaggctcaaaagtttaccctggatactatgaggaattcatatattgtgcaaacataaaaagggcgcatcacctacccctctcttcaaagaatatgggtgggaaaaggagctgatgaatggggagcacatttttaaaatccataatgcgttttaaaaatatagttcttaga

SEQ ID NO: 296189 - DNA, 817 bp, Homo Sapiens
ttggattttcatgatctcataaaccttttttacactaggtcttctgaatgagcgagttttcttgaaatccatagaccctctgaaaagcaggctttagaaaaagaccatatgttggatttgtgtgtcagggggctgggggaactctaccaaggaggtcttgcaggccctcagacctgggtaagccaaagagcaaacggaggggccactgaaaaagaaggcagcagtggcgcagtctccggcaggcaaggggtcagtgcaggacgatcagataaagcaaaaaggaacaaagagcatatgcccgggaagacaagctcgagttggagtttgagcacttgggcaacaggaagcaggaaccctggctaggaaaggggacacatggtcacgcaaccagagaacccctggcccacgtccagctgagagtctaggccaaagacccacgctggctccaggtcagagggagcagccccccatatgccaacagcagaagctgtgaccctgtaagtctgagaatgtaaggcaagaggaaatgattttctcttagtccactaataaacatggacgtcaattacacggttcttcagattttccagatgcttcatccttttaggaagggaatcatgaaataatgctcatcaggcaaataatttaatttgctgggtagaaaacatgcaaaacactcttgattatagagagtaaacttcaactgtcctctggtcctgtttagtactagcctgaaaccacaacaggcaaaggttagaaactatgactttgcaatgacacacaggtgtcgattgctttctttggccaactgtggctg

SEQ ID NO: 296190 - DNA, 355 bp, Homo Sapiens
ctattttaattttctctaagctcttccatgtattttgaggaaattaataaatccatacaacaagcacttaagaaagggcttatttttgtttctaaataagatacttctacaggctgggcatttttccactctaaacatggcttagagtacatatgatgttaatcattccttttggcattttggttgagcattgttcttcttatccttgttttatgagaaggagctagaggagtagggttggatctcagtatcatccagatagcatgaaaatatcactgtctgcagcaactttgaaaaccttgttttagtacttctcagcttccagcttttatacattagagcggtctagcttttt

SEQ ID NO: 296191 - DNA, 975 bp, Homo Sapiens
  misc_feature (525)..(621): n is a, c, g, or t
ttggagcacatggaaggcagtcattaatatattagtagaatgagtacatatataataaagatggcacctgaaaattttggttatagacattgtcttaaaaggcaataagtttaccatttgttatgataactgctgctatacaaacaacagcagcagcaaatgttttgtgacagatacgatgatttatcactatctcacttgtagacagaaattatattgccacctcatgccttatacccacatagattccaaatcaaagaaaatacaagagttaatactcaaattggaaaagaactatctgaaagatgactctgtaggcaggaactaaaaaaaatgatcaattcaattttatgaagattaatctttaaatatgataatcagaagcctctcctattagcagtgttgaaatatgaatgacagagcataaaaagtagtcataatattttggggagacctttcttaattacgtaagtacccttatagattagtgtattagggttctctagagggacaaaactaagggannnnnnnnnnnnnnnnnnnnnnnnnnnnnnnnnnnnnnnnnnnnnnnnnnnnnnnnnnnnnnnnnnnnnnnnnnnnnnnnnnnnnnnnnnnnnnnnnctgacgaacaaggagagccagtctaagtttcaaaactgaagaacttggagtctgacattggagggcaggaagcatccaccatgggagaaagatgtagactgggaagctaagccagtttttcttgtctaatttttgtgcctgcttatattctagcagcactgacagctgaatagattgtgcacaaccagattatggtgagtcggcctttcccagccccactgactcaaatattaatctcctttggaaacaccctcacagacacacccaggatcatcaatactttgtatccttcatccaatcaacttgacactcagtattaaccatcccattagtaagaaagcatgagtcccaact

SEQ ID NO: 296192 - DNA, 488 bp, Homo Sapiens
cttttaaaagccaactttgtacaaaaaagttgggctcttggcacctgaatgaacacatcttaatacaaaatttcaagcaacaattctttctaaatgtaataacatatttcagtctttgttcttaaaatccctacctagatctatgttctttccttctccatgataatttatttctattatttttacagcattcttagtattcacaagcgattagtcaggtccttgaattcatgaaatatctgatctctacatacaaaagcctaaatgctattcaattctgaggactacctctgaaaaaacaggactttcataaagggaatttcatattcaaggacaccatgcttcatggttttactttgtaacacaaagcacctatttgccgttattcatgaagcttcttctattaattcaagaattctctctgcaatagatcttataggtaaaaagtaaccttatcagattgcttggtgatgcacttgtgaattaca

SEQ ID NO: 296193 - DNA, 166 bp, Homo Sapiens
ttggcatggactaagactttagatttctggcaaagaaggacagtgattcttgagaaatggaaaacaaatgagagatgaaaactatatagtctgaaataacaaatgcactggatgggatggaagacacattagacattgcagaagaaatggtaggggtcttgggtac

SEQ ID NO: 296194 - DNA, 676 bp, Homo Sapiens
  misc_feature (110)..(279): n is a, c, g, or t
  misc_feature (303)..(363): n is a, c, g, or t
tatcactacctaatagtcattcatgtagaatgttagcctaagagcagggctctggaacaaatccgtttgagttaaattctcagctctgtcacatgtcacaataagagtannnnnnnnnnnnnnnnnnnnnnnnnnnnnnnnnnnnnnnnnnnnnnnnnnnnnnnnnnnnnnnnnnnnnnnnnnnnnnnnnnnnnnnnnnnnnnnnnnnnnnnnnnnnnnnnnnnnnnnnnnnnnnnnnnnnnnnnnnnnnnnnnnnnnnnnnnnnnnnnnnnnnnnnnnaagtaccgagatgtcaaagtgaannnnnnnnnnnnnnnnnnnnnnnnnnnnnnnnnnnnnnnnnnnnnnnnnnnnnnnnnnnnnagtgcaatgaatgagagctcttgtgcacaaaagcatttgcactgagagaataggaggaaaattataggtcacctagactagtggttatcaaaggagtaaccttggggcaattagcttctcctgggaacttgtaagatgcaaattctaaacaagaagagccaagatggccgactagatgcagctaagaagggcttatgccaccaagagaccagaccatcaagaagaccagcacactccgagcagatcttcagaagaagcaccgagagtggacaaagagagcacgcagaccctggctgaagtggagagctggaaa

SEQ ID NO: 296195 - DNA, 942 bp, Homo Sapiens
  misc_feature (130)..(421): n is a, c, g, or t
ttgggtttttctaaaaaaatcatagaccagaaagtagtcctgagaccttcccttccagttcatctgtaatctctgtagagagatctcagatatctctatgagtactttttgtcaagagtagaactacacnnnnnnnnnnnnnnnnnnnnnnnnnnnnnnnnnnnnnnnnnnnnnnnnnnnnnnnnnnnnnnnnnnnnnnnnnnnnnnnnnnnnnnnnnnnnnnnnnnnnnnnnnnnnnnnnnnnnnnnnnnnnnnnnnnnnnnnnnnnnnnnnnnnnnnnnnnnnnnnnnnnnnnnnnnnnnnnnnnnnnnnnnnnnnnnnnnnnnnnnnnnnnnnnnnnnnnnnnnnnnnnnnnnnnnnnnnnnnnnnnnnnnnnnnnnnnnnnnnnnnnnnnnnnnnnnnnnnnnnnnnnnnnnnnnnngtaagagtagaactacaggcacagttccagtgatgtgttggtgcatcccaagatgtacaaggaatcaattgcatgctctataaaaatctattgctttatgcatctatgaaatatatttctgaacacaggcattgctacctctccaagaggtaaccaatttaacatggctcatgaatattaaagtttcctttattcccagatcacagtgcctcatattatgatttgacttttagactaaaatctactgcctaaattttataatccatctacgtaaataatctatattagattttatcaaaaagtgaacagaatattgtgtaactagaaaattccttttttcatctctaatgctcctggaaacactgtctaaatgtatgctgagtgacacctactaagctttcaagaccaagaataatctataggacccaaagaacaacaaatgtcagttagaaagttgttgaagcttctttgaacatcttgatgcttctactaattcaatataggattatatgggaaagcta

SEQ ID NO: 296196 - DNA, 738 bp, Homo Sapiens
ttgggcaaggaggaccaagtcacatcttacgtgaatagtggcaggcaaagagagagcttgtgcaggaaactctcatttttaaaagcatcagatcttgtgaaacttattcactatcacgagaacagcatggggaagacccactcccatgattcaattatctcccatggatctctcccacaacctatgggaatcatgggagctacaagatgagatttgggtggggacacagagccaaaccatatcattatacaaacaatgaactttcccctgacatttacaaacatgctaaatattgtgtaaacatttctaattctattttcattttcataattaacaacagaaaaaatagattaacagaaaaagtatactccatgtatcattataagattaatataccgtggaaatcttgcaaatctagatgacctttctttaaatccacattatgagaaaattatatgctttaaaatatttgtaagaccagttgtgaacattcttgtagtcagtaaattaatcatcatatctaattacaaatatcaaataaaatattgatcataaacttgaagttgtggctcatctctgtaattggatgctctctaggctgtcctgtgctgaaatgctgagtatgcatttagattaggacatgaccatttattgtgacaaccaatactttacttgtaatatacattttgccttgaaaaaaccttacaaaattgtgctcatttattatgatatagttgg

SEQ ID NO: 296197 - DNA, 660 bp, Homo Sapiens
tacatatatatatatgttcaacattagcaaaatatgtttgtagaaacatatttagttgatatttagttagggagaatggtttaaattttactacataacccttaaaagaattatttaccccaatttaataactaacagactaaagaagctcaaatgttttatgagaagacaagcagataggcttctaatgcttaaaattttgtcccaattcttaactttactaaatatattaaaataaaatttatgtagtcatatttctgtcatttaagaaattaaaaataagatatatattatctcttactctggatattactgtcttttctatatggaactgttagttattaaaatttataggattactcttaagataattttacctattcggttacattgttgtaaggttcaaaatcaatcagacatgtaaagtacagagcctgacacacacacacttcctcaataagactgttttcttcacttgaatggaaacaatattacattacataaacttaatgcaaacattttttgaagtccaatgatatattgtgaagcaaatattacattacttacaatttaaaaatagagtcagtgaaagatgttccaagatttggaagtcacagtaaaggtcacataatccatactcaaatctcgggtgccaaaatt

SEQ ID NO: 296198 - DNA, 673 bp, Homo Sapiens
ttggtgattatttggatgctacaataataacttagaatatagcgtatcctgttctaattttactccatactggaattgtgattgctactttgagacagagacaaattctgaaccctaggctgtgaatttgtggaggaaggatgaccttcctccggaccagtgtactctcttgacggttgagtctatggcaagacttttccagagcagccagtgccctctgatatggttgattggtctggtgttaaggacaaaacagttttgaagccatgtgcctctcaccgctcttgtctgtggtgcagctccctgctttcctggcctcgggattttccagagtggacaatggatgaccccaggctgggccatggctgcctcataaaagggatgaactgtgtgtgatatacatagtagaaacactattgtctcaaggaaggaatttaaacccgagggcttcacacattacttaggttaagactttcaggattgacatagaaattgatgggaatccaattcaggggccccagaggcacagtttaggaggagcagacagggtgaggggatagactccctctctactccttcactttgcaacttttaccccacagcaaggcaaagatttctgcctgacattataggccaatgctaaaatcaaaatatttaaaggaaatgaagacac

SEQ ID NO: 296199 - DNA, 868 bp, Homo Sapiens
  misc_feature (222)..(230): n is a, c, g, or t
  misc_feature (481)..(494): n is a, c, g, or t
ttggaatttatgcttttataagctttgtcaaagatcagttggctataagtatttggcttcatttctaggttctctgttctgttccattggtctacgtgcctattttcataccactaccattgttttggtaactgtagccacatagtgtaatttgaagttgggtaatgtgatgcctccagatttgttctttttgcttactattgctttggctttgtgggctcnnnnnnnnngttcaatatgaattttaggatttttttctagttctgtgaagaatgatgatggtattttgatgggattgtactgaatctgcagattgcttttggctgtatagtcatttccacaatgttgattcttcctgtccatgagcatgggatgtttcaatttgtttgtgccatctatgatttctttcagcagtgctttgcatatttccttgtagataacttttacctctttggttaagtttatttctaggcattttgcnnnnnnnnnnnnnngcagctgttgtaaaaggggttggattcttgatttgattctcagcttggtcattgttggtgtgtagcagtgctattgatttgtgtacattgattttgtatcctgaaattttactgaatttgtttatcagggttttctaggtacatgatattatcagcatacaacaacagtttgacttcttttccaatttgtttgccactcatttttttctcttgtctgattgctctgactaggacttccggtgctatgttgaacagaattgattaaagagggcatgctcacaatataactcttaataaataaatttaagcatataaaaatcacaccaagtatcttttctgaccacagtggaatgaaactggacatcagtaacagc

SEQ ID NO: 296200 - DNA, 192 bp, Homo Sapiens
ttggagatttgaacatggctacgctacatgtggcaagctctgtttccttactgccacgtgcttctaagtgatttgtttgccttcctggggtggtcaactcggggcgttcatgaggaagcaactaagggatgcgaaggtctctttgtattggtaaatgccatccacaatgcgaaaaaatcacctgattgaaaa

SEQ ID NO: 296201 - DNA, 164 bp, Homo Sapiens
ttgggtggaaaagaaatcctaaaataaaaaacacgtgtgagtgaagagctatgaaaggatactttatatctccagggatttagggaagtgactaaaatagtcaaggaaggctgcatttcattcatttgacaaaatttgaagtgagaatcaccaagctaagttca

SEQ ID NO: 296202 - DNA, 709 bp, Homo Sapiens
ttggtttagggatcaggctcaaactccagcctctttaggaatcacagaatcttctcccaaaggtagagcacatcttgtccaaacagcctattttacaaacaaactaaggtctgcggaggttcagtaacttgcctaaagccacactaagttaggactggtaggactgggatttgctttcccgtcaactaactcccaaatggaggaatacatgcatgccactgaggtttataaagcacgatttgtaagctagaaatacaacatgtttagttctaaagggagaggcactggcagaattgttcctacccttcgttattagaacagtcccatggcaaggccaacccagaagatgaaattacagcctgcatgttggcctgttgaatgcatgaccagctttattcccatcttcagcataagctcaggcctgtccacccatctccagcagccccacctttgcttaggtagtttaccctgctggaaccttctccctcctactccccagacacagttactatactgtgggccttggggtcactgtaagaatgggccaagccatcattacacaagcattcctgtaaaatagctcaccactaggacaggttgctcactgacccatgcaatgggatgaacatgtccttggcatcaaactgtgtgttaagcattttcttatgggacctcatttaaccctcacaatgcactatttatacataag

SEQ ID NO: 296203 - DNA, 500 bp, Homo Sapiens
acttttaaaagccaactttgtacaaaaaagttggaacatgtattctgcatttgcacctctgggttgaattgtctccgaggcatatgaagatgctgtctcagtgcattttttaaatcccagtgctttagtcaggctgattgcttgtgagttgtgaatgtataaaaacatctgagtataggaagcatttgccatttcaaaataatagctctttgttaactactgcttatgtatagtaagagtaaggtctttaaggcaacttactttcatggaggaacaggtttgttagcttgaaaattatcagcccagttcaaagagaaatgatgcaacttaccacatactgcatgtgaatatgccattcttgaaaacattggtgtgtgaaagaaaatttcatatttacagccaacattacagccattctggaattaaggaaatagcaataatacattatcaattacattttcattgttaaatcattataacaacattgaagaatatatatg

SEQ ID NO: 296204 - DNA, 271 bp, Homo Sapiens
  misc_feature (93)..(229): n is a, c, g, or t
caatactgaaatgtagacacacaaattcttagtatcagaatcaaatcagccatataatacaaggcctcatcatgactaagtttaccaatgagnnnnnnnnnnnnnnnnnnnnnnnnnnnnnnnnnnnnnnnnnnnnnnnnnnnnnnnnnnnnnnnnnnnnnnnnnnnnnnnnnnnnnnnnnnnnnnnnnnnnnnnnnnnnnnnnnnnnnnnnnnnnnnnnnnnnnnnnngcaccctagaaataaagaagatttctcagtatcacatagggc

SEQ ID NO: 296205 - DNA, 812 bp, Homo Sapiens
  misc_feature (97)..(232): n is a, c, g, or t
  misc_feature (280)..(330): n is a, c, g, or t
  misc_feature (491)..(593): n is a, c, g, or t
ttggggactttgaaaattatgaggatggtggttttaaagcactcagtgtcctgagatgctggaccaggagctcgcctgggtttaagggcagtactgnnnnnnnnnnnnnnnnnnnnnnnnnnnnnnnnnnnnnnnnnnnnnnnnnnnnnnnnnnnnnnnnnnnnnnnnnnnnnnnnnnnnnnnnnnnnnnnnnnnnnnnnnnnnnnnnnnnnnnnnnnnnnnnnnnnnnnnngcatgaaaaccatgtacaaacgatttaaaaacaggaattcatgaattnnnnnnnnnnnnnnnnnnnnnnnnnnnnnnnnnnnnnnnnnnnnnnnnnnnggagacagagaggagatgagggagggctgtcttgtttaccagggctacagatgaactgataagtgtggaaagggtgctgaagctaaaacatcctcactttgcaaacattaggtaaaaattggaacaggcgagaatcatgaatggatgctaagtctaggtgnnnnnnnnnnnnnnnnnnnnnnnnnnnnnnnnnnnnnnnnnnnnnnnnnnnnnnnnnnnnnnnnnnnnnnnnnnnnnnnnnnnnnnnnnnnnnnnnnnnnnnnaaaaattaggcaacacctagaccgagtgctcaaaattaacattcccaacaaggggcagacaggcatccgatgagggcatcagatgtacctcgagatgtgatgctctgagaaggaccccacagcacctgtgcattctggctgagggtgcagaaccttaatctcttcacactgaagcaaacatcagacaaacacacaatgaagactgtcctattgcagaaa

SEQ ID NO: 296206 - DNA, 592 bp, Homo Sapiens
  misc_feature (255)..(493): n is a, c, g, or t
tgaggacaatccttcatgtgccttatttctctgggactcctctcctcgaatgaccttatcctctactctttggttcctttgtcaaaacctcattattcacaataactacaacctctgttatctcaatttcaagttccccctctctgattaccctctcctaagtttccaactctctctccattctaaaattcctcccacccacaccataggttttgccattcacggatcttttttttccccccaataaggagtctnnnnnnnnnnnnnnnnnnnnnnnnnnnnnnnnnnnnnnnnnnnnnnnnnnnnnnnnnnnnnnnnnnnnnnnnnnnnnnnnnnnnnnnnnnnnnnnnnnnnnnnnnnnnnnnnnnnnnnnnnnnnnnnnnnnnnnnnnnnnnnnnnnnnnnnnnnnnnnnnnnnnnnnnnnnnnnnnnnnnnnnnnnnnnnnnnnnnnnnnnnnnnnnnnnnnnnnnnnnnnnnnnnnnnnnnnnnnnnnggtaatagcgtgagtgagcacgccccgcgggccgtctttcagcaattcttctcagctgcttgctgtgtcttatccttccacgttttcacatttcttttt

SEQ ID NO: 296207 - DNA, 325 bp, Homo Sapiens
tgtacaaaaagttggcactcctccaaaactcactggagagtagccttttgctgattataatagtatagaacatactcctaggtggagattttaaatgctactgagacatgagacatgtgtaatagcatgtacaaccacagaacatgtgcaccctaagggacctcccaagccatgaataattcacacccctttgtgaataattatgtaagattcccataataagtctcccaacaccggctgctgatggctcattcttttgaacagcccactctgtctcatccttcagagttactacctctaagtaaacactgttatgattattttt

SEQ ID NO: 296208 - DNA, 848 bp, Homo Sapiens
  misc_feature (652)..(673): n is a, c, g, or t
ttggctcaatttgaatgttggctctctagtaagattgttgaaatttccatgaataatatccttaaatatgttttccaaattgtttgcttcctttttctccttctctttcaggtacatcattgagtcatacacatggtctctttacataatcctatatttcttggaggttttgtttactctttttaattatcttttctttatttttgtctaagcaatttaattcagagaaacagtctttgagatctgagattctttcctcagcttggtcaattctgctgttaatatttgtgattgtatcatgaaattcttgaagtattccttttagctccatcacatccatttctttcttaaaatggtcattttgtctttcagctcttgtatttgttttactgtattccttagattccttgggttggttttgactttctccataatttcaattatctttattcctatctatattctgaattctatgtctgacatttcagctatttcttcctggttaagaaccatttatgtgaaactagtgcagttgtttgggagcaagaagacattctggctttttgggttgccagagttcttgcactggttctttctcatctgtgtaggctgatgttctttccatctttgatgttgccatcctttggatggnnnnnnnnnnnnnnnnnnnnnnatcttctttgataccctttggggtttcattatggtacatgaggggttcagtcaactggcttcatttctggaagatttttggggaccaagactcagatcagcactttcttaggctgcatgctctaactctgagggcctgatatcagtccccttgctttattctctgtccccttgag

SEQ ID NO: 296209 - DNA, 359 bp, Homo Sapiens
tccatcaactcaacaaatattgctgagtatacatcatgtttcaacctctgctctggcactgaggatacaacataggccctgcctcaaggaaccaacaggaaggtacagtatgttaagtgccatgatgaagacaagaaccagttactatggaagtatattaaaggattaactcctagcattctggagagggttaaaataagaatatttatagagcaactgacacattgcctaacacattgtagatactgagaagtattagccaacccccctttttgtttacaaaccagatggcatgtttattccacattagaaaatgaggaatgttagcaacactgtgtgatgtgggatgaacaaatatg

SEQ ID NO: 296210 - DNA, 162 bp, Homo Sapiens
ttgggccaaaaaaatcagatgggatactaagacagcggaaatgggtccttcaaaaagattgtctgtttctatattgcaatgatatctgaaatctgatgctgtgataagaaccaaaaacttataaggggtgtaaggattttgccctgaatgaaaggaggcccc

SEQ ID NO: 296211 - DNA, 804 bp, Homo Sapiens
  misc_feature (214)..(504): n is a, c, g, or t
ttgggtacagagaaagataataatgaatcaaaagtaaagagtacattcagctatgatccaagttataaaatagtaaagaaggcatacattgtatctccttcatattttcaatattgcatatttgcatatgcaatgcttcagaaatactgagagaggaatcttgaaatagtctcaaattcttcctaccacaacaaaactattttgagtacactgnnnnnnnnnnnnnnnnnnnnnnnnnnnnnnnnnnnnnnnnnnnnnnnnnnnnnnnnnnnnnnnnnnnnnnnnnnnnnnnnnnnnnnnnnnnnnnnnnnnnnnnnnnnnnnnnnnnnnnnnnnnnnnnnnnnnnnnnnnnnnnnnnnnnnnnnnnnnnnnnnnnnnnnnnnnnnnnnnnnnnnnnnnnnnnnnnnnnnnnnnnnnnnnnnnnnnnnnnnnnnnnnnnnnnnnnnnnnnnnnnnnnnnnnnnnnnnnnnnnnnnnnnnnnnnnnnnnnnnnnnnnnnnnnnnnttttagcacagagtgagcctcagaaattatttaatctgataatcttatgtttataaatgacaaaactgaggttgaaaaaagttgagtgggttgaacaagtatattagtcagcttaagctgccatgacaaaataccaaagactggttggttaaataacataaatttatttcttatagtttcagaggctagaagtccaacatcaaggtgccaatgtggttggcctctggtgaaagttctccttgggttgcagatggccactttgttgctatattctcacatggcagagagaaaaagagctcc

SEQ ID NO: 296212 - DNA, 867 bp, Homo Sapiens
ttggcgaatgggaaaaggctttgtgccaaatattgaaaaaacaaatttggttccttcatcattccgttccagcagtctatgtctttactttgtcttagagtgcactttactgagcactttcttgatttgataatgatatgcaaatcatgattaatcattccacaaattaaagatatttctgctccttcagctggttacgctgaaattattcttcagtgatgtacatatgtagatggcattgaatttctcacataccaaataaagcagagatgataaaaactcatttcatgtaatttactttaaacctccttttgttgtctatgtcccctttaataatattcaaattgtgttttgcaatgccaccaagaatctgagtgggacacaagggacccaattctgcggctgttcctgtttgtagttatgctgtttattccaggggcaggggtagggcttggatggagatgttctttggcagttaggctacaactaagcaaatgtgagttataaacgcaactcaaacttgatttttggctttgtcctgtatggtaaggtttggctaagacagcataaagatttagttcagattgtaactcctttttgtctgaccttcctttctcagatgtttccgcattgactcggactgcttaaaaactgatgcaaagtaaatgcagctttgataatgcttcctactttgacactacatcacgttatccttctcaaacaaggtattgatttgaaaattggtttcctgacttctaagtaattgtcaattctttttaaatggagttcctgtctacacgaatatataccccttgttttttctccttctataaatgaagcacattctgaatctctcaaattattctt

SEQ ID NO: 296213 - DNA, 697 bp, Homo Sapiens
  misc_feature (107)..(127): n is a, c, g, or t
  misc_feature (136)..(409): n is a, c, g, or t
aataaataaataacaatcaatgttcatccaatgccatgattaagagtctttccaaccttaggagagacaggatcctgaaaaccttcccattctttactgtgatggcnnnnnnnnnnnnnnnnnnnnngagataggnnnnnnnnnnnnnnnnnnnnnnnnnnnnnnnnnnnnnnnnnnnnnnnnnnnnnnnnnnnnnnnnnnnnnnnnnnnnnnnnnnnnnnnnnnnnnnnnnnnnnnnnnnnnnnnnnnnnnnnnnnnnnnnnnnnnnnnnnnnnnnnnnnnnnnnnnnnnnnnnnnnnnnnnnnnnnnnnnnnnnnnnnnnnnnnnnnnnnnnnnnnnnnnnnnnnnnnnnnnnnnnnnnnnnnnnnnnnnnnnnnnnnnnnnnnnnnnnnnnnnnnnnnnnnnnnnnctgtgatagctttcttcatgccatggggacacagacagaggaatgtcaaccacatctggtgaagcacatcaggaaagactctgattaggcaaagggcaagaagggacaaaagggaagcctctccagggagaaatactcttttttctatactgctgttgtgttaaccactgtgacctcaatggcatgaataccatcctatataggcatccttcctaaactctcctagactatggacataatagggaagccggagagtggcagtggctaagccggaagactttaaaatat

SEQ ID NO: 296214 - DNA, 566 bp, Homo Sapiens
  misc_feature (130)..(163): n is a, c, g, or t
ttggggcttttagtttcctgccaatgttaaaattgtcactttatgacagaaatgcaacaagacaaaatccatccagacctttaaaataatgcaaatgtgctgagtcatatttctttgtgtacaacaagtnnnnnnnnnnnnnnnnnnnnnnnnnnnnnnnnnnggaagtttgtagaaaagtgataaaactcaaacaaacctactttgcattagacacaataaatttattgctcattcttacttcctaaaaagaaaaatatctatagagtatagatattcctatatgcatttcttagttcctaaaactgctaagaaatcaagataaggatatatttattaatatacctacttttattgatggaggacataaggtggaaaactattgcttaaggctagacagcaaggcagaggaagaaggagagaattacctctcttttgacttctacttcagtattctgggccctcactgcagctgtctcctaagtatgtgtctttcatattgattactattattgtacacttgttactaagagttcaaaattactagcctgaagcttcaagataat

SEQ ID NO: 296215 - DNA, 411 bp, Homo Sapiens
ttggcttagagatcattgtaaggtttgtaactggcctaatttcaatattgttgtatctgaatacaacaatattggaggcccaaagaaagggagagagacagggcaatggtccattggcagagcagtcagaacatacatatttatcaattaattctctgtcttatatgggcagggttcatggcactctgaaacaattataacagtaacatcaaaaatcactgatcacagatcaccatagcatatctcataataatgaaaatggttgaaatattttaagaattaccaaaatgtgtacaggaacatgaagtgaatacatgttccaaaatgtatataggaacatgaagtgaatacatgttgcaaaaatggtgccaatagacttgcttgatgcagaattgccaccaaccttcaatt

SEQ ID NO: 296216 - DNA, 118 bp, Homo Sapiens
ctatatgccactttgtacagaagttggggcctttgctgagagcattgtataagatagttgttagatggttattagtgttctttgaatagtttatttttctgtagtcaatttatcttgc

SEQ ID NO: 296217 - DNA, 391 bp, Homo Sapiens
ttgggagattcttttgctcctgagatattgttttgtctccaaacagaagatatgaacagttgcccagtgacttctgtgaaatgtttatggtctcgtgtcagttcccaacaatgagttgtccacataatagatgcactttatttgttgtacatactcctttgatgtatgtcaaatttttcatgtttccttttctttttatctggtctctcactgttgatattgtcctgttcttgttgtctttctagattgaaaggaccaagtccactttaactcggcatggcagccagcacaactctgatgagcatgtagacacttgacagacaatgtttgtggtgctgctatggaaggctccaaaactgtgctgtcaacagtgccataaaatcataatctg

SEQ ID NO: 296218 - DNA, 301 bp, Homo Sapiens
  misc_feature (175)..(211): n is a, c, g, or t
acaataaaggccaactttgtacaaaaaagttgggaataaactaacgttacagcaacaaaaggagcactatgcacctgtaatcacagatatactgttaaatgagaaaagccatgtgtatggtgtgtgtatgctatgtcatcttccagctaaggaagagggacactacagatagttnnnnnnnnnnnnnnnnnnnnnnnnnnnnnnnnnnnnngagtagattactttaaaaatgccaagatatactaaaaactagaggcatgggctacctttgggtcagaatgggaattgtgtgaagggatga

SEQ ID NO: 296219 - DNA, 834 bp, Homo Sapiens
ttggggcatctctgctgctataggcaaggttctctcacatgtttggggattgcaggttcttcactgctctaggatggaattggctagaacaaccatgtggctctctgccatatggtctcttatcctccaacatgttagctggactcattcacctggcagctttccagggttccaagatagcgaaaaggggttcaaagactcttgagtctaggctcaagattggcagtccgttacttctgcctcattctgtcagtcggtgcaattagtaggcaaacccagattcaaagagtaagggaatagattccatctgttcatgagaggagctgtagtcatattgaaatgggtatggatatgggaaaggacagagaattgtgaccatttttgcacttagtctcctttaccactcaaagaaagtcccacttcccttcctacaaggcttttcccaagttcatacacatacatgcctctatgtccttgctttacccaaaaggcttttcctgccttctacatgacattcaaaactccttccatccattcagactataggtcaagtttcttttctccttttaagcctttcctggcctttctaagccttttgtgatctcctatattgtcagtatcattcatttgccatttgataatttattgctaccatggagatatcttagccttgaactaggccataccttccttaatgacaggaattgtgtcttatgatgttttgacaaatactaccatctgcccagaagactgtccataaagaaggaatgaatgagtagacaatcagactacctcctctaacttgagacaaactatctgcctacataaaactgg

SEQ ID NO: 296220 - DNA, 643 bp, Homo Sapiens
ttggggtaaatcactgtgttttcataaaacaaatgcaaatgggtaatcagtgccctaaacaaaaaatggaataacactagcactttagaaaccctacttgtgactcactccttttcccaactagaataactatattcttacacttttaactacaattttagaagttggacacttggttgttttcctaaaatagatttatctactggggttttatcatgcatccagatggcttcttggtcatagtctcctttaaattacttttatggcagctttatcccatctgtccatttagcccaccaaaaaactcacagggcctaacctaatcattgatgggactgaccttagtgcccagtacagtctttcttagctttgctattctaggccaagccataccttcttgcgtttagagttcatgttgtccttcaaacaaaaggggcaaaatatcatgttgtatgaatggtttctttgaaaccccttctgccactggacttaaggggagggaagagaaggtgtactgtctttacatctccatgggaatgggcagtggaaggacatgcaggcactgactgctctcaccaaaaagtctcttttcttgaccacttcagctttgacacttatatgcattcaaagtgggcaataggtt

SEQ ID NO: 296221 - DNA, 894 bp, Homo Sapiens
ttggggcaactccctggacagagcctccaggggcaactgaaaacctttctgctactgcctctacactgtaactgttattggtaacaaaggagcaaagatcccaagtgtcttatccacacctccaacaagctgcaggtgacccaagaagatgtggccagtccacttctcataggtcccacacaactccaactgctggtcaccagacaggaagcccctgacttgggcacagcacatatccttcatcctggtctgattacactgaatgattgatgacccacatctctctggggtggagcccccaggagacaagcaaagtagtggggcagcaagccaccacccattttgaatgggtggagcccagaaggtttggtatgggagtgtctgtagcagaacgtggccaggaatggccattcctttaggtttcacttgctgccataagagactttagccctaggggaactgtcagaccgaactttgcagggcagtctctcacatcagatggggctggtgggcacagagccagaaagccccacctctatcagtaccctatcttgcactaactatgcacagagaacaggggatcctcccacaacccgagcaatcactcctgcttgtgagacacagagaaggcactgagaccagcaccagccagcaccctgctccaagccaacaccagctccagtgaaacagttcacacagtctccagtaggggcccccgttttttcccctgtccctgcaccccactggctactttgcccctgccactgtagtaaatgcccccaggcaatcaacacccttgcatccactagcactctgctgcagctgctgtaccttaccccccaccagcacagtggactccaagccttgaggagccagagaacaaatttggggtcc

SEQ ID NO: 296222 - DNA, 571 bp, Homo Sapiens
ttggaaacagtcctgtttcttttgtgctatataaggtgcttcagggataacaaattggatcaatggaaggtacaacaagggtgaaaaatagtccggccttattatcagaaagaacatgagaacattctattctattgtcatgtaatttttcttgcatggttcaacttcatttactctgcactctcacaaaatcaccagttaccaaactgttatagttcccagtgaaaaatcagaaaatactaagtatctttaagaatgctgaatcctagatttcagcttctcactcagaatttaagctgttttcagtaccagaaatatttaagactgttagtttaacttctaagaatagcagataaagcgtataggtgttttgagataaccgtattcataggaaaaacaaacataaaactttcataattttgggaagagttacacacaaaaatatcatcattgaataattagtacaacaaaaatgcatttgtttgtcctaaaggttgaaatgaacagaatcatgatgggaataatcaatatgggaaatgctataaagaaagccataaacaaaggcctgtct

SEQ ID NO: 296223 - DNA, 914 bp, Homo Sapiens
  misc_feature (235)..(243): n is a, c, g, or t
ttggtgaacaaggaagtgacatgattggatctacatttcagaatggccattttctggcagcattgtggagaatgtacagacaggcccaaaggctagaagaagaatttaaagtattattttgaaaatcattcctaaggataaagttgtaagatatcttcatgaaaaaaggactttgttgattagattcacaaaagagagagcaagatggttgtaatgatacgagagtctgctgcannnnnnnnncccagacaagaggggagcttgatatctttctgctacataattatgagaatctacccctttgagatgctacctctttgagattctttcccaaagggccaaccctttttcattctgtgtcatggacttcttgataaactgcaataaagtttctcaatgtctttatccttttaagaagtgaggacttcaatgtgaccttatgcatgtgtctctcaagggtattgggaggggagatgggaaggtttttactgtctatcttaatttactgtttgacattattgatgctagtttataagcccataccctaaggtgttagttaaacatttaacgccaagattatctcctattcctccaaaaatggatcaattaggtatcttattttggcttggaaataaatgacgaggtcacaactctgcatatagtatgacaatttgctgagtatgtttccattagctagaaagactttgagggcatgaagagtaggcactttttggactaacacctggtgttatgtgagcagtggtgttgctctaatttattgaatgtcacaattctgtaagggaacaaagaactctgttaggcagatataacctgggactattgccaaattgctttctgtggtggatatgaaaatcaatgaatagggtggatgtgcagcataatcaatggaaatg

SEQ ID NO: 296224 - DNA, 874 bp, Homo Sapiens
  misc_feature (660)..(694): n is a, c, g, or t
ttgggaagtctgtccattctcagcactcaaatcccatgctgggagaaccactgctcccttcagagctgtcagactgggacgtttaagtctgcagaagttgtctgctgcctttctttcagctatgccctgcccacagagatggcgtctagaggcagtaggccttgttgagctgtgatgggctccacccagtttgagcttcctggatgctttgtttacctactcaagcctcagcaatggcagatgcccatcccccagccaggctgccttcttggggatcaatctcagaatgctgcgctagcactgagcaaggcttcgtgggtgtgggagctgccaagccaggcatgggtgagaagcatcttgtctgctggttgctaagaccttgggaacagtacagtatttgggcaacagtgtctcatttttccaggtaatctgtgacggcttcccttggctgggctgcacccactctccaaccagtcccaatgagatgaaccaggtacctcagctggaaatgcagaaatcactcgttttctgcatcgatcatgctgggagctgcagactggagctgttcctatttggccaccttggaatgccctaatgtttaaacatttaggcccttgtttcagtcagcattctccagagatacaaagcatattacagaannnnnnnnnnnnnnnnnnnnnnnnnnnnnnnnnnncttctgagagagagagaaaggaaaaagagattttaaggaattgactcagacaattgtgttggctggcaaatttgaaatctataggagatgaagctgaaaatttatgtaagagttgatattgcagtcttgaatctgaaatccatagggcagacagtaagctggacacttacctgggctttc

SEQ ID NO: 296225 - DNA, 232 bp, Homo Sapiens
ttgggctactctctataaaacaagccccatcatcccctagtctctaggctccttaccccgccttcttttgcatagcactgatcagcagctggcgttttatttatgcatatctaattatctaaccacctccagctctcttgtgcaatgctgtatcctcagtgtaacagacagaaattattctataaacatctgtggaataaatgaataactggttctataaacatcatgctga

SEQ ID NO: 296226 - DNA, 433 bp, Homo Sapiens
ttggggggggtatcaagaagaactgctgagtttcaggaagagcagtgatcttggtgtgttctagcatttcctgttcccatctcccactccccagttctgctgcagcattggaacccagaggcccccatcagcctggccatcagcaaagggacaggatgggatcggtgctcatccaaagcctcatttccacaaaattgtcattatctgacctgttgagtggctgcctggaagtcctcacttgcagcgtggtctttatttgaccagtttcagagtttgctgaaagaattagagataattgtttaactttgcagctgtcagccagctgggcagacagtaagctcaccaacaagtgtaagaggagaagctgacgaattagatgtccaaaggtgctttgcaaagctcagacagagcatcgagccacagagaattattg

SEQ ID NO: 296227 - DNA, 315 bp, Homo Sapiens
cctataaaagccaactttgtacaaaaaagttggagttcgcctttcgctttctaaaatcatcttgctggagagaacggttatcaaatcccatccactgcccatgtaaaataaataccattcagaaaagcgtggcatggatggccatacttctgatgggtttataactgtatattgcatacgatcccaacgtgaagcctgaaatacgacattcaacgtcaggcttattccaggctactgctgtggctacttttgtaattcaaccattggggcgttttaagcgaacgtatattgcctctaagctgataagcattttcc

SEQ ID NO: 296228 - DNA, 160 bp, Homo Sapiens
ttgggatgtaggcaagatcaggtaaacacctgtgatataagctggatagatgtaactgccgaagagaagatgtggtatgagaaagaaaggagcaattaacaggtgtggaggtcaggggagatgccatgaatgagatgctgtctgagctagatactgaaaa

SEQ ID NO: 296229 - DNA, 100 bp, Homo Sapiens
agatccacttttttaggctcctacagatgagtgagaacatgcattattaaataagcaatttaagtccctgttgaggggatctcgagaatcctctcaatac

SEQ ID NO: 296230 - DNA, 118 bp, Homo Sapiens
tgtacaaaaaagttggcctgacctcgcctgggattcgggggtgatgacattctgtgactgagtgctggctgtgcagacgtgccccggttgtgaagcttccccgagcgctacccttgcg

SEQ ID NO: 296231 - DNA, 1031 bp, Homo Sapiens
  misc_feature (160)..(934): n is a, c, g, or t
ttggtgatattctaagcaaatgttcaaatccaatgagaaacactgttacttacatccagctattcaaccagttgcacagagtggaatataaggaaaagcacatagaaacttcattcactacatctgagaggaaacttcatgggcggtatataaagtttcnnnnnnnnnnnnnnnnnnnnnnnnnnnnnnnnnnnnnnnnnnnnnnnnnnnnnnnnnnnnnnnnnnnnnnnnnnnnnnnnnnnnnnnnnnnnnnnnnnnnnnnnnnnnnnnnnnnnnnnnnnnnnnnnnnnnnnnnnnnnnnnnnnnnnnnnnnnnnnnnnnnnnnnnnnnnnnnnnnnnnnnnnnnnnnnnnnnnnnnnnnnnnnnnnnnnnnnnnnnnnnnnnnnnnnnnnnnnnnnnnnnnnnnnnnnnnnnnnnnnnnnnnnnnnnnnnnnnnnnnnnnnnnnnnnnnnnnnnnnnnnnnnnnnnnnnnnnnnnnnnnnnnnnnnnnnnnnnnnnnnnnnnnnnnnnnnnnnnnnnnnnnnnnnnnnnnnnnnnnnnnnnnnnnnnnnnnnnnnnnnnnnnnnnnnnnnnnnnnnnnnnnnnnnnnnnnnnnnnnnnnnnnnnnnnnnnnnnnnnnnnnnnnnnnnnnnnnnnnnnnnnnnnnnnnnnnnnnnnnnnnnnnnnnnnnnnnnnnnnnnnnnnnnnnnnnnnnnnnnnnnnnnnnnnnnnnnnnnnnnnnnnnnnnnnnnnnnnnnnnnnnnnnnnnnnnnnnnnnnnnnnnnnnnnnnnnnnnnnnnnnnnnnnnnnnnnnnnnnnnnnnnnnnnnnnnnnnnnnnnnnnnnnnnnnnnnnnnnnnnnnnnnnnnnnnnnnnnnnnnnnnnnnnnnnnnnnnnnnnnnnnnnnnnnnnnnnnnnnnnnnnnnnnnnnnnnnnnnnnnnnnnnnnnnnnnnnnatgactacccacaactaccgtggtgtgatcactaccatcctatgttcgtcctcctccatatcgacctccataagtagtaaaatatgtatgtatcagt

SEQ ID NO: 296232 - DNA, 761 bp, Homo Sapiens
ttggaaaatgtaaaatgcaagatgctatctctagataataatgtgttcacggtggactttgggagctattgtttctagctttgctgcccagtctagagtgtggcatagagtggggatttcaggcaggacaagccagggtgccatgctcatttatacagcaagatacttgattaggtcccctgttttgttatttgtgtgtcatctagtgctctctgtaaggtagtactgggcagtgcctgctttatccttttatcacttgtcttgactttttcagtaacaacctaatcctgtctcaagtctctcgatattccagtgtcaccacgagccacacactgtgcccagtgctaggggtgtatacggaggtgcagccccttccattaaggagttttcagtgtttgtgggaaaacaaccagcaaagagaccaattaactacaattgaactagagtagccaaagatacagacaacgtgctggaagagcgtcaagcattttttttcccagtaagcccttgagattgttagttattgattttaaattaagggatatagtttcattatctgtaaatagttaatttgagtcttttggcaggaagagtggggtttctggtgctccaggggaagtggtaaatgagggtagtcctctccaattcatagattaaaagcaaggcatccaagtctatgcctcaaaaagaatcaaaagtgggtatttaacttattcccaaaatatagctagagatacaagaatctatcactcatcatgagc

SEQ ID NO: 296233 - DNA, 112 bp, Homo Sapiens
ttggaccaaatcacccttctcagagtattaatgcaaagaatagcatggaggagtggggaaggaggtaggagaacatatacatgacacaattattagacttccaaaatcctgt

SEQ ID NO: 296234 - DNA, 745 bp, Homo Sapiens
  misc_feature (316)..(646): n is a, c, g, or t
ttgggtggttgtgatcaggatgttggcaggggcagcagttatctgaaggcttgaccagaactgggaatctgcttccaagatggttcacttacatggctattgacagcagggtaaggttccttgccacatgggtcattgtggaggctgcttgagtaacttcatgacatggcagctacttgacctagtcttcaaagtcacactccctcaccttgcttcattctgttagttggaagcaagttgtgaagtccaagccacacccaaggagaggggaattacaattccacaaaatttgtgaacatattttaaaactgccacnnnnnnnnnnnnnnnnnnnnnnnnnnnnnnnnnnnnnnnnnnnnnnnnnnnnnnnnnnnnnnnnnnnnnnnnnnnnnnnnnnnnnnnnnnnnnnnnnnnnnnnnnnnnnnnnnnnnnnnnnnnnnnnnnnnnnnnnnnnnnnnnnnnnnnnnnnnnnnnnnnnnnnnnnnnnnnnnnnnnnnnnnnnnnnnnnnnnnnnnnnnnnnnnnnnnnnnnnnnnnnnnnnnnnnnnnnnnnnnnnnnnnnnnnnnnnnnnnnnnnnnnnnnnnnnnnnnnnnnnnnnnnnnnnnnnnnnnnnnnnnnnnnnnnnnnnnnnnnnnnnnnnnnnnnncctcacagtggcgaagtctggtaggcactccttaatcaagggatcaaagtgaacatcatcagtaataaaacaaattgaaatcttatgttaacctgatag

SEQ ID NO: 296235 - DNA, 819 bp, Homo Sapiens
ttggcagaaacagtgatttggcagctacccaaatggacaaaaatgtctttgtgtgagctttgagatccagactggaggttttgaaatcgctatggagtccacaaccaaggagggctgttttgagaaggcagttctgcacccatgtggcaaattcactgtccatggtccaatatgcagactttgaaacatcatatttccctgtggactcagctagagccccatttgaccttggtcttccaccgggatcattcaccaagggacccaggaggagtcacacttacctgtgcctctggtaataagcccactgatctcattcccagttataaactctgaagtggttcatgaatcagctctaggcctttcagccacggtcttggaggagtcctgtccacaaataacctggcagaagacacacttgtctgtgcccctagagacaggctgtctgactgtggattctgaaacagccctttagtttggctccattccccatttgccacagtcttggagcagtcctgctaacagagggaccaaccagccaagacttgcatgtccatgcccatggaggcaggcccagcaactttggactgagtttagatcctaaaatggccttgtgacacagttccagtccctcttagtcacagcctggggccagtgctactcatccagtggcccacctagtgacctggtttgaatcatcccacggataagcaggatccacactcatccgcacacttagtagcaacctgctgtctgtggacccaactgtagtctgaaaatagatccttgtcccagtgccagatctactgatcaaagtcctgg

SEQ ID NO: 296236 - DNA, 717 bp, Homo Sapiens
ttggtgtgatttcaagaacacctaaactgttctatatctgctgagtaagatgagttaactgctcctcgttgaatgtgtcaacaagcaagtggtagaaacagatttgtttgctggtctcctccgttgtgtaaggtttttcctctgttggaggttgttaccctgtaagcagatcacctgagatatgaattatatttgttctactacctatactgtttagcaggaccagtggctaaccataccctgaagccagccttagagaggataattgtcttaataaaaacatacagttgacccctgaacaacttgggggcaaggagcactaatgccctgcagttgaaaaccctcagataacatttgactccccccaaaatttaactacgaataggctattcttgaccagaagccttggcaaaaacatagtctattaacagatattttgcatatcatatgtgttatatgcagtattcttaaagcaaagcgagctagagaaaaggttattagttattaagaaaatcataaggaagaggaaatacatttactattcattaattggaagtggatcatcataaaagtcttcatctttgttatcttcatgttgaataggctgagaaggagaaggaaaaggaggggttggtcttgctctctcacgactggcagaggcagaagaggtggaggaggtgaaaggggaggcaggagaggcagcgcactttatgtaac

SEQ ID NO: 296237 - DNA, 624 bp, Homo Sapiens
gaatataattagttgtttggatggttgctagtatgatgcacaggtaaagagggccagcagacatttggatatgcagggctgaagttttgattctgtcatttgcaaaatggacaaaataaaatattcttgtctaatggttgtgaagactaaaggtaatacattcagaagtctagcatgaataggtattcaagtgttaggggaaatatctttaccacaatatggttccaggatctgggatttgttgtccatcccaaggcatgggatgagactctgcccctaatccctaccctcttcccatcagcctatttggcagaatgcaaaatagtagctggagcagtcactgaaacggtcattaacaccagctaagactttgtggattgcagattcagcgcctgtggaaagtaactctattgaccatagaagaagacacgggctaatgcagctggtcaatattttctaatcgagtaaagcctcattgagacagaggctcagctgaagtttatcttttcctctttttaaagagaaagagtttgggaagcaaatgagttaaacaagatttccaaagggaatatttaaacggcttagaaaacaaagtgcttttaatcaccttcaaacacttgagaa

SEQ ID NO: 296238 - DNA, 121 bp, Homo Sapiens
ttggagctattacaatcatgtatgcacagataggagctaaattgtttcctctatatagatgctgaaattctaaccactgaatatgacctcattaggaaatatgttctttgcagctgatcaa

SEQ ID NO: 296239 - DNA, 791 bp, Homo Sapiens
  misc_feature (206)..(287): n is a, c, g, or t
  misc_feature (346)..(700): n is a, c, g, or t
ttcttcaatcttaaagaaaatgagattaacaagcaataagaaatcacatgaaggtacagaactcatggataatagtaagtacacagacaaacacagaatattataacactgtaattgtggtgtgtaaactactatgttgagtagaaagactaaaagatgaacctataaaaaatagtaaataactatttactaaaagtaaataaagnnnnnnnnnnnnnnnnnnnnnnnnnnnnnnnnnnnnnnnnnnnnnnnnnnnnnnnnnnnnnnnnnnnnnnnnnnnnnnnnnnactactaaaagatgaactatttactaaaagatgaacttatcaaaaatgtaaataacttnnnnnnnnnnnnnnnnnnnnnnnnnnnnnnnnnnnnnnnnnnnnnnnnnnnnnnnnnnnnnnnnnnnnnnnnnnnnnnnnnnnnnnnnnnnnnnnnnnnnnnnnnnnnnnnnnnnnnnnnnnnnnnnnnnnnnnnnnnnnnnnnnnnnnnnnnnnnnnnnnnnnnnnnnnnnnnnnnnnnnnnnnnnnnnnnnnnnnnnnnnnnnnnnnnnnnnnnnnnnnnnnnnnnnnnnnnnnnnnnnnnnnnnnnnnnnnnnnnnnnnnnnnnnnnnnnnnnnnnnnnnnnnnnnnnnnnnnnnnnnnnnnnnnnnnnnnnnnnnnnnnnnnnnnnnnnnnnnnnnnnnnnnnnnnnnnnnttactcaaaagttataactatttattcaaagttatttttgagatatagacagtataataagatataaatagaaacacaaagagtttaaagt

SEQ ID NO: 296240 - DNA, 333 bp, Homo Sapiens
tgtacaaaagagttgggtctttctacataagatcatattttaatgggctgatagtttgtctgggaacataatatataagacctagagcaaaacagaacacactgtgaggaaaattctaataggtactttatatctcctaaaacctaagagttgggctaggagatgattgagataaaagtttccaaattctctttcggatagaggagaatgtaaaagagagaacaggagttagtatattttgaagatctcaacacatttgggtaggacgactacagctggagcagtagaggggaaatagtgttttcagtggtaaaactgtagcatcttgttttt

SEQ ID NO: 296241 - DNA, 151 bp, Homo Sapiens
ttgggataaacttgcttgcttggtgaagcaaaattacgtttaaaaaagtgggggacctcagcagctagtcaaaggaacacaaaaaataaatgtgaaatggtttccagactttcactaaaggtaaattaattattcagccatttagtcatcc

SEQ ID NO: 296242 - DNA, 215 bp, Homo Sapiens
ttggtaatttcaaattttatgaaaattatcccaaataatttgcaaattatcggaaaacatacaacaaaggataaaagaaaaacacaattcccttgatcagagagctggaccctagaccctattaacattttggtgtttcttttgtcactcctgttagaaatggtatggacatatataatttttacaaaaaatgtatactactttgtagctcaatt

SEQ ID NO: 296243 - DNA, 890 bp, Homo Sapiens
  misc_feature (60)..(68): n is a, c, g, or t
  misc_feature (226)..(347): n is a, c, g, or t
  misc_feature (613)..(673): n is a, c, g, or t
gaataaatagcacattttgggagttatgacatttttaacagacttttcttaagattagannnnnnnnncttacttagaaaatgtcgttttgttacattacaacttttgcaagatgcaagagtttttttaaaactacactattttacttatactcatcactttcttcctctctctgcattcatcattctctcactttctctctttccactttatgcttcatttcaannnnnnnnnnnnnnnnnnnnnnnnnnnnnnnnnnnnnnnnnnnnnnnnnnnnnnnnnnnnnnnnnnnnnnnnnnnnnnnnnnnnnnnnnnnnnnnnnnnnnnnnnnnnnnnnnnnnnnnnnngagctatctgtcacatattatgcattattactattcaacattatatttttatacattttcctagatccatccgaatgcaacatgactgtaatagaatatgtagtatgaaagtcataattcccttgtttgattgtataatctcaataaagaacctcaccaatccctcaaaaagaaaatctatggtcattgtggtatatttacaaaatatctattagaaaataaaaaattaaattacataaaattgtaccacctagggataacacttnnnnnnnnnnnnnnnnnnnnnnnnnnnnnnnnnnnnnnnnnnnnnnnnnnnnnnnnnnnnntttaagtgtttttttaatcttctctacaaaattatttggtggtgtgctttaatatttaatatattataaatatctttcctgttattaaatgtttttcttcaacataattttaatagcaacatagtttgtccttaaatatatacaccataatttatacaatccactaatgtagacatttagttgtttctgacttttgctattataaactgcattaaaa

SEQ ID NO: 296244 - DNA, 592 bp, Homo Sapiens
  misc_feature (158)..(439): n is a, c, g, or t
  misc_feature (445)..(472): n is a, c, g, or t
tatttattttttagaggttggggggaaacggtatatcacaaggatccttcaggttgccctaaatcatacctaccttcttcctaccactccctatctttatttctattccatggcaaacactagtctgccctcctttctaaaattttgtcattttaaannnnnnnnnnnnnnnnnnnnnnnnnnnnnnnnnnnnnnnnnnnnnnnnnnnnnnnnnnnnnnnnnnnnnnnnnnnnnnnnnnnnnnnnnnnnnnnnnnnnnnnnnnnnnnnnnnnnnnnnnnnnnnnnnnnnnnnnnnnnnnnnnnnnnnnnnnnnnnnnnnnnnnnnnnnnnnnnnnnnnnnnnnnnnnnnnnnnnnnnnnnnnnnnnnnnnnnnnnnnnnnnnnnnnnnnnnnnnnnnnnnnnnnnnnnnnnnnnnnnnnnnnnnnnnnnnnnnnnnnnncaaccnnnnnnnnnnnnnnnnnnnnnnnnnnnnctaatataaatgagatgatgactgaaggaataagtgaatataatgaaaaagctcagaagttggtttgcctctgaaactgatgtaatagttcaaagtgattaaattaattctcatttattt

SEQ ID NO: 296245 - DNA, 850 bp, Homo Sapiens
  misc_feature (236)..(436): n is a, c, g, or t
gacctttagacactgatgtgcgcccttttacctaaagaagtcatgtagacactgaagtagtccagttctttctatgccataaaggtgccacactaccattttaatagaaaattgatatcatagcatgttctgtgcatcatcttgaaaaaactggtactaaaactcagtcttaagggtatgagtatatttgttcagaggtgctcctctcatgtttccatcttcagaacctggatttnnnnnnnnnnnnnnnnnnnnnnnnnnnnnnnnnnnnnnnnnnnnnnnnnnnnnnnnnnnnnnnnnnnnnnnnnnnnnnnnnnnnnnnnnnnnnnnnnnnnnnnnnnnnnnnnnnnnnnnnnnnnnnnnnnnnnnnnnnnnnnnnnnnnnnnnnnnnnnnnnnnnnnnnnnnnnnnnnnnnnnnnnnnnnnnnnnnnnnnnnaatagaacattatttgtatcattgacatagaaattatattaagaaaaaacttcccaaacacacatgggtatagacagcaacatgcattgcaacatttataactgtgtaaatatggtagcaaatttagttacatgtaaattctaattttgtattattaaacaatagaaatacaacataagatttcatgtaaatatgatgtcgctgatataaaataataagcaaagtgctatataaataaaacaatgttaatagacaaagatgatcagatttatgggtgattatttcttctcacctcagctctttgtttctacaataaatacgacttcatagaaataaaagtaatatatgttaaagtaaattattccatgaatgaattataacaaagtcatatggaagaaatataaaatatgaaaa

SEQ ID NO: 296246 - DNA, 687 bp, Homo Sapiens
  misc_feature (379)..(407): n is a, c, g, or t
ttgggtctcctgtcattcaagcaggggaatttccaaatctagttggaaattcctttgaagataaaaggatgacatcatttaccagtcatactaccacactaacttctcaaataaactggaactaaatcataagaatgagcttttagagaccaaaacttacgagagaataaggaaagcatatttgggcagacttttcctctcaatttatgtgaaatgtgtaaaatacaaattaaggcctaattaaatccctctaaatatctattgatagaaataaagagtggacaaaatgggaaattttaatgcataaatttagtcagtcacattcaaaattttctgaacagaactgaagtctctcaacatacacatacacataaatctnnnnnnnnnnnnnnnnnnnnnnnnnnnnntttttgccaggaaaacaatgatttctcttacaagtgtatataaattactcctgacatacaaatgtttaaaattcttcaaatttttcatgaatttgtacagctcctaaggatctttttatagactacttctgatgtaaatgaaattagcaccttgtctatctctatgccactgtttgacagacacataaaacgtgaataagcatgaaaaactaaaaatatcataaaatctctgagtaaatcctatcggtatccatccaagtacattgtattaagtttgcac

SEQ ID NO: 296247 - DNA, 965 bp, Homo Sapiens
ttgggctaaatcttcaatgacagatgttgccatttctctgcaattttattttccattaactagaacattttcttctgcaagcatatgctcattggtacagaatagctacttgtgtgtgcaattaccaattctgaatgcaccaatggatgcactgacttcaacttatacaagttttaaaatttgtttggctttgctcaactattttctgtaagtcctgatgttaatgctgtgaaccaagtagttagaattgctttgaatatcctcctaattggcctgcactgtgaacaatttgattaaatggcagctggatcttttgtgtacactctgtctcatagatatcattttactccatatggtgcagaagaaaaaaaatcacagccagaataatttttatctgcctatctgacctactgtggtactttactcagggaacagaaggttattgtagaggaagagatgaagaaattgaaaaacatttctctaacttttcaaggtctccaaccctatccaaagagtctgtagaaataaactggtgttttaaacatttatggttaaaacctcaagttttaatactaaaactaatcttattttcaaatttttcattttaataattacagtaaatatgataatacaataataaacagaagggtgctctggggaagaattaagactaaacattttggctttagaaaatatttgtagtccatgtcttgaattaacatgtaattatcaatcttatgaaatactttatataaaagctcatttctgaaaagataatcattacaggcagttgccagaaaattatcaagtacaaagaaaattatgaatttctatataatagaactccgataacttttagagtaagttttgatattgacgtgatgttttttacctactttgctcataaggtggatttattaaaaatgtgcttttgtgccaggatatttttaccttttagagagaaa

SEQ ID NO: 296248 - DNA, 857 bp, Homo Sapiens
  misc_feature (458)..(746): n is a, c, g, or t
aactttcataatacatttatctctatgacagtggagcacatgctgagaacccaaaaagagaaagaacaatagactcaactctctacagcctgtaatgggctaactttttaagttgaaaacaaaagaattgaatgtttaaagtgttttcattttctatcactaccttccttagttgaaaaagtaaaagaagaaagtagatgagaagcatgtttgtaatagacaaaaaagcaattgtccttcaatctgtgaaaatgttcattccttcccacaaaacatattcaataaaacttttccatccaacagtcaaaagttaaaaatcttttcaattgattgcaatttcatagtcttcgaaagccaaactttcctttctctgttcatctgtagttattctatagttttttttaaagataggattataactaaactagtcttatccttaatattttaacaaatactannnnnnnnnnnnnnnnnnnnnnnnnnnnnnnnnnnnnnnnnnnnnnnnnnnnnnnnnnnnnnnnnnnnnnnnnnnnnnnnnnnnnnnnnnnnnnnnnnnnnnnnnnnnnnnnnnnnnnnnnnnnnnnnnnnnnnnnnnnnnnnnnnnnnnnnnnnnnnnnnnnnnnnnnnnnnnnnnnnnnnnnnnnnnnnnnnnnnnnnnnnnnnnnnnnnnnnnnnnnnnnnnnnnnnnnnnnnnnnnnnnnnnnnnnnnnnnnnnnnnnnnnnnnnnnnnnnnnnnnnnnnnnnnntaacttctaaatttatgcatatttatctcattaaatgaggattgcttgactactgatctgatctttactcagaattaaggtttactgcagtgacatatttgtgcattttcc

SEQ ID NO: 296249 - DNA, 565 bp, Homo Sapiens
  misc_feature (253)..(346): n is a, c, g, or t
ttggagagaatctttagttattacctggatagttagtcccctactgtaaccatggctctaaaaatcaaagaacatctgaaacaatagtaccttgctctgttaaaatatacttctctcatctgagaattccaaaaacatttaactatgctcctacaagttatataagtagtagctcttagcctttttaagacatggactctttgacgagcttaattttgtggaatcctttttgtaaaacagaaacgtttacttnnnnnnnnnnnnnnnnnnnnnnnnnnnnnnnnnnnnnnnnnnnnnnnnnnnnnnnnnnnnnnnnnnnnnnnnnnnnnnnnnnnnnnnnnnnnnntcctacctagtttaatcccaagatttttgaaggtcagggaactgggtgaagacaatgtatgtggtatccctggggctgctagggacccgtgcaagaaaattatgccaacgagggcagtggcatctcagaggcaggtaagggaccgacaaggaatatgtggtaagttgggtggaagaagactgaacaactaagtacaaatgttgatgataattggatcta

SEQ ID NO: 296250 - DNA, 887 bp, Homo Sapiens
  misc_feature (307)..(327): n is a, c, g, or t
  misc_feature (619)..(731): n is a, c, g, or t
ttgggaacacctttggaagtccagttccttgtttcctgcaagtttttatttagatcttattcatgtcacccaagatcaaaagtataaaatcatccttgatttcttcctttctctttataaccagtcatcaagtcctaccaacttctcttttgcagttgtcctatattttcctcctctcactggcccaatcctagttctagtttgggactggcctatttatccaattctttttagcattcattctatctctctccaagctattctacatactgagctaactttctcatgttaattccctgctttaagnnnnnnnnnnnnnnnnnnnnntgcaagcagttaatcttcctatcagtatttcaaatagttgtgaagaaacaacaacaacaataaaaacagtaaatattcagatttccattttccatttccagatatcttaattaagtaggtttggaaaagagatcacaaaaatatgtattattaaacgagtatctcaggtaattatcaccaggtagttcaaacagttgctttatgagaaacactattttatgattcttttacttatctacttcctttttctcttcactaacttttgtttaccactagggcaattcactgtctnnnnnnnnnnnnnnnnnnnnnnnnnnnnnnnnnnnnnnnnnnnnnnnnnnnnnnnnnnnnnnnnnnnnnnnnnnnnnnnnnnnnnnnnnnnnnnnnnnnnnnnnnnnnnnnnnccatggtcactcatatttggctcagaataaattgcttcaaatgttttgcagagttcgaggtttttcactgacaaagctactctaatttcaaatcatgcatgtctatgtctcttgtatatcaattagtcatgtacttcatgctactacttattgttt

SEQ ID NO: 296251 - DNA, 528 bp, Homo Sapiens
  misc_feature (198)..(392): n is a, c, g, or t
ttggcttagttttctaaagataattctgccttcaagcctggttggaattctgtgataatttcttttcactccacgttctccatcaggaattttatggaaccttgtattctgttgaataccagaattatatcagcaatccccaagtcaccaaatgggcatcatcatgacagcaggtgggtggaatacaaaagaaaaaannnnnnnnnnnnnnnnnnnnnnnnnnnnnnnnnnnnnnnnnnnnnnnnnnnnnnnnnnnnnnnnnnnnnnnnnnnnnnnnnnnnnnnnnnnnnnnnnnnnnnnnnnnnnnnnnnnnnnnnnnnnnnnnnnnnnnnnnnnnnnnnnnnnnnnnnnnnnnnnnnnnnnnnnnnnnnnnnnnnnnnnnnnnnnnnnnnggtggttggtggttttggcagtttctacttatctggacctggacaaaaaaatcttttcacaccagatttttggcagctgagattccaaataggttttgcacaggcatggaaaacttgatagaggctaaacaacagt

SEQ ID NO: 296252 - DNA, 930 bp, Homo Sapiens
ttgggagattttagcccgatgtagctccatgtgaatctgctgcttcacttcaaactactattaatatgactatactactgtacttactccctgacattagcaaatatcaattcactacatattatattaaatgtgatggcaatttaaaccatgcatatactatgatccttgctgtgatgccatgttcttgaataaccacaattcgaattaggatggagaagtatcctgtaaggcaactgacatgtttcaaaagttccaaagaaaagatcactttcaaccccactgagcaaaagcattcaaaggaggtggtggtgtctcagctatgctgggaaaaattagaattccaggatactaaactaaacagagaaaagacctcccagaagaggaagaataaaacccagtccacatattcagatgtataagaaaaatacatttcttttctacaacaacttttatcccaagcccccaggatatggagtaatagaaaatacttgatgctagtcttaccctttcccaaatttatatgaagtgccaaggcactggagtttgtgggggaagtgattaataaggaatggcccagtccacacgggtggtttgttactgtgacattcattatctctgatgacttggcctcttcagtttttatggctctctgccatttccataaacaactttgggagagaaatgttatataatgccagaggattcccactccctctgtagggttttgcagccaccctaatggcactggaagcaagccctagtccttcttgccccaggtccctcttttccctggtcccatgggcctctatccctttttacttcccatcctgaagaagttctttctagtctgggacatggtatataaccttgatgtcttcccagcttctgatcagcacttgttctattcccataaatcctcttcatatt

SEQ ID NO: 296253 - DNA, 492 bp, Homo Sapiens
ttgggacaatttccctctgattaggcaaagcttaaggactacaatacactaagtttacatgtttggagagaatatggctggacgcagctcttggtgtcctcagagacaccatgtgggcaatccctggaggccacgtggctctgttcaggtggccccattttcccagatgcacgtgggctatagaggaaaccagacaaaccctgaatctgcaatgtacctgtcctttcatagcagaaagaccaaggtatacagtcttataattactcgtagagtggatcagagcatttcaagaatgttaacggtgagaaacagggaggtaaaactccagactcagagaggaagagggagaatgtagggctcctggctcgttcccccgaacccccaggagcacagcaacgggaagcacatcgttggtcttgtgtgtgctggggaagagggcgtattcagactctgttgtttcagaatttatttctaggtttggcttttaagccc

SEQ ID NO: 296254 - DNA, 130 bp, Homo Sapiens
  misc_feature (42)..(51): n is a, c, g, or t
gcccccggtggggctgggaaaataaaatctcccccggggcgnnnnnnnnnnttttgggaaaagggggccaccaccgttttccccggggggaaaggttcaaaaggagaaaaaccgcccccttttattttcc

SEQ ID NO: 296255 - DNA, 937 bp, Homo Sapiens
  misc_feature (42)..(76): n is a, c, g, or t
  misc_feature (420)..(477): n is a, c, g, or t
  misc_feature (552)..(564): n is a, c, g, or t
  misc_feature (570)..(664): n is a, c, g, or t
ttggggcttatttcactcagcataatgtcctccagcattccnnnnnnnnnnnnnnnnnnnnnnnnnnnnnnnnnnnattaatatatatgtataccacattttcttcattcattcgttgatggcatttaaatttatcccatatcttgtcttggctattgaaaatactgctgcaatgaacttggaaatgcagatatctccatgatatactgatttcatttcctgttatatatacccagtagtgggattgctggatcacatggtagttctatttttaattttttgatgaacctctatactgttttccataatgcctataccaattttcattcccaccaacggtgtgcaagtattctcttttctccatatccttgacaccatttattatcttctgtctcttttttaaagacagtgtcttcctcnnnnnnnnnnnnnnnnnnnnnnnnnnnnnnnnnnnnnnnnnnnnnnnnnnnnnnnnnntagctcaatcaatcctcccacatcagccttctgagtagctggaactgcagatgtgcaccaccatgcttggataannnnnnnnnnnnncatacnnnnnnnnnnnnnnnnnnnnnnnnnnnnnnnnnnnnnnnnnnnnnnnnnnnnnnnnnnnnnnnnnnnnnnnnnnnnnnnnnnnnnnnnnnnnnnnctgagccaccatgcccagacagaagtttatttcttacaataccattctactctctatttttataacaggccagaatgtccaagatcagtttgccagcacaggtgggttctggtgagggcctgcttccttcatagacagaaatgtttcactgaaacctcacactgcagaagaactattacatagctagctctccagggtctcttttataagagcactaatcccatccatgagtgctccatccttataacctaaccaccttccaaatgccccacc

SEQ ID NO: 296256 - DNA, 168 bp, Homo Sapiens
ctttgtacaaaagttggattttgaatttagtttcatatgttatacaatgctgctaattctaactccagagcaaagttagattacatctttatttctctgttttgcgtttttggggggagtgaacagggggagcttcttttcaataaagcgaaagaaatgctctaatac

SEQ ID NO: 296257 - DNA, 321 bp, Homo Sapiens
agggggttttaaagttttaggttttaaatttaaatctttaccccatcttgagctgatttttgtataaagtgaaagggagggatccagtttcaatcttctgcatatggctagccaattgtcccaacatcatttattgaaaagggagtcctttccccattgcttgtttttgtcaactttgttgaaaatcaaatggttgcaggggtggggctttatttctgggttttctaacccgttccattgttctctgtggccgtttctgtaggggcacaaatcttactcccactccaaaataggataaataaaactatgctgggttcaagg

SEQ ID NO: 296258 - DNA, 124 bp, Homo Sapiens
taagttacaaagaatcatatacattagtaaacttaaattatcttaacacttagtagtacaaggtaacaggtagtatacgagcaagatgatggatgtactgtttgtttctttctttatgaatgcc

SEQ ID NO: 296259 - DNA, 403 bp, Homo Sapiens
ttgggctgagttgtctctgtcactgccatgaacacccacaaagagattggtacctcaacacccaataacaccctgctgcagctgactttgccactactcctggcacatgtgaacaatgatggatcccactgccactgccctatgaagtgcattgcatggcaccacccatttaagtgttctgaccagtgatccaagagctccttagcccctccagaacaggaggtttccaaccttgaggagccagagaacaaagccggggcccagtaccagtcccccagagttagagcttgcagcacagtagtcctgaactgaggtgtaacctcataaaatcttccagaaatgaagccagttgaatggacccaaattatactacaatgaaacccccaaggacatcaaataggac

SEQ ID NO: 296260 - DNA, 770 bp, Homo Sapiens
  misc_feature (290)..(335): n is a, c, g, or t
ttgggttttcatacattagcctcttgttgttctggttagtgtggggtcaatatcgcaacccagtcatctgaattagtaataacagtccatttcaagatctacaaactgagaaccatgacttggggagtcctatcatccccagcaataaaataaatagaccttgtactctttcttgtaatgaaacattaagtggaattcctaactgccccaccaatagtgtgtgctctcaaatctctgggagaaacacacacacgtacactgtttatcccaccctgaatcgtaagtttatnnnnnnnnnnnnnnnnnnnnnnnnnnnnnnnnnnnnnnnnnnnnnnttcagtaagcttatctatgaggcttctggaaaacaaaatagaagtcaagcactggtttacaagcaatgtcagccacttgagacacttcttttaaatttgtctggaaacaccttttttcctttccatctaacaaaaaagaacaatacgcaaaaccacacttaacacttaacaatcaatcatgtcataaacccctacaccaagaacccttaaaacatggattaagacaataaaaagtggagaatatcaagaaactctaagcttcttattttaagaacagtgataaagacccatgaatgctctgaaatcactttattttaaactagttttaaatcccagctgtgtgaattttatcctcttctgctttttctcacctataaaatgacctattgtgtacaatgaaagagataacacatgtaatgacataatacaatgctg

SEQ ID NO: 296261 - DNA, 472 bp, Homo Sapiens
actataaaagccaactttgtacaaaaaagttggctcaaataccacctcccctgagaggagtgctttgttttcacagccagaagtctaccttctttcagcacttggtgcttgctcttaccatatgcgtcacattttcctcttctataccacttaattcgcaggtctcatctcactacggaacaaaaagttccttaaggccatagactaagtcctgttcaatcgtctatcctccgcagtgcctggaataccacgggcctttaataaatagtcattaaataaagggttcaacactttaatgtgtaatcagttgattaagcccatcaaaatgcctgcaattttaaatcagcagcactgctgtcctttttgtgtgctgggaagggggagaagtggggaaagaaggttttggtttttgtgctttagtcgtccaaactcatcttaattcccttgaacacattattgaacttccaacttg

SEQ ID NO: 296262 - DNA, 890 bp, Homo Sapiens
  misc_feature (434)..(748): n is a, c, g, or t
ttgggtagtttatatggacagctaagtggttaattaatttcttcaatgaaactgtattgaacactgagcacttaagtgcaaagcacttaagtatagtagtgaacaagtgtttctgctcgcgcagaactcacaactgattaggggtaaggatgagaaaatcaggtgtgataaatgctgtgctagggggagcatagagttttatgggaacacataggaaggaaatctaagtcagatttggagagtcggagtggacttcctgatagtgacatctaagctaacctgaaggatgggtaaagctggccaaaacaaagaaaggtgggaagagtgatgtagacagaagggagagatgtataagggcccagagacaagtaaaagtgtggcatattctagaaattgtatggaggtgggtttggttgaagcatgatgtgctgtgnnnnnnnnnnnnnnnnnnnnnnnnnnnnnnnnnnnnnnnnnnnnnnnnnnnnnnnnnnnnnnnnnnnnnnnnnnnnnnnnnnnnnnnnnnnnnnnnnnnnnnnnnnnnnnnnnnnnnnnnnnnnnnnnnnnnnnnnnnnnnnnnnnnnnnnnnnnnnnnnnnnnnnnnnnnnnnnnnnnnnnnnnnnnnnnnnnnnnnnnnnnnnnnnnnnnnnnnnnnnnnnnnnnnnnnnnnnnnnnnnnnnnnnnnnnnnnnnnnnnnnnnnnnnnnnnnnnnnnnnnnnnnnnnnnnnnnnnnnnnnnnnnnnnnnnnnnngtggaagtgatgagactaggaatctaatcataattagccttatatgctaaatctaagcaccttgtgattatctcctataaaatatggaagaattattgaacgatttaaagtaagagaaagttaggatgatttctattttttt

SEQ ID NO: 296263 - DNA, 969 bp, Homo Sapiens
ttggcacattgctgcctgtgtcagcgacagattgccctcataaaaggtcttgtctgttccagggtacactatggtgtttcaaccctggagaacggagagctgtgtactgaacccgattcttaaattttgtggttgtaaaatgtctgggtcactgatgtagaagctttcaagagcacccgtggtaggaattcctaatcccttgccccccaaataaccccattctcccaagtgaaattccattgttagagttccatcgtttcagcagggaggcaattctaggaggagatcgcatcaattatacctcagaagttccagatcatttctctgaggacagactttgaaagaaggagagacaggatctctgaggagggaaactggcacaaagagaaaaaccctgcacacagggagaagacgatttacgtgcctccagtcagccccatggacagcatggccccatgacattgctctgctcccccaaatttattttcaataaaatcatccatcaggatgtgactaggtcgtgctccaagccttaagaaagaaaagccagacacgaattccagactctagcatgacttctatagtagcaagcatgtatggttcgaatactgacagtttacctgtccaagagcttggctggaagccttgtatttttatgacaaataatgcctttggttggtgcatgaaacgaatagtgagtgtgtttgttgtatcgtttgtgtgggaagccacgtctcagtttagcacatgcctattcatattcaataaaatatccgaggggaaccccattctgaagaaagatgcacatccattctgtagcatcttttatctgtgtctgaaaactgagctctctgagaagaatttttcacatgttcttaataataccattttttctttacagaatacactgtgtagcagaaaacggaaatgaattgtcatagagtgaattgggtatgtttgtattcagtc

SEQ ID NO: 296264 - DNA, 810 bp, Homo Sapiens
ttgggttttgttcactttatagatcacccagggagggcataagccagtgggccattctcacccctgaggacggaactagacccttggggaaatccacacctcccctgccccaactcctgtctctgagtccatctgtccccaggatggactagaggagaacagtgatgtcccgcagcctaaagactgaagcctctcccttgccccacgccccatgaggaatcaagggtcactctgaagagaacctgaattgaaactagttccagttattgaacacctgagctaatggactgaggtcatccatctctatgtacatagtagtctggagtgtgagttttggggatttgggtggaccatggagggccaggccttctacagggcattgtccttctacgttctgggagagaaagtgggagaggagggtgttggccccatgggcaggtcacaccatagactcttacatggctatttgcaatagctctgagccccactcagggcagagaggggatatctagaggtggctctgagagaagataaaaacttctttagcaaatttacttcttgagagagggaaaaggaggggcccagtgacctccaggttgtacaaggatattctcctgaacccatcagctttcctagcacctaaccaaatggagacacatagacataccccatgaatggggatctaggaggatttcagataatattcaaatgtcttttcaatggtctttctgcgtccaaactaatttcaattcaaaacacacactgcttcatgcatggtgagatagaacttcttctctcagatgtcacctc

SEQ ID NO: 296265 - DNA, 310 bp, Homo Sapiens
ctttgtacaagaagttggcacagtgctctgtcagctctggtgtttcatgacattcttcgatgctctgatgtacagaatgactcagttctctgcctgtcatcacacagggcctctctcaaggttctctgctctatgggatacctctctctctcatctgagacatcacacagacactattttcacaacagagtgcacatcacaatctccaggtgtgtgagactccctatatatcttccgggggcccagttcacacacgtcaactattaaaccatctaaaatcccaaacacatgaaaagacagcggggccctt

SEQ ID NO: 296266 - DNA, 199 bp, Homo Sapiens
  misc_feature (62)..(72): n is a, c, g, or t
aactataaaagacaactttgtacaaaaaagttggcgcacaactttgtacaagaaagttgggnnnnnnnnnnngataacagccatcctaatgggtatgaagtggtgtctcaccgtgattttgatttgcatttccctcatgattaatgttgagcatcttttcatgtgcttattggtcatttgcatatcttctttggaaaaa

SEQ ID NO: 296267 - DNA, 504 bp, Homo Sapiens
ttgggactaatgcaatatctcaggatgatgaaagcatctatttttaaagtgtcattgatatattttatccactatattggctattacacggatttaaataatttataattggttagcaaagagaggctttattataaacgttaagactaaccagaagaataaaccagccaggagtctaaactagttacagaaaactaaaagcctacagaattagaaaccagaaacttgaataggaagccactgggtccaagttagaacctcaaaacaatggaaagatcgcaaaaagtaaaagagctgaatctctagattgaaagttaatttacactaaaacattttaaagtgccattttggggtcagattagtggtctatgggcccaggattgcctttctaacagtggctcccatggctgtgtttcagagtcagttttcatctatggcactcatcttaataaatcaaggatatatacagatctcagttatccttaatgtctctaaataacctgg

SEQ ID NO: 296268 - DNA, 550 bp, Homo Sapiens
  misc_feature (103)..(111): n is a, c, g, or t
  misc_feature (329)..(357): n is a, c, g, or t
ttggattcaggtaaggtgatgcttccagctttcttatttttgcttaggattgctttggctattcaggctcatttttggttccataaggattttagaataatgnnnnnnnnnctagttctgtgaaaaatgacactggtagtttgatagtaaaagcaccgaatatgtagattgctttgtacagtttgactattttaaaaatatcagttcttccaatccacgagtatggaatgtttttgcatttgtttgtgtcatttatggtttattttagcaacattttgtagttctttttgtagagatctttgacctctttgtttacatgtattcctagnnnnnnnnnnnnnnnnnnnnnnnnnnnnnactattgtaagtaggactgaattctagatttggctctcagcttcaacgttattgatatatagaaatgctacttatttttgtatattgattttacatcttgagactttactgaagtcatttatcagttctgagagcatcttcacggagtccttagggttttctaggtatataatcatatcatccatgaagagag

SEQ ID NO: 296269 - DNA, 658 bp, Homo Sapiens
gagcctctgaagagctaaatggagtattaaaagcccacaaatttatttgcagtcatagataaattaattcctgtctttacatcctacctctttaacctcttcatttaaaaatgaattgtaaggtatgaaaaagagatagattaaaacaagtgtgtcctaataagcttttggcatattaatttgcattttattgctactctttctccctccaccttcttaatttcaaagagatagctagacctttcatattttttttccctcaggaaattttccagatcacaaagtagaaactgttggaaaacaaagctttctcctgtccaaaaacttaagttcatagaaatgatgatgcaaagcgccaggcgtaagaggaaagaaagctaaatgcctgccctttaaggcaacacttgagaagggcaaaatttctggaaaatggaagaaagatagtttagtaagtttctagactgtcctggacccatgcactagttagtggaccttaagagtgggctgataaaatcttagaggtgacagttgtgcaaggtacccaggaagctggcacatttgcccagagatgccagtctcagcaaagatgcctgcactccactagagacatggaagactggaagccaagagcaacaaggctgcaaaacaccaggaaaac

SEQ ID NO: 296270 - DNA, 439 bp, Homo Sapiens
ttggtctgtgactaaactgttcacccatttcccagtttctctgctctgtcaaatatcaacattttaccaggtttctctgttgttgccaaacctgtcatttttatttggtgtggcttcttgggaaacttccatggcccatttgatgggaatcaaacagagtgaaaacaaggacagatgcagcagaggtggcatcaggaacaaatgggtcataagaacttaccttggcagcagccccagaatggtcaggaggaaaggcactttaaggtatcagaaggtagaaaggagaggttggatgatagaatggggaagcgattcctcctcgtgttcacagaagtgaatcaatgggagacacaaggttaccacttaatattcctgctctcctaggcatgggtcaagtacatcttcagccatgggtaagtttgttcaacaaatgagtgat

SEQ ID NO: 296271 - DNA, 566 bp, Homo Sapiens
ttgggaagatgtacaaactctccctctctctcggtgagtgctcgtacaaggctacaaacggccgaccaatcagatggattcctgttctatctgatatcatccctttattgtgcccttgggcctggtcgaatcaatcatcccacctcatatgacatttgcatctagtttcatgcaagatgcaaactcttgcacggcaataactaaataggcagttggaattctgtgcaagttggaaaaaactggggggcaatttggcctgcatacatgtaactttgtctcccagttcccttcattcatcatgcatgccctgcctgacaaagtttaattaatcaaaacatttgtctactatcaattgactgaaatgatggtgcacgtgtctggagttagtctgtccacttcctagggtggccgcctgtgacagttatgcaaccatgcacttggtcaccacatgagtaatgaaaaatggatgcggacagagctatcgtcccacacataattaatttttgcttatggatggaactaacaatccatccatccggttagctagtgagtcactcgcttgtaat

SEQ ID NO: 296272 - DNA, 915 bp, Homo Sapiens
  misc_feature (410)..(428): n is a, c, g, or t
  misc_feature (441)..(505): n is a, c, g, or t
  misc_feature (529)..(629): n is a, c, g, or t
ttgggtgatagaaaggagcggaaagaatattccaagacataatgacagagtatgtcacaaatttgatgaaagacattaatctacatatctacaaagctcaataaactccaagtaggaaagctttaaacttttccctgatgaatatagtattacctgtgggtttgtcatatgtggtctttattgtattgaggtacatactttccatacataattcgttaagtttttatcatgaagagatgttaaattttgtcaaatactttttcttcatctgttgaaatgatcatagggtttagtccttcattccactagcattctgtatcacatttattgatttgcatatgttgagccattcttgtatccttgggatgaattatgtttttaacgtgctgtcgaattctgtttgttagtannnnnnnnnnnnnnnnnnngaggcagggtctnnnnnnnnnnnnnnnnnnnnnnnnnnnnnnnnnnnnnnnnnnnnnnnnnnnnnnnnnnnnnnnnngcttcagtcattctcctgcctcannnnnnnnnnnnnnnnnnnnnnnnnnnnnnnnnnnnnnnnnnnnnnnnnnnnnnnnnnnnnnnnnnnnnnnnnnnnnnnnnnnnnnnnnnnnnnnnnnnnnatgggattacaggtgtgagccaccatgacaaggccctgtttgcttgtattttgttgaggatttttgcattcatgttcatcaagggtattggccagggatattccttttactgttatgtccttctctggtttttgtattagagtatgctgtttttatagaatgagtttggatgtattgtctcccttcaattttgttgactagtttgagaagaattggtatttgttctttaaatgtttggtagaattcagcagtgagccattaagtcctgggcttttctttgattgga

SEQ ID NO: 296273 - DNA, 200 bp, Homo Sapiens
gccacttgtacaaaagttgggacgagccaccggcgagcagcagtgctcgagatggaatgtctgtgcatttggtcttgtaagatgcagctatccccgagcttcagctacatcctgtacttcccacagctagttcttcaactcacccaacaaaccaaatacattccttttggcttaaccttgattgagtgcttctgtcactt

SEQ ID NO: 296274 - DNA, 946 bp, Homo Sapiens
  misc_feature (537)..(576): n is a, c, g, or t
ttgggtttgcattgtaagtaaccaaattgcccaaaggtattctgtggttctacggctgttattttttattctgatttgcaaaggatccagttaatagcgccatgctaagaatacggattattcaaatgcaaaaatatatttttacagtatctctgagtcaatttataagaaaaaaaagcaagctgttattattcacctatccagtgtgcagtcatccaacgacctgacctcacagatctagcatagacaagaagcaggatgtaagcaaaaaaggctttagaggcaaaagagatgttagcaaaggccagtgcagaggaagctcacacactttcccataggaaagctttgaggccctcccttggaggctatttactttcactttacaaacaatgtagccaagcttatttatctagtttctaagcctagggcagaatagaataagatattaggatgagagctgtgagagaaggggtacttacagcaaactgaaatactgactgcaaaacagagccaactgtcagcctaatgaggaggagnnnnnnnnnnnnnnnnnnnnnnnnnnnnnnnnnnnnnnnncacagctgaatgcagggtttgggggcaaatgcttcactcacccagtgagatcttggggcatcactatatcacagtagagcatagaggatcgacatccaaaatggtgcccttcgtcctcaagaaaaagatcaacttagcgcctctgccggggcacacctgtgccaggtaatggaaatgcaagaaggaacaagcaacacctgctttcacaaaggggaacgagtatagcagattttagaaagtgtttcttctgaaagactaagcatgaaagaaagcttacttgtccttaaatactgaatcgctaattatcaagaaaagtcagtatctaaagatgactcatttgtcagatagcagttacgatgtaattaaaatc

SEQ ID NO: 296275 - DNA, 461 bp, Homo Sapiens
  misc_feature (205)..(338): n is a, c, g, or t
ttggtacaaaactcccagtccacaatgactctcttcaattccccatatctcctccaacctccaaccttcctcctgcttccagatgttttttctatcttttcccttcttccccattgaaactccccttcactcatgaacgtaatcagcaccataaatgaccagcaacaaagaaatgcaaacacagaatccttaagcaggatcagannnnnnnnnnnnnnnnnnnnnnnnnnnnnnnnnnnnnnnnnnnnnnnnnnnnnnnnnnnnnnnnnnnnnnnnnnnnnnnnnnnnnnnnnnnnnnnnnnnnnnnnnnnnnnnnnnnnnnnnnnnnnnnnnnnnnngaaaaaagaaaggccgattgtccatatcagtttatcacatacaaatgagtcctcgtgtggtcacccttttttgtgatgatgaaacttcactctgaagctgaaggaggatgaaagcactgcttt

SEQ ID NO: 296276 - DNA, 825 bp, Homo Sapiens
ttggcattaatcatattaatggtgccacccccagtcaagagtatgaaattatacatggtgggcatgccagggggcaggaatttggggaccatcttagaattacacctatcactacatgaaaatataaaaatatctgaaatatctgacagtaaaatgtaagggggcaaaccctgggaggcaaggcttacaggggagagtagagagaggggcgggcatttgggagaatttccacagagaaaatagaagaggacaaagagtctgaacaagattcgtgttggccatcatttcaccaaaactgcttgcctccgtcaatattccttctatcctagaaattctgactcagcgcctacccagaaacagcgtaatgggaatttgtatgttatattggtatttcctgagtattttctcacgtaatgttatttcacatttctttaattccacttcaagaattgagaacttcccatgtcctcatccccattttctctttttatgacccccgccattcctaacatacggtgccaaactcagtgccgctgaactcagtgctccccaatcccaatctttgatcaaaaatcagacacagcaggaagatctagaattgtctttggctacacaagagaaagctagctggatcaccttcatggcccttagtttcacttcaagtaaacagacccttcaaacaagtgtttttcaccaaatctttcaacattatccagtgattaaaccaaggagttgctaaagaatactaaagaaaatggttgaagtagtgaattttccattgttgggcaaacgccctgatatgttttcagtgcctaaagcccatta

SEQ ID NO: 296277 - DNA, 142 bp, Homo Sapiens
tgttcgttgcacaaattgatgagcatgcttgttatatgccactttgtacaaagtggggagtctgactatgactcttctcgtcatgtcatgtcactgcatatctatcactacgtcattatcttagctctaggatatataaaat

SEQ ID NO: 296278 - DNA, 953 bp, Homo Sapiens
  misc_feature (506)..(559): n is a, c, g, or t
ttggcctaacagttgtgaagagtagaatcctgttcactttaactctcacttgctatgtgacgtatgtgttcttataatggctttcaaaggagctgccagtgatatgtagaaagagtgggcaagaacagaggtgtacgaaaattaaggctgaaagttgcattggccccctctttactatctcttcctttacaaccaatgccactagtctctggctcaagcactgcaaacattgcataaagaaatgagtaaaacagcaacaataataatcagattttgtaataaattcttaatttatacctgaaacttggctaagtgattgctgtggattattaggactaaaggtggtggggagtctgggctctgagtattggacgtaggtagctgagagtcaacaaagtctgaatagtgaaaatatttctctcacacagtgacattcattttaagactatatgcatttagtcacattaaccatctctttcaatcattctctgtgacagacaagcaannnnnnnnnnnnnnnnnnnnnnnnnnnnnnnnnnnnnnnnnnnnnnnnnnnnnnttcagaagtgtggaggttccattgatgtcacttgtttgtccagtccttggtcagtgaatctctagaaaggccacagtcttttcatgttcatggctttgtcattgctctccattgagtccactggatgaacttgcttcttgctccatctcagagtccataagaatatgtctttgcagaggacatttaggggagggaatgtgttaccaattcatttccaggcctcagatctcaactaaggtgttttcaagtcccacaaccctggatgtcacttcgtagagggccagtcctccctaaaatgtgggctttgttccttagtctacagtagatgcagaaatgatgtttcttttcatggtggcccataaaatttagaaattgcctggattccagtcaattt

SEQ ID NO: 296279 - DNA, 601 bp, Homo Sapiens
  misc_feature (193)..(255): n is a, c, g, or t
aatctctgcaatggtactttcaacatgtgctggtaatctattttataacaattatccacccaatggttttattatccatagttaattctatcctgaaatacttattgctttggggaatttgaaaaataattatttttatgctatccatttttctacatttagcaattcaaatgcttctgtaaattaaagcttnnnnnnnnnnnnnnnnnnnnnnnnnnnnnnnnnnnnnnnnnnnnnnnnnnnnnnnnnnnnnnnatctctcgatattaccatgcactcattgattcattttttaattcaattcattacaatcttttaacaaaattgttattttgctgcttaaattgacccatgtgtccaagtaagagaataccttaaaggcagttcctaagaccttcgctttcaggcatgaaaagatcctccattgtttaggtctgaaagtttatgtacaaaaccctaggatgccaatttctcccctccagcacgtgaagtgtcccatccattgtttcctagtttccattgttcctgttgaaaagtcagctatccttgacagtattaagctttttcttttttatctggcttcttgaatacgaaaaaatac

SEQ ID NO: 296280 - DNA, 686 bp, Homo Sapiens
  misc_feature (101)..(164): n is a, c, g, or t
ttgggaatagaaaggcacctagggagccctggggaagagagtatttgtagaaggcaggcatggtcagcagtatcaaatgctgttgagaggataagcaagannnnnnnnnnnnnnnnnnnnnnnnnnnnnnnnnnnnnnnnnnnnnnnnnnnnnnnnnnnnnnnntgcacatcaggaatcataatccaactcctggaaatttattcagaggaaatactgagatttaagtggagaaagagatctgtttttataaccatgatgacattatttatagtggtttttaaaaacttgatggtaaaaacttttaatgcctctatagataatttactaagtaaattaagacatatatctaatgaaatattttgcaaccattaaaattgtaattatggctaccatgaagtaacattaaaatgcatgtaaaataacatcaaattaaaaaatgcaagaatctacataaagagtaaacatccacatggataaagattggaagaacatggaaaatgtaaatacttcatatataagagaggtggaattgttaattttaaaaattattctcagtatttactgttatactacttacagataataaattacaatctagagaaaagaacacagtgtagcaactttataatcagtagaaaaacctagtacaatgccaaacaacttgatgtcttgttatgatgagag

SEQ ID NO: 296281 - DNA, 900 bp, Homo Sapiens
gacttcttcttggacccattggttgttcatgagtatgtgtcttgatatctgtaacattttcagctttcctcctgttattgatttctacttttataacattgtaatcagaaaagatatttaatatatttcaatattcttaaatttttaaagacttgttttgtagccaaacatataatatgtcctaaaaaatgctccatgtgttcttgagaagactgtgtcttctgctactgttgggtggaatactctatatatgtctatcagattcatttggcctataatattgttcaattctgctatttcattattgattttctgtctgaaaaaatctacccattgttagaagtgggtatcgaagttccttaccattattgtattgctgcctagttctctcttctgttttgttaatatttgctttaaatatttaggcgctctgttgttaggtgcatatatatttacaaatattataacctctcgaagaattggcccctttattataatgtaatgaccttatctgtctcttgtgacaacttttttactcaaagtctattttgtctgatagaagtatagccaggcttgctctcttttggttatgatttgaaggaaatatatttttccatccctccactttcagcctatgtatccttaaagctaaagtgagtctctcctaggcaacatttagttggatcttgttttatagtcaattcagtcactctacctcttttgattggaaaatttaatccattggatttaaagtaattattgataggtaaggacttactactgcaattttgttaattattttctgttttgtagttctattatgcctttcttccactcttgctgttttgttctgtagtttgattattttttaatagtggcatgtttggattccttctcttt

SEQ ID NO: 296282 - DNA, 528 bp, Homo Sapiens
  misc_feature (156)..(468): n is a, c, g, or t
ttggctttgagtgtgtgcggtacttggcaattttcttctaacaaagtacaatgtaaacaagtatgccttctgatactagatcataaaaggtggtaaagtcttctcgttgttctctctcagatcacttgtgctagggaaaaacaactgctatgtggnnnnnnnnnnnnnnnnnnnnnnnnnnnnnnnnnnnnnnnnnnnnnnnnnnnnnnnnnnnnnnnnnnnnnnnnnnnnnnnnnnnnnnnnnnnnnnnnnnnnnnnnnnnnnnnnnnnnnnnnnnnnnnnnnnnnnnnnnnnnnnnnnnnnnnnnnnnnnnnnnnnnnnnnnnnnnnnnnnnnnnnnnnnnnnnnnnnnnnnnnnnnnnnnnnnnnnnnnnnnnnnnnnnnnnnnnnnnnnnnnnnnnnnnnnnnnnnnnnnnnnnnnnnnnnnnnnnnnnnnnnnnnnnnnnnnnnnnnnnnnnnnnnnnnnnnnaagctgaaagatatacacattctagaacaaggggtccataaacctttttcttgaagaccc

SEQ ID NO: 296283 - DNA, 868 bp, Homo Sapiens
ttggcagtttgcttggctttaaaattgtaaattcaatttctttaatggttataggactattcagattattttattttggttgagctgtagctttacgctactgatttaagaacaatcctcttttctaatgtaatcatttagtgctataaatatccttatcaatacttctttaactgcatcccacaaattttgatgtgttgtattttcattcatttctgtgtaataggtttaatttctgtcaagactttttcttgaaccataaatttaagaatgctgtgtaattcccaaaaatctggaaattttgttgtcttttattggtttctagttagattcatttatggtcagaaaacacacattgtattatttcaatcctcttgaatttggtcagatttgctttgtgactcaagatataatctatctttgcaaatcttccatagatgcttgaaaaaagtgtatattctgctattgttggtagagttctctataaatgtcaactcaatcctgttggttggtggtggcgtttagttacaaaatcatccaactacctcattttcaaataaaatctcttaggctaaagaatactaaacagtgtggcaacatgtttaagccaaaaccacacctagagtcctgaattctagtctagaacaccattttgacatactatatctacttaagcaattaggaacataatacttagctatctcttaatcaaatatgtactgccaaaataagggattaagagactggggataatagcttgtaaactacaagtgattattatcctaatatagttttttaataatcacgaatttgcctagaccaaacataatcttcaaggaaaatgtcacaatgacatgcttacataccc

SEQ ID NO: 296284 - DNA, 234 bp, Homo Sapiens
ttgggttggaatccctatgctgtgggtagagatatgactaaattaagcagttttaagtctaagtcggcaaggtttaattattgatttattggttttacaattgataaatattgcctttaagtatatgttttatcatgtaatagtcactttggtagcctcaaatgccatgggttcacagggtaaatgttaaggtaatagctaaacaatagagagtataaagatctatagtaagtg

SEQ ID NO: 296285 - DNA, 895 bp, Homo Sapiens
ttgggttttagaaaactccaacccttatctttctcgacctcttttaggagggcaaacctcaaaagctattctcctcccgatttgatcaataggggctattatctttgcagtttctcggaggattgactttttggcactgattctgcaaaccataaggttttggtatttaagcctcaacagtgggagtgttatttggaaggaaggaaaaagtaagccttgaatcctcctcattgataaaagcctgtgctctccgaaaggattactggttcatctcagcagttggcaggtaaagacccaacattcacaggatgtggaggcccttccaagaagctcccagccatgccacatcctgtatccccgattcagtgatgcgtgaggttacacaggcatgcgcatactcataagactagcggccagcccagtagctgcaaaggctgaatgcaagagaagcaagtggctaccccactgcctttcttgaccgctcactgagtcctagaatgttataactgggtgggccctcaaggcccaagacatatttatcaaattatattctttggatccatgggattttttggagctatttatagaggaacataagaggatttggggttccagaggacaagagtacaggctctagaccctccttcaaaaggaacaactctacttttatctattttatatattgttgtgtttacaggtactgtggaaaatgccccaatgttttaaacaattgtttaaaacattatgtcatacaatctcctcatttttcagaggaagcaagtgaggcccctggtagggaagtggcttcgccaaaatcacagaagttctaagatagagccagactttagaggtggctcaaaaggaaatacatgctgacttctcactgagctgcatg

SEQ ID NO: 296286 - DNA, 926 bp, Homo Sapiens
ttggcttccacttgaggagaggagaggaaagagttgggaggaatttgtcttgcatcttggataccagctcactcacagaaggatagggcactagtcagagtcatgagggcctcattccaggccctagttcctggatgacatttctagacacaccctcggccagaagggaacctactgccttgaagggaaggacccagtcctggaagaatttgtcacctgctaaattaagagcccttgggaccagaataaccagcaagaatacccaggtactatgtccagggctttggatgagcttctgaggcttgctggcttcagataccagcatcgacacagggagatagagcgccaagtgggctcttggggtccctgattccaggatttgactcttggatggcatttgggacctgctctgggccaaaatggagcccactgccctgaagcatgaatcccaggtgaagtaacattcaccacaaggtgacttaagagcccttgggccttaagaaaacactggtgatagctgggagtatcctgtggcctgtggtggcagtggctatgtggtaaagtaagtttggaaaggggagggaagagagggaaggtctgtatcttgtagtttgagtgccagctcagctgcagcacaatagaacacaaagtagaattctaaggttgttgaatctagtccctgacccccgtatggtaactctggacacacctggggcctgagggaactcattaacctgaagggaaggacacaaatctggttggatttgctacctgctgattgtagggccctaagaccttaacaaaaaaagcagtagacagggagcgtttacaacagccttgagtgagacccacgtttgtactagcttcagtctgacccagtgcagtcatagtgttggcccaagaggtgtttgtgtcacttgaccttc

SEQ ID NO: 296287 - DNA, 919 bp, Homo Sapiens
ttggctccctgctgcttctgctgaggcagaaaatacttcatcatttacttcagtcatgagaataaagccaaaaaatctggaacataaacaccattttttctttgcattcaaaggccaagctcagggtgagtttgtgaataataaacccaagttggcaatcaagctaataagtatgaagttgctggggagagaagtcctccgcgagctgggagctgagggtgtacccagggctttttgttcccctgttggtaaataacagccctttatttacacacagttgtttcggcttcaaaagatattcaaagcccagctagtttctgcagttgctttacatggaaaggaatatatatgtgaatttttaaagagattgagccccaattaaatctatgctgcccggagagagttgcaggcgagtcagcctgagatccaagggggaaaagaggcgcatgtgattagcaggcaagccagggttgtaaacataggcgctttctttctgaaatgggaattgcccgcaagaaagtattcatctgcagcctcgagcttagagaaattccagggccaggcgccttttggtttaagaacagaactttgaactctccatttcaaaaactgaatttctcctccccctggttaggaaaagcatccgatgccgagcgtctccattcaagctctccaaactttcagcattttttcatttgaagcttgtagccatacaaacctctggtaatgagttccctgcccgagacaagttctgcatccagtttgtgcgccggcccagtgaaacagtttacaagtctgagagtccgaggggcggaatccaaaggaaatctccagaaaggaatgaagagctatcatggaaatctttatttatgtgagagaaagagctaaaacattacctcagatgcaagattacaacatc

SEQ ID NO: 296288 - DNA, 905 bp, Homo Sapiens
  misc_feature (107)..(120): n is a, c, g, or t
ttggcactaatgatgttgtgtacctcatcatttatgtatcagctaaatatttttcttcttctgtggaagaccctaaccctgtccacagaggaggtaaaattaaaggnnnnnnnnnnnnnngaataacctaacccaagggccaaatccttgccagagaaattgcccttattttagccttgatttttagtaacttaagagttaattcaagatctaatagaaatgggatagtaaccttattttataacaacacctaatatgtgcttaaaggctgacttactgcctttaattgtttttactatctttttgcaaaatatcatccccatattacataaccagacacagaggacccttttacgtagtaaaattatattgcaaagaatcctcagttcttagtaccaaatttccccagagcacatgaatttctaggggccgccaacagtcctgactacctgttgcacagatcagaagcatgctgcctgactgcaaaggctaacatgtgaagaaaggcttttgcctttataaggatgtcataagcagtctttcacgtaacaggaagttgtagtgcatacaaatgctattttaaagtctggggatatttaatcataccttaatctttattatttatatttcccggtgccagtgtccacaactattgtccaaagtgtgacagaaagaaatcctgtagcaggaagcccagagcctactcatggacacctgttgcaacttgaatcgcaaccagtacttgcaaaacaatgcatatatgtgaacaactaagtgtagctactggccctgccttactaatatagaaggagattacaactccacctgctgcccctgatattttagtgtctctggaagcagaggaagaaatggaaaacgacatagtagtaagaaatgttcgtggc

SEQ ID NO: 296289 - DNA, 940 bp, Homo Sapiens
  misc_feature (375)..(613): n is a, c, g, or t
  misc_feature (628)..(725): n is a, c, g, or t
ttggcttccagagagctctctctgaggatgtgtgacattggagttattcattcattggtcaccaaatgcttgggaggtcagatggtggctcccagattgaattcagaaatagacctaagtcaacactttagcagcaagttggttcaaggggaagcaagccgctattggtcacttgactccttgccatcccttgtggcttgaatgcaggctggaaaggtgaggtgtgtccggagccagaactctggaggctctcagtcttcttcctgaattttagggttccccacagagaccatttccaagctatacgggaagaaagaggaaaccccagggttctttggcaacaagcttgctttttttctggttcttggtatgctnnnnnnnnnnnnnnnnnnnnnnnnnnnnnnnnnnnnnnnnnnnnnnnnnnnnnnnnnnnnnnnnnnnnnnnnnnnnnnnnnnnnnnnnnnnnnnnnnnnnnnnnnnnnnnnnnnnnnnnnnnnnnnnnnnnnnnnnnnnnnnnnnnnnnnnnnnnnnnnnnnnnnnnnnnnnnnnnnnnnnnnnnnnnnnnnnnnnnnnnnnnnnnnnnnnnnnnnnnnnnnnnnnnnnnnnnnnnnnngcaaacaaacaaaannnnnnnnnnnnnnnnnnnnnnnnnnnnnnnnnnnnnnnnnnnnnnnnnnnnnnnnnnnnnnnnnnnnnnnnnnnnnnnnnnnnnnnnnnnnnnnnnnaaggattgagagccactgatccaatcattttgaattaaactgagcccaggagcattaagaatgacatcttggttacatttcaccaagtcttcgtgctgtgatttttctctccttgctagagctttatatttttaccttacttctaagccacgagatcatttcttgccctcattattagtttttcctaaaattaatgattggacttaaccttcaga

SEQ ID NO: 296290 - DNA, 260 bp, Homo Sapiens
tgtacaaaagttggccctctcaaaggctcctgtggtgccatgcagatggcctgcttgagatccagcaagctccaagcctttccccctgcttcctctacccctgtatttcgcttggctctctaaatcgactcagctccaggtaaggtcagaaacttctcccacaaactacaccttcattttccccagtgggggtgtgtgtttcatagcagaaggtctccctttcccatttccgcagtttgggtactcacagtatttggggg

SEQ ID NO: 296291 - DNA, 735 bp, Homo Sapiens
  misc_feature (193)..(247): n is a, c, g, or t
  misc_feature (372)..(380): n is a, c, g, or t
cctcaggaaccaaactctctgcttcaatttattgtgagcatgctagataagcacagattatttttcttctgaattcaggggatttatgttttctacatttggcagattatctagatcctaaagaaggatgagagaaagctaagtaaataacattaataataaaattctgtattggtttctgtattagtgaatnnnnnnnnnnnnnnnnnnnnnnnnnnnnnnnnnnnnnnnnnnnnnnnnnnnnnnnatacagttgacaaatatttatcttgtgcctattgttatcatgacacagattatacagaagaaaggcatatccaagtcctagaagagttgttttattgagggccattaggagacaaataaaaggannnnnnnnnccattttactttagagggtgatctgtaaaatgttcatggaagaataaagagtttatatgggtgacagctgatgcaacaatataagaatgcagtttaagaatgctgacattaaaggaaagtgctgagaatatcttgagatgttcttacagagaagataccaaaacatattctagcatgagaagcaaatgaccacagtgaaatgtcagaaatgacaaagcattaattctatatacaaattattgagtaaacaaatatgttaaacactctggaggtgcaatgattaactgccaacttttgtcttctgtgagttttcaagccagttcatatacggaagaaacgttaagaaacaatttaa

SEQ ID NO: 296292 - DNA, 319 bp, Homo Sapiens
ttgggggcaccagcgtgttctgctagatgattaacacagcacatttttactgggtcctaaagcctctgaactgttgtctaccatagattttataaaacagatgtttctttcatgcaataaagtaattctagaactagattataggaaaagtgatacaacaggtagagcaagatccaatgtaaaaataagcagaaggtaaaattgccatcaagaaaaactgtgaacctcaaaaggtttcaatttgatcaggtaaaccaatgtgagtttagtgaactgaaaatttcatgtttctaaaaactgagattttcctcggaaaggt

SEQ ID NO: 296293 - DNA, 495 bp, Homo Sapiens
ttggcagatggacctcaaatcaaacccctcttagtggtcctcctgtgtttaattaaccaaataagtgtattcagtagattactcctttatcggctgaatattctcgatgtcaacagtatgagcaacagaaaataaaaacttggaattcagtgacagctttttatgtaactgcctcagttttcttagggtaatcaagccaaagagaaaatcagagatgccaaggatagagtggttgagagaggcccatattgaaataggcacacgattgtcaccatttctcactttacaagctgtataatcagtaagctgattctttttatacttcaaattatatgaacttgacctcatatttggctgcaaataccctgatgattctcaaatctaatgctacatcttagcttattccctcgagctccagacaatgtgtctaaccaaatgtttgcatttgaatgtcccacaggcatttaaatttagcttgtttaaaatctttttctg

SEQ ID NO: 296294 - DNA, 822 bp, Homo Sapiens
  misc_feature (125)..(167): n is a, c, g, or t
  misc_feature (672)..(685): n is a, c, g, or t
ttgggatttgtgccaacaccatccttctgtatccttcccttctagctagttcttccttgaaatgtttccatgtctgttttttcttcttagttaattctgattcttccacacttgccataatagtnnnnnnnnnnnnnnnnnnnnnnnnnnnnnnnnnnnnnnnnnnntttatttttccaccagtcatgtgatatatgcagagtagcattatacctaggcaattattagggtttgtgggtagaatgagccccaaatccctaatgtggaaactgcttaaaacagaaagtaaatcaacacctactaagatggatgtcaaatctcaaatccttgtagaaagctgtgttggaacttctaaccactgctaaaattagattcaaatcaatagtgaagcaacctaatttttatcaagaaattttccataaggaagataataaagtcatgtctacaattctttttgaattagaggctagatatattagcttggaaataactagatgcaaagtcatgaagagattatgcaaagtaacttttcatatggcctaatttaatcttgtgtgaagcaagtgcctttgttaattcaactgatttttttaaggattatagtttttttgttacttacttctcagaattagaattaaaatgtagttaccgggaatcatctaaccatgaccnnnnnnnnnnnnnngaattttataagcatgccgacaaataatatgttgctggcattgtttacaagtgtgttagatccataaataatggtttactaaaagtttaagacttgaagagaaatatacagatgactctacttctgcaacttttacc

SEQ ID NO: 296295 - DNA, 736 bp, Homo Sapiens
ttgggaagaagaggaaagaactttgcaaggctccaaagcactaaagcctgctgaaaatatgacaagttgacttcagagagaaatcttgatgaaagaatgccagcctgagagagggtttgaagactgcatggtaatcagggaggtggaaaaaaaatcactgcatgccacagtgcagaaatgttttcatcttaaaaataattattaaaaaacatagagttataaacaaatataaagtgacatatgttttggtttgtggtctgtttatatgttccagagatgtttacttcatatcttaatcactttaacagccttaatgctttggccttgataaagtttagtatataatatattcctcatttatagctctgatagctttaattttctgaaaactatcaaattttgccatctgttatatttcatgggaagtttagtgaaacccttcattagtaatctagtagttatggcttgttgacatttccatcataagttctaattttgaattatttatgtataactgaggttttactttacattgggctgaaagtcaaaagaatttcagatagcctttgtgaatgctgacctagattcattacatacagcagaaccatattttataagaacatgggaaaaatatgtaatttgcttttataatgaaaagaacttagtattttaagtatgaagtttagctggtaattaatatgaatcagattattttgctttaaaaaataaactctgg

SEQ ID NO: 296296 - DNA, 730 bp, Homo Sapiens
ttggagagcccgctttaatcgcagccacagggaaagcatttgtcgctgtcttatcacacaggaatgattttcccattggcaatggcagcctgccagctggctgtaaagccagcgccttcctggtctttcaggtcgcaatctcagatggcatgcaccaccactgccaggcactgacatttctatttttgcaggacatgctgggtcaggaaacaaaactgcagaatcacagactatttcttatttacattgaatgtgaatctcattttggctcagaagcctacggatttccaactcttatagttcaatacaccagagatggctcagagctttgctgattgaagtcagctgatggtctttggatcttatcattccctttaaatccccaaggtggttcatagagtgcatttctataaatctgcagtaatttgccatttataaataaagcagcaactcagctggggcatcactttcatccaagcccagctcagaacaaacacaaaagagagatggcttatatgggaaaacaaagttctttaggagaagggtttggaataaccattagttgcctctcccaacaaatgctgctaagagctccttcaaatctttatctgagacagttcttagccatttatacgccatgataactgccccttggaaatcttttaaaattagatctgcacttctgattctagccaagatggaataacagagatcagatttactctcctac

SEQ ID NO: 296297 - DNA, 347 bp, Homo Sapiens
  misc_feature (49)..(80): n is a, c, g, or t
ttggagaattcccaaaaaaacaagcaataattatctttccctctatagnnnnnnnnnnnnnnnnnnnnnnnnnnnnnnnnagtgacagtgatgggaaaggaacaagctatatattccaaaggaagaactaccagacttggttagatataaagatgaagcactcaatgaataaaaagtgacttcagcattttggtatctggccaactatgtggatggcagccttcttgacaaacccagaagtcagaggagagttggttagtaaggaggggaggtagggccagttttaccctgttgaagtgaatgttagcaagtgggtatacttagcatgttctaagtatatatagctg

SEQ ID NO: 296298 - DNA, 785 bp, Homo Sapiens
ttgggtgtcttggggttgctcttctcaaggataatctttgtggtgttctctgtacttcctgaatttgaatgttggcctgtcttgctagattgaggaagttctcctgcataatatcctgaagagtgttttccaacttgattccattctccccgtcactttcaggtacaccaatcaaacgtagatttggtcttttcacatagtcccatatttctttgaaactttgctcattccttttcattcttttttttctaatcctgtcttctccctttatttcattaagtggatcttcagtctctgatatccttttgtctgcttgatcgattcagctcttgatacttgtgtatgcttcacaaagttctcgtgctgtgtttttcagctccatcaggttacttatgttcttctttaaactggttattctaggtagctattcttctaaacttttttttcaaggttcttagcttccttccttgcattgcgttagaacatactcctttagctcggaggagtttgttattacccaccttctgaagcctacttctgtcaattcatcaaactcattctccatccagttttgttcccctgctggcgaggagttgtcatcctttggaggagacgaggtgttctggtttttggatttttcagcctttttgcactggtttttccccatcatcctggatttatcaacctttggtctttgatgttggtgaccttcggttgtggtctttggacgccatttttgttgatgttgatgctatccctttctgtttgttagttttccttctaac

SEQ ID NO: 296299 - DNA, 438 bp, Homo Sapiens
  misc_feature (296)..(304): n is a, c, g, or t
ttggggataattgagcaggctgcactgtattcaagtttcaaattatcaaaatgttaatgggaaacgtttcatctaggaatgtggttggagatagtggggtaattgacaaaaatataataaagatgtacttcgtaacattgttctcagattattttgagtataaggctaggaaaaaaaggataaaagttttatgttttgcttagcattaaagttatgtccaatggtgtctatttagtgtagttggatttatctttgaggctatgtctaggttatgtttgtgtctgtgtgtttaaggnnnnnnnnngggtgcaaggtataggttggacattagatggagatgtagtgtgatttaattatcaagggagaggttttataaatgcaaggcctaggattgagacttatgtttaaattactttcactggcatttatttattcaga

SEQ ID NO: 296300 - DNA, 823 bp, Homo Sapiens
ttggccatttagcaccggagaactgaggcagagactacaagaggctttcaacagatgattgtgcagctaacaagggaagggagaaagagggttaacctgggtcttactgacagactgtgcccctatgctgagttacgtttccaaacacagggatgtgagagtttgttaatgtaactgattcttcatagtattaagcatgtttcatcttttatcattactaaagcatctgaaaataaaagtcctaaaaacagtagtgtgagggggtgggggcgaattcagaatttgctaatacatcagtagcaaactgacaaattctatttggtgccatgtgagaagcctaacacgactcattagagcataaaacatgttccagaagccattcctaaggtagccaggatgaaatacacacaatctctctgtccgcgtcctactctttcccttgcagcgggaatatgaattctgaaactgcatttgtaatgcggaagagtcaccttgctaaagactttggtatcttccttccccttcctacctgatctttccacctcctgggaggtttggggttcaaggctgcctccatctctattacgggggtgagatgccatttagtaaacattcctaagtctgtgtcatggttctgtttacatccgatgcccatttcacactcaggcctgagcagtttctgaaacggttcgttctggcacagtctagcctgcttcagacttcctttgcagctaatggaaagaccagggctgacactgctgcccctcacaggttatgtctgttagccgcatcttcattcttatctgggagaaaatttatatgg

SEQ ID NO: 296301 - DNA, 961 bp, Homo Sapiens
  misc_feature (42)..(54): n is a, c, g, or t
ttggataaattttaaaactgtttgtgtatcctcttcctgcannnnnnnnnnnnnagcaaaatgatttgatatcgtacggggcgctctgaagtttccatgctactgcttttttctgtttacttcgctttgaggtcctggcgtagctgcaggccacacctagaatgctgttcctgtctgccctgtcctctgggcaggggtccaccatagtgtttctccatgtttgggctctagtctgtttttccctttcctgttctggaaagcccactggtggctttggcttaggtgggggtgggcagagagctgctccccgtcactagtcattgagtgtgaggctcctgaagccagtttccacttaggcatcattttcttcataaatgtgtttctctgtggtgagtgaggagagatggtgtcattttcttattttgtgcatttagaaaggctgagatttacaaaactcattttgggtactcgtcactaattagtttaatctgggataacaatggaaaatgaaagattgcatgtttgatcatgcacagcaaagaaaaaagatttataatgaaactaaatatcatgaaagaagagaaggatcagaaaactcaagtgtaggaactgagttctgtgttgcccactgatctccacacccagcccccaaacacacagaggtcctgggtctctgttctagaggccagaactttatgttgtccgaggttctttggaaaagaaattttctttgacattttcaataactagcaatgtgcacattttggtaaaagagatgaaatgatgctttatgattaactttagcaacagaaaagtaaaaaggtgcagagaaagactaatatcttcactttttttcttgttgagcaataacttcctactccaaatagaatattgtgaaataattttaaaacgaaaagaaaaatgttgcatccgatttctgtaaacattgaaagcatttccc

SEQ ID NO: 296302 - DNA, 440 bp, Homo Sapiens
ttgggttataaagacctatgtattttgattagcaattttgtatagttgattttaagatctagagttccacagctgttaatatataatcttataaattgatctttccttagaatgatatctattgtactaataaaaatgaactgatgtaatgtttttatgcgtctatctagatatcagaattacatggtagatatcagaataacaatttttgatagctattacttggcatgctctttcaccaagattattattggagcagttttgttaagaggcatttgtcaacataccatatgctgaaaactatttgttgatttaaagtataaggctgagttttcaaaaggagattttggtgtgcataaagttatacacagaattgcattttccccacagttgcattttccccacaattacctagtcatgctatagactatcactacata

SEQ ID NO: 296303 - DNA, 157 bp, Homo Sapiens
ttggtttggattttggggcttgtactatgtaggtgtaaagcataaaataaaagacaacaatagcaaaaagaacatgaggggagggtaaatggaaggatattctggcaaagttcttaacattttatgtaatgtggtataagattaaatgtaagtacac

SEQ ID NO: 296304 - DNA, 506 bp, Homo Sapiens
ttggctaagaacgtaagaatcactgtgtgagttggtgatacatgtcacagaagtacattgaacagagttgtaagagatcttagtagttccctagcctaagcctctcatattatgtatgaggagactgaggcaaagctttgcactctgtatcacagtgggtggcagagatagaactggaattaatagtaacctcattttaaatttctgttatatccactttgaacaaatagccccatcagtatgacagtttggtatgacaaaaaatcatttcagtatgcactatcaatgtctgttaagagtttacccttgtgtatttctgtttttacttggaaatacccaaaaaggaattatttgaaaatttgtctgttaccataactgccaatatgtgaaagctggatttttaaaaaagtaaagcagtatcattccaccagatgtcactgtttgcatgtagcaatgaagttacgatgattacaaatacaattttccccttcccaatcatgttttgt

SEQ ID NO: 296305 - DNA, 757 bp, Homo Sapiens
  misc_feature (223)..(536): n is a, c, g, or t
ttggctgtggtttcagaattagatatttaattctcttcagatattaattttcttcaagtagtgtttttgcaggtttaaacaagtgaccccaaaccagtgtccctaatttgccttatctgattggcaaacatgttggcttattctgtaagagaccattgaatttgttatgagtatttcaaaaaatttcacataaacccctggatttccagcttcttttgatacnnnnnnnnnnnnnnnnnnnnnnnnnnnnnnnnnnnnnnnnnnnnnnnnnnnnnnnnnnnnnnnnnnnnnnnnnnnnnnnnnnnnnnnnnnnnnnnnnnnnnnnnnnnnnnnnnnnnnnnnnnnnnnnnnnnnnnnnnnnnnnnnnnnnnnnnnnnnnnnnnnnnnnnnnnnnnnnnnnnnnnnnnnnnnnnnnnnnnnnnnnnnnnnnnnnnnnnnnnnnnnnnnnnnnnnnnnnnnnnnnnnnnnnnnnnnnnnnnnnnnnnnnnnnnnnnnnnnnnnnnnnnnnnnnnnnnnnnnnnnnnnnnnnnnnnnnnaggaaagaaaatgcagccatggtggcaccgtggctgcattcccacatggcagcagttggctggcgatgagaagtagctgcttccttttaggtgtggcctttgctcttgtttgctggtaacccccacagttcctgagggtctccccaccaacagcggtgggaacagcacaacacttgcacttttaaacatagagttagtacttttttcttagaaaatagccc

SEQ ID NO: 296306 - DNA, 453 bp, Homo Sapiens
gtacgggggttaaagaggacctgctgacctctgagctcacactgaagcctcctggaatgctgtgggttgtgagctgggatgagaacgcagcatggagatgaaagacgcatccacccaggaaggcccactggcatcgcaatctcagggaagattcccaggctgaaaaaagagaaagtggctagggtggcactgaatgccccacgtcaaagaaatggcacccaagccgtccgtcagtccctcacctgccacacagacagcaccttggacccagcaagatgtcactcaccacattgatgctgtccacaggcatcgccttgcttttgcagctctgtgtgagatttgtcagcttggtttgggtctggggctgtattagagctgtcagcctaggagcctaccctagttttgtgtctgcactatttccaaagcattggaataaaaggcattttaaccaac

SEQ ID NO: 296307 - DNA, 212 bp, Homo Sapiens
ccatatataattttttttcagacagagtcttgtcctgttgcacagggtgaagtacaatggcgccatctttgctcactgcaacatctgcctcacgggttcaagcgatcgtcctccctcagcctcccaggtagctgggactacaccacactgggactacaccagctgccaccatgcctagctagtttttggatttttagtagtgacagcctttc

SEQ ID NO: 296308 - DNA, 571 bp, Homo Sapiens
ttggggtagatggatggggagaagaggcaagcaaagtgggaatcggggacggggagcgagcgaccagattcactccaagtataacatgggatcccacgtctggagaggagtcggggcgagtgcagcctgtaagcagagtttctgcgctccccgccctcggctgccctggcagcagaccctcccatgcttctagtactggaatcgctccgacattctggcttcctcccagcaactggttcctgaacagctgtcattctccgtctttcttctgcctccacccgagttctcctcctgcccacttcctaaggcttttaacagagcaggatagagatttggggggttgaggtttgctcaggggttgagggaccctccctgctctagattttataggccatgcatttttaaaaggcttttgaagtttttagatctccttcttatttgtttgaatttacgcctgagctaatcctgaccttggctagggtactgtggaccatctgtaaaatggagcagatggcggttgctcactctcagaattgaagtgccaaagaatgcgaagtgtatgtcaaagatg

SEQ ID NO: 296309 - DNA, 621 bp, Homo Sapiens
  misc_feature (285)..(345): n is a, c, g, or t
ttgggtacatgcattttcttctctcagttctctgtatatttaattacaatcatccaatctttgcatctttccaatggcccctggtgatgtgatgatgtttgctttcattgacttcttgtcaatgaaaattcatgggaatttcactctaaagcaaagcgttagaaaaataaaaatattctttctatttaaatatattctttttattttactgcatcactaaatttggtatagatggcacttacattccattcatgaccacttttgtatatgtagaacctattgtgnnnnnnnnnnnnnnnnnnnnnnnnnnnnnnnnnnnnnnnnnnnnnnnnnnnnnnnnnnnnnaccaatacattatagaccaatatattaaaagtgttacactgttgtcttgattacttcaagaccctaaatgagtaatctaaaataatctttcattgaagttgaagcctaacatatttatttgtgataattccatcaaactaaaatgaataaacatttcatgtacataagcaaaactttccaaaacataaaacctaagcattgttattacaactagatagtaaaaggagtttgaaacgtctactgaggacagtgggcacaataatttatctctaaatg

SEQ ID NO: 296310 - DNA, 288 bp, Homo Sapiens
ttggcatctttttggggggtggtgggagaaagacagaagttgggaaaatggtaactgctgaatgaaggtaggagaaagctgcaaaatagtgcattcatggagaaagatatgacgaaaaaggagttgttgtttcagcatattggagaggctcgtatcactgagtttgtagatgggcagagggtaagcattagatgtgggactgaaagatactcatgagttaaaatatatctagacaggatttagctatattcccaacccctttctccatatagaaatctctgcagatag

SEQ ID NO: 296311 - DNA, 908 bp, Homo Sapiens
  misc_feature (657)..(668): n is a, c, g, or t
ttggcacagtttaaaaattgcctttttatgtaccgattgataatgtgtcagagtcagggtctaggccaaaaagcagagctcattccacatagtccaaaagaaggacttgagttctggggactagttgcacaggtgcttgctgaaggcaagcaggcactattaaggtcattcctagattaacaacatcaattagttgatgctagctctatgcctagagggtgagaagatagaagtggtggtaccccaacccagagctggggttgccagattggggtgaggttactcagtctccaagaaagctgtatggcagtgaccagaaccgcagataaaggggttgcccagggtgagctggggccatggggagatacagctgcttccagaaaagcagctctaagcataaatggaagaggtggattaactctgtgtctgtgtcccagtctttagggtcctgtcagtttctcacagtagctaactttagccagaactcagtgatcaaggtttcctaaaatatgcggggaaagtcagagaatagatctgagaactaatgtgcaaggggctggtacatcttcaaagaatgacatttgggtggatggttaccttttgcttaaaaagggttattgataaatggacttttgaacagttttaagtttttcttannnnnnnnnnnngcaagtgagctagaggaaatttgcagatgttaaaacttaatatttgagcacaggttggtagatgagaaaaatattttaaaaggaattctccagtgaaaaaataattagaatacttagagaagagtaaatttttgatattgctattataggtacaatagactaatcagagaacatgatgaggaaacatagcgagagagatgaaagatcttttctgccaagaaatttgagttcttcagtttg

SEQ ID NO: 296312 - DNA, 528 bp, Homo Sapiens
ttggggcagaaacaaagaggggatgttattcctgagcactggctggtgagttggggctccccaaaggactattcaaagacccaaagggctattcaagacccagaaagagggcctggtgcttgggtttggaaaaagagaagtaaccgcctgcaactgagaatcccacaaaagccagatccccaggagagctgctttcctctgtgaaaaagagacaaaaagaactcttccaatccagggatgggggctgggaggaagaattgtttgccaggtgtcttggattgaaaaaagacttcataaaaaatgaagacattgaaaccccagttagtctcatgtgtggatgttgggaatagtctgggcctgtgtccaaatttttaataccagcataggaatggaattcccagtcaagatattgacctcaaaactggtcccacatcagtgaaactcccatgggcccagacataagccaacccaaaatagttctgtaggaatatttctataacccagataacatgagatgccctcatggaa

SEQ ID NO: 296313 - DNA, 745 bp, Homo Sapiens
ttgggctactgttaccttgatccctcactctgctctcaattagaaagccaaatatttcccatttaatttcctatttgagtcatttacaagggcaagttgaggacttcttcactcaaccccaccctacaatagctacacaggttttgcgtctagattctctgggtgtggttcaatggagcttactgatagagtattttacttgctgtgaatgtagatgaacattcataacaatttcagtatgaacaggtctaaatgatatgcagtctatctaatataaggggtattaaaatgagaacgtttgaagaaaagagataactctttccttctcttcttcccccttcctctgtgatagcttctatgaacatggtaggtttatttcaaggtactgcagcctatatcagtgttttttgccatgtgatctgtggacagcagttggtccacactgttactagtacacaaagggaaagtgtctagaaactttatgacaatttgccattgctgtaatattgaagcccatgatcaatggacttggctcattttactggttaccaattggttttaatgctgtctatcttgtgtggtggcttgtgtgtagtgtgaactgcaagtcaatattggtgcaagaattggaagaaaaaattagccttcatcactgtgtgaacactggcccatatacaaaggatgatatgcgtgaaaagtgcaacttcagatggtatctgagtatgctgtccctaataagagtgaa

SEQ ID NO: 296314 - DNA, 754 bp, Homo Sapiens
  misc_feature (486)..(679): n is a, c, g, or t
ttggatagctctttctctggcagagctgcctactcatgggattacttttatagacagacccctgcaagtgcatacccacttgctgtcttcccccaccagcacacacctgcctacagctttccctggcagcgtgcatttgcctgcaacaacctcctctcccatcctttccagcatgcatatgcatgtaaacccactgccacctctgccacctcaccagagtgcttctgctggcagcccgtgttggagtgttcttgccagtgggaacaattgggaacatgtcagcccctccagtgcagcaggtgtttaacctcaagtggccagagaataaacaagcaggccaggtcccagcctgtcagggttagagtatgcaggccaggagtgctgagctgagccttggcccataatagcatccagaaacaaagccaattgactaaacccaacttacaccatagttgaatcctcaagggcatcaaagaatataaaagnnnnnnnnnnnnnnnnnnnnnnnnnnnnnnnnnnnnnnnnnnnnnnnnnnnnnnnnnnnnnnnnnnnnnnnnnnnnnnnnnnnnnnnnnnnnnnnnnnnnnnnnnnnnnnnnnnnnnnnnnnnnnnnnnnnnnnnnnnnnnnnnnnnnnnnnnnnnnnnnnnnnnnnnnnnnnnnnnnnnnnnnnnnnnnnnnnttagaatggcaaggaaactttttgagttacaggaaaaggttgaaatctaattcgaggaagacagtaaaacagttc

SEQ ID NO: 296315 - DNA, 850 bp, Homo Sapiens
  misc_feature (447)..(522): n is a, c, g, or t
  misc_feature (606)..(663): n is a, c, g, or t
ttggttttcaccagggtttgcagcaagaaatgacaaaacaagtactgttagaggtattgaggtccgtggtattcctgtgcttgttagcagtgcagatctatgtgatttgacagacattttggtgattccctagcatgggaggggtaaaaatgtattttctgtggaaaggaaaaaaagtatattggggttaggggagttgaaggagggacagtgcttgggaaagtttaagaagattgagaaaaataagtctttttcttgttcctttcctatttggacattatcctggcataggactgactttcctatatatttttttccccaagattcctgtaaaagttctttgtcatcttcgttgacttctgtcctttacccattttgtgaatcctcttattggcacaccacccaagaacagtaaggcagtgaaagactgtagacctggcttcaagnnnnnnnnnnnnnnnnnnnnnnnnnnnnnnnnnnnnnnnnnnnnnnnnnnnnnnnnnnnnnnnnnnnnnnnnnnnnccaccttttcatgggtttatgattcaattaaaactgcatgtgaagaatctacctattgtaaaaactttttcttccgtacctccnnnnnnnnnnnnnnnnnnnnnnnnnnnnnnnnnnnnnnnnnnnnnnnnnnnnnnnnnnaccattcatttaaatattctgcctagttctagaaagaatgaaaaatagttctgctttacctcttcaccaatgatgcctcttactctactatccccctgggcttccgaatgaactttctctgtcaccctggttttataaaatgaggaggtgtgtaattatatctctgtctttggctagaggcagaaaa

SEQ ID NO: 296316 - DNA, 808 bp, Homo Sapiens
  misc_feature (43)..(106): n is a, c, g, or t
  misc_feature (139)..(156): n is a, c, g, or t
  misc_feature (159)..(170): n is a, c, g, or t
  misc_feature (265)..(273): n is a, c, g, or t
  misc_feature (298)..(316): n is a, c, g, or t
  misc_feature (374)..(383): n is a, c, g, or t
  misc_feature (571)..(606): n is a, c, g, or t
  misc_feature (619)..(632): n is a, c, g, or t
gggggggccccccgcaacaagggggggtttctttggggtagannnnnnnnnnnnnnnnnnnnnnnnnnnnnnnnnnnnnnnnnnnnnnnnnnnnnnnnnnnnnnnnaaagagaggggcccctcctccccttggggcccnnnnnnnnnnnnnnnnnngannnnnnnnnnnncgcgcccaccccctttctctcggggggagatatccgcggggggaaaaaaaatattttttttccttccccctcttttgggggcgcgcgggagaacnnnnnnnnntgttttttaaaaaccctattttttnnnnnnnnnnnnnnnnnnnattttttggggggtgagaggcggaaaaaaacaatagtgtggtgtagacgaattacacnnnnnnnnnncccgcgcggggtgtgtgtaaaacaaacctctctgtgtgcgggcgcttttaaaaaaagtgtttaagaaaacacccccgccgggagaaagagggcctcctatctctgtatttctccgcgccccacacgcgcggggggcaaccatctttatatattgtcgccaagaagagagcgccgcgggaaaatctctnnnnnnnnnnnnnnnnnnnnnnnnnnnnnnnnnnnngagagagagatgnnnnnnnnnnnnnnatatagaaaaaaacctgtgttgtgtctccccaaaaaactcccccacaaccccgcgtgttcccccaaaaatatatatattgtgagaaaaaacacgcgtgtgtggcccccttttaaaagaggggggccgcgcaccccacaaaaatgcgtgtgttattttagaggcctctctcccagga

SEQ ID NO: 296317 - DNA, 761 bp, Homo Sapiens
  misc_feature (192)..(266): n is a, c, g, or t
caaccttctgacttgggttggttttaggctctgaaatgaggattcatgtgaaagtgttttagtaggaagtgttcccaggaaaaattgtttagggaagcaggaaaatgggatcaggaaggaaaaaatgccaggaatgggtgtcaagtcatgctatgtttcatgcaggacttggattcaatcctatatgaagcnnnnnnnnnnnnnnnnnnnnnnnnnnnnnnnnnnnnnnnnnnnnnnnnnnnnnnnnnnnnnnnnnnnnnnnnnnnttttaaagaaaatctttttaatcccataggggaactctggagaaaatgtgggttatttgtcagttctccgaagtcaagtggcaagagagttgagttattcatctctgaccagacattgcttatacaccacccatagtggtgaggtagaggagtaaattcctaggcaattttagatctccatgcacgtagaaaaatggaatctgaatgtttgaaagcatccgtctaccaagagacacaggtgttggctgttaggaatgaaagctgactgggagcttacacatatgacaacggcaaagaaacccaattagagatgggtagagtactaacagtgtctgcaacagtttcctaatctatgcacttttacttaaatgaatgttaacagattgcatttttttattgattttgtatcaaagtcagcatctgcaatgccacataccatccagggaaagaaagactcagtgcccaaatgtttctgaaaagtatcttcaccttctc

SEQ ID NO: 296318 - DNA, 154 bp, Homo Sapiens
ttggcttttaaactgcaggattactgccacttttgaaaataatagaatttcttatcaaaaagagcaattggtcaggaatcaaacttgtatatggtcataattttttttacaaaatttactaaaattagtaaaaaacactgtgccaagtggttaa

SEQ ID NO: 296319 - DNA, 156 bp, Homo Sapiens
caagcaaggtaattgcctctagtcctggcaacttgtaaggaagccagctccctatctgtgaaagaatgaattggcatatggaattaacttttgaactattcatttgaaaagtgtttctgttctttgcggaagaaaaattatattgctcgtccttca

SEQ ID NO: 296320 - DNA, 151 bp, Homo Sapiens
atatagtgagtagaaaaatcaaatttggtgacaatgtggcattgttggtggaatataaatgggtgcactttggaagtacatactaaagttcaacatacaccagttctatgattgagtatggctctatcttgctcctacctatatacccata

SEQ ID NO: 296321 - DNA, 100 bp, Homo Sapiens
aaaagttggttcatgcctctgcaaacgtttggcaatgaatgggatcttggtctctactaaacacaaaacatggctccatgagacttcaatttatgttcaa

SEQ ID NO: 296322 - DNA, 516 bp, Homo Sapiens
ttggacttgggagaatttttagaaattccatgctctggccgttccccagaacgattaaactagaatgtctggggaatggaatccaggtatcactatttttcaaagccctccagagattctaatgcgcaaccattcctcatagttttccccctaaaccttatttaataagcaatagggcacctatgtgacaggctgatagatgcaggacacctaccacatcagccagggcagaggacccctgtgggctgggaaccccaaacattcctggagagcctaaacattaagtacactgaattaaaggaggcaaattccaagatgtttgctatggctcaaatcagaaaccaattttacagaatcattttataaaaagttatagattcttgttgagggcattccaggatggagataaactggcctcactcacatggaggtggttgagcctgggccttgttccccaaagcagtctcctctggtaaccagctatgagtttccctttggctatcccgacgctttaag

SEQ ID NO: 296323 - DNA, 920 bp, Homo Sapiens
  misc_feature (189)..(230): n is a, c, g, or t
  misc_feature (249)..(495): n is a, c, g, or t
ttggagtgaggttgctggatcatgtgataatagagctttatgtactattttggttccctgttccaaggtgaaacattgatacctgcaagacagccataaaaacacaatagttcacaaaggtaaaaatatgtggaaagtatttccctctccccttctagatatggtcaaatgggaggtcatagaaatccnnnnnnnnnnnnnnnnnnnnnnnnnnnnnnnnnnnnnnnnnngagatggagtttcactctnnnnnnnnnnnnnnnnnnnnnnnnnnnnnnnnnnnnnnnnnnnnnnnnnnnnnnnnnnnnnnnnnnnnnnnnnnnnnnnnnnnnnnnnnnnnnnnnnnnnnnnnnnnnnnnnnnnnnnnnnnnnnnnnnnnnnnnnnnnnnnnnnnnnnnnnnnnnnnnnnnnnnnnnnnnnnnnnnnnnnnnnnnnnnnnnnnnnnnnnnnnnnnnnnnnnnnnnnnnnnnnnnnnnnnnnnnnnnnnnnnnnnnnatgagccaccgtacccaggcagttttaaattcttgaatgatagtctctgaaattttatgcaagatagctgtatttatatgccaatctcttttaagcaggatgttttgacttccaaatctgaaatataagaaattcatttcccattcacctccctcttcatctttcttctccaaatagttgttaattgtgtatcttgttttaaattcttctagtcacatctactgattttgaaaaaggtacttaagcttatttttcatattccacaaatttttactgttttcagcagaacaccactgagtagaatggaaaatttaaataaatttcaatcaaagtggagtcttcggatgccaataataatttcatcagcatagtctctcacctggccaacaaatgtttcatattatgtatttttcctttactgggtc

SEQ ID NO: 296324 - DNA, 120 bp, Homo Sapiens
cctataaaagccaactttgtaaaaaaagttggggcctgctgaagcataaggcttagataagatccagcgtcttataacataataccaaaaattccaggctatgattgaaaatcacttgtc

SEQ ID NO: 296325 - DNA, 973 bp, Homo Sapiens
  misc_feature (670)..(678): n is a, c, g, or t
ttggcatggttactgatgtaaccatcagtatagttgaggcatagtgtgttgagaatttcctaatttgccatttactgaaggttgatccacttttgcaggaaaaccacctgtattagtcagagttctctagagggacacaactaataggacagaaaaatatataacggggagtttattaagtagtattaactcacatgatcacagagtcccacaataggccgtctgcaggctgaggagcaaggaagccagtttgagtcccagaactcaagaacttagagtccgatgtttgagggcaggaagcatccaacatgggagaaagatgtaggctgggcggctaagccagtctaacctgttcacatttttctgcctgctgtatattctggctgtgctggcagctgattaggtggagccctcccagattaagggtgggtctgcctttcccagcgcactgactcaaatgctaatctcctttggcaacaccttcatagatatgcccaggatcaatactttgtatccttcaatccaatcaagttgacactcggtattaaccatcacaccacccaaaataaagatcctctccctaaaagatagaaatggacccccagaccatgtgtttcaggcatctaactttattggttgagctttctctaaattatatatatacatatannnnnnnnnccagcaaacagccatttttaatcaaatacataatacataatctaccgtcaggaccatcctctgtacttagaaacagcatgttatggctgccaagttgcttatctctaatgatgttggttaagtaggatggaaaagaagaaattcatcttccccaaatgacacagaataaaggcactgacatttaaagaaataaataaaatttgaaatgtaaaacatcagagtggtgcttaggagtaatgaaactgtcagaagttaaacacaatcagtttaaagagataatgataaaatgaaaatc

SEQ ID NO: 296326 - DNA, 289 bp, Homo Sapiens
cctataaaagccaactttgtacaaaaaagttggagcttgtactcctcaccaaatattctatttattttcacttcctacaggatgaaagtcaaaccttcaacaaaaatctctatgaagacaactaaagtctgtatgtaaatgagccttgacctcacacctacatgcaagtccttaatcttcaactggaagtggctgctgttactttaaacaacctgaaaagaaacttaccttccaggtataattccccttccatgatactaagattcttccaatcttacaggcaaacatc

SEQ ID NO: 296327 - DNA, 822 bp, Homo Sapiens
actccatcctagggccaactttgtacaaaaaagttggaccatctcatacgtagaaataaataataggggagctgagagctcccttgcttcaggtagaaccatctaattgaaaggttgaatcagtatgtctgaattatttgctttgtaaatatacctcaagaaaaaaatcatagaatataaagattccaatttcccttgaaggaaatcacactgttcatcttggagttggtgggcattccacagtgaaaatagcctgtcatttatcatccactgtacatgagatagtataacattttaaaatattagctgatttatttctgtcattatttaccccctttccctttcttacctctctcccaactcccagttcaaagacagaatgtattatgggttcacttttcagtggaaggatttgacaagacaataacactggaattgttagcggtagcgaattcgttcgggtctacagcaacctcaattcttgcctcctcagaagaaagaatttgaaaaaggggcataagacagagtgagagaccaaggcaagctttagagcaggagtgaaagtttgttaaaaagtttaggaatgaaaggatgtcaagtacacttggaagagggccaagcgggcaacttgagagagtcaagtgcactgtttgacttttgacttggggttttatacattggcatgcttcccggggcgttgcggggagtggtgcgggaagtttgcattgcttctcccctgattattccctagggatgggctgtctgcatgcgcagtagcctgccagcgcttgggaggggccggcacacgcagtgtgtttactg

SEQ ID NO: 296328 - DNA, 823 bp, Homo Sapiens
tgtacaaaatagttgggttccatggtgtatatgtactttttctttatccaatctgtcattgatgagcattgaggttgattctgtgtctttgctattgtgactagtgctgtatgaacattcacatgcatatgtctttatgatagaatgatttatatttctttgggtatatacccagtaatggaattgctgggtcaaatggtagttctgtttttagctctttgaggaatcaccactctgctttccacaatggttgaactaatttacactcccaccaacagtgtagaagtgttcacttttctctgcaaccttgccagcatctgttattttttaactttttaatagtagctattctgactggtgtgatatggtatctcattatggttttgatttgcatttctgtagtgatcagtgatggtgagcctttttttcatttgccttgttggcacatgtatatcttcttttgaaaagtgtgttcatgtgctttgggccacttttaaatgtgttttctcatctcttttaagtgcgtcaaatcctctatagaggcaaaattcaaaactttgtcgtgagagttaatttgcgcaaaattttcttcccttctggaggggattgtttatcccggggagaattttctttgcggtggcgaaaacctctaggttatatagaaacccagggcgcatttttggctttgtgtgaattggtttgggcctctttctgaaaaaattttcctttttgtggccaaaggggtttcctcagtgtcttttagaggttcaaagttgggaataacggagaccttaaacaccctcgaggtattttttttccgaag

SEQ ID NO: 296329 - DNA, 919 bp, Homo Sapiens
agttggggtaacacattctacagttattcactctgtgttaattccatattcccctttgctttttcaggttcgcattacttatttaaccaagcccttagggtaaactctcagctaaaatagttggtgtgtattctgccctctatcacaacacagtgtaaagtgagcttgactgcctctgtatcttgcagtgcagttcactgcattgttgacatcatgttaatgaagcaaagtgagcaaactctctgggtctctgtgtttgctagaagatacaccagaggataaaagacagacctttaaagaatcctgggcctgctacattaatgagaattttaggggttcagtgattgggggcatgtccaaggataagggaaattaattacagtatacctattaccgttaagagtcacattgcttggtaactatctttagattttgaagacaagatacattacttaggcacagagctctgactcatgtgttggaggactcagaaggctgcaaattttgagcaggatccagaccaagaaaggattcctaataggttcatactgtggcaccagcatggccacatgtggccctccagcatgagttacgggatgtggcagagtcaatggttcaagaagaatctatgatagacaaggacactaggtggggttttttgtcaagacccacaacaaaagttgtaatgtagaactccagggttccagggcaagcccacgccttctgcagcacggaactattcactatgcacaaatgtctccatagcatgtgccaccaggttctgacagactcagatggaaacatggggcactacgagactgtacactacgacatgcttgtcatgagataggacctgttgtagccacagaatcacaagacaaagcacgtgtaccagtatgtcacagacatagaaatttct

SEQ ID NO: 296330 - DNA, 627 bp, Homo Sapiens
actataaaagccaactttgtacaaaaaagttggtcaagacaggagtgtgggtgtgctcaaaagaatgaggcacatccagtgttgtcagggctcacacactatatggataagtataatgaaagcatgaaaccctaaccctaatgttaaccctacccctacccctgatctgaaccctaatctaactcattagaagcataatgaaagcatagaatattctataataaggggaagagttttctgggaaatggatgagcagttcctggatttggggtgccacccttttattgactaaatatggttaatctggaactgtcatagcatcaggtgcatgatgggaatgggaggtttactcataattttatgggaatagaggcataacgaaaccaagggttagcagttggtcaaattttatgctgtcttggatttaaccagttgtggccaatttcttttttgttacattctcatctgtacctaaagcagggtgtctgcagtccgtctttattagcacagcctgctgtaacagttcctttccactagggatcatgtctaaccagtttggccccatttgtgttgcttttagccacctgcaaataatcattcctgttccctcactaagtgcctggcgcc

SEQ ID NO: 296331 - DNA, 948 bp, Homo Sapiens
  misc_feature (134)..(232): n is a, c, g, or t
ttggaaacctagacctgtggcttgggtatggcatgataatcttctggaaactgacagctattttcagaagcttaagacacatagtttcctctctcccttcctcttttatggttgtaagacatcagtaggcagtnnnnnnnnnnnnnnnnnnnnnnnnnnnnnnnnnnnnnnnnnnnnnnnnnnnnnnnnnnnnnnnnnnnnnnnnnnnnnnnnnnnnnnnnnnnnnnnnnnncttcagtgatcccacacagcacaaccgcactcctctgcccccctacccctggctgtatgtgggaccaggtgctgcagagcaggaggtggcgcctgtcggggagggggatggggggtgtgtgtaggggcaggagatggcgcccctcgggcatggcaggcggcaggacctgagccctgccccacagggaggcagctgctagccagctatgggaacggaacagcgccgccgcagcctcagcccctcgcgaagcgccgggcagctagggaacatggccctggaggggctctgctcggccctcaaagatggacaaaatgttggaatcaagcacattcctgcaatccagtatgacatttggattcaaaccagcaatgaggtcattttgcttcaccaaattatcctgtctcatatccaccaaacaaggagcgtatctacattttggaagctgctccacgtgaaagaatcgagcttcgatgaacattattatatagagccatcatttgagtgttggtttgatcccttggaagttccagatgggccatttggtttctctccccttatagattatactgcgggcatgaaaaaacctccattaatcagatcaacaaggagattcatgtggattaggtttagttctgatgaaaagaactaatattcatttatccaagatccagactttacttacctggagattgtgggtttcagctcttgggagccga

SEQ ID NO: 296332 - DNA, 876 bp, Homo Sapiens
ttggtcagttgattggctatagatttatagtatgtgttgtaatctgttagagcaatgcctcttctctttgttcttttattaaaagtcttatttttatctgtattcacttccatgtgaattttagaacatccttggtacattgaatgaaaattagtcaaatttcgatgacgattatgttgaattaaatgcttaatttgtgaagaattgaaatcttttacattttcatgatttccatctaggaacataacataactttccttttattcagacctttcttctgtccttcagtagattttgtttcacttgcatggattctgcactttcctgttaaatgtattgctaggtattatatctttggttactattataagtgggatttttcccactgtattgtcaaatttgttttttcaattttatagtaaggtcgttattttttattaaccttaatttcatactcagccagctggctggagctccatttcccctagatgctttctaggatcccatttcagccctaaaaattctagaacttaggtgttatagaactttgtcattggaagaggttatatctggttcaggccaaaggaaaagcttcatggaaagggtaagattcattgtcattatcatttaaggctgtctaactcttctggtggtaatgtctccaattctgtttatttataatttttagtgccaggctttttagggttccttcagactcctctgcatttcttcattgtttaatgctacctccacaattgttcccaaatctgatatgacctgaccaggcgaagtaaggacggctgtaaataaatccccaaacatctcctctagtgctcacagttttcttagtggtgatcaatatctccttttgtcccc

SEQ ID NO: 296333 - DNA, 415 bp, Homo Sapiens
tgtacaaaaagttggcaggcagctcaggagtgccaagtcacaatctacagccagcattcaaggggaagaggaacccatgctttcagagcattgagaggaaacatggctgcaactgtgaggaaacagggaagccacacaacaagcaagagtttaccaactgactaataagcctacatgccacctgctggatcatactgtaaaggtttatcaccaaaaacacctcactaacatacctctgccgaaaccagagacaagaaggtagcttcaaataaagaccctgcacaaagcctaggcctggcaaaaaacatccagaaaagaagtctattgactacccaatctacactgcagctaaaacaacagccacatgtagagataagaaagaatcaatgcaaaaacacaaagaaatccctgtttg

SEQ ID NO: 296334 - DNA, 908 bp, Homo Sapiens
  misc_feature (459)..(570): n is a, c, g, or t
  misc_feature (604)..(667): n is a, c, g, or t
  misc_feature (712)..(798): n is a, c, g, or t
ttgggagactttgcagaaccatagtgtcatgaaagtggagctaatgtgttacagaaggatcatgtgctcacgtcttccctaccatgcctactgattagctagtcactgtcaaagagtagtatgtggttctctaattctcaagttttctcagataagcatattctccacatttctatagttttctcttagaatctagggaaatcatgatcattttagcactctcttctagtctccaatgcttttttatgttgtactttataaattatgtataaaaacgtgttccattgatgaaacattttgctctgttcttgacgtggcccaaccaacatggagtggtgatttgttgatttaaagggggatgatatctcccaacatttggaaactaaacaacacacttctaaattattcatggctcaaagaggaattctcaaaggaaatttaaaaagtacattcaagtgnnnnnnnnnnnnnnnnnnnnnnnnnnnnnnnnnnnnnnnnnnnnnnnnnnnnnnnnnnnnnnnnnnnnnnnnnnnnnnnnnnnnnnnnnnnnnnnnnnnnnnnnnnnnnnnncagtaatctaatctcccagctaaagactctaggnnnnnnnnnnnnnnnnnnnnnnnnnnnnnnnnnnnnnnnnnnnnnnnnnnnnnnnnnnnnnnnncaatagtagaaatcaatggaattaaagagagacaaatattgcagnnnnnnnnnnnnnnnnnnnnnnnnnnnnnnnnnnnnnnnnnnnnnnnnnnnnnnnnnnnnnnnnnnnnnnnnnnnnnnnnnnnnnnncacattaccgacactagcaacaaaactgggaatatcgttacatactaagcagctattaaaacgatagtaaggaatactatgtacaattgtatatacatatttgacacttt

SEQ ID NO: 296335 - DNA, 342 bp, Homo Sapiens
ttggcttgtgtcaaagaagagcaagaatctgagttaaacaatacaattgctcttgtagcttctggtcaaatgagatgaatgtcatattcaatctgctagccgaagaatgaccaaccaagcccaacttcaatgaggggatttggttgtaaaatatatgtcctggaagtgggggtggaaagtaagtctttggccataggcaaggatttataatcttcttactgagatggaaaagtcagtaattgggaataataatgcaatctcccatgggacttatgaaaaagtattacggtgcacaggaaggaaacccatatcctgaagacttgaggcaagccgacttataaa

SEQ ID NO: 296336 - DNA, 745 bp, Homo Sapiens
ttggatgatggccttccagaatgaaataaatctgtcagtgactttaaaatcacaataggagaaaaatcaaatggatatcagaaatgacctccatgtttaccatgtgttacaaacttttgcacatttgtaggtaggtgaggaaactatttggcatgtagaatttctctacatccttcctccatgtagttattccatcattaaaaagcaggtctcatttctataaaagttgtttttctccgtgcaaaaatgtcccctaaagggcagaacaggaaagctgccacataatattagaaaggttcacaaagtgtacaataccttaaagattatctacagatggaataattttgaaaaagatgttaatgttagcccaataacacaaaaatacagtaataattgctaaaatttcctgatgaaatagaacttgtagagactcttatcctactctacaatgttatcaaataaatccagcatgtgaagtcctttttcagcttcagcaagtataatatgttatgaacttgctcaaaccgcataggtttgacctcttacccgtttagttctgtttctgtgctctacattatgcccagttgtcatgtctcaatgattttgtgggaggagcatagtacaggctatggaatcataaagagagttttaactttattatttactggctggaagatttttggcacattccctaacctccctaaacactgtgtcctcatgtgtaccatgtatgtcttaaccagct

SEQ ID NO: 296337 - DNA, 925 bp, Homo Sapiens
  misc_feature (826)..(851): n is a, c, g, or t
ttggggaaaatattaacaggaaaacaaacttatataggtagtagatacctaacttctgttaacttttaatataattttctccaatgtaacatgtatgctttcaaattgaatcaggatgcttacttctaagaaggcccatgccaaaaatacacctggtattcatgctgagatgactaaaataattataacttttggtcatataatgcactcgtttttgaaacttgctgaaatgtactttttgacgctgcaattaaaagcccatctcacttttcctgaggtgcctgttgccatggtgcctgggcattctgaagaggaacttactgaggatgacacttcacagatgtagaagagctatgttatgatataaatgacagtttacacaagcagattattttcagaactctctggggactgattacacgtagcaactgactgtgggtatgtggatttgtgtagccactgaccatgtttctacctactgtcgacttagacacaccgatctatcttttctttgctatcctcaatctatgggcactgacttgttagtactgaaaggtgtcccaaactctccacaaatggcccagactccttaaacgttttcattttaactctttccatactggtcactcattcatgataaagtaagagtccaaaaagtactgagatcaattagtgaacttaagatccatcacatgtaataatcaagagggaggctgataaatttaggaaatattctaaatacaatggagtagatagaatataactactgcctttacagggcctttcctgataccactaaaggaaactgtccctccataaagccggnnnnnnnnnnnnnnnnnnnnnnnnnngcccccaggaaagacaaaactaatcccctaaaaacttgaatggcactaaaatctcttactttccatttcatttt

SEQ ID NO: 296338 - DNA, 481 bp, Homo Sapiens
ttggtagaggttgagaattgagaacgattctgcagaagagactgagaaggagcagtcaaggaggcaggccgtgaactgagagagaatgatgactcagaagttaaaggaaggaagtgtttgatggcaatgaggctcctgaagaatgacgtctccctgagatcagaaactattcttgattgtttttatatccatagccctctacagttagcggtgctcaaacaatgtttgtggaactgaatagaatgaactcttctttcctgacatattcttgtcctaagataacacatattccagcatcatcttttcttctcttggattttccttttccatttctattttcataaacatgatggctgtggcctccaggctgagatctctgaccactttcttatggcaggtcctacttgttagtattgtcttatttcatggagggatacagggaatgaggtcccactgaggagataaaaatgtgctggaagtg

SEQ ID NO: 296339 - DNA, 368 bp, Homo Sapiens
tactctgatactataattgtagtgtgcaatccacttataactctaatatgaagcctcaaaaagcaaatctatcaaaaacaataatagctacagaaacctgttaagagataggtaatataaaaatatgtaaagtcaattaaaattcaaaatgagagagaaatgaagttaaaatgtggaagtttcattttttgtttgtctctattctttgtgatctaagataaattgtcatctctttaaaataacttgttatatctacaagatttttttgtaaacctcatagtaaccataaggcaaaaacctataatagattcacaaaaattaaaaaacagcaaattaaaacatactaccacagaaaatcacttaacccc

SEQ ID NO: 296340 - DNA, 965 bp, Homo Sapiens
ttggctctacccttttaaaaattgaataccacttttaattactgttcattgttatattatatgtaaatctgtaaatacttcaaattactactaaaataaagaagagataagatacacattttcaaacctctcttcatataaagcatttagaaaaatcattatcagagtaattttttttcatttaagtattcatatatgagctagtctatccaataaatgtcttctcccatataattaactgtcttcattttgatataattcaaataaaaatgagctgttcttctctagttccttaaacatctatgtcaatgtgagcttgataacatatcactggcatggatgcctcacatggaaacaaagagaaaaagggcagcacagactagaggaagaaggtctagtgtgtttgaccacacgtgttctcaggggtttgaggatccggtctctttcagtaagaatggccttctgggccctggtccatttccctggcccctgtaggcaatattgacatgcggtgcaaggcccatagaaaatctctttggctaaccttgtatcccagaggaggagagagaacaggttgggtttgactctaattcagatgcaatttcatccatgtagtcaatacatggcacttgatgtgtatctcttgggctttttataaacctggaataagaagaaaacattagaagccccgtgccagatttcagtcactattctcctctaagtttacactggaatttgtttctgcttcgtttattgacttcattatcttctactaaccaaatcatcctcttatcaaatttcatgcacatgccttaatttccttagaagaatacatttcctaaacagaagatgtgaattcctgatatctttaaagtacccaaagtaccaagtagagtcacgtacacacagaaattgttggatatgtgaatggatgcaatcttagatactgattccccttctagaca

SEQ ID NO: 296341 - DNA, 957 bp, Homo Sapiens
ttgggatgatttcagagaaaccatttgcagtagtttcctgcccccatagctttttcccagttttgtttctgtggcttcaggtttcggttaccagtggtacagtatgacattttgagagactgagagaaagactcatataacttttactacagtatattgttataattatcttttgtattattattgttgttattctcatattgtgcctagttaataaataaatctgtcacacatatgtatgcgtaggaaaaaaaacattacttataggattcagtactatccaagatttcaggcatccactgggagtcttggaatatatcccctatgaataagagggaagtactccatttatttatttaagaaatatttattaagagtgtattaaatcccaaggactattctgtgcattggaatataatgtgttaaataaactcattgccctgtggagcttagatattagtgggagatatacccaaataagaaaaccaaaaatgtataaccaaattataagtaatgctgtattaaacaggtggcctaggataatctctggtaacaatcaccacattttactagtacactgtagcaaaggtttatttcttgattatgagaagtccacagtggctagtccaggcagctatccaaatttgctgccctcagctttccaagatgctcccttcttgcggctccttcatgtcagcacgtgtttccactaaagaagaatcaaacagcagcagctaaaagcttttacatgtgtcactgctgcttcatgttttattggccttggcaagtcacgtggccaggcctactttcagtggagtgagaaaatgtgaatcttggtaatcccagtggtaacaaagaactggatgtccctaccacaagtattaaatgctatgaaaaatggagatagaaagagaggatacagaacatgtagtttttgcaaagatgatagaataaaaa

SEQ ID NO: 296342 - DNA, 800 bp, Homo Sapiens
  misc_feature (143)..(436): n is a, c, g, or t
  misc_feature (438)..(452): n is a, c, g, or t
  misc_feature (454)..(483): n is a, c, g, or t
  misc_feature (627)..(690): n is a, c, g, or t
ttagataacattacactgcatagttaagatttactgtatagttacaataatcaaaataatgaacagttggcataaggtcaaaattgtagggtaatggaacaggaaacatttgtccagaaatagacactcccttatatagaatnnnnnnnnnnnnnnnnnnnnnnnnnnnnnnnnnnnnnnnnnnnnnnnnnnnnnnnnnnnnnnnnnnnnnnnnnnnnnnnnnnnnnnnnnnnnnnnnnnnnnnnnnnnnnnnnnnnnnnnnnnnnnnnnnnnnnnnnnnnnnnnnnnnnnnnnnnnnnnnnnnnnnnnnnnnnnnnnnnnnnnnnnnnnnnnnnnnnnnnnnnnnnnnnnnnnnnnnnnnnnnnnnnnnnnnnnnnnnnnnnnnnnnnnnnnnnnnnnnnnnnnnnnnnnnnnnnnnnnnnnnnnnnnnnnnnnntnnnnnnnnnnnnnnngnnnnnnnnnnnnnnnnnnnnnnnnnnnnnnctaatgactatagaaagacacactcaaacaaatatataaagacttcttacacaaaacaaatatatcaataagaaaaaatactcaacatactaaaagactttattaatgaaaagtaattcatagaatagtgaaaaattatataannnnnnnnnnnnnnnnnnnnnnnnnnnnnnnnnnnnnnnnnnnnnnnnnnnnnnnnnnnnnnnnttaaacattttttaaagccatttatttcacctgatattctagcttcagagaagagagccgattatccgatcactgccagttctgttccagagttagcattgcttgtactc

SEQ ID NO: 296343 - DNA, 162 bp, Homo Sapiens
  misc_feature (65)..(119): n is a, c, g, or t
taagtgtcaccgttataaaagataacaaatatatatgatgcactctatgaagtagaggtagaatnnnnnnnnnnnnnnnnnnnnnnnnnnnnnnnnnnnnnnnnnnnnnnnnnnnnnnncagagtaccttctatttggaatgttaaaaaagttctggaaatg

SEQ ID NO: 296344 - DNA, 573 bp, Homo Sapiens
  misc_feature (213)..(229): n is a, c, g, or t
  misc_feature (269)..(281): n is a, c, g, or t
  misc_feature (360)..(371): n is a, c, g, or t
  misc_feature (381)..(438): n is a, c, g, or t
  misc_feature (465)..(490): n is a, c, g, or t
  misc_feature (502)..(512): n is a, c, g, or t
acaataagccaactttgtacaaaaaagttgggagaatgcaaatatgaatccgctcttacctcttaaatgcactcattcgtgaattctatctgctcctaatgatgcacccattacccatcttgcccccagaccccctgatacgtcttcatcccccccgggagtctaaaaattgtcctaacttgccaatgtcattcccaagataaaacttaaccnnnnnnnnnnnnnnnnnctttgttgaagggccaaaaattatgaccagttttttcccnnnnnnnnnnnnncccccttcccgggcattaaaatacaaaaatgtgaaattgtgtctttttcggagccccggggggttatttgcgtgtgtgnnnnnnnnnnnncccgcgcccnnnnnnnnnnnnnnnnnnnnnnnnnnnnnnnnnnnnnnnnnnnnnnnnnnnnnnnnnnatttttgggggcgcggtttctgggggnnnnnnnnnnnnnnnnnnnnnnnnnnaaaaaattgtgnnnnnnnnnnnccaaaacactttttacccagtttacccccaaaactcgggggggctggtgcccaaatttttt

SEQ ID NO: 296345 - DNA, 868 bp, Homo Sapiens
  misc_feature (678)..(687): n is a, c, g, or t
actctcaatgcatacgccacactttgtacaaaaaagttgggacttatctaaacactttagaatgaggagaaacccatttgtttacctaagacaaggccaggcacagaccttccaaattcccattctaagtgattaattagctgaagtgtttgttcccaccaattattgcaaacaaaatgcctgttaaccttgacttgagaaaatcttagttaagcatctttccttcccatagtgtcctgaggtttctctcaaccctaagtttaaacaatcattgacatacagaacaaccagtcctaatgattactactgaaaattggctggcatcaaggaaagaaatttctggttccagttacagtcacacatgtaataaacatggaaatcttatgaccaatctgattatgtcactggtttatctcacttgccaataaccagttctttctagccttatttactctttactatgaaagagaatttctttcgtgcttacttttgagacacttaacagattttgtgcattctccctattgcaatagtcttttcaaataaagtctgtctttactgaagtctggagtttgtaaatttcctcaacctcacactaaaagcttattcgcctcagttgctatataccctatatatcatgttggaatttcaacaaacattacaagtctaaaggcaagnnnnnnnnnnccatcttcagagccaaaacaaacattagaaccagtctcacgtatggcaaagatttggggattttcaggtagggaatgtaaaataactttgattaatatgttaagggctctaatggaaaaactagacaatatgcaagaactgatgggtaaagtaagcagagatggaaattttaagtattaat

SEQ ID NO: 296346 - DNA, 742 bp, Homo Sapiens
accaattaagccaactttgtacaaaaaagttgggcaaaatggaaactttaaaatcataaaaactatgataaaaggaacattaagctacatcttttctttaaaatttctgcacaacaactcattggcattgccccatcaaacatacaaccaatcacagaaaagaaactcaaatttgacagggcaaggcaaggagttactagcacaagaacagtgatcatgttaaacacccatgcagtcacctctgccaccattgtttgacaatatgtagactgcttccagctttgtcagtataataagacccaagagaatgaacaatgccgaattttaaaatgatgtgtcaaagtgttaaatggactttttgagaacctccattccttggggggagttaacgattagagaaaattcacgctacccctctcagtgaaatgaaaagaaaattactgcaaccaacagctagatatttagttggcatatttaatgctttattggaaaggctgttttattttgtttcagaaaaaacgcagtgggcaaaaacaaagtgatttctactgagttttctcttcttgagaatacagtcaggactagcacatctgaggtcaggagccacacataacaaataatggcatatgctaaggcttgtaatctgtccggacagtttctcttctacctggagctttctcgggatgaaaagagcagggaatccctcaaactgaaagaaggagatgagacaaaaccagcttac

SEQ ID NO: 296347 - DNA, 712 bp, Homo Sapiens
  misc_feature (452)..(501): n is a, c, g, or t
ttggcttaggaattacctttactacacagaagttttcaagaacaccggagggctattcataagcgctctgaaacatgagacatacatatgcaagatatgtcaaggacagggctgtgctctgtgctcagcaccatctggaggcattagcaggagtgaatccacttgtcttttttgtccttttgtgaatttattttccatacttatgtatcctgttccgggctgttcatgcacaacaaatttgacttttacaaaatctaaggccatcggatttttataaaagtcaaattttggtccctctccacacttaccccaaagaaaaaacattaaactttgatctaatgacagaaacattctctgcacacatgattggtttgatcactataatggtcaagaaaatggtttagcttattttaacatactcattctttacaaagctctaattagtggataannnnnnnnnnnnnnnnnnnnnnnnnnnnnnnnnnnnnnnnnnnnnnnnnnctctaaatgagactcataagccctttcttctgtatgtaacaaacaatacaaacatacctgattggtgagtaaaagtctgtccccaccccctgcaaataagtatttctgtgcaagatgaaacacacatttcatccagagagaagaagcctctctacagtaaatggagacattggatttatggtaccagaaaatttaactttgaattggtagg

SEQ ID NO: 296348 - DNA, 484 bp, Homo Sapiens
gctccttataaggcctactttgtacaaaaaagttggtttaaaatttattctttaaaatatgacaaaattacaacattatttttgtaattcaaggtttctggttttctagaaatgcaaatcattgccttatggtaaagtaacaggagctgatcaaagagcttcacctctgttatctcatttttaaaaaaattctaacttattttaggttcaggatacatgtagaggtttgttgcataggtaaattgtgtgccacaggggtttggtgtacagattattttgtcacccaggtaataagcatagtacttggtaggtagttttttgatcttctcccttctcccactctccaccttcaggaaggccccattgtctcttcccttctttatgtctatgtgtactcaatggttagctcccaattataactgggaacatgcagcatttggttttctgttcctgtgttagtttgcttaacataatggcctctagc

SEQ ID NO: 296349 - DNA, 313 bp, Homo Sapiens
acaataaagacaactttgtacaaaaaagttggcaaatggaagatggtcttagggtaaatatacaacattagctaaagtttctcaacatgaggactccgagtgtactacagaggcttttgatgtcttgtttccttcaaaaagggcaccactctattaagtttggaaacctgccttcgtgcccaaccattcagtggctgcaggccttttgcagagtacagacctggggcttgagccaaggggtgagttgtgtgtgagtagccatttctaactaagccaatttttataccaaaatacagaatgtagagctgccctg

SEQ ID NO: 296350 - DNA, 639 bp, Homo Sapiens
  misc_feature (344)..(370): n is a, c, g, or t
ttggggcacagagctccaaaagctagtgtactaatgagcaaagtgaagtgtttattgtgaacctacctgcaaagccacatattgtcagttcaactgcattcttttgaataaaacagttttaagtccaccaaggttcaagagaatgtcacctagatactacttttaatggcaaggtggtaacatcatcacatgtaagatagataacctagttgtcactgtctttgaaggtaacatctatgagaaccacgtactctttctgcttcatttgctcctcatcacttaccccaacattcagtatgttttatctttttatttactgtacgtcttctcaatagaatgtaagnnnnnnnnnnnnnnnnnnnnnnnnnnncaattgatttttcacagcacatagaagatatcctggaagaattcatagtttgacaaggttttgttggttggataaataaatgagagttgaggcaggtcactgtccagaaacagaaagtttattttacctttgactacgcacaagtcagcttcttcactagctcccttagattgctgaacaactgaatggcactcaaaattaatatcatctggcccttaaattgatgttcattgatatgtttaaagagatacctcctacacaatttggtg

SEQ ID NO: 296351 - DNA, 849 bp, Homo Sapiens
  misc_feature (199)..(340): n is a, c, g, or t
ttggggttattattgatgctgtttcatatggcttgtggttatcaaggacaaattggaattgactcctaggtcatgaggaacccagtcttgactgggaagcttataaaacactgaccccacacaataaggctgcctctgagaagattgtatccgcaaaccatgaacatctcattttatgttataaattatttctctgaannnnnnnnnnnnnnnnnnnnnnnnnnnnnnnnnnnnnnnnnnnnnnnnnnnnnnnnnnnnnnnnnnnnnnnnnnnnnnnnnnnnnnnnnnnnnnnnnnnnnnnnnnnnnnnnnnnnnnnnnnnnnnnnnnnnnnnnnnnnnnagtgttagagtatttgtagtgctgtggctattgttattatatttcttcatttagtaaacttatatttgttcttcctgatttaactgtttaagctcttctctgagaagtcttcttgaccttcgtaggcaaagttattcatctcttcttctctagttccatatttctttgattcctaagaaatgtgattataatgttggttcttacatctgtctcccacacgaatctctgtctgccactttaattggtgtctttccagagcagaaacagtgtcttcggtgtttccaccccgggtaccagcgtatctccttgcacatgtgaatgaaaaaaatgaatctgctcctggtaagtgtattggtaagtaatttatgctagttctagaataaatataaacataataaattaatttgcttagtccttcatgtttttaaaaggtcatttgattaaatatcacccattttgcaagaataaaagaatgaatccagtcaatgatcaatggaccgctatgcccg

SEQ ID NO: 296352 - DNA, 877 bp, Homo Sapiens
  misc_feature (189)..(225): n is a, c, g, or t
  misc_feature (523)..(564): n is a, c, g, or t
ttggcaactggcttggttacagcccagtgtttgccttatttgaatgctatttgaacagttggttataatatggacagaaggcagggaaatactgggtagaagagagcggtccctggcaaaggccctaccctcaagcatggaaactcacggccctaaatgggaagaggcattcctgttttcatgtccaannnnnnnnnnnnnnnnnnnnnnnnnnnnnnnnnnnnntggggacagtcagagaggagataagttgcgggatggaggaactccagggaaagatcattttcccactccattcgctttccaggcccctatccatcccactgagagccacctccatcactcaccgtccctccctgcattcaccatccttcaagtccacgtgacctgattctccctgggtgctggacaaggacctaggtaccaagaggtcagggtgtaaaagactgtcaccctgactttccactgagctggtttaacacttaatcagtggacagcaaatgctaaaagaacattaattgtnnnnnnnnnnnnnnnnnnnnnnnnnnnnnnnnnnnnnnnnnngctcacctgggcttctgcacttgtgcacctggcatgctccccctcccatagggatttgagtgcacagcagccaagcaaactagccacacccctgttgcaagtcccacaggggagtcagggaactttcttgcttcagtcacctgtgagtagttgaagtgtagcttctgtgattgactgagacagggctgcttgttacaagagtagaccatttacatatatgagagttagggttactgctcactatgttcagagaaaacttcagccaaactaataagaggcagctttaagctaaatttgatttaacaaaggcggc

SEQ ID NO: 296353 - DNA, 774 bp, Homo Sapiens
  misc_feature (125)..(133): n is a, c, g, or t
acaataaagccaactttgtacaaaaaagttggtgtgactattgtaaataggatttctttctcggtttctttttcagattgttcattgttgacatatagcaatgctactgattattgtgtgttgannnnnnnnnatcctgtaacttcacggaatttttttatcagtcctaacaggtttttgatggagtctttagattttccaaatataggattgtataatctgcaaacaaagataatttgacttcttcctttccaatctggatgtcctttatttctttctcttgtctgattgctctagttaggacttccggtactatgttgaattatgctggtgaaagtgagcatccttgtcacgtttctgtacttagaggaaaggctttcagtttttccccattcaatatgatattagctgtgggtctgtcatacatagcttttattatgttgaggtgtgttccttagatacccagtttttttagggttttgtcatgaaaggatgttgaattttgtcaaatgctttttcagcatcaattgaaatatcatctggtttttgtccttcatactgttgatgtgatgtaccacactgattgatttatgtatgttgaattatccttgcatcccagggataaatcccacttggttatcaatgatatttctaacatgttggtgaattcagtttgctagtattttgttggagatttttccatcaatattcaacagagatgttgcccaggagttttctgtttttgatgtgtctttgtctggttgggtaatgcta

SEQ ID NO: 296354 - DNA, 502 bp, Homo Sapiens
  misc_feature (117)..(259): n is a, c, g, or t
  misc_feature (316)..(422): n is a, c, g, or t
accattaaggccaactttgtacaaaaaagttggcagagtgaaggcatgatgactgacatgtggaattgaggtcctagctctgctacttactcactccctgatcttagaaaagtgctnnnnnnnnnnnnnnnnnnnnnnnnnnnnnnnnnnnnnnnnnnnnnnnnnnnnnnnnnnnnnnnnnnnnnnnnnnnnnnnnnnnnnnnnnnnnnnnnnnnnnnnnnnnnnnnnnnnnnnnnnnnnnnnnnnnnnnnnnnnnnnntaagaggccccacagagcttcctcaccccctcaccacatgagggcaaggcgaaagtnnnnnnnnnnnnnnnnnnnnnnnnnnnnnnnnnnnnnnnnnnnnnnnnnnnnnnnnnnnnnnnnnnnnnnnnnnnnnnnnnnnnnnnnnnnnnnnnnnnnnnnnnnngtcaccttaaaccataataggatgaatggctacaatcgggtgcatggactggaaggcatcagggaagaaatgcagacagt

SEQ ID NO: 296355 - DNA, 153 bp, Homo Sapiens
gggaggaagacaactccagcacaaccaatacttgaagccatgaagttgtaacctatctcagaaggtatccggttaacattctgttgaaagcaaaggcaaaggtagcccaactgtttaaaaacccagagaacaatattagcccacgaaaacttc

SEQ ID NO: 296356 - DNA, 245 bp, Homo Sapiens
ctctcttactataagggcacactttgtacaaaaaagttgggttaattttggtctatgatgaaaggaaggggtccaattttattcttctgagtatgactagccagttttcccagtgtcatttattgaatagggagcagccctttcttcatcgtctctttttgttgactttgttgaagatcagatggctgtaaggttgcaacattatttctggcttctctatcctgtcccattcgtctatgtctctg

SEQ ID NO: 296357 - DNA, 753 bp, Homo Sapiens
  misc_feature (374)..(384): n is a, c, g, or t
  misc_feature (586)..(614): n is a, c, g, or t
ttggctttcttccagtttggttctaaaccctgcaaccctcccacttacaaatgtaactctttaatatgttattgaaattatgcaaatcttgctaaaaatctagctcaaatcaaagtatatttatgtcttactttgatattagaaaattagggtatgtttcacagatttccaactatcataacatgtatctttttattcatgcattataaaagtaattttcttgcaaatattacctaaacagaatcaattagccatgaaactacacagcctttgaatgcattggtctgtatttgtaacaattgacccaaattcaattttctcagttgagttagcagaaagcatgttaaatagaacattgagacaacaatctgtgnnnnnnnnnnnaaggcaagattatttggatctgatttctgtccatattaggccagttctccacttcttctattatacttagtcatagtctaagcatgtagctatgactgtatcaaatattcattgctagtgccagataggtaaatatatcaaaagccaaagttataaagaacactttcacctagtcacaatctgagaacaccttcaaatgccnnnnnnnnnnnnnnnnnnnnnnnnnnnnngtgaatatatacttgcacaccacacttctttttccttcattcaacctttgtctggtgtcttacatcataaaatgatatgataccacttgatggcagctttgatgttgtaaagttacttcccaattcaactcactgctga

SEQ ID NO: 296358 - DNA, 774 bp, Homo Sapiens
  misc_feature (469)..(530): n is a, c, g, or t
  misc_feature (534)..(575): n is a, c, g, or t
taactatgttattgatattatttctattatcatttcaccaggtcccatggagtttcatacattttccagagttacaaaacctggctaacactgagtcaagttaggaatctcaatcaatatctttgaccaacttaaagtgtttgtagaatgtttgatgtacctaagagtgagtaaaatgtgaaagtcagttgctggaattggttgaatgagagtgtcgggtgaagaaggcaagacatgcaacagaggaagaggaatgtgtcatccaagaggggaaaagagaaatactattactatctgttgtcttggtggttctcatgaggagtgaaaggagaattgctaacctggaagaagatcagagaaacacactatacagtcctgcagtccttcaccaagtagcatgggatagaagctctgaacatcagcataattttgaggcctaaagtgtaagaattgctagaaatgctgtggnnnnnnnnnnnnnnnnnnnnnnnnnnnnnnnnnnnnnnnnnnnnnnnnnnnnnnnnnnnnnngaannnnnnnnnnnnnnnnnnnnnnnnnnnnnnnnnnnnnnnnnncttacaataacagatactcaaggttaaaaaataattgtaaaagttcaaacttacattagagtaaaagttatcctgggtgctgcaacctttgtccaacatgactcatgtaaccaatattaacagtgtaaccacaaagctttgtagtggaatacatgtaggcaattatttttacccaacaagatatactagcattggtttt

SEQ ID NO: 296359 - DNA, 839 bp, Homo Sapiens
  misc_feature (668)..(725): n is a, c, g, or t
ttgggatggccctaagaaactcatgcagggtgtaattaattttacaagctgctttgggcatggggtaaggaagaaattaggaggattctagtgttttaacttctgactacttacatgtttatgtttctaggcaattcatttttacatatggttccagggtaaaaatacaatttatttaaagtccgagtctattctaaccttctacgaatgtgcagtgtggccttttaatcaattttcctgaaatgtggctgcccagattaagcatccttcactcctcaactaagcttcccaaatgcttcatattagaatgttttgtcctctcgtctttttgacaacctttcttcagatttcttttctccatacttttctttgctactcattgccctttagcaatttcaccactattactgatatagtttcttctcttattagtttttgactattgcatctattctttgctctgcattatcgcttttctaagtagtgcaataccttggaattatgaagggcttgcgaatctttgcatcggattgatttactaatttggaggttatttgccttctctataattctattgcttttctgtcatgctttgactccatagcttgttagtatctgtcccaataagcccctcgattctggttgtcttggtgatgactctcttgtgnnnnnnnnnnnnnnnnnnnnnnnnnnnnnnnnnnnnnnnnnnnnnnnnnnnnnnnnnngctgtactcactttattaatttcaccgatggaggagcagaaatatactgcccgacaagttttttaaaaattaaatttaaatttcctgatataaaatctcagtgtgctaaaaact

SEQ ID NO: 296360 - DNA, 828 bp, Homo Sapiens
  misc_feature (200)..(212): n is a, c, g, or t
  misc_feature (521)..(561): n is a, c, g, or t
ttggaatgtccactatttagaaaatgtatagagaaatgacctggaaataatgaccattctaaagacacatgtaaatatctatagttttaaagcatattttaaaatgagataatttaacaaataagagttgcaatgataaaacaacaattatttcactaaagtctatattttaggtcatagaaagtgcttttttaaaaggnnnnnnnnnnnnncattcctgtgcagcattttacaaatttcaaagcatcattaaacaactgaaaagtgaatttcttttcaaaacaggagaggccatgcatctcttacaccacatctccatctatttcatcagcagttgtgttaaaattcctagatgagggatcaaaaagctttggaacttgaaatcagtttgtcctcaagactggtggttaacatgatatcattgactattggaaacaactgaaaaactcttttttttcctattagaacatcaaatacttctacagaatatttctattctatgttctaatgtaaaaatattnnnnnnnnnnnnnnnnnnnnnnnnnnnnnnnnnnnnnnnnngacaggtttgccagtactcttgctcggcagttttttctacttcatctgttagtctgccctcctccctgtctggaatgatctgcatagaaaggattgtgcaaattctcatcggccacaaacgttctgctcacatgtaccagatgaccctagtgccttgcaagaaacttgagacccatcgcatgatttctccagaatcagatccaacaggatgcactgctcctgctgaacaactaagaaacgttattttcaaccccagcttgaaacttg

SEQ ID NO: 296361 - DNA, 430 bp, Homo Sapiens
ttggcaatgttatcttctggaatacttatggtttcaggtcttagatttaagtccttgatccatcttgagttgatttttatataaggtgagagatgaagatgcagtttgattcttctacgtgtgccttgccaattatcccagccatttgttgaataaggtgtcctttccccagtttatgtttttgtttgctttgctgaagatcagttggctgtaagtatttgggtttatttctggattctctattctgttccattggtctatgtgcgtatttttataacagtaccatgctgttttgataactatgcccttataggatagtttgaagtaaggtaatgtgatacctccagactcattcttttttcttagtcttgctttggctatgcaggctctttttggttccatatgaattttaggattgttttttcaagtg

SEQ ID NO: 296362 - DNA, 606 bp, Homo Sapiens
  misc_feature (62)..(74): n is a, c, g, or t
ttggcacagctgccacataatcttgccaaaacaccactttaaacatgctacctcacttgccnnnnnnnnnnnnntacacccatgacttctgtcatgtgggaaattatcttgctgcaatagtagcctccaagttcatgaccacagagctatctctgaggtcacacaacagaaaggctcctagacaaagctaaaatgctcgaatcacatggtttattaaatcaacttaaaacacagagcaagatgcaagggaaaagggatggggctatttaaccaagttagggtagggtgcaagctaggtggaaggaccatactacctgaatctagggtgcacaggttcatctgttttgtatctttttctattgcatctccttccctgatgaggatgttacaagggccagcgttgacatttaagcaggggtacccacagatagatgtcctggtccaatgacacacttgctttttcagacagaggaagtcaagtttgcaggggcgtagctgtagcttgctaattagtttgatgagcagccacgattatatttgtatatcttgagcagagggcacatgggccagaataaatgtcaccaatagattgaattaaaacctcgt

SEQ ID NO: 296363 - DNA, 106 bp, Homo Sapiens
acagaaaatgagcagattgacaacatcagcaatgatgtagaagatctaaacatgattcttcactcttaccccactgctatataaagaggaaatccctttcttttca

SEQ ID NO: 296364 - DNA, 859 bp, Homo Sapiens
  misc_feature (136)..(395): n is a, c, g, or t
  misc_feature (406)..(423): n is a, c, g, or t
ttggcaaaagccacagaattttaacttgctattcttcatagtacctaaacaatgaagaggtcattgaacactttgtccctgttataaacatctgcttacaagaatggaatggagattaataaatgaactgtcctgnnnnnnnnnnnnnnnnnnnnnnnnnnnnnnnnnnnnnnnnnnnnnnnnnnnnnnnnnnnnnnnnnnnnnnnnnnnnnnnnnnnnnnnnnnnnnnnnnnnnnnnnnnnnnnnnnnnnnnnnnnnnnnnnnnnnnnnnnnnnnnnnnnnnnnnnnnnnnnnnnnnnnnnnnnnnnnnnnnnnnnnnnnnnnnnnnnnnnnnnnnnnnnnnnnnnnnnnnnnnnnnnnnnnnnnnnnnnnnnnnnnnnnnnnnnnnnnnnnnntggggggaacnnnnnnnnnnnnnnnnnntagaaatggactgtccctactctcctagaatttacagtctggaaagcaatcagatgtttcacatcagaaaggcatcacctccttatgcactgaaaacttttgtttaataagattacattgaaccccaggtaaaaattcttagagagtggccaagaagataaatgcacaaatatttcaacctatgttgaatatggtgatgattgattaataactctcacttaagaggcttagagaagaaaagtagaaattttcacaaagatagctcttgtttttgagattgtagttcctcctgttctcaaaagaaaacctaaacaatggcctttggggctttggttcagagcacaaagtatttaatctggttgctcctggaatgggccctgagaagtcacagtgggcagggagaggaatgttgaccctggctttcatttttgcttac

SEQ ID NO: 296365 - DNA, 481 bp, Homo Sapiens
ttggctattttatgtcttgatgttattgtaaatggaattgctttcttaacttcatttttggaatcttcttataactatacaaaaatacaacagatttttgtacattgatcttatatccttcaagtttgctaaacttattagtttaatagtttttaagtaaattccttaggattttctatacataagataatgtcatctgcaaatagagatagttttacttcttactttccagtctcagtgtctttttaaatttttttcttacctaattgccctggctagaccctccagcacaatactgaatagaagtggtgagagtgtctaatatttttgctggtcttaggggaaaacatccactgttccattattaagtatgatgtttgctgtgggggattttgtagatattctgtagctggttgaggaagttcttctattcctagtttattgaatatttttattattaaattacattgccttttataaa

SEQ ID NO: 296366 - DNA, 716 bp, Homo Sapiens
  misc_feature (487)..(535): n is a, c, g, or t
gttttaaaattccacataaagctgaaaaatacagattaaaaaaaattgccctcatttattaaacagataggccctatcttcctgctctagtgagtgaaaaatatatgttctcaaatttcagaaatcccatataaatctatgctaccatcttgtgttctaaatattgcttctaatgatctaaaacacattgcaagaaatgaaactaacatgatgtcaaacccttaaaaggagtccatgcaaaatgtctgtttgcttaaatatttttattttatcactatgctgaattttaaacttaatatttctggtatttattgctctctgttctttttcccagtgcattctgcctgttttatcttcgatagtccttcctacagacacaagagcactagtacatgcagaaacatatatactcacacactataaagagaagtaaaaagtgtactgttttaaagtccaaattgaccctatgttgtggaaatatcataannnnnnnnnnnnnnnnnnnnnnnnnnnnnnnnnnnnnnnnnnnnnnnnnaaagaaacgcctttattagtccattagattgtgacaggagtctaaacaggagaacattaccaggaaaaaactaaattgctatacatgataagtaggatgtttatgagttgtgccttctgctagtggcttagcactaaggataaagagaagtaaagatctcactcagatgggaattaacaaa

SEQ ID NO: 296367 - DNA, 846 bp, Homo Sapiens
ttgggatgctgttcaggtaacccaatatttaaatcatctttgccactcagccctaacttataatttgtatattaatcaagttttaatgaataagtggtatactacatgagtgagttacaaagtatttccaattaggtagagttcgatatctgctaatatcatcgtaataatggtaatcatatttgatgtttatttctaatagggccgttaaagtttttgcatggtttaaacctcagttaagagtcacatatctgaaaaagtagtattctttgataaatatgaattctctccttaggaccacaatttaaattatgcagggggaaatcctgaatttgtattctgacaattgcctaagttaaaattgcctgagaagacagacagtcccaatggctacctccatgtgaagtaaacttgtccccagagataaatggacagtactctaaggaaatccacacataaaaatctgaacaaactcatatttcagggaagatcattaatagtatcaaagattctttacagtggagaagtaagaggcaacagttgagtgttgaattgcctaccatgtgctaagctgtgtgttaggtagctcctttaaatgaagcggtggagttgggtttttttctctctcacagtacttgagattattacccagttttacagataaagttgctgtacctcagagagattacatgtcgaaccaaaattaagattaaagtttgtctatatcagcacctgttccttttaactcatccactgtggatttatttgtaagaatttccattctacacttaaatcttcatttactaatttgcaagcagtaagttagtaaggtaagttagaaactac

SEQ ID NO: 296368 - DNA, 572 bp, Homo Sapiens
  misc_feature (490)..(498): n is a, c, g, or t
ttggcatgaaatgaactatttaaacaggtttctaaaacctgctgagattcatatcttaacaaaatctttcaggtctcaaaataatttccatgatgccaggtagcaatagaactgtagggtcaaaaggcatgaacatcttaaattttagtagatattgtcaagggccctctgaaaaaggttgcaacaatttacacagctaaaggcaaactcttgttttattttatctgacctgtcctatatatgagaggaaataaaagactatgacatcaagttaatagctaacaggcaaaaccagaagtataccaaatttgtaaacaaaaataaacctctttattgtccccatttgcaccccaatagaaactcatgttccaggaaagatgagcaatgcccccaaactgcttttctggagaagcaaaagaaggacatggtaaatgctgaaatttggagttactaaagcaactattgggagtgggctcttaaacaacaaaannnnnnnnnactatctattctatgaaaatacatgtgtgaaaaaaatatgaataaggaaggtcattgaagcatactgtgtaatt

SEQ ID NO: 296369 - DNA, 787 bp, Homo Sapiens
tgagccaccacacccaatcatgaaacaataaattaatccaaaaattatacgaggagattttaacctctctgtctctaacagatctcataggtaaaaactcggtaaagctctaaaagatgtaagcaacacaacacataaacttgaccaaaaacatacagagccctgcactcatcaactatagaatttacattctttcatggaccagtgaaacatttataaaaatgaacggtatgctgggccataaaacaaaagtaatgatatatttcaaatgaacggggagctatcatcagtaatctttgaaagaagatgaagaaccagatgtcaatgggagattaaaacaaagtaatgctgacccaaagagagaaaaatcaaattctaggaactacatcttaaacgtgaattctcagtagcactataacctgtcatttcaaatttttgagctacataggacatgaaaagcatggaaaaagccaggccaaagtaatctcatttcctttttaaacaaactagtagtacaaacaagtagtacattctgatttcagaaagcattcaataccgtttctcatgaggcttcaggtaataagccacaattatcatgagtcgctctcacaaaaagactcttgcaggcaaataaagcaaatggagaaatacagtctggatgacagcataagtggatcagtggctggttaaacaaccatattcatactgtgatgattattggagcaatgtcaattttgattacaagtttccagtggtaacatttacagggctttgtcttgtatcctct

SEQ ID NO: 296370 - DNA, 689 bp, Homo Sapiens
ttggatctttcactaataagcagcaagataatcgagcctaaaaaagagggttacactcagaaatttggtgggaaatagcagctacaacacccagttggattaaattaagcactgattacatacagttggtcagaaaggtcacaatctatgccttcaaatattcaattattgcttcaaataatcaatgatcacaaatacctgttttttaatatagctgtttgtggagagtaatgatatttggctggattataaatctcattccaaacctgaggacagaaatttaccaattactgtacgcatcctaactggcatctaaaggcagcaatctttacagtcttgaggaaaaaataacctaactttaagaaatgagcttttgatatctcacttataacaatgaacaaaaatatcatagcatcccccaaatctgttttcacttcgtctatattattgattaaatgatatagcctcttgtcagcaatgattttcatggaagatgactaactttgaccaaatttgttcctaaacactattagaatctaaattgagttttgaactataaattgatctgccatcttgaaatattttcacctacttttataatctctagtttttattgttttgatcaaaaaacacagaaagaaatatcctttgaaaagaggtctaatcatcccttttaaagtaaactgcac

SEQ ID NO: 296371 - DNA, 800 bp, Homo Sapiens
  misc_feature (157)..(221): n is a, c, g, or t
  misc_feature (397)..(421): n is a, c, g, or t
ttggaaataaggcatatttgaatgtcctttcataacctaaaactggttgatgctttaagagtagcccttccaaggttagaaagaaaattttatttgactgcatataaaatggacagcttttccatttaccctattaaatttggccatctagttttcnnnnnnnnnnnnnnnnnnnnnnnnnnnnnnnnnnnnnnnnnnnnnnnnnnnnnnnnnnnnnnnnncctgatacagtatttcttgcttcagtgattcccgggaaaagagcccagttggtttaatgttttattattacagactacctcatgaattatagagtattaactctacattggtagagttttcaggatggaaaagaagagttattcatgctacttaatacctacaaatttatgacctnnnnnnnnnnnnnnnnnnnnnnnnntatttttaaaattcaaattactcccttttatgtcacctcctatgttagcagaaattatgaaaaatacttgttctatcaattaattgtattgtccaatgactaatattttctatatgccaatgcacagtttcttggtcctcatattcatatatcacttttgtgtcattttaaagagtgtccttccttaattattacacattagtttaaataccatttaacaatgtcattttaaaacctatgtactaaatccacatgcattacataacttcaggcaatcagttaatcttctttccacctgaatcagccttatttattcaaaagggaattacagttcaaggtggtcacattagataaaagtgatgagtgtctgcagaccttg

SEQ ID NO: 296372 - DNA, 895 bp, Homo Sapiens
ttggggcgccaggcaaggtgctaggcatttttgcataccttatttaattttatcttcagtacaacaaagcaagggaagttaagatatggagaaagtcaagtgtcagctagaagcagaagagtaggaactcacactcaggtcagttctattgcaaagctttttttgtctcaccagagctgtcaatgataaaaccctaaattggatggattatagggtctggccagaacacaggacaagatggatctttagctggtaaacaccagtatggccatatcactgttttaggccagcatctgttctgcttggtcagtgcccaagacctatcatttgttaaatatttaggcatcattgttgcccatatcaaaatgaaatgtttgccaaataccaaatgtttgacttttactctggcaaggagagagtaacagtgactggatatggtctcccacctgaaacaactaaaaagccagataaagtatatgaaacatggttttcagatactgggcatgaggtaatgcaagacaatgattcatgaaagaagtaaaacaaagtgagccatatgattgccccagcttattgccaggagagtttccgggctacagcacagggaagaggaactctggtaaagtctgacagtctctctgagtaaagaaatagttggtagtttaggatggcagcttagagttcatagggtaaagtaccagagagaagagaatagcacacatgtgtgcacacaaacacatctctccctggagatataaagcaagtcttgagttgagaactaatcagtgtatgtgtgtgataaaactacactaagctaaagaaagaaacacccaaaaggtttagaagaataatccataaagattacaaagactattctcatcagttagagtagaaa

SEQ ID NO: 296373 - DNA, 266 bp, Homo Sapiens
  misc_feature (160)..(168): n is a, c, g, or t
gcgataaaggccactttgtacaaaaaagttggggacaactttgcctttcaaaaaagagttggaataattttaatcttatattttataattgtgatcattttctaagttctctataaaatgcatatgcaattctaatattcatattcaaaggtgtggaacnnnnnnnnncagccataaattttgaaccaaggatagtgtatgaagttctaatatctttaatttgcctttgaagcccagaaaataagaagggagcagcacatttggaa

SEQ ID NO: 296374 - DNA, 279 bp, Homo Sapiens
taagaggaaaggaaggaataaactagggcatttgcagttggaatggggtagagggtatggaggtaagagccatttttgtagggaggctatagtggtgattcgcggtcttaccaccaaatgcgagtccgcgaaacgactgttttagactatcaaaataccaaactggcacaccgccggaaccccccaatggttgatgcggacttgctttatatttgatttgtgacggtcgcgccagagaacgaaatggcctcttgcgcttacgtctatccggccccggtg

SEQ ID NO: 296375 - DNA, 404 bp, Homo Sapiens
ttggcttgactttaataattgccattctgactggcgtgagatggtatctcattgtggttttaatttgcattctctaatgatcagtgatgttgagtttttgaaatatgtttgttggctgcataaaggtcttttttttaagaagagactgttcatgtcccttgcccactttttgatggagttgtgtgttcttttctcataaaattgtttaagttccctataaattgtgcagagggctttaaatgcattatcttactctgtaaatttctattagtaaccctgctttccataagagagcgctattaaggctcaccagtgggttagaaatatgaccaaggacactcacatagtatgtgactatagtccggttgaatagctgtcccaaaaagatatatcctccaaaaatg

SEQ ID NO: 296376 - DNA, 422 bp, Homo Sapiens
aagggggactttgtacaaaaaagttggataaggtcagtctcctcatcatcttcacttcatgaataaataaacagaggcacagacttgcccaaacttggcactaaggtatttaacccatagtgtgccaagtagagtgccagattttaaacctaggaattataacagtatggcatatcaattatcacttgatatatcaaggatcatgtctttgagattactattaaaaatatacggcccaagaagatcagctaaaggaaagcactaaagaaactgcaatccaccatatgtgaaggttaaacccaccttgaaaacaagtttaagggacacttaatacaatcttcttgtctattctttacaaaatctatattacagcatttgtattttgacgcaccccacaacaaacacaggtttatggtacaaac

SEQ ID NO: 296377 - DNA, 161 bp, Homo Sapiens
cgataaaagaggaactttgtacaaaaaagttggtatttataatgccgatgcatttttctgattaatctaaaaaatatccaccatttattaaaaatcttccctataattgaataacatgagtagtttctcttttttaaatacctacattgagcatacttttg

SEQ ID NO: 296378 - DNA, 739 bp, Homo Sapiens
ttgggggactttttgtgcctaatgccaacctcatttgcctacataatgattcctatattccactcattgccttggagaaagcctgacagaaactgcatagaaattgctaactttccatctttttagggcagttcattatgagtgtttaggcttctgttatcatatgggctcaccacaatcctggtagtttcttatttattttgaaataggctaatgatattaagaactgtgaaagttactctagaaactttcattttcttcttggctccaatgtgaggtttccacatgattatactgcctgtgatagtgtatttttgtaaatagaaaaaaatagcaacattcactggaattgactggaagctcttggaggacataatcttaatcaactttgcttattcctcaagcacccaacataaggttttgttagagcatgtaagaaatgaatgtttgttgaaaatgagtagaactgcatgcacagacaggtgacctgtctttgttttggctcttaaatgtcctaagctccaaagcaaccatgaaaggtcagcaaactagtgtgcttgagcagctgactttagctatcgtaaaatccatttgcatttctgtgaagatacacttagaatataaaccccctaattttgagccagtaaacaaaacagtaaaagagatttactgagcacgtggagaagataaacacaagtttagctgaaaactctaacatacaatgcattcacgctggagt

SEQ ID NO: 296379 - DNA, 794 bp, Homo Sapiens
ttggggaacatgcaatttcatagcccaacttgtagcctaagccattccctcctcccaaacctgctctttcaaacattattactagcctgatcccattctagatcctacatatatccaatggagtttatgccttcagcgtcaacctttcaaggaacttgtgctatttgttggagttagtcctccttaaactccctatgttatccactgttgtaaaaaacaattactgttatgatgtaaccacaaactgtcgaagacaaactgtcacagctaacatgtaagagatcagcaagataaagagacctaggtgaaagacagaggctcacaatatccataaaactggaatttgttgactccaaacttgacaaattgctccagtgtacaaacggagctgttaagaatgagaatttggaatatcaggaaaaccaggtcattttaatctttgctttttggtgttacttctaatgctaaataatcatgataagtgacattctgttaggtttatctgactacacttcttgggaacatgtacattagctgaagaatttcagttggtcaagaagtctcaagtagtatatgtgcaataaaacataattttacctttctacaactgtgatttattctcttcctcacatttaaattgtcacctattctcatcaaattcaataatctcaatatatcgtcccattacaagaaaaaataagttcaaggctatgtaaacacaagattctgaaatataactttctgtgataagtcttaaaatagaattaagacttatcaaacatctgttctgctgc

SEQ ID NO: 296380 - DNA, 818 bp, Homo Sapiens
ttggctttgagaagcccaaagtgaggcccagtgaggcacataacacaagtaaatgttatggggtcctaaaggcatgagatggaaaaggtttgaatgtagaagatgacatctgagccaggctttgaagaatgagtgtgtttgcttgctggttgcttaatagagctgattgtttctgccaccagaaagggcctcctaaaatctcctgtctggtccacatagattttgccatctaaagggcaaaatcacagacatgctaagtttgttcaatccagcaggtcaaacaaacaactccaacaacccaggccaattgccttgctcccctgccctagttggactgccatttataggaaaaatggaaacagagatgctgacctctggctgctcgggcctgagtccccctggagcttcaggctcgtgcaagaactggcttcagaaattcacccctgtggggggtcttcctattctggctgctcagacctctctgctgtgctaaaaagtcagattgtgttatttatgtattaaaaacaacaacaaaaataaccttttctttccaaatgtcccatgtatggaaagccaagccttcagcagctcattaatatgttgatgttttaaaggactaagcttccaggccctgaaacaggagccaggcctgctggccttggccttgagatctcttggctctccctattaaggccccccaggctcctcaactttagctcctggcggtcactgctctgagcaatgctgctagggaacacagtgaagagcagagccaattgcaactggagccacgtctgcctctgtgatgatgtcaaatg

SEQ ID NO: 296381 - DNA, 858 bp, Homo Sapiens
  misc_feature (414)..(711): n is a, c, g, or t
ttggattattgcaaaagcatagaaatattcagatcatgtggagtatgtacatccaaaatagataatttaaaaaattatcttgattctgccattggaatttttaaaacaactttactgaggtataattcacatactgtatggttcgtccatttacagtgtacaactcaatgtctcccacaatattcacaaagttgtgtaaccaccaccacaatcaatattagaatattttcatcaccccgaaaagaaattctgcatctcttagccatcacggccgccctcttccatgttccttcactttcaccattcctaggcaaacaccatctactttttgtgtccatagatttgtctgttctggacatttcatatagataaagtcatacaaaatgtagttttcttttttaaaattgtattttnnnnnnnnnnnnnnnnnnnnnnnnnnnnnnnnnnnnnnnnnnnnnnnnnnnnnnnnnnnnnnnnnnnnnnnnnnnnnnnnnnnnnnnnnnnnnnnnnnnnnnnnnnnnnnnnnnnnnnnnnnnnnnnnnnnnnnnnnnnnnnnnnnnnnnnnnnnnnnnnnnnnnnnnnnnnnnnnnnnnnnnnnnnnnnnnnnnnnnnnnnnnnnnnnnnnnnnnnnnnnnnnnnnnnnnnnnnnnnnnnnnnnnnnnnnnnnnnnnnnnnnnnnnnnnnnnnnnnnnnnnnnnnnnnnnnnnnnnnttgtattttagattcagaggatatggtgcatgcttgctatgtgggtatattggtggatattgggcttctagtttacccattacccaaatagtgaacattgtacccaaaaggtaatttttcggcccttgctcccttcccaccctcccc

SEQ ID NO: 296382 - DNA, 806 bp, Homo Sapiens
  misc_feature (48)..(327): n is a, c, g, or t
  misc_feature (329)..(345): n is a, c, g, or t
ttggcagaacacaaaccatactggttctataaagatttccttcttgcnnnnnnnnnnnnnnnnnnnnnnnnnnnnnnnnnnnnnnnnnnnnnnnnnnnnnnnnnnnnnnnnnnnnnnnnnnnnnnnnnnnnnnnnnnnnnnnnnnnnnnnnnnnnnnnnnnnnnnnnnnnnnnnnnnnnnnnnnnnnnnnnnnnnnnnnnnnnnnnnnnnnnnnnnnnnnnnnnnnnnnnnnnnnnnnnnnnnnnnnnnnnnnnnnnnnnnnnnnnnnnnnnnnnnnnnnnnnnnnnnnnnnnnnnnnnnnnnnnnnnnnnnnnnnnnnnnnnnnnncnnnnnnnnnnnnnnnnngatttctttcttgcaatgatagtttggggtcaagtttatcggttaattactttttgataatcagacattgacagtcaccaagttattgagagaccaacttcaatcacaggcaactgttcctgatgatcgaatcctcctaagtcattatcaccatcactgggaattctggattacacagaactgtgaactgagcccacatatttcacaaaaaagtccagcacaagaaaagataagatcgtttcctagaatttattatacaggatttgacttttaaaaaccactatttcactacaaagattgatgtatgggaaaggagaacctggcaatgtggtactattgaaaggcagaagctcaaagatatcagataccaatctggtgtctatccaaagacaacactagaataaaaaagtatagatcattcttcaaaaatattcatcccctcccattgatactctttggga

SEQ ID NO: 296383 - DNA, 638 bp, Homo Sapiens
  misc_feature (42)..(56): n is a, c, g, or t
actgctatacttcagattgggtgacagtaagatcctgtctcnnnnnnnnnnnnnnncaagattcagtgttttgaatgttttaactgaatttgttactctagttatttctcttatttactattgtgcaatggtaaaattcactaaaatgtctgtgcattttataaaaatgcctatcagaggtgagaggaattatagacgactgtattagagttctccatagggacagaattaataggatatatatttatatgaaagagagtttattaagaagtattggtttacacgatcacaaggtgaagtgccctgataggccatctgcaaaatgaggaacaaggaagccagtagtggctcagtctaagtccaaaagccttaaaagcagggaagaatggtgcagcttttagtctgtggccgaaggctcgagagcccatggcaaaccactggtgtaagtccaagagtccaaaggtggaagaacctggaggctgatgttcaagggcaggaagcatccagcataggagaaagaagaaacctggaagactcagcaagccatcttcttccaccttctgctgcctgcttttctagttgctctggcagccaattggatagtgcccagccacactgagggtggatcttcctctccc

SEQ ID NO: 296384 - DNA, 215 bp, Homo Sapiens
  misc_feature (67)..(126): n is a, c, g, or t
gtaccagtgaggacagaaacaagaaaggggttaaaattgtgtaggtttttaaatgatatcctggatnnnnnnnnnnnnnnnnnnnnnnnnnnnnnnnnnnnnnnnnnnnnnnnnnnnnnnnnnnnntgagcacacaaaatatgattcttttttgtgtttttgaatagaatttcaaccaaggcgtgtgaaattgggcacgtccccccgcgagagcg

SEQ ID NO: 296385 - DNA, 227 bp, Homo Sapiens
ttggagtcattattgatatattcatttatgtccacaaattttaaaagaaattaaaatattttcttgatccctaaaagtatcatgagccctagacactatgtctgctgcaccgactgggcaagttgccctgcttgctctgtatcttcttcaggatcatgtgctttgcacagccagattttcatagcatcctaaccttcttagtcttgccttccaatacgcttatgcca

SEQ ID NO: 296386 - DNA, 294 bp, Homo Sapiens
  misc_feature (65)..(73): n is a, c, g, or t
ctattaagacaactttgtacaaaaaagttggaatttttgatgcctcaaatacattagatggtgcnnnnnnnnngctaagagttttgtgagaaaacaattcagaaaaagccaaagaaggaaggaccaaaattatttttgcagaaattataaaggtacatgtcaaaatttaaaaattacacttaatttcttactgataaagtgggcatctccttgctcaaaatacttgtcaaggtgaataaaatagtgatggaacacagaagctgatgccattacccttaatcagaaataacttaa

SEQ ID NO: 296387 - DNA, 301 bp, Homo Sapiens
  misc_feature (248)..(260): n is a, c, g, or t
atgaattttccctcacagagcgatcaagattgttccctgcattctcgtcattggcttcttcctatggcttaaaaatgtgggccgcgattcgaagatgggggggttaagctggcaagaccgcggttagcgattgacgcctaaatctgggcaatcaaccggcccagtaatgaacgaaggaaaaattagaactctggcgcgggcttccctttgtattagataaacagagggcgaaccacgggaaccggaannnnnnnnnnnnnaaaaaattacgtatcccttaatgtctttttgtgcgcccccc

SEQ ID NO: 296388 - DNA, 867 bp, Homo Sapiens
  misc_feature (95)..(158): n is a, c, g, or t
ttggatagattgctaactttaatttatttgtgagacagaactatagagaatttcccttaatttatggtgtaaatagagtatatatgacctctctnnnnnnnnnnnnnnnnnnnnnnnnnnnnnnnnnnnnnnnnnnnnnnnnnnnnnnnnnnnnnnnnataaaatatcatacagcattttctatactttttttggaggttaatttcagcatatacatttggtaatactgagagaaatgagagtccaaattttatttttcaacagtttcctcctcttctccataattcaccaactaatgccatcatacagaaatttgtatactgtttcatttattaatataaaacaaatagacaagcaaatgaccatggagtaagcaacaggccctattggagactgagtagacagagtctattacacaactttatgacatgtcaaatacaggcccacgtgagtggagtaggcagtacctaatttctaaaatcttaaaagacaggctactatttatgggacatacagacactaacataatatttaaaataagaaagatatttgatttaattcaaatgaaactatttgtattcatccatggctgacctgatacttttcagaacaaataaagttatagtgtccttgatatggtggatctttataaaatagtagtatataatacagcacttgttttatggtattataataatttggttaatactaattatatgctctaaatttaatctgcttagaattatatttctgaaaataagatcttaagttacattttctgctttttcaaacttatagtagtttcctatgtagtaggaatcaatgatcattaaaaagttttatactaattatattatgtggatttga

SEQ ID NO: 296389 - DNA, 884 bp, Homo Sapiens
ttggggacctacctctctctaaaactctcccaacaatgtaacatttccattaaataagaagagtgctcagtgacaaacggcaaccacacttggatagttcaactccatattttgcctgattcgtaaacaagagccccaacctgcctttccatttgcttgggtttagcaaatggatttgcttctgatttttgagtgcttcgagttagcttagcactttgcaaagtgtgtaagggagggatgctccccagagaagaggccgcctgacttctgaagagggagtgagcagcagcattcacgagctgagaagcagaggagacaacaaatgccctcttccactcgcctcagctgaagcagggtgcccaatttcaggtgccccctcgtgtcaggaaatgaagtaaatcaatgactgagagggctctaggctggctggctggaggactggagtttcatatgcactgccttcagctggctgatgggttctattccagaaaggagttattcagcctagactggggagacgaaaaagcaaattcaatggaggttcataaaacttatgaagcatatgcagaaaagtacctcagcaactcactcctgggccttgtcccataaataacacaaggacaaagcagtgaggaaaatgaaactggagactggggggaaaagatctctttttcacaacaaggagtttaggtgatgatctctcctgcagcaggcagtggttgccagagcacatgggacggtggcagggcttcagagaggtccatttcattttaacatttttaccacttttggtatttgtaggtatgcagtactggcacttcttgatttaggatgtagttgtatgtttattagaagaggaagaactcagagggagattatttccc

SEQ ID NO: 296390 - DNA, 129 bp, Homo Sapiens
ttggcaaaaaacaggttgtcaagtaaagaagctgacgctcaggaaggtgaaggggacgagtccaaggacactgccggtcaaggtgaaatggcctggaaccctggcgacccaactccccattcagtgctc

SEQ ID NO: 296391 - DNA, 888 bp, Homo Sapiens
ttggcaggacaccacaagattgatcacgagaaatccatgcctctgttttcagaacttgcttgcatctttccctatgtggcactccagaagccagtaagttggaggagtttgattctacccagagagaagtctatgaagactgcaagagtctaaggaagtaaatcaaaatagcagtgtatctagcagcccggtgacctatttcctgaattggatgttggaatcgtcttcccacagaacagccaattgtgatgtgttagtattttcatgctgcgcagccctctggcatggaggcgctgccccattccttcccaaggaaattccactgcaggcaatgttatgattagtggactaataacacttgtcgttggaacactcagacaaagctgcaatgtggactggcctccaagtcccttaatcacctatttcatcatctcgacactgaagccctggcaatagggatggacttgtggatcccaataattaagcaaagggacagctgcttgcttgcatggggatctcccttccttccattcataatcccaagccaatccggggtgttaactggtgtggttaccacatctaatactggatggcagctagaaaaagagacgctgcaagctaattctgaagcaagtcacctgcctgttcactcctaacattcaggcacacacattttccttgtgattagcttgctggagttctggacaggggccagggaagaggccaggaagtgtgtgtgtgctaatgcacctgcccctaattgggagcaccactgatccccaacattctagaggtgtgctccattacccttccttctgacattgcatgggcagttggaaaggagatctggaagctctaaccatgctgacgtcgacgaaaagctagttt

SEQ ID NO: 296392 - DNA, 801 bp, Homo Sapiens
  misc_feature (398)..(410): n is a, c, g, or t
ttgggccaaacatgccaggtaaaggcaataataagtaatctctcagcagcagcagatagaatggagaccatggctgtggggatgtccttctattcattttaatttgccagtcagaaaggcaacaaggtactgatgaagtcctgaacaagatccagtggtgttggttgatgtagaacagcttaggagtatccctatcctatacctttcctctattgacacagttcagccaatgcacagacacagttccaggaattggaactttgaaaagcacatacttctgcttaggtagacctgggggccagatgacttaggaagctatgttagttatttatgcctgaagaggagatgtaatttttattagatgaagaaacagaaaatgggagagtttcagaactcannnnnnnnnnnnngatttagatttaaacttatcacatcaaattgttaaaacaggaactaattctgataatttccttagtattaagatttaaacccttttgcttgatccagtcacagaaaatgtcattagcaagcttggtgatttggttgtagcctagcctaaatttaacatgaaaagcattgggctttcataggttgcatggagttatctagatctaaagacttttaggaatatttgagaaaatatttacaaatacttataatacattttcccctataacttcagtgtaattgattggctttgtgaagaaactggtgatatttgagaattctgaagactcatggggatatataatatctgagaagagattaaaaagttttggaagaaaagagatatgaaaatgc

SEQ ID NO: 296393 - DNA, 865 bp, Homo Sapiens
  misc_feature (432)..(450): n is a, c, g, or t
ataggtggaacttcacttttcattttatacacaaaagcccctgtagaagcgactccattgtcttgtttttatcacttattctaggtaaatttggctcttgaatctttcaatttaagtccattttggattttgaaatgaaagatgaacagaactcaagtacacatgtgtaggttagacacttggaaggtgatgtgaaatatatcaagaatattatatgtactttcttataaaagatattcagctttgttttgtttattgtttatctttcatttttgggtggcccaattttcttcagacctgacctctgcactgatggagtattcaaaacttgaaagaaactatacaaatattatgaatgtgcatgcccatgtgtggatctttgagttgcaagaaccttttatgtagggcaaacattagtattcctcatgtttnnnnnnnnnnnnnnnnnnnggtgatatgattgtgacttgttgaagttctgaaattaactaggcaaaggacaattcgaaaggcaattgtccctgtcttttgtatgaaacacagctttgagatcagaggtgttggttgagagtgtttccaaaacccaagtgtggatcttgttcacgtgtgtttagcaaatctcaatgactgaacttgggcattgcaagagctcccttggtcccctccccataccccactgggatgcacataatacagctgtactcaccttgaggttgaaatacgtgtagagctgatgagttggagaaaaagtccccagcattccagaattagatttatctcttgtcactttgcttaaagtatgcacgtgtttgagggactttgagaatcataatactattgcttcctttcatattataacagaaaa

SEQ ID NO: 296394 - DNA, 630 bp, Homo Sapiens
  misc_feature (152)..(164): n is a, c, g, or t
ttggagctctctagctctcttgctatctaatttgaacttagcagcatcaattcttcactgcctttgttttctcagtggtcttctgcttaatgtaaccaatgcttaatgtaatcaatagaaaaaaaagtcaattgattgaccgagatttgccnnnnnnnnnnnnngtgcaagatcatgtactatagaagaacgcatctcctttagtcactagtttaacaatcacttattcatgcaacaaacgtttattgagcactgtattcatttcctgtggatgctgtaacaaactaccacaaacatagtagcttaaaaccacagaaatctattctcttacagttctggaggccagagctctgaaatgaatcttacggagctaaaatcaagctatcagcagggctgtgctccctccagaggctctaggggaaaatctggttttttgccttttcgaacttctagaactgcatcccttggttcctggccccttcctccatcttcaaagccagcagagaagcctcttacttcagtcatcacattgacttctgttgttgccaaatctccttccgcctccttttaataaaaacacttgtgattacatttagggtacacccagataattcaagatattttccacat

SEQ ID NO: 296395 - DNA, 140 bp, Homo Sapiens
ttggatggcattgacataaagataaacagagcaacaggacagaagagagaatcctgaaacagacccaccacacatggacaactaatttttgacaaaagagcaaaggcaatttggtggagaaagggttactttttcaacca

SEQ ID NO: 296396 - DNA, 464 bp, Homo Sapiens
  misc_feature (316)..(327): n is a, c, g, or t
ttggggtttctatctctctttaagattataagtgaatgtaaaggacttttcctgctggattttatagatctaaaacagaaggcctggattaaagaacatttacgtttgaattttcgctccaacatttataaatttgtgtgacttggacaaatttcttaatctctctgaggtctagcttcattaccttaaaaactggctaattaatgatctacctcttaacatttaaggaatgagatattacatctaaatcccttggcacagtttctgatacataaggtaaggagtgcttgacaaatgttagttgttattattggcnnnnnnnnnnnnactcacctctactcaaacaaagattaagccctagtactccccagaatatactggatttagaagaggaaaacttaaattttgttaaatacaaacagactttcatgttgatgataagcaggaatttattaaattgatgg

SEQ ID NO: 296397 - DNA, 212 bp, Homo Sapiens
gcgataaaagagcacctttgtacaaaaaagttgggtttttccagactcctcagagagactataaaaactgaagaaagaaaccaaaccctgatcaactaaaagggaaacccacatattacacgccttttgatatgggtaatacatctgcaatacacagcaccatgacatcttcctgcctgaaaaatggaatctgaactaatcaagactccagg

SEQ ID NO: 296398 - DNA, 743 bp, Homo Sapiens
ttggctcacttatgatgggatcaggtcttgcccatggtcctcctccaggtgaggtgtacacctacaaaacaaactgggtacttgccctatgaaatattgttcagaaggccacccgcaatcattaatcaaattagagggcatttaaaggagttaggagagctaacccttagaacacagatgcaggcttgaggagtggcaatgcaggaggtaaaaggctgggtaagggaaaggatacttataagtctaagagatgtagtgcatccacataagccaggagactctgtctgggttaaaaggtggaatccaacaaccctggggcccttatgggatgggccccatattgtaattatgtctactcccactgctgttaaagtcgcaggtgtcacaccttcgattcaccatagccagccgaaaccagtggcagcagtgactcctgacgatgaccaatgaattagccaacaagacacagatcaccccgcctgaatagtcctacggcgaaacgcaaccaccagtaagaaggacaactgccctgctctgatcacagtggaagctggtcagtctacgcgtggctgaagcttgaggatcctgcaagctctactctagtcacatcccagaagctgactagtctatgcacagctgaagctaagaggaccatctccagataagtaaatgtggatacaatttataagcctagttataattctgtcaatactgattgttctgttgttatgttattacagcaa

SEQ ID NO: 296399 - DNA, 678 bp, Homo Sapiens
  misc_feature (495)..(547): n is a, c, g, or t
actagaagttttacagttttaggtcttatgtttaagtctttaatcaatttttagttcatttttgtatatggtatgaggtaagggtccaatctcattcttttgcatgtggatatccagttttcccaacaccacttattgaagaaattgtgctttccccatgtgttttgttggcaccttcatcaaagatcaattgaccttacatggactatttctaggctctctattgtgtttcactggtttgtatgtttgtctttgggcccgtcccatactgtttttattactataattttgtagtatattttgaagacagatagtgtgatgcctctagctttgttcttcttgctcaagattgctttgcttatgcagggtcttctgtggtttcatacaaatttcagaattttttttatttctatgaaaactgcccttggattttgatagaaattccattaaatctgtagatcactttggatagtatggatattttaacattaaatnnnnnnnnnnnnnnnnnnnnnnnnnnnnnnnnnnnnnnnnnnnnnnnnnnnnnttctttagtcaacattttatacttttcaatgtacagatctttcacttccttgattaaatttatttctaaatattttaacctaattatgctattgtaaatgagattattttcttaatttctttcttaaatag

SEQ ID NO: 296400 - DNA, 818 bp, Homo Sapiens
  misc_feature (268)..(318): n is a, c, g, or t
  misc_feature (356)..(402): n is a, c, g, or t
  misc_feature (458)..(614): n is a, c, g, or t
  misc_feature (731)..(742): n is a, c, g, or t
aagtctataagggaacacattacaatgtcaagtatatcatgacctctgaaatcaataattggtgattggtaattataatggtacagcacttaataacagtagctaaattattttcatggtgagtgcactactagacttgttaagccgaaagtattctctgttttaaaaacacttttattttaggttgggtgatacatgtgaaggtttgttgcacaggtaaatttgtgttgcaggagtttgttgtacagattatttcatcagccgagtnnnnnnnnnnnnnnnnnnnnnnnnnnnnnnnnnnnnnnnnnnnnnnnnnnnatgagaggtgactggatcacggggccagtttcccccannnnnnnnnnnnnnnnnnnnnnnnnnnnnnnnnnnnnnnnnnnnnnntttaaggagctcttccccctttgcttccttcacacactctctcctctgccttttgnnnnnnnnnnnnnnnnnnnnnnnnnnnnnnnnnnnnnnnnnnnnnnnnnnnnnnnnnnnnnnnnnnnnnnnnnnnnnnnnnnnnnnnnnnnnnnnnnnnnnnnnnnnnnnnnnnnnnnnnnnnnnnnnnnnnnnnnnnnnnnnnnnnnnnnnnnnnnccctctctctagttttctccttttctagtatgtccccccttgattttcagtggttgtggttgactgatgaactctctttgctggttaatcaagcaaacttgtacgattttcatcagnnnnnnnnnnnnctctacaagtacaaactggggcctccccccagggtagacatttcaaaaacaggaatctcaccagacttcgttccct

SEQ ID NO: 296401 - DNA, 942 bp, Homo Sapiens
  misc_feature (600)..(617): n is a, c, g, or t
ttggtaattatacagtctatagatcatggattctgggtatttcatcagtcgacattcagtaagtgtagcttgtgtagttgctttaaaatatgtgatcaattttctgacatcatgaaagtatgaaagtacccatgaaaagacttcttgccacctgaataatttagtattcatcctaattggtgacttccaggacttgtcaaactatttatttgattaatgtctagagcagtgacatcctcagagtataaattttattttacgctatcttttaaatgagagagttttattgccttcaaattctaatctgcctagtaattttttccccatatttgattcttttttggagcactcatcaattcatactcagcctatgaatccaaaagcactcattaaggatttttaaacatactgcatgctgagaccattaaagggtttgattaagttacaagaatactatatatatttgctcagtgaatattatttcttaagataatctgtccaaaggatacagcatctatttatgagtttgtctaagtttatccttgtatgaaagaaggtgaccctaaaaacagctgagccataattatttcaggcttctannnnnnnnnnnnnnnnnnccacttgactgggttagagtcacatatactccttgccttttaaaaagttcaataccacatttgcctatttgaacaatgtttctgtaataaaacaaggattacaatgactcccctacgtttagtttcagagaaacccttgcctttccagaaacatttgtaagcagtgttgaggaagagtttattggaatatttgctatgtaaacataactaaacctctttttatttagtgaggcaagataaaacaagtcatatcactttccaaagaatagtgattgtattagctcattggacgggcagtaaacaactctagatgtgttttattgta

SEQ ID NO: 296402 - DNA, 797 bp, Homo Sapiens
  misc_feature (331)..(344): n is a, c, g, or t
  misc_feature (353)..(446): n is a, c, g, or t
  misc_feature (575)..(633): n is a, c, g, or t
ttggacaatctgggcactaggtggtacttgttacttctgggttggctattgtttctagcctcctaagtttatatgactcttctagtttaaattcataactatagggctaaacctctagttcttaaatcttcatttcctttaagtcttgccaaaaatctgaacatcacaaacatagtcatttcacttaccccacaatacacacatatgacattgtcagaataacagtaccaacaccatcaccaacagtatgcctactgaaaaattttaggtaatctgcctctagcctcccagttaactgggactgcaggtgcacaccatcttgcctggccannnnnnnnnnnnnncttttaaannnnnnnnnnnnnnnnnnnnnnnnnnnnnnnnnnnnnnnnnnnnnnnnnnnnnnnnnnnnnnnnnnnnnnnnnnnnnnnnnnnnnnnnnnnnnngtgtgagccactatatctggcctatcctttatttattccatcacagttttacatacaaattactttgttgtaaagttcgttgggatagtttcttctggatcattatgttaccaattagatgcacctttnnnnnnnnnnnnnnnnnnnnnnnnnnnnnnnnnnnnnnnnnnnnnnnnnnnnnnnnnnnataaatatatgaaatatttccatgattccaaagttaaatgtacaaaacaggtatgttcaaagaagtctagtttctgtctctgtcccatccaacctgttgtcctcttccccttaaagtaacaatttacatttctaactttatggtttatcttctgatttttaaaa

SEQ ID NO: 296403 - DNA, 736 bp, Homo Sapiens
ttggtacgcattagccaacctctctttacctccttcttccttcttaccctcctagcctctggtaaccatcattctattctctaccttcatgagatctgcttacgttttttgtgtaacattttgttctttttaaaatgtcaaaagttaaaaaaaattttgaagagacaaaattcatataacataaaattaaccattttaaagtgtaaaattcagtggcatttagtacattcacagtgctgcgtgtgaaaagttcaatatagaaatgaacttctgaaattaaaatgttttatatgggaggaaagtactgcaattcagggcataaatgcagactggctggtcttcagtatgtctgaaaaacaaagagaaagttagaggttttataaaaaggagaatatgtattgctgtttgataaatttcattgccactagtaaggttttgaggagttggtaagctctgattagcaagtgacagtcgtgggcaaaactagtctcagagttgcagcaggttgtttcagtagccaatagctaaaactggtttcaggttatggtaggcagtttcagcttgcagacttgcagggaattacatttttggggcaatgttttgtgccgagtggttttcctccctgacctctgaaatccatttttgttgagtatgacaagaatgacccaattcatatgatcacctttcacatgtgcaaccatcacctctatctagatccaaaacctttccatcagcc

SEQ ID NO: 296404 - DNA, 300 bp, Homo Sapiens
  misc_feature (76)..(204): n is a, c, g, or t
tgagctcaatcaatcctctatcctcagcctcctgggtagcagggaccacaggcacacaccctcacaccccactaannnnnnnnnnnnnnnnnnnnnnnnnnnnnnnnnnnnnnnnnnnnnnnnnnnnnnnnnnnnnnnnnnnnnnnnnnnnnnnnnnnnnnnnnnnnnnnnnnnnnnnnnnnnnnnnnnnnnnnnnnnnnnnnnctgtccagccataaatgtgatttccaatgttcccagggccaacgcaaagagatacacattagggtgaggagaggatcaaggcatcccgcaactcac

SEQ ID NO: 296405 - DNA, 871 bp, Homo Sapiens
  misc_feature (41)..(85): n is a, c, g, or t
  misc_feature (110)..(306): n is a, c, g, or t
ttggtgtgtgtattcacattcttgctttaaagagaggattnnnnnnnnnnnnnnnnnnnnnnnnnnnnnnnnnnnnnnnnnnnnntcactcaaggccaggcgtttgagannnnnnnnnnnnnnnnnnnnnnnnnnnnnnnnnnnnnnnnnnnnnnnnnnnnnnnnnnnnnnnnnnnnnnnnnnnnnnnnnnnnnnnnnnnnnnnnnnnnnnnnnnnnnnnnnnnnnnnnnnnnnnnnnnnnnnnnnnnnnnnnnnnnnnnnnnnnnnnnnnnnnnnnnnnnnnnnnnnnnnnnnnnnnnnnnnnnntaaataaagagggaggatttctgttttccccaggaattgacttcctctcaagggagaggggaggcttgtctgctgggtcagagcctggcagccatgtgtggaggtttctcagtgagtccgtgagtgctcagtgtgcactctctgctccagccccaccagctggatggatcctgccagccctagtggacatcatcatcacagccagctgtgagacccctaggatgtggggtctgcagaccgtagcaagcctttgtgtgatgatcccaaggtggaaggtgaaaggctccctgctcccctgtgtcttggaggtgactgggcacttgcctagcgtgtgttctacagcttttaaaaaattttattatattttatcttccgggatccacatgcagaaagtgcaggtatattacataggtgtgtgccatggtggtttgcggtacctatcaccccattacgtagttttaagccctgcatgcattagctattggtcctgatgctttccttccccttgtcccccaccgacaggccctggtgtgtgatgttcccctccctgtgtccgtgtgttctc

SEQ ID NO: 296406 - DNA, 128 bp, Homo Sapiens
gcgataaatgagagcgagcatctttgtacaaaaaagttgggatttatatagcctttctgcatataaaattctcctgactcatttcagttctaagatcccagctcctcattcactctagaatgcacatc

SEQ ID NO: 296407 - DNA, 753 bp, Homo Sapiens
gaagaaaacgttaccttcagggatccaagtgatggcaggtcaaatggtaggctacatagctccaagtcaagagaattaacaaaacagagcagctctgttgccttaatcccagaggaaacatctaatcagctacactgcaccttcagtgcagacatttcacccaggcttttagcaggagaggagaatatattcaatcagacttctcagcagaccacttccttgccatccagtttcatattggttaaagacttggatcagagaccacagaatccattaacagacacacctgaaaccacagagaatgccagccctgaagctgcaatgccaaccatccacaagtttctccaaccttctaccattaatgttttgtcctacagacatggactggattctccatgctagctttcctctgcaggaagctcttggggctatgcattgagttggcagaaatgcagaccttgatattcttgctttgctaggacaccatcataactatggaaaaatgggcttcatcatatgccattcccttcaaaaggctgtgtagacacacccatacatatacattatgtgtagaaacctacatgcagactgttgagttagataatttcaacgatttttgtcagccaaaataatttatgatctcttgtctgatagtttgtctacttgttaaaatgtgggccttttaaaatgtgttggcagtatgtgcatacagaagattttcgttctccttaagatgatgtgttctggcttaaa

SEQ ID NO: 296408 - DNA, 699 bp, Homo Sapiens
  misc_feature (509)..(588): n is a, c, g, or t
ttgggtcctgattcacccaacatcaaaatagtcaaaccctgagccatatctacaacttgagtgctggagattcaggtcagagctctttttactgtatcatacaaatccattcagccaacaatagaatctttattaactatccatgatgttcataggattgtgaagtataacgatagttcctgctttcagggaagttgtaatctagatgacagaagtttgttccccagtcattatatgtacttcttagaaaggtattggcttaggtatcctctattcgatcagctagtactccagaaacataaggaagagaccaaagggcacccaaaatacagagtgcttatgagaaatatgcactcagaaagttataactggatattaatctgagctaggaaggtgtagcaggcagtctctaagagtcttgttcccaagatccctgcctcgtagtattcatccctgcccttgtgaaatagtctcctctttgagtataggctggacctagtgactcactnnnnnnnnnnnnnnnnnnnnnnnnnnnnnnnnnnnnnnnnnnnnnnnnnnnnnnnnnnnnnnnnnnnnnnnnnnnnnnnnggtgctttctctcatactctgttgtgttgttggctctggaggtggccagctaccatgtcatgagacaacccactaaagaggtccatgtgagtgaacttgaaaacacatcct

SEQ ID NO: 296409 - DNA, 864 bp, Homo Sapiens
ttggatccatgttgccgcaaacgaaatgattgggttatttttttatggctgtgtagtattccatggtgtatatacaccataacttatttatccaatccaccactgatgggcacctaggttgattccatgtctttgctattgtggatagcgctgcaatcaacatttcagtccatgtgcctttttggtagaattatttattttcttttggatatatacccagtaatggattgctgagtcaaatggtagttctgttttaagttctttgagaaatctccaagctactttctacagtggctgaactagtttacattcccaacaacagtgtataagcaagaacctgcattttgaggtcaagctctacttcttaccagctacactgatgtctttcaagttctctgagcaaataagacactatttttcatctatctgattagtgaagttttgttaaatgtaataatacacagtgcataatacagcaaagaaacaggcaactgaatatgttcttggtgggattttattctatttttccaagggcaactgaatcatacttatcatggtgggttgcaaaaataccccctaattcttctcatctttgtatgcactcctgtttgcaatgttacttagcagctcctacctccatgaatctgggttagtcatgggccttgcttacgccaaggagagaatgggaaatataatgcaaacgggggcttgtacattggaattgcctcccttgctgtgcttggaagcctgaggccaccatgtgaatgagcccaagccagcctgctatagaatgagaggccacgtggaggaaaactgaggtgcctcagctgaccttagaagcttgagcatgcccagttaagatca

SEQ ID NO: 296410 - DNA, 726 bp, Homo Sapiens
  misc_feature (320)..(384): n is a, c, g, or t
  misc_feature (460)..(595): n is a, c, g, or t
ctatagagtctttagaagattgtataggaaaaatctttgtaaccttggggagagaagtgtttttaaaaacaatacataagacttactaaacctaagggaaaagaattataagagtggttacattacattaaaagtatatattcatctagtatcttaaagagagtaacatcagaagccacaactagatgcttgtatcaaagaagctgaagtgatactacttctaaggatgctaaggtctagtattatactgtgaatatatgtagactcatattaatttataatgagaattataacaaccaggttgttaaaaatataatttnnnnnnnnnnnnnnnnnnnnnnnnnnnnnnnnnnnnnnnnnnnnnnnnnnnnnnnnnnnnnnnnngctaccattctttgtcaaaccattacatagtaaaattgaagatctccatccagtgacccaacggagaaacttttannnnnnnnnnnnnnnnnnnnnnnnnnnnnnnnnnnnnnnnnnnnnnnnnnnnnnnnnnnnnnnnnnnnnnnnnnnnnnnnnnnnnnnnnnnnnnnnnnnnnnnnnnnnnnnnnnnnnnnnnnnnnnnnnnnnnnnnaagaaaaggtggaagtgaacgaattacagctacacacttaacaacacgtacgaatctcgcagtgttgagtgcaagaacccagacaggaaggactgactatatgtgataccatataatttgtacgcaatctc

SEQ ID NO: 296411 - DNA, 840 bp, Homo Sapiens
  misc_feature (657)..(722): n is a, c, g, or t
ttggccagtttcctctgtggctactttaggtgccttacgccgtcggaagtggcgtccccgctcagtgtctgcgggtttagcccgcaatgcaccgtctcttagcaggtgtcggcactggggctcgcctgaggctggggagggtctaaggcccgcggctttgctcagagtccaggacacggagcagcggcctcctcggggctcagctggagagggtagaggggaggctcgggctgtgggccgcgcagccccttcctccccgcgggccatggggccacagtgtctgcagcagtggcctgggaccaccgcgcactagacacatgctttcaggatctgaaaatatcagggcgaagagagagttggggcgcttgaaggtgcaatatattgcatgggtcacgtaacctcaaatggctgttttccagtgaaaaggcaaagatcaccctttaagtccaataacaattgtatttgcagaagccctgtgcagtatcttggggaaaaatgaagaggaaattaggcatctagagactgctaatgaaaagcagccatcaaaatgtgcccagcacctataaaaactatcttagaaaacaaaacggcaggtaacaaaagtcttctgatttaaacatttatttctactggtttaagtatccgttcatgtttgannnnnnnnnnnnnnnnnnnnnnnnnnnnnnnnnnnnnnnnnnnnnnnnnnnnnnnnnnnnnnnnnngcccttttctgtccatagaaattaacaagtaatgttttacaggttttccccagtagtttaaaacacatgatcaacataaaaatacccaaatatccaagctctgtacctcgcaaatgat

SEQ ID NO: 296412 - DNA, 396 bp, Homo Sapiens
gcgatgaaaaggcgactttgtacaaaaaagttggtgtgactaaaaccggccatcttgctggcttaatgtgtggctggagagaccagcctggagacaatgtggcaaaatggggcgcttcatccagtctgtctaagccctgtctacttggggaggtgatttctttcctggttctatatgcgaagccaaataaatgttttacaatttcaagcaatctcactactggcaaaaacaaaacggacacatccctaacatggttaatgtgagctcgccctgtatatgactattatactcgcgatccacacaacaggacgcgattggctaatgataacgtagaaatggacaccctttttttctctctctatacagcaatccttatacgtcattgtttttcagcca

SEQ ID NO: 296413 - DNA, 472 bp, Homo Sapiens
aaagcttgatatgtagcactaggccatgttgttatgttaattttttaaagaaaattatcaagattgcaaaaattatcaaaaaacttatttgtatctttgtcccaaattgatctgtgttaaggttcagtgaaaagtaaaatagtaaacatagttgagcaaatgggcaggaattatgagtatattctgaatggtaaagatacaaagttcttctcccatgtggtatttgaaacggttcctcttttctttccatctttaaatgtgaaggcattcatcattctcttttatttcttcacattttccatccatgtattttttataaaggtagtggtgacaagaacaaaagcgttaatctattggtagcctgacgtgggacaattaattaaagctttaggatcaatttctcaaacttcacactcaatggtgggttctctatatcactgatgttttcaaggtttagacctgcctatttaaa

SEQ ID NO: 296414 - DNA, 846 bp, Homo Sapiens
ttggttcctgccttttgcaataattcgtgttgtgcaccgaatattatttatattagattcacagaggccccagatgatgtctctcatcagacagattcctcccttctctttgttaggcaggtagagtaaggtaggctggctacctaaagccagttaaggcttgagttaggttagggctgagtttcagttctagtaaaatttagtccaactttggtttgttcttgttcttaaggtatgaccctcctgagttgtgggctgatagtctggttgatccttatctcctcaccccggaaggagtgtgggagatttgcatctaccctttggtggtttggagcttaattcgttagccgcattccccatccctcctttccccccgcccactacatacacacatagcttcaaatctttgtaaaatgttttgagaggaaataccagtgtgtgtgtgaggaaatccctcttcctctattctcttaagcatcatgggatcatgggagattttgttttgtcttttagaggccctcagcacagctttctagcctcccttgcatagccagaattcagaagatgtcccacagggaaaacttgttatgcatttagagtgcctcaaatttccagtatgttttgtaagccttttttgactatcacaagtcttactggtttctctttctctcatctatgactctctgcctggtccaagtctaagccacatcatggtccccaaatcaaatattcccagagaacaaaagagctggtgattattagttaactttggagggtccccacccattggagtttgccttcatctcatccttatggcacccatattcctcaatttgtttaaaaatg

SEQ ID NO: 296415 - DNA, 771 bp, Homo Sapiens
ttggcccacacctctgaaccctgctggtgctgccccagtcttgtcttccacccatggctttcgtcatctggccttccctcccggctctgtgggtcctggtattgccaatcctacggcttgtcctcaggccgcatcctctgttgctttccgctcctcttgaccctgagtgacaccctgctgttcaaacgtttacctctgcgcctcgttctcctccctcccctggtcgtttttcttctacccttgctggcctctccacctctcaatgccttttaaacactggggtctcatgatcttattgtcactttgcatgatcgatcacacctccctaagtggcatctttcacagcctctggaaggagacctccagatctttacctgtctggcctttctccagctgtccctagtcgtcttccttggatcttctcaatacatttcacagtaaataaatcctttccggatctgttgtcttccccccagatctctgttgcactctgttctttgtcttagtatgtgctgtcactgtcaacataggacgcccagttagacgaagcttgttgtcctccctaactcaatccttataccacgtgtctggttggtcaccagcatccgctaattctgcatcagaaatgccttcgaatctgtcttttttatcccccctgctcctgccttacttaggacatgtcatccttcattgaattttgaaatagctttctagctggtgtgttcaatatggtagccaccaactgcatgacgccatttaaatttagttaac

SEQ ID NO: 296416 - DNA, 872 bp, Homo Sapiens
  misc_feature (582)..(628): n is a, c, g, or t
  misc_feature (656)..(755): n is a, c, g, or t
ttgggctggtaattgacttacacatagacttctccccagtattgtgcaaattgaactactaatctgggactgctctatgatgcaaaaatcatagaccaaatactatgtatcagagaaccttcaagtcagatgtttggcatctgacttgcttgttggtctcatctattcagttttagagatggtcttagattaatatggtataagagtgatgagaggactggttttataattctaaatacctgagagggaatcatgtctatgccacaaactagctatatgagacttttatcagtcacttctcttccctggcctttcagtttcctcacatataacatgccttctagattaatctgtaaatgtatatgccttctagattgccttttagattattcggtaaatgtatatgataataaatgcaagctgtgtcatgctgtgattgacacagaataagaaatcaaatatggtagatatattactaaagattccctatttctgagaatggaagagagtatcagccacttcactttttctgctttattttggattctagctgaaattccaatctagatactatttacatgnnnnnnnnnnnnnnnnnnnnnnnnnnnnnnnnnnnnnnnnnnnnnnngagacagggtctcacttggtagcatgtnnnnnnnnnnnnnnnnnnnnnnnnnnnnnnnnnnnnnnnnnnnnnnnnnnnnnnnnnnnnnnnnnnnnnnnnnnnnnnnnnnnnnnnnnnnnnnnnnnnnacacatcaccatgctcagctactttttgtattttctttagagacaagtttcacccttttgcccaggctctcaaagtgttgtcactacaggcatgagccactgcatcagactctgttt

SEQ ID NO: 296417 - DNA, 643 bp, Homo Sapiens
  misc_feature (93)..(101): n is a, c, g, or t
ggatgggaaaaggcaaatttttggcaaaactgaatgtgttaatctgcagtgaaattagcgatttaaaaaagtatttctcacctgcacatctgnnnnnnnnntttatgggtctaattttcctttggaaatttaaaatcttacaaactcgtaaaatataattatccaagtttttccaccccacactcaccatgcccacaaaaaaaagtgggaattatgtatggatgtaaatgggatgactactgcaaaaaatttaaaaacatttcaataaacatacttgcaaatattttcggtattttaaaaaagtaggacacatatgttaaactcaagggaagagggcctaaaagggaatctccaagtgcacagtttgcttctatatttgtgtgaaccatttggttaagtattttacaaaatatctacactttattttccagtccttctggaattttcaaaatactgtatatcctacaatagacttttcaacatatgtgtaagctgtagtgtgaaaataattgtggaaataattctagatctatataattccacaacctacttgccttgaattggctgcatgtgtttttcatgtaagtatgcatagaaaatgttgaagtgtttcacacaaaactcgtttagatctaaaagcatc

SEQ ID NO: 296418 - DNA, 858 bp, Homo Sapiens
  misc_feature (596)..(735): n is a, c, g, or t
aatagaaaaatcctgatttctttcacatgatttgagtaagtagagttagttttatagagttgtctttctttttaaaaaacctttgctgagtcttatttgtcctcaagacatataaagatctttgtggaccgtggttctatgttatctatattatttaatgaggtaataattgttttcttgataactggttccagaatttccctcatggagcaatgtatttttctgtgtaaaagtgtctaataagtactcttaaaatgggtaaaaccctgcatggattatgttggctgattcaaagtacaagttaagaagaaaaaagtacagcggtagagagaaccaactaaatgaaaagaggctagtattacatagggtgaaatgctgttgaatctcctgatttgtgggataaaaacaaaggacactttaacagtgatgaaccctctcatttcatttaaaataatttataatgttttaatttaaaacccttcccaatttttcctcagaagtttctgtacaaattgtatattaatatatttgtagaaattaaggaagggatttaatttaatatatgaattgttgtagtactcaacaatattgctatnnnnnnnnnnnnnnnnnnnnnnnnnnnnnnnnnnnnnnnnnnnnnnnnnnnnnnnnnnnnnnnnnnnnnnnnnnnnnnnnnnnnnnnnnnnnnnnnnnnnnnnnnnnnnnnnnnnnnnnnnnnnnnnnnnnnnnnnnnnnaccttgcaaagaaacgcacagcttcacctatgtaagtagaaactcagaaactttgtggacatgaagtagtaagcctcctcagcatgtacgtacatgttaaaaagtctttgaaatgttataact

SEQ ID NO: 296419 - DNA, 860 bp, Homo Sapiens
  misc_feature (163)..(234): n is a, c, g, or t
  misc_feature (626)..(668): n is a, c, g, or t
ttggcagcgtgctctgagagcaatccaggaatcattgatgaatcccactcaatttatttttgtgactaatcttttctttccaagtagcaagataactaaatgtatagattgctaaaaataaaggtaaacaaatgaaatctaacctagaatgattggcattgannnnnnnnnnnnnnnnnnnnnnnnnnnnnnnnnnnnnnnnnnnnnnnnnnnnnnnnnnnnnnnnnnnnnnnntataacgatctaaaagttaggtgattcctacaggttttcaaacagtttcacacacattagttctttagagctttcagcaacaaccttgtaaagcaggctagacaaattggtagacccattttatataccctgttttgtttccctccctcaggaatgctttttaatgctttaggtttcgtcacaggttgttataagaaaattccatcataaggatatcttatgtaaaaccagagttaaaaccataactgtccatcatgcccctcatataagaaatatgataaattcctcctcaattaatcccaggagaaagtcggccttgccatactgatttgcttgttctgtccttgctctgcctgctctctcttctttctatccttccttccttcctcccnnnnnnnnnnnnnnnnnnnnnnnnnnnnnnnnnnnnnnnnnnnaagttccagaatacatgtgcaggatgtgcacatttgttacataggtaaacatgtgccatggtggtttgctgcacctgtcaacccatcacctcgtattaagcccagcatgcattagctatttgtcatgatgctctccccccagtctcccaccaccacaggccccattgtgtgttgttcccctccctagatcca

SEQ ID NO: 296420 - DNA, 557 bp, Homo Sapiens
atgagccaccacacctggcctctgcttcttcttggacactttgctctttagagatttcttctgccagataccctaaatcatctctataaagttcaaagttccacagatctctagggcaggagcaaaatgctgtctgtctctttgcatagcaagagtggcctttactccagtttccaagttcctcatctccatctgagaccacctcagcctggacttcattgtccatatcagcattttggtcaaagccattcaacaagtctctaggaagttccaaactttcccacatcttcctgtcttcttctgagccctccaaaaatgtttcaacctctgcctattacccagttccaaagttgcttccacagttttgggtatctttacagcaacaccccactctctggtaccaatttacagtattagtcagttctcacattgctaataaaaacatacccaagactgggtaatttttaaaggaaagaggtttaattgaatcatagttcagcacagctggggaggccttaggaaacttgcactcatggcagaaagggaagcaaacatgt

SEQ ID NO: 296421 - DNA, 902 bp, Homo Sapiens
  misc_feature (511)..(633): n is a, c, g, or t
ttggcatatacataattttatataaatccagtaatacagtatgtgcctgttatcttgttaccaccttaaaattttgtggacttctttctgtctatagcaataagtataggatcatattatttttaatggctacattagaattacattgtatggatgtatcataattatttaattgatcttctgttgatagctctcatggttgtctctaatttttcatgattataaatgatgtcatgatgaacatcattgtagatatatttttgcacaattcctagaagtgtgattgcttcccgcatatttaaaattttaatgtatttagtaaagggacttttataaatgtcctgccagtttatacttatcccaacactacacaggagagctcataaatcttgtctcatattaatcctgattattttccattcttttatctttgtcagtgtaatagacaataattgatatggcattgttgtttgtaattttatttcattgactgcgagtgaaggtaactgtnnnnnnnnnnnnnnnnnnnnnnnnnnnnnnnnnnnnnnnnnnnnnnnnnnnnnnnnnnnnnnnnnnnnnnnnnnnnnnnnnnnnnnnnnnnnnnnnnnnnnnnnnnnnnnnnnnnnnnnnnnnaagttcagtggtacatgtgcaggtttgttagataggtaaatttgtgtcatgggggtttgttgtacagattatttgatcactgaggtattaaacctagtacccattagttatttttcctgatcctctccctcctcccaccctccaccctctgataggccccagtatctgttgtgcccctctatgtgtccatttgttttcattgtttagctcccacttgtaagtgagagcatgcagtatttggttttctgcttctgtgttagtttgctaaa

SEQ ID NO: 296422 - DNA, 757 bp, Homo Sapiens
ttggatgaaacctaaacatataagcaaaacatatactacattcaaggcaaagtacattctattactttgtaaaatatacaaaaaatttaaagaaaatttaaatggctctaattatatacaaactacaattaaagaaaaccctcttaaagctaaggatggcttaaatatttattgaactatggctgcaggaattacataacgcaataagattattaatttaatatgcactttaatgagttttctgtttgggaaggtccagaaggcttaattcccaaaagtgatacctgctaataacattttaatgttaaagttatccaattcagattaatatatctaaagtccagcaatatgatatgttcagctcataaatgaaattaactatactacatttgagattcattcaaatctaagagaaatcttccttttattttaaaaatttatatcttgttaggaaaatgtaatgctcaagcttcagattcattatttttattttactccaattgttttaaaagaatagtataatgttaacggttcaattgaagattcttaacaagcctttgaacattcttttcttaaccccagggtctggctttgatttgcctctcatttagcatgctgaagggggtggttttttaagaacgcttaagaagtttaggtttgtgtcataattaagatgaaaataagcacacgagaaaccttgatgaataaatgccttgtcatactgatgcttcttcaataataagtattagtctttttt

SEQ ID NO: 296423 - DNA, 730 bp, Homo Sapiens
ttgggggagaatgaagcttcatcatgcatacaaccagtttgtcttgtgtaatgtaagatgcatcctagttattctgaaacagtatttaaagcaaaaggtttgctcaagatagaaaaaaatagataaagcttagtctcatggaatgatctatgggttactcatccaagctctcactttctccccttctctatccatattaactacacatgtgggcttgatagtgcacaagatagcctcaattcacaagataactttctttcttttagcaaacactcagccttctcacactattctcatatctagaagattgacctaaaatctcagttaatcaacttatgcctaaaagcagatatcagtgcaaaaaccttagcaatgtctaggaggaaataatcaatgagatgacaatggaaagaaagcctatatatcctattgtaaactaaaaagtacctgagacaagtctcaatcagtttaaaagcttattttgccaaagctaaggaaatgcctgtgacacagcctcaggaggtcctgatgacatgtgcctaaggtgattgggttacaactaggttttatacatttcagggagacaagacattaatcaatacatgcaagatgtacattgctttggtccagaaacgtgggaaaactggaaacgggggcttccacgtcatagatggattcaaagattttcttattgacaattggttgaaagagttattatctaaagacctgg

SEQ ID NO: 296424 - DNA, 708 bp, Homo Sapiens
gtagttataggggccaatgagttccagattatttctaactcggcctgtcataagaaactgtggtggactatggaccccataacccatgacatctggcgttccaactttggattactctgaaattggacatatgatttgatttcatcatgagacacatcaaatgagcagagacttgataagcacttgtatattaaggaatgtccttttggaactctccctcttgcagtgctaacttgagactgccatgctgttaggaagttcaagttcaccacatggagatgaaataagatatcgtgataaacatccccagctgatcccagcctccagtgatccgtcaactacatatatgatcctaagtcacatgtgtgaccccgagcaagatcagcagaacaatcactcagccaacccacagaaccctgaaaaaatataaatcattatagtttaaaccacaagttttgggtagcttgttatgctgctattgataattaaaacaaactggaatattttcatctagatggcaatctactcaattgttgaatcctttgtgtttccctctttgccctggttggtaagaatctcagagctaagttgcgtgttcattgctgtgtctttcttcaaccaggaattctcatcacagttgttccatttctctttcagatttttgtcttttatattaattggtttgggtcttactataccaattaatat

SEQ ID NO: 296425 - DNA, 193 bp, Homo Sapiens
ttgggtagccccagatctaaaattttaaaaaagaagtaatatcagtcaatagaaccatgtccataaatgacagaagtgatgaactgagcaatgatgatcttcaaaacagctattataaatatgcttaaaatcttcaagaactgtgtgagtataatgaagagaggaataaaaactattaagaaaaaacaaatga

SEQ ID NO: 296426 - DNA, 916 bp, Homo Sapiens
ttggcttctgtgagccacaaagaaagcacctcttccagagatgctttcagagctctaacatccctgactgttccatggagggctcctagatcctgacttctgggtgacagacaccaatcccaggcaaaccttcttcctgcacattgcatgtacatgatgaaacacagctgattattttacaggaactcagttgctagaaatgatttttttaatgttatgatgctgaaaaaaagagattcaacttcctttgtcagtcctttggctctagattttaaaaatctgaatggtcaagagcaatgtgataaaggcagtttaaaattattaattattattaatattgtctctgatgctcggcatattattgttattttttcaacttttattttgggttcaggggttatatgtgcaggtttgttatgtgggtgtattttgtgatgctgaggtttggggtatgaatgatcctgtcacccaggtactgagcatagtacccaacagttcttcaacacttgtcccccttctccctcaagcagtctctagtgtctattgttgccatctttatggcatgactacccattgtttagctcccacttataagtgagaacatgaagtatttggttttctgattctgtgttaatttgcttaggataatggccaccagctgcatccatattgtggcaaagaacatgatttcattcctttttggctgtgcagtatcccatgttgtatatgtaccacattttgtttatctatccaccattgaggggtacctcagttgattccatgtctttgctattgtgaataattttgcgatgaacatactcatgcatatgtgcttttggcagaatgatttcttttcttttggacatatacccagcaatgggattgctgggtcaaatggtagctctgttttaactta

SEQ ID NO: 296427 - DNA, 137 bp, Homo Sapiens
ttggctctagctggaaagcaagaatatctaagccatcgccttctgaaccacaaggccaatatgaagatagatctaaattctgctcccaagggtctcagaagttcctggatcaaatgattctgattaatatagtggac

SEQ ID NO: 296428 - DNA, 867 bp, Homo Sapiens
ttggagtttttacttctgtataactttctgtagtgcttttaaagtcttgattatcactttggttaaattaataactattattttacaatgacctgtgattctgttttgatcaaatgttttggccttttaacatctttgatatacatcctcaaaatcaaattctaaattaagtctctgacttagacttattgctgatacttatcaaagctgtaaaaactgatccctgcaagattttagcatctttttacagcttccagtcaaaccatgaactccagcatcaccaactccagcctgataattacatgtactggaagagatatccattgaaagactccctcgaccccccctttaaagggactttcatcaggtgctattaattaatccttgtactgttaagttaaagggttttgattcctgggtgcccatatctcatctgaaaaaggcaccaactcctactaattcttaaaatattgatactattatctgacaccatactcaggttaacaaaagccttgtcttcagacccagaagaaaggtagcatgaaaatgatctgcttttgtgagacataagactagaaattaaaactattcaatctctctaggctcagtgactactgcaggagagatgggcatgtgagattgtaagggcctgttttgagggatacaattagttcagatgctccaaatcaaggatggcacagagttacctaaacagccaacaagttgaggaattttgccactctgaattccttaactcaaaagggtttaaccaaatgcttatgtttcgtattgctaaatggctacagtcagtatctaagaccagaattcatttctataaccttactttttggctcttatatgctgaaa

SEQ ID NO: 296429 - DNA, 437 bp, Homo Sapiens
ttggatcttactcaaaggagctagagaatacgtaagtaagcaaacaaataacgtacaaaatgatgataagtgctatgatgaatgagaatttgtatgtagtgacattttgggggttgctgttttatgtaacatatacattttttttcactaaaaagtagcacttgaacagataattgaggaaaatgtgaggcaaagccatgtggaaacctgaagaacgttttaaacagaatacagccagtgcaagttaccaagatgtgatcaagaaaaggaagtaggtcagtgtgctttgagtgatatctataagacataagaatgctggatgaattcagatgtagcaaataagcttatatagattatatgtgaacctgggctactgctcagtcttctacattgaagataaaatttccgtttactataatgaaaagaagcaaatttgg

SEQ ID NO: 296430 - DNA, 282 bp, Homo Sapiens
  misc_feature (226)..(234): n is a, c, g, or t
gccacagacaatagcgagtcggagcccgtcaggagtctgggtggtttagctgggtggagccagggtcggatcgcccgatggcggtggtcgcgatgctgccccgccaccacgggtggaagatatcaagccttggcgcgacttgggcagttaagtttagggggggacgatgatatatattttcttacgtgcctcttctgccgcacatccccgcccccttccgaccgcnnnnnnnnnctttccttgtccggtatttgatgtagcgatgttcccgccccacccccc

SEQ ID NO: 296431 - DNA, 711 bp, Homo Sapiens
ttgggaaagaacatacagttggatataaagttggatccagctggaactgttaacatcgactactaagtggatattctaaatttaatgttgcagcttggggagttagaaaggctctacaagttgctcggttggttaaatgaaacaaggagcaaaacgtggcccacaggaaataaatgtgaaatgccacacctgccttggcattttgtagagaaagagagtcaaaggcttgtgaaattagaacggcagagtagatttgtcacctcagacctgctcactcactctggagagtctagaggatacacctttcactacaactgtgagaaacaaatttgcaaggggatctccagcatccttgaggagccccttgattactcttctctctgtagatcagaaactacagtgggaactgctgccactgaattggaaaacctgaatgcaaaggagggtagttgaatctgggtggcagggaccatgtgttggcactcagtcactaaagacaaggcaggtggggctgctgtaatgaacaatgtagtcaaagcagccatcgtaatagtctgacctgcagacaactgtggcactggctggtgatcatggtacttctagaagtgaaataggtaagatgcttactaaatccttacttgatctgcacaaagaattctacatcaagtgaataaacataataatataaaaacccaacctatcttgtacaac

SEQ ID NO: 296432 - DNA, 604 bp, Homo Sapiens
ttgggtggctttgaagaactttgccatatactgtcttcttaatctcatgaggagagggaacatgctgagaaactgaagaggctacgtaacccacgaaggggcctaatcatccgtcaggataaggttaaaccagactgtgatgactgggagagcgggctgaatgcaatggagtgtgcattacatttggaaaaattgtgaatcagtcttgatggacctgcacaaactggccactgctccacatgacccccatatgggtgacttctttgatactgattacggaatcgaactcggaaattcctacttgcaattgtgtgacggactgaccactgtgccctggatgggagcgcccgactcgggcttgtatgaaaatctcttatacaagcataccctgttagaaacctatccttgactattgcctcgtgctaagttcttccaattatagtggtgacttccctgttctcattagcattggatgcatattggagtttccattatcttatctttattttgaaccaaaatatccaagctggctctttgatttttggatgtccggcgcaatggtctatatgtcacacccaaaatttatgtgctggaaacctaatcc

SEQ ID NO: 296433 - DNA, 786 bp, Homo Sapiens
  misc_feature (573)..(625): n is a, c, g, or t
  misc_feature (644)..(694): n is a, c, g, or t
ttggcttaaacccctagagagcactgcctcgtcctctagcctggggctcacacaacagtctgccactcaggctgctaggagattctccaatagcaggctcagcacctcaaactgcccaccacctctcctactgctcctctcccacccaccacccaaactcctcagtcctgtcatgtagcagagttccagtaactcaggaaaatggagaccaaggtcattccttaagttggtttcttggggccacagcacagagcatgccacctgggctcacttttgatagcaacagctcttagttattcccctaggtctcctgtgtctctctgtccctctgttcctactttcaacctacccccaagcctgatggaatgcaactggctaccctgggcttcatgacctcaaagtaggaacccttcgttctgggggtaggttcattttgtctctcttgtaatggtgggattgcctgcccagttccttcatgcagtcacatgaagtaatcttttgtgtagtttagttgacacatgtttataagttaaaagttgatgtggctagtatgtttaaaccattaatgtccannnnnnnnnnnnnnnnnnnnnnnnnnnnnnnnnnnnnnnnnnnnnnnnnnnnnattcacagacagacagacnnnnnnnnnnnnnnnnnnnnnnnnnnnnnnnnnnnnnnnnnnnnnnnnnnnaaattttttagcctttgcttttctgtcttcagctgagtttgtgttgaccaagccttcttttggtattttgagctaattcagtttgtgcttcc

SEQ ID NO: 296434 - DNA, 452 bp, Homo Sapiens
acttacaagggccaactttgtacaaaaaagttggctacttttcttgcccatagagttttagcagaactcttaattgtaaaagatatgaagaatcaggatggtttcgaatttggtggtactatgggctttgtttatgaaaatattgttgctgcccgacaacttaacacggttacatgtatgacatccagttcgtgacctgttgatgtttttatcctacttacatgtgtattgactccttttatgagactttcaggcttcacgtacttaggggaaaaggggtttcggtgctgtagcagaaggaatctttttacaaagaagttttagatagaatcccaatagataaaatagactaaatgaccatgcaaaagatatagttgaaagagaagaattgttacatataaaagagaagaaagataagtgatagcataacgttcctaagatggaaaagggca

SEQ ID NO: 296435 - DNA, 719 bp, Homo Sapiens
cataaagggcccactttgtacaaaaaagttggattctctgaacctctccaaatcaggagatttgatcccaaaattgtaattgtatgggagacatcaaaattatttgaaatttcggttgttccggaaaatccaggatgtaatttgccatatgtatgtttcattttgattagcttccacatgctcccaactcgtacaatataaatccatgaggctgcaggggagagaaggagctgacacataaccttagctagttgaaagctggaatgaacttcttagtagaaggattacagactaaggacattaacctccatgaagctgaagaaactttaacccgaataaatatcttagttttacttattcctttttggcaatttaaaaagagcaaatggttctaacaaaaatgcagctcttctgaaaacctctgttggtttaggagagggggagacagagggtttagactaagtcaccagacccaaacctgaatctaaaggggtttgtgcactgctttaaggaggaaacggtattttactattgcacgtggcaatatttagtataatatttcactcttctcttagatggctgccaagagtaacaattaaagtttgctttttcacagatgaattattctgaatgggctgggctcccagtgggattgttttgtaattttgttgatggcgagtcccgtatttcatctaaacaggatcataataagatgactt

SEQ ID NO: 296436 - DNA, 652 bp, Homo Sapiens
  misc_feature (194)..(268): n is a, c, g, or t
  misc_feature (293)..(401): n is a, c, g, or t
catacaaggcccactttgtacaaaaaagttgggccaagacccctgttaaagagcagtatttcataaacgaatgaattaggaagaaaaaactctgccctatgaagtacctctataaaataatgacagagtatagcatattaaggtcccaaaaaccccacttttgcttttgctttcacatggaactgaaagtcagnnnnnnnnnnnnnnnnnnnnnnnnnnnnnnnnnnnnnnnnnnnnnnnnnnnnnnnnnnnnnnnnnnnnnnnnnnnggactctttgtgctacaattttctnnnnnnnnnnnnnnnnnnnnnnnnnnnnnnnnnnnnnnnnnnnnnnnnnnnnnnnnnnnnnnnnnnnnnnnnnnnnnnnnnnnnnnnnnnnnnnnnnnnnnnnnnnnnntagaagtaagtgatagatcactaatattattgtgcttatctgaagcactatggctaagagcacaggctacatgttctagtagccacagttacttcagttagtggtggaaacatggcccaagctggtgagtctgagtccttctttgggtctattgggcttcagtcaatccctctgtggcaggggcattcatgaaagtgaggttaatttagtggcagataccacatttcctgatgtttgctgaaagctcctgt

SEQ ID NO: 296437 - DNA, 910 bp, Homo Sapiens
ttggtgtccctagagacatatccttggtctttttcatatcaaagcttgccaaccacttttatgtccacttctataaaacaagcgtcttcccaaagcttcttatcctcattggaatagtgtaaagacatctgccaacttagcgattttgccccgtactccagcttccaaaaccattataaatattaaatcaaattaatcccacagctgatcctttgtggtcctactgtattattttctgtcattcagaaaagtgcccctttagctatgtatttttttaaatttcttatctcgcagccatggataaagtgccaggactaaacactgctccctgatcccacagtgactccatttttaaaagacagttttgggtttagaagcttgccaaactttttgaaagttgaaatagcatctactgttctgctctatccatgtgctatttaaatcctcaaaggactctagcaaattaagcatggtttctggttacagaagtgttgggaatagctgccctgtggcttaggcctaaagcttgccatttttgcatctacttcacaaggcagtaaccaaaagtcctggtccaactgatgcctatagttgcttaagtttagtggcactatttaaaaactctgtgttcttgcactatcctttaggtatcttgatacctctcccacagctctcaatacttttttctgtttctcatgtctctatcctttgctccttagccagacaaaatattgaaccaaattttaaaagtaatcagtgttagaatgaaatactatgagcacattaatagggcaaagtagatctgtatgtgttgatatggaatcaagtacgagatacattataacagatacaaatagcagcatctgcagtgaaaatgggtctacatttgcattactcttatatactctat

SEQ ID NO: 296438 - DNA, 905 bp, Homo Sapiens
  misc_feature (63)..(183): n is a, c, g, or t
  misc_feature (186)..(205): n is a, c, g, or t
ttggatctcatcccatgtctgagggaaagaggacaggtacttatggcttaagaatttagtgannnnnnnnnnnnnnnnnnnnnnnnnnnnnnnnnnnnnnnnnnnnnnnnnnnnnnnnnnnnnnnnnnnnnnnnnnnnnnnnnnnnnnnnnnnnnnnnnnnnnnnnnnnnnnnnnnnnnnnnnacnnnnnnnnnnnnnnnnnnnntttgaaattttaaacttaagaatttagagaggtctcaaggctgaattgactggcaacataaagggacagagcaacaagatctaggccatccacttacagaggagccacagcatgttggatcgtttctttcttgatgttaagacatctagaaatacaaagcataatcaacttaagaaccaaaaatattgagatgggatttttcccctgactttgaccctctttgtggacaggaactagagtggctcatttcactcagcctgcagtccgtggatggctaagtgtaacagctcagtgaaggctcagggtgacagcctcctacacctgccttttttgacacctgagttcttgttcagtgtccaggaacaatcaggtcacacaaactatttgaaggatagtgtatttggaatatttattgggcgataaaagtggctctcagtaggatggggaatttgaaaggggatggtgtgggaagaaggtgatgtttccctgaagctgcactgtctgaagttagcagcgtctattcgtagtttctgacactcagctgcatggatccctgatgctcagctgcacatatctccaatgtttagcagcttgcatccccaaccacttgtataagccgcttgtgttgctcttccagctgaagtctttttatgggcacagatagggaatggcagcaaaaaggcaatcacttggcagaaaa

SEQ ID NO: 296439 - DNA, 141 bp, Homo Sapiens
ttggtgaaaaagtacaacaaataataagaaaatttactaaagtagcagtgaataaaattaatattgagacccacagcttttcaagcataaaaaagcaacaattaagtagaaaatacgaattaacaacccaataataaaatg

SEQ ID NO: 296440 - DNA, 530 bp, Homo Sapiens
  misc_feature (46)..(297): n is a, c, g, or t
ctttctagcacctcgcattattttattttattttagacagggtctnnnnnnnnnnnnnnnnnnnnnnnnnnnnnnnnnnnnnnnnnnnnnnnnnnnnnnnnnnnnnnnnnnnnnnnnnnnnnnnnnnnnnnnnnnnnnnnnnnnnnnnnnnnnnnnnnnnnnnnnnnnnnnnnnnnnnnnnnnnnnnnnnnnnnnnnnnnnnnnnnnnnnnnnnnnnnnnnnnnnnnnnnnnnnnnnnnnnnnnnnnnnnnnnnnnnnnnnnnnnnnnnnnnnnnnnnnnnnnnnnnnnnnnnnnnntgagccatcacgcccggcctattgttcccttttttatgtcatgtgtacccaatgtttagtttccacttataagtaagagtgtgcagtatttggttttctgtttctgactggtttgcttaggataatggcctccagctccatccatgttgctgcaaaggacatggcttcgtccttcttttgggccatgtagtattccatggtgtatctgtaccacatttttctttatccaatcc

SEQ ID NO: 296441 - DNA, 510 bp, Homo Sapiens
ttggaaattatttttcttctcactgttaaggtctccagaaacagcattcatctttaaattggatgttatttgatatcctcattatctgatgtcctcttcctaatttcttcaaactatatcatttcataagtttttactgtgcttttcatcagtgattccatttttgactacatctattctcttccctgccctgtctaattatctatttgttctgtgtgaggtttgcttcattctccatgagtttccataattttcattttcaagtttgagttcctgtttattaaatttattttcttgttaaatcactatgggaaaatttcttctgtacgttgaattaggttatctctaaaatctgattcttttatatctttttaatgctagttttctcaaaaacaattttttggctaaaaaagtatttttttctgtaactatcagtcaatttcttttcacctcagctttgcttgttgagggctgtctccacatgatccatttattattctcttggccaca

SEQ ID NO: 296442 - DNA, 806 bp, Homo Sapiens
  misc_feature (53)..(104): n is a, c, g, or t
  misc_feature (138)..(147): n is a, c, g, or t
gttcattataatctgtgatgattatttttatttctgtgcagtcagaaataccnnnnnnnnnnnnnnnnnnnnnnnnnnnnnnnnnnnnnnnnnnnnnnnnnnnnattagtctaactagtagtctatttcattaatttnnnnnnnnnncagctcctggcttcattgatcttttgaatggtttttcatgtctcagtctccttcagttcagctctgatttttattatctctttttcttctgttagctttggggttggtttgcattacataataatgcttctccagttcttttagttgtgatgttagattgctaatttgagttctttctaactttttgatgtggatgtttagtactacacatttccctcttaacactccttagctgtgtcccagtgattttggtatgttgtatctttgttctcattagtttcaaataacttctttatttctgccttaattccattatttgcccagaaagtcattcaggagacggtcatttaattttgatgtaaatgcatggttttgagggattttcttcatattgaattctgtttttattgtgctgtggtccaagagtgtgggtggtataatttcatttttaaaatttcctgaggatttttttatgtctaaacgtgtggttgattgtagaatatgtaccatgtgcagatgagaagaatgtgcattctattgtttttgggtggagtattctgtagatgtctatcagatccatttgatccagtgttgagattagatcttgaatatctttgttaatattctgccttgatgattgtctgatgctgtcagtgggg

SEQ ID NO: 296443 - DNA, 891 bp, Homo Sapiens
ttgggaattatacagatattaactaatcaattctaacagtttttctgagactactgagcataatattctacagtgcatgagttgctccatggtgagacagtcttagaggtttgtttgttctttcccaccacggagacactgtttcacatataacaaacaccttaaaaccatcaacgtctgtgttcaaagacattgctataggaagcctaattggtgtgcggatgcaaagttaagaccatcatttttttctgctctttgcccatgtgaaatctgttcgttctgccctatgtactttcagtgcctatttgcagcatggcctcctgttctgcacaaaattttcctgaggtctgaggccaacgcagcagctctgttttttacagcctagcagatgggcagcaagccagatgtagttggtttttggcagccatattttccacattgcttggtggtataccttatacacatggaggttgatagttggcatatatgttcagttactgtagagtagcatttttcaatcttgcactattgacgttttggacttggtaattatttattctgggcggatgtcctctgcattgcaggatatttagcaacattctggatctctgtgcactaaatgctagtaccaccactcatccaaattgtgacaaccaatgtcttcaggtatttctaagtgtcccctgggagcaaaagcatccccacttgagaagtactgctggagacaaagggaaaatgaagaggctttgtggcagacaagtgttgtttacgagaatatagctggtggcactgggtaagatatgagggagaggggagataaaccaaagaagaggtttggaagaaaagagcccacattacagtgaccaattagaaacaaaatgagttgtcttt

SEQ ID NO: 296444 - DNA, 434 bp, Homo Sapiens
ttggcaacctcacttttcattggtcagtatggtaagactttatctatatctcagagggtagacttgctcacttaggtgcatgacaatctattaattcacaatgaacaatacaagattacagaggaaaatcgatgtgtcagggccagcaaatttctttgtagtatggaaaattacagatacaagctggaaggcagcatgataagtcggaaacacaacagaagaggtcaaatgattttataaagtgcttctcagaaaaggaggctaagtcattctcatccactgaaatatagccctgtcagaaaaatcataatgttactgtttcttgtaaagatataactttccaggaaggagtctgacagacctgccaagatctttctctcccatgtggtgggcaggatttgggctcccatggtctttgcatcttggtgttatga

SEQ ID NO: 296445 - DNA, 751 bp, Homo Sapiens
  misc_feature (410)..(463): n is a, c, g, or t
ttgggtgaatttgccacagattcagagtgaggtgcttatttgtgaagcattaagaatccctgggctgttcccagggagttgagtagaggcatggtgaataactgttcaggtacacctaattgtatagcttgtttatatttgttgttgtaccacaatgcccttattacttagagcataaactccaatcatattcacatttattttaattatttgatcatgaaccacataacctaatgggaaacttggcctgatctgttttgtgaaatgtcttgagaaaattatccatgcctacattaagcaaaaacaaaactaactccacatgatctcacgcataaaaaatgaatgcctggaaaagatgctagttttaagttttaggccaagattgaatttcaattctgggtcatagattnnnnnnnnnnnnnnnnnnnnnnnnnnnnnnnnnnnnnnnnnnnnnnnnnnnnnnatgaatgaatagataagtatatacccacaatataagttgctgctaaagaaaataaaagttataagacgtgaaaggagacaccaaaaatatgatttccttacaaatattttcaagaattttacttaattgcaaccagaagtctgacctggaagtgtagtgttttgacccccctagctgtctggtctcctatttgcggtgttttttctctcccccaactgtgagaaaatatattatacacagttataaccgtgtgtattcttagacacactgaaatagaaagtattcctc

SEQ ID NO: 296446 - DNA, 656 bp, Homo Sapiens
  misc_feature (533)..(533): n is a, c, g, or t
  misc_feature (574)..(574): n is a, c, g, or t
cccgatgtagaacatgacctgaaacactgccagtatgacactgagaaaggcctagctgctgggtacaaaggcttaaatgaccatcatgtttacctggcgggcacactgctaaatgccaacatggcgactgctggacatgcatgcactaagaagtatactccagaacaagtagctatagacaccgtaacagctatccaccaaactgaatctgaagctgttcgctgcgatatgatgttagaaaggtggcatgagagaagaggatgccactatgaacctgaatgctaacaaactgtgcactgtagcatagtgctcgaaactaagcatgtcttatggacggaacctgcacgacagtgtactggctgtaagacggggctggctgcaaacaaggatgcaacccacgaagctgttatgaaactggccaatgctatcttgcatgccgccagaggacacgatgattacacgggtattgtagggctgtgttcatacagtatgttgtgacagcctggtatacctactacgggcccaatgcacgncattgctattgcagagcgtctaatgggaaggcttcaacgcnagcacactttcctcttattctcgaaattccacacaatagatttttactgctggaaatccacacctgtaattgaagtacgggt

SEQ ID NO: 296447 - DNA, 577 bp, Homo Sapiens
  misc_feature (229)..(393): n is a, c, g, or t
acttaggtcagtgccataggactgaccaaatcataaattgaggatgctgttggtattcaaagtttttactcattacccttactcagtttgcagctgcaatgatctgtacttaacctgcttttacatattatgcttccttgacaatgggaggaattttaatggttaacttgcagaatatgacagatacttgtcttaatatcattcttcctaccataatctaattcaaaannnnnnnnnnnnnnnnnnnnnnnnnnnnnnnnnnnnnnnnnnnnnnnnnnnnnnnnnnnnnnnnnnnnnnnnnnnnnnnnnnnnnnnnnnnnnnnnnnnnnnnnnnnnnnnnnnnnnnnnnnnnnnnnnnnnnnnnnnnnnnnnnnnnnnnnnnnnnnnnnnnnncattgttttggacagcacagattagccttttagagtaccttcttgctgagtactagcagtgtataggtttccccatgaaaaggacctacatttttgttggttaagaggttattaaatgtgctttgccaaagatactaccttgtcatttcttccagcttattagttccgtgggtttcttggatta

SEQ ID NO: 296448 - DNA, 342 bp, Homo Sapiens
gctttatgaaataagtttgcattgcacatccgtgcagaaatctttctgactttgaaatttttaggacgtcagctgtcagatacgaaaggtagatatcaggtaagaatctggacttaggaaatagtcacaaaactgtcataggttgtaattttatcaacattcgcttctagtaaaattaaagtcaattaagaaatagaacttgggtctgagaaatttgctttttgtgtgtttgacattcctaatttgggagtccttcagctgaattactattcttttagaagttgagacagcaggtaagcaaaggacctagttcatgtaaacatggacatcatgatggctatt

SEQ ID NO: 296449 - DNA, 341 bp, Homo Sapiens
  misc_feature (130)..(130): n is a, c, g, or t
  misc_feature (150)..(150): n is a, c, g, or t
  misc_feature (169)..(169): n is a, c, g, or t
  misc_feature (190)..(190): n is a, c, g, or t
  misc_feature (228)..(228): n is a, c, g, or t
  misc_feature (318)..(318): n is a, c, g, or t
tggagatcaaatgccttcatacatgtacagcacctagattactgactgacacctaaataatcaataattaccagttgttaatataccatcctattctttacacggatgcccgagtatccactttatagancgagaacaaaaaagaaatcncatactgtataaatgattncgtcccaaaccacaaggctcnacaaagtcagagatggacctcatgcctggtcaaggtgngtagggtgagtggaggagaggatggaactcagtttccaccaggtgagctccactaacactttacctgcaggagccagtttgggagagagngaaagtttatttggaccaaggga

SEQ ID NO: 296450 - DNA, 807 bp, Homo Sapiens
  misc_feature (226)..(286): n is a, c, g, or t
  misc_feature (330)..(330): n is a, c, g, or t
  misc_feature (443)..(443): n is a, c, g, or t
  misc_feature (450)..(450): n is a, c, g, or t
  misc_feature (458)..(458): n is a, c, g, or t
  misc_feature (472)..(472): n is a, c, g, or t
  misc_feature (509)..(509): n is a, c, g, or t
  misc_feature (534)..(534): n is a, c, g, or t
  misc_feature (552)..(552): n is a, c, g, or t
  misc_feature (559)..(560): n is a, c, g, or t
  misc_feature (563)..(563): n is a, c, g, or t
  misc_feature (566)..(568): n is a, c, g, or t
  misc_feature (571)..(573): n is a, c, g, or t
  misc_feature (577)..(577): n is a, c, g, or t
  misc_feature (580)..(580): n is a, c, g, or t
  misc_feature (582)..(584): n is a, c, g, or t
  misc_feature (587)..(587): n is a, c, g, or t
aataattcatacattttccatccccaaaaakkccacacataatcacaaacattcaacktkttccactataatkatatgtattatattctcttccttataaactttattactaakcaaataaaataatacattcataatatatkaacaaataaatcatacaataaaaatcctktatwtkattwkcwcttaakatcaaatatcttcataatctctaatataaaahatnnnnnnnnnnnnnnnnnnnnnnnnnnnnnnnnnnnnnnnnnnnnnnnnnnnnnnnnnnnnntcatactatatatactttctttaaakaaktaaattatttctcanttcaaattccaaattataaacatttcctaawttcattacatccctaattaaattcttattctcaacttccacacatatatttcttatatataaaactcttaattatcataatncatttanaaaatctncacmttcgaamatnkcatataatcccaacattaacaaacaatttttccacnaatttcaaaattacaacttatacanctctaawattatattaanttcactnnatnttnnncgnnncgtncgntnnntcncttattaattwacgacgttcttttwttatttctaatttcttctaaaatacctaataataaawatatattawctaaatttacgaaaatwaattttckcgtttataaatawatataattwttacatsatatacwtcataaaatacaaataaaaatttaaacckacratgwtsratcgwawattackawtaatcgcracgwcgmgtgartaattgaaadtraa

SEQ ID NO: 296451 - DNA, 670 bp, Homo Sapiens
gcacagagaacacgccgcgatcacagtgtgccacacgggagcatgtctaccaaatgtgggaatatgtggacccggctactccacccctctggaggccatgaaaggacaccaaggaagagaacggctacctggcctggatttaccggaacacaagcactgagggcccagattatctggccactgtggatggtgaccccaaggcttcccagaattgcgcaggtcattcaccggctggccatgcccaacctgaaggaccagctgtattacttaagagggaacaactgcagcagctggttcggtgatatgcaccaagtcgcgcacacaagctggtgctgtccagactcatcttctctctgcatctatgtggtggacatgggctctgagacccgggccccaaagctgcacaagggcatatgagcccaagggcattcatgccaagtgcgaactggcctttcttcacaccagacactggctgtgcagacgggaagtgatgatcagattcctgtgagacactaagggcaatggcaaagggggttttgtgctgctggatagggagacattcgaggtgaacgggacatgtgagcctgtgggtgctgtaccgctggctatgacatttgggaccagactctacactgtgatgagcagcactgtagagggcaggtctcacgtg

SEQ ID NO: 296452 - DNA, 441 bp, Homo Sapiens
  misc_feature (235)..(314): n is a, c, g, or t
  misc_feature (356)..(356): n is a, c, g, or t
  misc_feature (379)..(379): n is a, c, g, or t
  misc_feature (407)..(407): n is a, c, g, or t
aaagttccttctctgctttagggaattaatctacttctttaattattatctccacttgaatttttcatgactgcttcaaaatcattgtttagggtttatgccatcctctccctaaaactggttccccttcccaacttatctgttacttcgatattagtattccacagaccttaaaaattcacattatgattttaccgtctatctcctttattacgcactacggtgggttcaactnnnnnnnnnnnnnnnnnnnnnnnnnnnnnnnnnnnnnnnnnnnnnnnnnnnnnnnnnnnnnnnnnnnnnnnnnnnnnnnngataaaaattaaatttaggggatctccatggaggatcatccncgggatttaaggggtggggcccnaaaatcccttaattaaggaggaaaaggnaggggggaaaggactgggagggcacccaaaaacc

SEQ ID NO: 296453 - DNA, 415 bp, Homo Sapiens
  misc_feature (193)..(212): n is a, c, g, or t
aggagtacggcacgagctcatgtgactttatatatctctctgtccatgtgaaaagagagaggctctatattttcacagagagagaaatactctgtgatgtgagcctgtgctgtcaagtggcaagagtgtggggactcgtgtgggaggaagtctttcatggcatctgagagaagagtgacagggtggctcaacnnnnnnnnnnnnnnnnnnnnaaatgcgcttggattggaaggattctttcctgtgggccaagggacattttaatttttggtttaacctcaggcaaaaactttaaccactctggcctttgttttccccaccaacggggagcagtgacatttaccttcctcacagagagactgtgaggaatctatattgagttggagaggagctgtgtagaactggaccttgtggg

SEQ ID NO: 296454 - DNA, 387 bp, Homo Sapiens
ggctcttttagaaactagtttgcttcatcactttgctggcttctcacagatttctaaaagcaattcccaggctattgtgggctatggtttgatgatattacttataatactgtggatacttagagaaattcaaagcatatatatcattggaattttccgaaatcccttttatccgaaggatgtgcaaactgtgactgtattctttgagaagcaaactaggctcatgaagattggtattgtcagacggattttgctaactttaggtaggaagataaagtctattaaccttgtgttacaaatcatatcctggaagtattcaaaaatattactcaattcccatatttgtgtggtattataccatatacaagtgtttgttcttttatgtta

SEQ ID NO: 296455 - DNA, 615 bp, Homo Sapiens
atgctattctctgtgccataccagagtacaggatcagctgagctgaccttactctgacgactaactcttttgctggaagcggcttctgattcacagctcttgtgtactaccagacatgttggcggtagagattatggcttttaaggggttgtacgatggcgtcaattctgtcacgttcccgctgcaggtttaactaaaagggagtgacacaatgacctctgttcagtgatcaaactatacaatctatgttcatatccaatccctggctctggagtccaatgagctagatacatttgctctaacgcctgatgctgctcaacttgccaaaagtgtgactacgctctgacatactgtaccatgctcacagtgctgctcgccatataggtgcatatttggcaaaaccatttgcggagtacctgcaggctgaactgcagaagctataccacataggctgaatgggcacaccacaaggggactgacttgcctggatagctggttggacgttgacatggtgtgtcacgttagcctatctatcattaactacatggtacagagttatgctaagcgaatccagcagcagctagactcagaggaggacttaactcctaggttccg

SEQ ID NO: 296456 - DNA, 358 bp, Homo Sapiens
ttaatgaactataattgaatagataccaaaaatagaatgacaaatgtattttaatagcagatgaggcagttttaggatgaattttccactgttgattttacttcaagacatagcaagagaaacaaaattttgttttcaagacatttccactgcagtttcaagctgtagtgggcatatgcttcatttacttccaaagagggcaaaagcagctgggaattgggcttacagcacatgctttgtttcatgttatggggtgagggcctacatacactcttactttaggcagtcactttaaccttctccagcagggcagttgtggggggttcactaggggtttaggtgccctggtctttttttt

SEQ ID NO: 296457 - DNA, 383 bp, Homo Sapiens
gcgagatgcaggtgtacctgggactgtactggagcttactctggagcacctattttgtgtacacatgggagtgctccactccctatcattgtctgaaggcctcattatgcccagactgctgttgatggtaccattctactgagacactgcctccctggagcccatgcatgcccagatgttcttactgcttaatagccttgagacagctcatttacactgaacctggcaagattgtgggaggctgcgcaacccatgcttgtatgacttactcctgtgcacaacagtgagagcccctttccaggtgcagcatgtgcttcatgggccaccggcagtggctctgtgtctgacagagtaggcttgctcttcctattgcttctacgcgc

SEQ ID NO: 296458 - DNA, 604 bp, Homo Sapiens
  misc_feature (331)..(331): n is a, c, g, or t
  misc_feature (570)..(570): n is a, c, g, or t
gcaataaatacattcagtcatttatttataaatgaatgacagaatattcaatccaaatagaaacaaccttttgtcagtgatgcaacataacatggagtcttatattgagaaagtgaatatgaatattttaaatagatgcctaggaaatctgtgtttgctgtttacatttaatgtactttgccacattagcagtaccacacttcttttactttcatccttctaagaactaatgaaagatagcttgctattagctttgacatgttgcacatgccattatgttggtctctaagaacaactaaattctctccagtgttcatgtgtgattcctttntcatcattattactttaatgtggatgaatactatttctaggaacttgattatcactgaacagattgcatatgtaaatgcagataattcttgagcaatatagtgaaaatgatttcacacaaaaaaatccatatgtactgtatacatcttcctgaatccttttatacattaggacattagctggctgcttctataaatgtacctgtattgtctgcctgctccctttgtggagatgtgtttntgtattggatgtttgggccaatgggaggcttcaa

SEQ ID NO: 296459 - DNA, 442 bp, Homo Sapiens
agaaacagaaaataaaaatggctacctaatgaaagtttcctaaattcaaataaagtaagtaaaatgtatgggaacagattttataagaaaacaaatgcaaggcacctgtagcctctacactgaaatatacagctataattaacagtttgctttccatcattctaccccaaattcctaagtacctaaaatattcataatgttgatattattgatttttattttcttacctgtgctttgccacattttcttgttttcccactgtgagcatagatttccttcgtaatcagaaaacatagctttcttttactaagtccctttataatttggccatatgaacaaactatttccagaaataagttaagaattacaagactctatgaatacaaagagaagatgtcacttgtttttattttaccaaatatgttcttcatagcaggcaaac

SEQ ID NO: 296460 - DNA, 682 bp, Homo Sapiens
  misc_feature (38)..(38): n is a, c, g, or t
ggatggaaggaagaagaggacgccgggcgcgcctcggntgctgattatcacaactgtttggtgacctacttcactgacctgtgaggattccttcccttcagaatggaaacagactgtaatcccatggagctaagcagtatgtcaggatttgaagaaggttcagagctgaacggttttgaaggaactgactatgaaagacatgtaggctcgaatctgaagcakttgtaaatgatgttctctttgctgttaacaacatttttttctcgaataagcctgcggtgtgctgtttgatgtggcctatatcaatktggaaacaaaggaaatawacagatattgcctataactcactgaagcagggctcaaggtggtaggctattcttttgacctaggtagatgatcatttacagactccctaccatgaaacagtctactccttgttggatacactcakccccgcctwcggagarggattgggaaagggastggttgaaagagtggartgtttggaaaagagatggasattgatgagtagagtttttsgtttsagagggggtggtksggggtasaraakgtggatataaasgtaaaattgktggatatggtsatrraaatggatstttggttttgtgttttwasavttkgttggamtttrgsktttggtbrraagatatgrataakgwtt

SEQ ID NO: 296461 - DNA, 352 bp, Homo Sapiens
ggtgttgtggctgttgtgcacgggtgcgccagacgctgtgtgcctgcggttggggacacagtgcacggacacgcgtcgcgccgtgctatgggcctgtgccacacatgtggagcgcgggcaggcctgcgttcagaattaccggctcttctttaagaatgtgactggtcactacatttccccctttcatgagattcctctgaaggtgaactctataagaggatatgaatgtagaaataccttggtggacaaatgcttaaatggagattggcaccaaggagccaatgaattccatttaacacatatgtgaaggatggaaagctacgctatgtggcgaatatctctccttacaagg

SEQ ID NO: 296462 - DNA, 410 bp, Homo Sapiens
  misc_feature (293)..(351): n is a, c, g, or t
taaaattcccacaatccaaactctcaggcacaaagtcaaatggctaattattaacagagctgggccaaacacatattttaaagtctaatgccattacctaaggggagggtattatgcacctaccaggggtcaggcaccgagccaggttggtagttacaaaattataaatatttatacttaaccaagttgccaataatggtttcaaaagattctaggtaaaactctatcatccaggaacagagatcttaacatgccacccggcaggaaaagatggccacaacacaaatgcccgnnnnnnnnnnnnnnnnnnnnnnnnnnnnnnnnnnnnnnnnnnnnnnnnnnnnnnnnnnnactttcacgtggcattgcccagttttaaaggcacccgccctgttggacgtttccacgga

SEQ ID NO: 296463 - DNA, 410 bp, Homo Sapiens
  misc_feature (309)..(309): n is a, c, g, or t
  misc_feature (346)..(346): n is a, c, g, or t
  misc_feature (353)..(353): n is a, c, g, or t
  misc_feature (380)..(380): n is a, c, g, or t
attatcctaacaggcttctttcttacttagaacttggaaaggctgctgtatttaataccctccaacactaacgcagacttaagataggtactgtttattgaaaacctactgagtgaaatgtgcggttttaggaccttcataaacatctcatttaatctttctagcatcctgtgaaacagccatgatttcacgttgataaacaaagaagacaggggtcccagggatgtgaagcatcttgcccaggcttctgctgctggtgaccagtgtagccagggactccaacccaggttttcctggactcaggaaggnctgaggctttttcctgggatgttatttaataggctantttgtgntccaagtcaaccaaggggccttgagtnctgcttgggtttctgctttatgggcctcac

SEQ ID NO: 296464 - DNA, 439 bp, Homo Sapiens
  misc_feature (106)..(375): n is a, c, g, or t
ccgagatgggtgggtaccccttgacagtctaggctgtggttgccccagatgtcatggaaggcggtgaggagggcttggagggacagcattaaaaatgggtcagaannnnnnnnnnnnnnnnnnnnnnnnnnnnnnnnnnnnnnnnnnnnnnnnnnnnnnnnnnnnnnnnnnnnnnnnnnnnnnnnnnnnnnnnnnnnnnnnnnnnnnnnnnnnnnnnnnnnnnnnnnnnnnnnnnnnnnnnnnnnnnnnnnnnnnnnnnnnnnnnnnnnnnnnnnnnnnnnnnnnnnnnnnnnnnnnnnnnnnnnnnnnnnnnnnnnnnnnnnnnnnnnnnnnnnnnnnnnnnnnnnnnnnnnnnnnnnnnnnnnnnnnnnnnnngaaaagtgtcagaagtggtccctgagctctaggagaggagcagggcctgggaagagcgtgaggt

SEQ ID NO: 296465 - DNA, 487 bp, Homo Sapiens
taccccgggctgtaggaatactgcacgagacgcctttctgtgctctcgcctgtaggacctgtgcagaatattgcgccgtgccgaccgcgcacacgcgcccatatgtgaacctcaaggacgagctgtgtgttttccaactgtggagagcgtctgtgtctcaagctctgtagggtccggtgaagcccggggcacgcatcttcttctttgacgggaaggacgtgctgagagcaccccacactggccccacaagaacgtgtggcatggcttggaccccaacgggcgcacgctgaccgagagctactgtgagacatggcggacagaggcttcctctggcacagggcaaggcttcttgctgttggggggcaagctctctggggcacagagccgcgagctgtcataacaccttagtgctctggattgagaacaggcttatgacatggcttcaagtaaccaccgcctggatgcacataggccgagggccgcggct

SEQ ID NO: 296466 - DNA, 401 bp, Homo Sapiens
  misc_feature (239)..(260): n is a, c, g, or t
  misc_feature (316)..(316): n is a, c, g, or t
  misc_feature (388)..(388): n is a, c, g, or t
gagaacagcaaaatgctgttaaagggaaatattaagaatgagaatctgcagtaagggtgattctgtgcccacagttcttcaattctttataccgttttacccacatgtggtgttaccaaagccgggcagaaccatgctagcggaagatgtgaaatccagatagctcattattgccaagagctaggcagctttgatctccaaattgttattgctttcatttttattgtaatggaattgcnnnnnnnnnnnnnnnnnnnnnngtattgaagagggttgttttccctttatttttcataagctaatgtaaatgaagganaaaatgtcttctctggggctgtagggctgggcttcagccgtacacagggtattacatccctaagcttctctnatgttcccctaat

SEQ ID NO: 296467 - DNA, 413 bp, Homo Sapiens
ggcacgagagtaactctctttcacaatgtgaccatacctgtgtatgggtctcttgggacttgggcttcatgctacaattcactgtgcattacctgaaggcaaagtaacagactggcattcattccaaccaaatggcactctctacaagaagtgattcattaatggtgactttgcattcaatatgtaccggagaggcactgtggagaaaccagatatgaacacatttcttttcccctgggagcaattctgcagatttgggtatagctttcctttggggcctggtgtaagacccaaactgagaatggggagaccttgggggtcaacctctcagacacttcaatggtagagatccaccatgggttccagaatctgagctgtgtactgagatttccgaaggaactggaattgcctgg

SEQ ID NO: 296468 - DNA, 706 bp, Homo Sapiens
  misc_feature (77)..(77): n is a, c, g, or t
  misc_feature (526)..(526): n is a, c, g, or t
  misc_feature (542)..(542): n is a, c, g, or t
  misc_feature (547)..(547): n is a, c, g, or t
cccggctgcaggaattcggcacgagaatggattgaattagcccaggatgacgacaggcttcgtgaagagcgaatgantgcttagaagaacagagacatgtatgtaggggtttactcagacagagttggaggattcagatacagtgaaagatatgatcctgagcccagatctgggatgaggagtggcatattggaagcacaattgatgacaccatcagcacgttacggaggaaagatcgagaagactctgcagatagatgcagcgactgcgatgaggaaacgagagctagacgaggcagatcttccacaggtgaattcatagatgacgaggagactgtgacgacacagcatattcatatgacacatgccacatcgaccaccacagccatgacacaagcgcacagttacttacacaaccattgatcttgaagcagcagcacactactcacgggatcaagcaaggtcagatcagcatgcttctacttgcacacctgagtcttgagttaagacttcagagcctagtgcgngtcatctgttgacgtngtcanctagtcagtagcaccagactgcaacatgagatcaactgactatctgagatagctgacttgctagtagtgatatgcagtgccgtccacgttcagactcgtggatggaacttgttacctagtgcttcattccacagctctgcatggtgctgtctggcttgt

SEQ ID NO: 296469 - DNA, 166 bp, Homo Sapiens
  misc_feature (102)..(110): n is a, c, g, or t
caaaagtaaatgtaataaaaatgcccaacataaaatgtttatgatcccaccaacaccctttttaaaaaatgtgaaagccaaaaaattaagttctagttttgnnnnnnnnnaaaagggcaaaagtatttgcccctggaacattcaattcccatttgagaataatggt

SEQ ID NO: 296470 - DNA, 499 bp, Homo Sapiens
ctattgaaatgtaatttaggatgatttgatcttccatctcaagttgtcaacatggctgtgtcattctggcttacatatgttttatttaacaaaattctagtcaagggataagggcataatgaagacaagcttcagttatgaaagtacaaactatttgtgtgattaatttttaaaaatgacattaagaagcccattgtaaaataatatttgcagtcaaatggtttttcttgctgtaagtcctgttgtagctatgtttagggtagtggttctcatctaccttggagtgcataagacttacctagcaggcttgtttaaaaagttcagattcctagctttgtacccagggattgcctcaggtggtatgggctgtggtcctggagtcatcacttttataaatagtggttcagagaccacagagagagactgcttcatcgaatgggaagtaccaacgagaaagtacaattcagtattgtctggaggcaagtggacactttgtacc

SEQ ID NO: 296471 - DNA, 356 bp, Homo Sapiens
ccacatcagttgactcttcctttcacaagagatttctctgtagcatgcaatcctgtttgatagcatttacccacagtagaacttctttcataatattctgaatcccgtgttgtgatttcaacaatattcatggcatcttcaccagaaatagattccatcccaagccactttctttgcttatccgtaagaaccagctcctcagccatctacattttgtcgtgagattgcagcaattcagtcccatcttccagctccacttctagttctcttgctatttccaccacatctgcagttccttcctctgatgcagtcttgaacccttccacgtcatccatgagagttggaatccttcttcc

SEQ ID NO: 296472 - DNA, 736 bp, Homo Sapiens
  misc_feature (408)..(408): n is a, c, g, or t
  misc_feature (459)..(459): n is a, c, g, or t
  misc_feature (468)..(468): n is a, c, g, or t
  misc_feature (639)..(639): n is a, c, g, or t
gcagtccatgttcttttcccaaggttctggatatacctagtgctcacttggcagagcccacccgtgtgccaaagactctggtggccccattactcagctggttagttgttaccacttggcagtcctcatgacctttgctgatataactttctgctgaacttttgttctctgctaagcctcctgttttcttctgaagtagtgtgtaccatggctaaatctccttgacttgtttgcacagggataaggcttgtctcagtattttggctgtaaaatgctatcctgaaaggatggcaataagcaatctttacattccactgataagggaatatcgttctctcactgactggcctcttatattgggttaactagaatagactacaggaggtgtgacattgtaagtgaacctgnggtgaggcacagggcagacaactccagcaaggcatggaatggatcctgttntgccttccncttaactgagaggcagccacctaacctatgtggtaatgcctttcctccaaggttaggtcccttagagccctcttcattcacttgtggaaacagagagccaatacaaatgggcttagtacaatatggttatacttcaaaaggtgcttctcaggtaatttgacattccttctncctcactagccttattcatcttggaaaatagaaggagatcctagatatcattggacattttgaggttggaatctgatggttgtggtttgctcgtttt

SEQ ID NO: 296473 - DNA, 807 bp, Homo Sapiens
  misc_feature (270)..(271): n is a, c, g, or t
  misc_feature (274)..(274): n is a, c, g, or t
  misc_feature (283)..(283): n is a, c, g, or t
  misc_feature (285)..(285): n is a, c, g, or t
  misc_feature (288)..(289): n is a, c, g, or t
  misc_feature (291)..(291): n is a, c, g, or t
  misc_feature (294)..(294): n is a, c, g, or t
  misc_feature (297)..(301): n is a, c, g, or t
  misc_feature (305)..(305): n is a, c, g, or t
cgcgtgagaattggctatatcctggagcgagttctgggaggtgctagtccgccgcgccttattcgagaggtgtcagggctgggagactaggatgtcggacacgtggagctctatccaggcccacaagargcagckggactctctgcgggagaggstgcagcggaggcggaagcaggactcggggcacttggrtckacggratssagaggcagcattgtctccaaccttccgkagtgacagcscagtgcstackggrcccaactctggggnnccnaagaccagnanagnntnagnagnnnnngaangaggtamagaksctgagtdagagaagaagtkgckacaccacctctctgatctggccttaacattgsgcamtgatgckgkgtccatctgtsttgggatgtggaggggagaggagcskgamackcaagagggggtagaaagsgkcctggagaagtttgcaggksaggagttgattgaggaaaagggaggagkggtagaagaaagaagcasatcctactcttgtaacctmtgctgaccmttccamgctctctgcsatgatgggtgctgtggcmgammagmmgggccctggggaggtmgcmgggactgtsmcmgggsagamgcggcgtgcagaacaggactcgactacagtagctgcctttgcsagtkcgttagtctctggtctgavctcttcagcmtcggavccagcaaaggagcgmgcgmagagmtcamggamacatactgcctcagatgttgatctggagatavaragcttstgaacgamsmgtsgmctamggrmcacsagag

SEQ ID NO: 296474 - DNA, 370 bp, Homo Sapiens
gttttaaacagtagctcccaaatattagatgtaaacaagtggttagtgcactatggttggtcacagtagggaagaaatgttaattccagtttttcgttttaatattaattaaggataagggggcctaacatttacatgtgtagataggtgtttcacctgttttctcattttacaggaacttgaggtttgtcgtagtcccattttagtgtatgtagcactctcccatttccccatatggatttcaaagaacttaagtcttgtaacttccttatttatttatatgctctaacttcaccgtgtttcaaagtggagttagcttatagcagtacagagtcagggagttgaggaagggtatatttgaaggattcag

SEQ ID NO: 296475 - DNA, 398 bp, Homo Sapiens
gggcctcaaaaaaacactgatgggacaaacgcaatgaatgttggacaacctcctccctcccttgcctgagatatttcagctgccctccccgaacacccctccacccgcagcgattatttttaattagttgctaacatttaaactcaggagagctcacataatctggatttctgtctcctcattagaagagttagcagccctgagactagaacccacgactccagtgctcttcagacaacctcagtggagctgggggctgccctgggggctacacctgggctgtccagcttgcacagcccttgccaggcccacttacctcatccgcagaaccctccacatccctatagtcatttgagttttcccccacccttcgggtcatgacggcttccttttttatg

SEQ ID NO: 296476 - DNA, 397 bp, Homo Sapiens
ccctcttccaaccccacccaccaataaaaagagatttccaaatgcatcatatagtcatcaagacatggtaaagtctgtttcaaaattgtattcattctagttggtgtttagaggcatcttattatggttttaatttgcattcctttgatgactgatgatgttgagcatcttttcacgtgcttattgccattcctatatcctctttcatgaaatgttttttcaaatattttgcccatttaaaaaatttgggttatgtcttatcattaagctgttaagagtgtctcacatattctagatgtcctttgtcagatatatgcattgctaatttctcccagtctgtgggttacattttcactctcctagtggtgcctttccaagagcagcttttagttttggt

SEQ ID NO: 296477 - DNA, 369 bp, Homo Sapiens
gtgggtctacctttatttaaatgatttttctgtgttctgaatattgtggagtcttctatttggaattattgttagaattctgaagtcccactttgggggaattattcattccagagccatatacaacctgtttctctttctgtgatttcttcccttcctacttcactttcatgagttcatcctatgtcatctttctgtccctcccaatgtcaaaggccctgaggaaagggcctggtgaaatggactctggagttagactgaggcccaacagcctaacaagccttaagttgtgtgatctttctgcctgtttcatccaggtatcactaacttagtccatgttccagcgatgacctgttacttctacatcag

SEQ ID NO: 296478 - DNA, 336 bp, Homo Sapiens
agaaacagcacaaaagggttgaatgagaaccctactcgcctatatgaggaatgtgtttcctacacatattaaaataccaagggttctggctgtgtaaggtgttgtagatgacagtaaaacctgatgacaccatttggttccctgtaaggctacattacatatttcacaactttggccctctctataaggcacattggaaaaattcttcaactgagaactaccttggtaccatgtcctacacgttttaaaccttaagtttacttgtgtatacaattcaatttttgtggcttcagggtaaactcaatttttggtaaagtgggttcagcttttgtgaaa

SEQ ID NO: 296479 - DNA, 645 bp, Homo Sapiens
  misc_feature (481)..(481): n is a, c, g, or t
  misc_feature (512)..(513): n is a, c, g, or t
  misc_feature (524)..(524): n is a, c, g, or t
  misc_feature (579)..(579): n is a, c, g, or t
  misc_feature (598)..(598): n is a, c, g, or t
  misc_feature (619)..(619): n is a, c, g, or t
  misc_feature (631)..(631): n is a, c, g, or t
ttggggggcaaacatagtggattatacctgtaacctggtttcagcttcagcgtaagctttcccatcccctgtcttctcttagcagtgaaatggttgacaggaatggcatccagtcacaaatttattactttatatgagttgagtttattatgcaatttcttttctggtctctgatagcaacattaaacagcaagctgacattttgcagacgaagactttttctgagagctttgcaagtattacacaatctatttgttgcaatgtgaaatgtacttttctattacatttgttaccatgtcaaatttatcttgtgagaacattagttattaaataataatcacagtaccgaaatgatcattaaatttatgctgagaatcagagttttccaggctctatcaggatctaacgaggaatttaaccaaagttctctttgaataagcagtggactccttcctgtgtgttatgcttgccagactaaggngtgattatcttttctaggccatgtatagttnntatttaagaantaacaatgaggcagagcttttgtgacaccttatacacagcaatttatcacacttngttcaacccactgtgcatncatcccatcattcaataattnttaatgaatttntatttgccagcggg

SEQ ID NO: 296480 - DNA, 366 bp, Homo Sapiens
ttatatcatgtcgtctagactgggagcaccctttattaatacccgaataatgattattgcacatatgtcccatgtatatttagccagtctccacgaggcgacttggagctttctataatcatggagagtcattgatatcaagtcagatatcacagaatagtttaaagttgattctaacaattgtgcgtacagcacactcttataaacacatgagtagagaaccaggagcagcgaaagtgaggcgccagtcctgcgacagacattaatctgaaggggctgggatggtggtggcaggaagctcaaggaacagaatcccagaggcttggtggcctgaatctaattagctgctgctctgagccgggtctt

SEQ ID NO: 296481 - DNA, 358 bp, Homo Sapiens
  misc_feature (153)..(294): n is a, c, g, or t
gcacgagctgacaattcccttttgaatgtcaactccctgataacagctatcttgtttgtcttgttctgattgtatccgtcatacctatgccctgatatgatcaggctctggccttgctatcctctcaacttcccctctaaatcctataaactnnnnnnnnnnnnnnnnnnnnnnnnnnnnnnnnnnnnnnnnnnnnnnnnnnnnnnnnnnnnnnnnnnnnnnnnnnnnnnnnnnnnnnnnnnnnnnnnnnnnnnnnnnnnnnnnnnnnnnnnnnnnnnnnnnnnnnnnnnnnnngtattggccattcttatgtatgctgaggtccgaggaccactgccatgatcatggtctcatccac

SEQ ID NO: 296482 - DNA, 697 bp, Homo Sapiens
ctgaatgctttttgtcatctctgttttcatagttcttgagcaggtactaaaaattaactggaaacaatgaaagtcatccaggttagggagaggaagttacccgtttatgagagttgcttgagagataagctgaaaggatgtggcgtgctacccccacccctgcctcgtgtagaaaagcctgccaatgttgcctcatttagacccagactccaaaacgggagtcttatagctgggccacctaggaagagaggttctaaagcataaaaaagaaagcatttcattttgggacacttatttgcagctggaaatgggggaatgggctaactggctaaactactatcttgtccatcctgccttcacttcagtccttccacattgttatttggtgtttggactgtgctagaagaactgttttatacaggctgctattcaataaatttgtaaataccatacccacaccaaaggatttaacactgaaaagattaaggtaattttggaaaattctaaaagtcacttttcactcctgagatgtaggtggtcagaagaaatgaggaactctgtagaagccatatgcaagatgcacagatggcattgtgtttgttgtggactgttgatgttaacaggatggaagaagtcaaaactgaactttattagggtataagtgtctctctcagaaattgagttgttagcctggttg

SEQ ID NO: 296483 - DNA, 318 bp, Homo Sapiens
cctgaatacaggaacatcggagacctattcactcccacacactctgctatagtttgcgtgcttttgtggacacccctcatgaacaggctggcgctctaggacgctctgtgttcactgatgatgaagaaacctagaactccaagcctgtttgtaaacacactaaacacagtggcctagatagaaactgtatcgtagtttcaatagagcaagttggacaattttgtggtgttggggaaatgttagggcaaggcctagaggttcattttgaatcttggtttgtgactttagggtagttagaaactttctactttgtccttt

SEQ ID NO: 296484 - DNA, 114 bp, Homo Sapiens
acgaggtttaacaggcaaataagtttccttgggagactgaggtcccttaaaggggggacagcaatatgtgacaagtgtgtccctattctaaagaggactgttaaatcatctgga

SEQ ID NO: 296485 - DNA, 399 bp, Homo Sapiens
  misc_feature (354)..(354): n is a, c, g, or t
gtggctttaaaccaggggcaggttgtccctccaggcagcattggaaatgtgtgtgtgttgagggggtcacagtgactgtgggggcacccctggcatctagtgggcatcccacaatgtgcagaacagtctctgacagcaaagaattggtccattcaatgccaattgtagtacctttgagacattctggctgagccaatgccttctccctgtcagagtcccccagagcagagagggtcaggcttccctggaccttggctcccagagcaagcctctgcgtgctgcagggccaggacagaaatagccacacatgccggtgagaacgagcctctttctttctcatgttgacatcgactntctgtgccaagtcctttgggtataaggatgctagggttcctatgg

SEQ ID NO: 296486 - DNA, 419 bp, Homo Sapiens
  misc_feature (376)..(376): n is a, c, g, or t
ggaattcctataggcaccaaacagaaggaaagctaggggtttggactactgggtataggacttgctctagctctcaggtcctagcccaagctcaatgcaaacacagcccctccggcttctctgtttctgtgaggttctggaatcccttcctctgtgtccgtgagtctgacagaatcgatgatgttcccttagagctgggaaatccatgtgtttattcacggagggaactcaccattacctcccttgtcttctttgcctgccttgggagaaatccagagtctttcgggaatgggcaaagggcagctcctgggattttccctgggaaggggagggcactagcttgaggggaagtaggctccctttcatttcaatgatngcacaattttaacggcaggcaggacaacaacaacttgcggcct

SEQ ID NO: 296487 - DNA, 586 bp, Homo Sapiens
ggatagactggccagcactggtaggaacctgtgcaagacccaactggtgctctacgatgacgctgaggagcttaataggagtgctggtgagctccccaaaaccggggaatcaatccacacagtgcaagagtaagtagacacgctgttgaatcaggaccaagcacaaggcgcgcgtatgcctgctaaagactttctggacagactttgttgtctagacaacctgaaagcctcactcagccaagtgggggtggacatagaaatgctcaagactgctgtggacagtttagatgcatactcagtcaacatagaaaccaactagaactatgtggaatcaggcaaagagttactagataacctgacgaatgatctggataggatggttgggaaagtggcttaaagtcacataaagggctcaaagaattgtgtgtgcacggagccgaattaaaagcccatttctcataaccaaagagtggtttatatccatgcgtcccctaacgcacaagttatttgtccctcttgagcatgttgttaccaactgcacaccaaggcatatatattttcatgcccaggtaacctaattactttt

SEQ ID NO: 296488 - DNA, 582 bp, Homo Sapiens
ggaacgttttgcctgttctagaggcaacggtgttattttcacaggcgcgatttgctattcagaaagcaatccagtcaggagaggggggatagcttactatgccggggaaatcagccactttttcaaaacataaaatgactcccaatggcattcagtgtattgacaggaattgctgatgattgcgaaaaacgtcttactcattgcgatgtttgtaacgcagcaaagaactcacagcactcttggatggtgagccaacaagcgctgagagtcaccagggtccacatttatgtgctcttctcacctatacctctagccacctgtcttaacaatgacacaggtattatggagcatgagctcatggtccgcaagttataactgatgatataactttactcgacacaagctcctctaacatgttatcagcacttccaacccaattaaagttccactatatttagaacatggttgagttctacaactttacatattatttgagcataaagtatctcaagtcttaaacagatttagtatactgggggacccatgctattcttgtactacacttaccttcttgtgggtgtc

SEQ ID NO: 296489 - DNA, 872 bp, Homo Sapiens
  misc_feature (23)..(23): n is a, c, g, or t
  misc_feature (28)..(28): n is a, c, g, or t
  misc_feature (59)..(59): n is a, c, g, or t
  misc_feature (62)..(62): n is a, c, g, or t
  misc_feature (242)..(242): n is a, c, g, or t
  misc_feature (284)..(284): n is a, c, g, or t
  misc_feature (372)..(372): n is a, c, g, or t
  misc_feature (593)..(593): n is a, c, g, or t
  misc_feature (625)..(625): n is a, c, g, or t
  misc_feature (627)..(627): n is a, c, g, or t
  misc_feature (629)..(629): n is a, c, g, or t
  misc_feature (637)..(637): n is a, c, g, or t
agcacccccccaccctgtccctntcgantgacaacgtttgcaggcttcagggggaccanaanaacaaagctggggcctggcagccccactacgctgccagccggggagaacaagtcacaattacaaataatcacaacaataagcgaccakaaacatattkagggatctgvaaatatakatmkwggvsatstagatacamattttmsarcttttactataaaavmkaamgcgcattaagctgnatgaaamgwmatmtacatacgcttgcmtacgcttatttaatntatttataataagcsstttttsatcakttggctgcataatcaccctgcacgttcatgctcaccagctcctcattgtagagagacagtngggactcccggccgaggatgtacacctggcccttgaggacggacacctgcamtttmmmttmmaatmgmtmmtgggamttggagatgmagtggaggaaaaattmamaataagggatgtgaaagaaammggtataaaaaagawmagaaaatttmaagaaaaggccttgtttgattttgagmaattammggtmaatggtgaaggmmtmgatgtataaatgagantggtaaaggatggtgaatgatggggtatastngntnaatmgggnattcattmcaatgaagcggttctccacgatgtcaatacggamaaagcaatgattgmaagacaattacgttmaggtacatgaagagatamaaggaggtatggtgggtggtgamatamttgaagttggtmammttaamagggaaaamttttttgaaatasatatasagaatgtcaggggtgtwgggggmtttggatgggtamtgggtcttastgtagagammtggaggagattggtt

SEQ ID NO: 296490 - DNA, 418 bp, Homo Sapiens
tgaatgaacacacctgtgatctatgccttgtcttgtaattgtggattaatgtgactgttaatcactccctcaaagggagagataagttggacctttttccttgctgtgccatattcagcatttgattttcatgggccccaccatttatgtgtagaatttgagacggttgtcacctttctctgaggacagagcttgcagtctgcacatcagctgctgctggagattcaaagcccagctgtgggtccgagagggaagctgactgcgctggctgaagaatgaagaccactggactctgcgctaatctgtatggggtatgcttatcaagaacgcttctgaacaatggagactttgatgcgagccatttggtccatgtgcttatctatttattagagactttctttcccttgcctgaggaccc

SEQ ID NO: 296491 - DNA, 597 bp, Homo Sapiens
ccaccttggcctttccaaagtgttgggattacaggcatgagccactgcacccggctgggtttatgtttttatattgagttgtaggagtactttattcattttagctagaagtactttattcattttagcttatcagctacatgatttgcattttctctcattctgtggattgtcttctcactttgttgatggtatcctttgaaccacgtgcttttggtgtcatatctaagaaatcgttgcctcatccaaggtcatgaagatttacctctatattttcttctaaagattttatggttttagctcttacatttaggtctttggtccattttgatttaatttttatataaggtgtgaggtaagggtccagcttcattcttttgcacgtggatattgagttgtgccggcactatttgttaaggctgttttcctctgtttaatcatcttaaccctttttggaaattaattgaccataaatgtgagtgcttatttctggactctcatttctataccattgaactataatatatatctgcccttacgccagtaccacactaattactatagcttcatagtatttgaaatcaggtacagttctcc

SEQ ID NO: 296492 - DNA, 345 bp, Homo Sapiens
ctattagtaactaatcaaaatgatcattactgtgagaaggtggggaatggtagaacattgcttttgctatatttggcaccattaatacaaaggctgtgatcgctgtgatgagtgctggtcatgctaaccatgttcccgcatggctggtgattatgtcctgggttgggttctgcacggtagcctgctttgggttaaggacagtcacacctggtctgtcctgacttctttctgggccctcctaaccccaggggaggggagaaggacccaattctttttctttggtgcacgtagcctggacccgttatggacagaggccttctttgagcccttgtttatgagcctttg

SEQ ID NO: 296493 - DNA, 376 bp, Homo Sapiens
aaaggatggggttcaaattgtgaagctgacaacttttcatgttttacaattagtctaagagaccacttcttggctaaattattatatcaaatatattcaaatcatattcttaaactcatcgagccatttgaacaaaaattatttttgtttagcttcatgagtatctttggtaatttgttgaatatatatgattatgagatattttctgataaacactgaattttgaaacctgaactcactatataattgcagtgttttgaaggcctgcatccattagcattgcattatattcacactgccttttttagtgaaccaagacccatcttctggacgacagatttatcttaagatgggttgtataacatgcccacggcat

SEQ ID NO: 296494 - DNA, 312 bp, Homo Sapiens
caggattcggcacgagcaccagcctttgctccttctcccagtgggagtggagagaactgactgctgtagtggagacagtcaaggctgtccttctgagggagcacagcacagggtctggtgtcccagggaggcaatctgaaattcaagccaggcctccccagcggagaggacacacccctcaccatgcagagtgacgtttagtaaactctctccagaccagtgaacaaggtggattgcccttaagccagctcagaggcaaagtccaaagacctcaggtgagtcaaacaatataaacgaattaagaagaatcca

SEQ ID NO: 296495 - DNA, 651 bp, Homo Sapiens
ctgtttgcacagagagaggcaattttgtctacctttcgagaatcagttataaacagaagggcctcttaggattttgagctctcctgacaatgaaggaaaagctctcttgagtatacaagttccacactcattacctttcagtggtgacccatcacccactacaatttgttgaaggaagggagtgtcagagatatgctttaaagttgtactttaggctgaaattctctctgtatttggacctgcagatgttgtgtacagaaccgatgcatggcagggtcaggaagctaggagagtgaaggcgcttgtggagacagctctgtagcaaatgaaacacggaagcctccgggaatgtgtttgtgtcaccagcagcaggcatttccctgtcctccccacccccagtctccacatccccagcagcctcttccagaagcatgtcagggagacggacaggtgctctccttctcgtgcaccacatccaagtccacccaccgtggacgcagtgtgactaaatgctggccttgaagagaaaccctcagccagcttgtctgttgtccaggtccctcagtgtctctggtttccctgccctgcataatttaagcattagtgctaaatacatctgtcatattcctctccctggagactgcgaaatgt

SEQ ID NO: 296496 - DNA, 578 bp, Homo Sapiens
caaatgtcttgcaaagaaatgttattaaaaccttgaatttttacaaatgtaaaaaacaaaaagtgtattaatgtatttgttcaggaaaagctacataccgaagggcttttgtatatgaattctgtggtggggagacccatttgtaatctatatggcagttccatctgggttttaagtttagatttcaccgtgtcttaatgcttcattctattggtttattggaacatgtaataaataggagtagtgatgtattaaaacacaagtattcattaatgttttatatcttcactaaaattctatagttatgaaactattttatcaatcaaggtgttatatttcagtcagaagtgtttatgaagagtatttggaagtgtgtacagaaataaactagacttacaggtaggctagatcagaacgttaacatatgaacctgcagaaatctggtaagacttaaattcagtgtgaggaataactctaggtctctcctatgagcatttcctacacaagtaaacacaattaagttattattccactgttaggaatggaaatcttgtgaagtctgtttattttggtttggg

SEQ ID NO: 296497 - DNA, 656 bp, Homo Sapiens
  misc_feature (575)..(575): n is a, c, g, or t
  misc_feature (588)..(588): n is a, c, g, or t
  misc_feature (631)..(631): n is a, c, g, or t
aagacaagcagggatgtgtccttccagccatagagcagcaagcgttcactgaaagtatttaatcaggagaatgcatggattaaaaaaactcacgctggctgatccaattaagcttattttgtgacacccaaatggctggctttctacttcaggtcagacttaccttttacaagatttcattccaatgtattaatgagcagttatctcctttcctcccatgcttaatgagaaataaaatactgactttgggcccaggtggtgactgagttggagggtgtccatgattgaagttaaggactaaattagagttggccaagccaccagcagagaggaaccttcatgaacatctgctctcactgtggctacagagggattgtgaatatcggttttctcttctttcattagtggagtatttgtcaatagcattccaagctgtcttttcctttcttggcttgactactagcccctttcccacggtacagtttcacaggcatctgccttatattctgttctgtacttcccttggacattctttgtaaaagagttcttaaggttttctatcttctgccataganattaggagtgttntatctctaccccatgatgtctctcttagatcctgagctctttntctgtttgcctagccaccttatcct

SEQ ID NO: 296498 - DNA, 309 bp, Homo Sapiens
tacacttgacattacttttccaaaagtctgtcctttatactcctgtgcaatttcaatgtaatatatgatacaaacacacctccaaactgtaaagctgtgcacaaacataaaaaatggcagccttccatctcctgcactggctgagtccatttacttgtgtacttgttctagtgagtggtgggactgtacatttttgaatagacctcaaaaatacttcattctgctgctgttcactcgtctttttaaacctgtctgcagtaggacactgaaaacagcaagaacttcggggtgaacacccgctgatccttt

SEQ ID NO: 296499 - DNA, 364 bp, Homo Sapiens
gcagactccaggagaagggggcatgctcgcagtttagaggaagtgagcccctcttccacgttccactcccaccatcctcctgggaccccagcctgcatgccccccaagacctgtgaatggcatgtacagtcctcagttcccagctgaggggccactcgggctccccatattcccctcagcctctccatcttccaacaggggtgtggagtgcatccatggccatgagtattgatctgtcccagcctgtgcattgctctgaggcagttctgagtggatgatgtacagatgggattcctcagctcatttgcgtggttgacgttatggctgctggttttactgccacaactcctaggccccctggctt

SEQ ID NO: 296500 - DNA, 568 bp, Homo Sapiens
  misc_feature (41)..(41): n is a, c, g, or t
  misc_feature (53)..(61): n is a, c, g, or t
  misc_feature (351)..(374): n is a, c, g, or t
  misc_feature (444)..(444): n is a, c, g, or t
  misc_feature (474)..(474): n is a, c, g, or t
  misc_feature (509)..(509): n is a, c, g, or t
tgatagtcgaattccttcaacgtctagcacagtccttcaantttacccactcnnnnnnnnntttcgtaaggaattaataaatgaatccttaggaggaaaagtgaaaatgaagtttttctctcaggatgaggtgtatttctccgttcatttcagatatgcatcagctagtcagcgtaaattgtgctttttatatgctcaccaggtgtaggtaagagctttggctgagatggagaaattcatcgcgggaggataataaagcgggcagggatttggcaacctcagagccgcgaggagggaggcggagtcgcgggagagtttgagtatttccgtcccaatcaaaaggagactgtnnnnnnnnnnnnnnnnnnnnnnnnatgacttgggggagccgggacccgaaggaatacttccccagttactctagccgcgccagggcccgaaccngcagccttctttggccttagggtacttctncttaccagcgcccgattcccgaggccaacttccancaattgccttttttcaaatcttccgggaaagtctttatcagtacacctgggccctttct

SEQ ID NO: 296501 - DNA, 391 bp, Homo Sapiens
ggcacaggcaccacagagcgccacggcgaccctgaagaaggcgcgctacaatgcgtcagtgccaggagaccatacgcgtgaccaagccctgtacccccaagaccacaggaaaggccaaagccaagaaagggaagggaaaggactagacgccaagcctggatgccaaggagcccctgtgggacacggggcctgtgccacagcccttcctcttccaaggccgagaagtgacccaccagtgcgcttctgtgagctcggtagccttaatcaaacatgccctggcttgtgccttttacattgcagacccacccctaagtgcccaaagtggggaaggacaagggattctgtgaagcttgagccttcctcgctgtgagtcccaggcccgcttttggtt

SEQ ID NO: 296502 - DNA, 368 bp, Homo Sapiens
ctggcctgtagtagcttaaaattttccttgagaaaattcctgactttaaaaataacccttatataagtacaagtgattgtgacaaatgacgtaaaaatggcattcatgatgtctgaaacaagcctaaatagaattcaagattagactaaatgattttcacaaagcacattcaaggttttacattctatgattgaaaaaaattttttgatgaataaagtggaatggtaactttccagtggttcagaattgaattagacttcttgtgactgtgatgtttggtttccattgaaatatatgaagtgagatgtcatatcctgaatatagtttgtcttccccaattacttgatagcatgtctgtcagccagtaa

SEQ ID NO: 296503 - DNA, 387 bp, Homo Sapiens
ggaccaggaataacgcaaataatgctcttaacgtactcagagccaccacgccagaccatgacattttagttaataaagtaacacattgatgccacagagcaacactgagggatagatggtaattgttacatttacatgtgaggaatttaaactgaaaggtgaagtaattggttcagcattatgctcgttactggaacattctagtaatatatgtgcattataaacgtcagaattagttcctatactcaacatctttctaatggaccctttgtgtatgcaaagtcgtttagtatctcaactctgcaggacttacacctactccctcagatcttttgtttgaacaactgactacttcaggatattctactgtaaagaaggctgagcctt

SEQ ID NO: 296504 - DNA, 420 bp, Homo Sapiens
  misc_feature (120)..(142): n is a, c, g, or t
  misc_feature (164)..(212): n is a, c, g, or t
tttctgttaactcagaattattatagcattcattattgttttgtgaaaatactagttaataatctccggttaatgaaataattatcttagataaatttactgaacttaatgtagaatatnnnnnnnnnnnnnnnnnnnnnnngagacagggtctcacttgtcannnnnnnnnnnnnnnnnnnnnnnnnnnnnnnnnnnnnnnnnnnnnnnnntcctggggctcgagtgatgctcccacctcagcctctcaagtagctggggactacaggtgtgtgccactacacttgggctaattttcatattttttgtagagacgggggtttcacccatgttgcccaggggtgggtctttggaactcctcctggagttaaagcagtctgctttgtcttctgtctggccagagtgctgggcatttttggg

SEQ ID NO: 296505 - DNA, 530 bp, Homo Sapiens
  misc_feature (367)..(413): n is a, c, g, or t
cgggggagaggggggtctttttatgttgcccagactggggtgcagtgactagtcacaggggcaattatagtgtactacaccttcaaactggtggcctaaagggaaccttctgcttgaggttacccaaaggctgggattacaggaacatgccagggcgtttggttccaatcctttaatttcaaaggggaaggattacatataattctctcaaaggttatactgcttttatcttaaataaacataaaaagagcgcaaagccaccgttttttttacaaatatccattatgaactcaaatgtggactttgcaaacttcagaaatgtatcagaccctaacctgggatctttagggccattgatcaattttgnnnnnnnnnnnnnnnnnnnnnnnnnnnnnnnnnnnnnnnnnnnnnnncgctaaatgttctttttggatatctagccttactttcccgccattcaacgttaaatgacccggagaagcctttcctcaaaataaaccctttggctcaaccctgaaaaagaatgcccg

SEQ ID NO: 296506 - DNA, 357 bp, Homo Sapiens
gttgtgtgtatgtagtagatgataacctttagctttggttttcaataagaattttaaaatttattacaattaggacctgacccaattcttttttgagaattcatttcatagagcagcgtgttagaatatttttgttcttctaatcaagtgcagtgtaagaactgtagacatccataatttcttttctatcccttggttaagatattagctttattactatatttactggtcctggaatagcaaggcataatctgaggagcatagctacttcatctgtgtaataaattgctctttcactacaaacattttaatactgattttgttggtcatttaactttctaatagtggtccttaaat

SEQ ID NO: 296507 - DNA, 387 bp, Homo Sapiens
tccaaagatcagagtggagtgcttctgaaaaacgaaacgaaaggaagtcataataacagaacgtattgtgcttgtttgatgctccgcgctaggaactaaaaaaattacgccaaacacgggtttgatgcttacggggtacacactttggcgcatcccgtgaacacaaagtttaataccaaacagtccttgatgcttaacctgcggctgccaagcagattgtaaaacataggaaaacatttagcgcaaactgtactatgcttttgcaactttgcgcgtggggcaagtttttgaagatacattggccttacaatgaacaacaaaggttatctgagagaagacaaggaggactttccattctgtatgtccaaccattggcactgttgatcg

SEQ ID NO: 296508 - DNA, 285 bp, Homo Sapiens
  misc_feature (16)..(16): n is a, c, g, or t
  misc_feature (61)..(61): n is a, c, g, or t
  misc_feature (75)..(184): n is a, c, g, or t
  misc_feature (253)..(253): n is a, c, g, or t
ggcagaggaatctcantttactatgcaaataaattaaatacttagggataagcttacgaangaaattgcacaaannnnnnnnnnnnnnnnnnnnnnnnnnnnnnnnnnnnnnnnnnnnnnnnnnnnnnnnnnnnnnnnnnnnnnnnnnnnnnnnnnnnnnnnnnnnnnnnnnnnnnnnnnnnnnttagttctctctaaatcagttaatatcatataatatcaataaaataccaatgtacccttaaaaaatgantttagacaagttgatactaaagttcacatggg

SEQ ID NO: 296509 - DNA, 444 bp, Homo Sapiens
ctcttttcccacctgttttgataaaatcaaggcaggagtcttcacccagggtaactttcaccctgagtcctctttcctctaactgtcacaatggtgccttgtcacccttctgacattgcttctaaatttgaacagggttgtaaccttgtggaaactagaaccactgcctgccctgacaccctggaaaagcagatacatgttggcacaaaggatgttttcaataaagactttgtagtagtatcttaaaagactatttagtagcaaatactaaattgtatttagacttttagtcttaaaatactttgtagtcgcaaataaagactaagaaaatagttttatgttatgaacatttacgatcttgggaataattccaggtgacattgctcttaatttcttttaaattcttaatgacttttacaatcctaccttcatgcctgataaaaa

SEQ ID NO: 296510 - DNA, 413 bp, Homo Sapiens
  misc_feature (277)..(277): n is a, c, g, or t
gccatttgtccattcaggagtgacctgtccatacatggccatttgttattcagacgcagtatcattcactggaccggatacatgtctgtgttgcccctcagatccaccctctgccctacttctccctgcctctgtgccctgggaggccgaccaatgtgaactaaatcaaaggacttccctcctttctgtcttcctcattcagccacgaagaggacgagaagctctagcaggagactgggggagggggatggtgggacaatgaggttgtagagtttcnatgtatttagagtgcttattaggtatatccacacgaggtgaagttcacgacaacttatgggttcttaatgaccgacaataaagccaggtttgccctgtaaatgcgaatagtggtgatgtctcaccagactgtactg

SEQ ID NO: 296511 - DNA, 375 bp, Homo Sapiens
gagtaaacggcctgcccccctgtccctaagcagccgcggtggcttccagtgattcctaagggtatttcggaagcaggggcattggctctggaaattgatgcattactttcactcccccggattagtaaagatttttgaatgaaatgagatgatgagacaggaagggttgccccgctaaattatgcggtgcggtggacgttctgccgagtgcgccgcggatttatcgctctcttctgtcggcgtttgccttggctcgctttctccttgctgggcctctgacttgaccggcctaggtggctgcctccctcattccagcatccacattccccttggaagccacaccctgtgcacacctgggagaaacacttcacttaa

SEQ ID NO: 296512 - DNA, 360 bp, Homo Sapiens
gattgattgttagtcagtgatggaagggtgttctgatcattccgactgtcccaagggtcgctggccagctctctgttttgctgagttggcagtaggacctaatttgttaattaagagtagatggtgagctgtccttgtattatgattaacctaatggccttcccagcacgactcggattcagctggagacatcacggaacctttaaatgaaatgatttgaagggccattaagaggcacttcccgtaattaggcagttcatctgcactgataactacttggcagctgagctggtccgagttgtggccgctttaaggttgaatggccttttaagtttaaaccaatttggcatggccttggaa

SEQ ID NO: 296513 - DNA, 419 bp, Homo Sapiens
aaaaagttgttacttgcaaagtttgggaggtgacatcaaaaactcaactgcccttacaatagtcattccatccatctgttgcttatttgaattctcatttatttttactttatggcattaaaatacaataaatctgtcaattatgtattttatattagtagtagcttaagattgggtcacttcatttcggtagatataattgttagtattatccttcaggacaaaaagcatctgctaacaacctgtggtttaaaaatataggccaactttatgttcaaacattatgttgataatatttttagcagtattacacagtggaggtccaaattggattagacttttgcattgaattccaaagtattggtaagtctagcacatactataaagtcttgctaaattcttgtgggtacattattttt

SEQ ID NO: 296514 - DNA, 682 bp, Homo Sapiens
  misc_feature (621)..(621): n is a, c, g, or t
gagccctgctcaggtttatcattgagatcatttttcttatttaagttatagtaataattccaggccacttctagcatcctaagtttagaacaatgatggacaattgtctcttttgtatgctcacatttaaaaaatatcagacctgtacagaaagtgacaacatacaattccagattcatgtctgaaattcctattagaattactatttagctacatgccctttaataggaaaaatcactttgatgggtccttttctctctactaaatatgatttattgcttctgcaaatgataaagaagctatggaagatcactgtgctccatgacatcattttcagccttggttctgcacatttatttgcataaattacaaagacagggaaatacagttgttttattttctattaaggagtatctgggttgaaagtggttatcatggtgaattcattctgctgtgatagaaggtaacgcccatccactctggctcattgtttaaaggtgacatgaaattattataggtttaagtggttgtttcataaactcttgacggttttgaaaaagaatttaggataaatgatgaaaccatcactggagggtttaatcatgtaataatcattaaatntcttagtcatggaattaaaaatattccaccaagctctttaatctatgggattatagctttg

SEQ ID NO: 296515 - DNA, 919 bp, Homo Sapiens
  misc_feature (67)..(375): n is a, c, g, or t
  misc_feature (400)..(418): n is a, c, g, or t
tgtctttacaagtttaaaaagactggacaccattattttttatgaattatgcacataaccattttannnnnnnnnnnnnnnnnnnnnnnnnnnnnnnnnnnnnnnnnnnnnnnnnnnnnnnnnnnnnnnnnnnnnnnnnnnnnnnnnnnnnnnnnnnnnnnnnnnnnnnnnnnnnnnnnnnnnnnnnnnnnnnnnnnnnnnnnnnnnnnnnnnnnnnnnnnnnnnnnnnnnnnnnnnnnnnnnnnnnnnnnnnnnnnnnnnnnnnnnnnnnnnnnnnnnnnnnnnnnnnnnnnnnnnnnnnnnnnnnnnnnnnnnnnnnnnnnnnnnnnnnnnnnnnnnnnnnnnnnnnnnnnnnnnnnnnnnnnnnnnnnnnnncttwyaawaccwcttttcttwctgnnnnnnnnnnnnnnnnnnnwtkyttkttcccctwtyagttctcctwaactgttaactgttaggtwcttwkgtgtcataagaaacacattaggggtcatgttcgtgggcagaaacctttacattttcttattgcatttatacaatcaacacacaataagcaaaactgaatcctttctaagcaaacatttttgcatatactgccttctctttatctttctgtgcctttatcttttgtttgactttcagcaattctgcctggatagctttatcttctggtgctatcccctgagctttcttaagatcagccaatgcttgatmatattmttttaatmmttgmmatmmttgagcgctgcgggavaatgctttgggatttgatgggtmtagttmaagagcctmtaaacaamtgttaattgctmcmtgcmaatttgacatmttcagtktacaagcramaatattmagtacacagmttaaagctataggttgcagmytggmtmtatmtgmtgtttmatwaaagcctttg

SEQ ID NO: 296516 - DNA, 427 bp, Homo Sapiens
gtgtatgtaaggggaagtgctgggtgcagcctctggggtggggttattcctatcctcctctttcctgcctggaccatgcagatgagggccatcccctagagataatgaagcaataagatgggagatacctggcagtccttgacaccatggacccgccatactagtctttggctgcaaactctcacgctgtcatggaagataaataaacctcaatactgcttaagccattgaaactttaggtctctgttgcacacagatgaacccatagtccaacaaatgtatcttcttgactaaatcttaccttcttactctgatgatttatattcagagaataaatttaactttgtctatatctggggtaaaaaagaacagctcttcaataaatctgcttctctccaaaaatattccagaaaattcatgtgattgg

SEQ ID NO: 296517 - DNA, 624 bp, Homo Sapiens
gacacaaaactgatcttacaggtgaggtgctctattaattgtgccccattttcttcaggattgattttaatttctgagtatagcataaatggcacatcatgatttgacttttgcccattccatcttcatttcaggccttttctcctatgtgcataatctgctatagtggtacctatctacttggcaggttttcctgcattaatttttcctcatccatgtgtcttcccacacttgccttctatatggatttctgttggtctttcaaaatacaacgcaagcatttccccttgaaacctctgccctccccatttcttccttgtttccatggtgcactgggccatacctctgtcacagtattttgtagatttaattttaatccagtctttacttgtcctttacaccgtgggttcccaggacaggagctgtgcttctcattgctctattctgtgacagtgctatataaaaatgaatgatttggtctttagtttggtagcataaagttaacagtgaatttttaaccattactaaaagtgtacttctaaagattgagcctgatgaaccagatgtctgaatattagtaattaaagtaagcttacatttaacacatgcaggattatttacttg

SEQ ID NO: 296518 - DNA, 766 bp, Homo Sapiens
gtaataacagagatgggttacaagatcattgttcatagtgcatctcagaaagtagaacacagcagctctatcccatcggaaatgccatggcgctacttttttcacaaagaaaggattttaaaaaaagaccgaaaaatgtgaagctgcccacatgtgaagagagaacacttagataaccgttctttattatgtaaaaaaacccaacaccataaaagagataagcacacatgaactcctctcctgctcaattgataataaaattggctcgacaaatactggataactgactctctgtactggcgagactcaagtagtgccacacccaccacactgaacacaccttccatctcccagtccctgctaagtaggtatttgtagataccttggataacacattgtatgtgcacctctgtgcgaataacaccacatgcaggatgatgacttgcaaggatttaacacagcgttgaatgtgataaacgagtatcttcatctagcctgagataccagaagactgacatcacattgttgactccactgtactctctcaaagagctctacaggataatacatatttgactttttccagctcttgatagatgactgcaatactgtttgacctatattgaaatggtctgacactaatatatgactacatctacatatagcatgtacctctgaccgtctatgtcatcatcatcatggactttgttctttcacagagcgagagtcatctgaaacttctcaactccaatatacggcgcattaa

SEQ ID NO: 296519 - DNA, 338 bp, Homo Sapiens
  misc_feature (154)..(154): n is a, c, g, or t
  misc_feature (325)..(325): n is a, c, g, or t
taacattcttagttttaaataaaaccctcaaccttctctttgtttgttggacatactaaagatcacctagaattgaaattctttcttctcaaaacattaaatttagttttgtgtccacattttcattttgactttgacatgcatggtgtcagangtgggatacaaagctgactcacctcatgggagaatcattgggcctttgggagttatgggcatgaggtacccatgttgggggccctttgaaccccctacacccccaccacttttcacaggtaatccttttctccctccagtaagtatctcttgggacagaacctcttcaggnatgggttccgaag

SEQ ID NO: 296520 - DNA, 404 bp, Homo Sapiens
  misc_feature (200)..(217): n is a, c, g, or t
catagggctcggcgtggccggcttttgaggatttcctcggtccccgggcggaaatagctggaatggaggggcctctcgattggagacttactggtcaaatatttacttttgttgatcactggaaacgctacctaccacgcattgactaggaccacagtgaggagggaacgctttagatgatagagttttgtttgggggcnnnnnnnnnnnnnnnnnnattccagggaattcaggaaattgccccagaagtccgatttctgatgtgtaaaacctttttttacagaaaaccacggacttcctgggaaaagtcttcaccgtaaatattaatctctttgggcatggaagagggaaaacactggcagctaattttttcatgggggttaaccaaaaatattaaactggca

SEQ ID NO: 296521 - DNA, 299 bp, Homo Sapiens
  misc_feature (62)..(72): n is a, c, g, or t
  misc_feature (113)..(113): n is a, c, g, or t
  misc_feature (122)..(122): n is a, c, g, or t
  misc_feature (254)..(254): n is a, c, g, or t
  misc_feature (281)..(281): n is a, c, g, or t
caatgcaggtgaacttgtaagtgctcaaatcctccatctcctcacttttcagactgaggccnnnnnnnnnnnaaatctgagaagaaatatgggactgccactgctcagtaggnaaatgtccnttcccacaagcatttatattttaataaaaatctgcactttgtgagttgagccccctcaaagagacctacaaaccctgccacaaatatctccaaccacacttcatcatttccgattttcatcactggctgctnctgtggcaaaccaactattcctttccnggggggattcctgggtgg

SEQ ID NO: 296522 - DNA, 397 bp, Homo Sapiens
gcatcagagaaagagtttaatgattacaggcttctgagtgaggagacaggagcaaaccttcaaattcatcattccagagagttctgggctacagtttttaaggggattgtggagggtgagaggctggaaaattggagaaattgatcagttggggtagggagatgaaatcatcaggatgtggaaactgcattttctggtgactcaccttctcatgggatcctgcagaacagctgacatgagtagttttactggcatgcaggacctgaaacaatatttcaaagggaaaacttaatgtttccttaatatttaagttgttatctataaagtagttgaggtgaactatgatcttgtagcagagtctacatacttctgagaaaataggcagtaaacaactata

SEQ ID NO: 296523 - DNA, 340 bp, Homo Sapiens
gcaaccctctaactaagaaatattactgctgtgtgaaacacaaatgtctataaaccaagtgaatttttggactgtggtttaaaatgatatgtttctaacattatctttctactttatgtgtaatcacctgtcaaaacacaggaaaagaataactaattaaacattaatgaatagggggagtgtgtgtgggagggagcacatatttaacctgttagatttattttttaaattatatgatcaaaaattaaaacattatgttactggtccaagaatcaagagacaggataaatactgctaaaattttcaccatatttgaagggatgttcaggatgatgaactt

SEQ ID NO: 296524 - DNA, 276 bp, Homo Sapiens
gttatttctgggcttggctcaagaccaaggagagtggatgttgatgaacattcctttaaataaaagtgcttaggttgtagttatggctttgtctagaatggtgatgtcaactgtgagtgtaggtctgtgatatagaaagaattcaactttccagatctagaaagatgctaccttgcatagatttgctccttaaacataaattgcaaaaataaaaatatcacagagaacacctgtactttgcttactgaaagatttgctcactaaagaaggaaagtt

SEQ ID NO: 296525 - DNA, 351 bp, Homo Sapiens; identical to SEQ ID NO: 257620

SEQ ID NO: 296526 - DNA, 597 bp, Homo Sapiens
  misc_feature (167)..(182): n is a, c, g, or t
gacattgacactttaattaacgccaacgtgtgatttatttatttttttaaaacatgtgctcaaaactgcggatggaggttgtttcacattttgatgaccttctgaaatagcggtaaggccacaccaaatccgagcatcaggcaagaacacataatatttttttaagnnnnnnnnnnnnnnnncggtgggaacgaagaagggaatgagatgtacatttaaaactcattgcattaaataggagaggcttagtaggacatactgttgccgcaaacagcggcacacacagtcttacagtaattgtttttgaaaccagttaccactaatgtattaagccctgcagcgggtaccactgacttgtcctacgcataaaatgaacccggcgaagccagtgttgatactgttgtgaagaggttgaggagctcattttcaagacagcttagaccatatttagcagaatatctcgtttagaaaggcctggctgaagatagttttatgtggattgtctaacctataaaaataacagggttcctattagtccatctttaaaaggaaatagatgccgaataccatgattcggttaccaaatgtgggtatgac

SEQ ID NO: 296527 - DNA, 1002 bp, Homo Sapiens
  misc_feature (11)..(11): n is a, c, g, or t
  misc_feature (268)..(268): n is a, c, g, or t
  misc_feature (280)..(280): n is a, c, g, or t
  misc_feature (283)..(283): n is a, c, g, or t
  misc_feature (331)..(331): n is a, c, g, or t
  misc_feature (462)..(462): n is a, c, g, or t
  misc_feature (486)..(486): n is a, c, g, or t
tatatakaadndgytggtacaacgctctgaaaaatagttttgtcccaaaatccagcgcctagggtgctccgggcctagcctttgccatgtgaggtccaacggctgcaggaatgggggcagcggcagtcgtccagggcctcggggwagcggcctggagagatggcggtgaccagcacctkcatggcgcgcgctaagakcgkkkkbgkkkkkakkkkkkkkdkkbackkkaacttktccccacccakcakcckctkccakckckkcckknckcccakcakcnccnkkckkkcckakcckkckkcacccackkkkktktacakckccakkakknccakcakcakcakkckkcgctggcgcggctccccgggagctgaggcgggggctccggcggcggagggagtggccccggcktckckkcccakctkkckcakakcakctckakakkckkkakkcckcckccknccckcakacckkkckakkckccknkkcccakcatcaggaagaggcacgcggggcgcgccagcacacaggccacgggcagcgacgggccaccgcccgccacgcggccgcagccacgccggaccagcacgcgcgcccgcrccacggccgggaagbcgcgcaaggrgcgcaggargcggcgcagaargcccacgcggggggagcgcacsgccagcgccacgagcggcccgggagccgcgcasagcggcaagccggcacggggcggmgcgagcgcgcgccgcgggaacgcggccagcaggcaargcgcgcacgccgggcggacgcgcacgagcgcgcagasmgcgccacagagggcgagcaggcggcggcgcgcccgcgcccgsccccagmggaaggccacgscggcgcgcaraaccccagcagcacacgsggagcaggkcgcgcacscccgggcaaaaggcgaacgacgacgggcggcacggcagcggcgccgcgaakctcgccgcgcccgtaggccgcgggccgcgggycgcgtcamcccca

SEQ ID NO: 296528 - DNA, 803 bp, Homo Sapiens
  misc_feature (279)..(279): n is a, c, g, or t
  misc_feature (338)..(339): n is a, c, g, or t
  misc_feature (373)..(373): n is a, c, g, or t
  misc_feature (379)..(379): n is a, c, g, or t
  misc_feature (388)..(388): n is a, c, g, or t
  misc_feature (390)..(390): n is a, c, g, or t
  misc_feature (393)..(393): n is a, c, g, or t
  misc_feature (414)..(414): n is a, c, g, or t
  misc_feature (419)..(419): n is a, c, g, or t
  misc_feature (423)..(423): n is a, c, g, or t
  misc_feature (428)..(428): n is a, c, g, or t
  misc_feature (449)..(449): n is a, c, g, or t
  misc_feature (468)..(468): n is a, c, g, or t
  misc_feature (472)..(472): n is a, c, g, or t
  misc_feature (477)..(477): n is a, c, g, or t
  misc_feature (484)..(484): n is a, c, g, or t
  misc_feature (486)..(487): n is a, c, g, or t
  misc_feature (490)..(492): n is a, c, g, or t
  misc_feature (515)..(515): n is a, c, g, or t
  misc_feature (517)..(517): n is a, c, g, or t
  misc_feature (521)..(521): n is a, c, g, or t
  misc_feature (525)..(525): n is a, c, g, or t
  misc_feature (533)..(533): n is a, c, g, or t
  misc_feature (536)..(536): n is a, c, g, or t
  misc_feature (578)..(578): n is a, c, g, or t
  misc_feature (595)..(595): n is a, c, g, or t
  misc_feature (620)..(620): n is a, c, g, or t
  misc_feature (627)..(627): n is a, c, g, or t
  misc_feature (660)..(660): n is a, c, g, or t
  misc_feature (669)..(669): n is a, c, g, or t
  misc_feature (671)..(671): n is a, c, g, or t
  misc_feature (674)..(674): n is a, c, g, or t
  misc_feature (677)..(678): n is a, c, g, or t
  misc_feature (682)..(682): n is a, c, g, or t
  misc_feature (686)..(686): n is a, c, g, or t
  misc_feature (694)..(695): n is a, c, g, or t
  misc_feature (704)..(704): n is a, c, g, or t
  misc_feature (711)..(711): n is a, c, g, or t
  misc_feature (716)..(716): n is a, c, g, or t
  misc_feature (728)..(728): n is a, c, g, or t
  misc_feature (741)..(741): n is a, c, g, or t
  misc_feature (745)..(745): n is a, c, g, or t
  misc_feature (747)..(748): n is a, c, g, or t
  misc_feature (750)..(750): n is a, c, g, or t
  misc_feature (752)..(752): n is a, c, g, or t
  misc_feature (755)..(755): n is a, c, g, or t
  misc_feature (759)..(759): n is a, c, g, or t
cacacagcaacttatatacagatactatacacgtsggccctgccctttaggctacactctaggcagaatgtacacatgggcactgcccttacagctacactctaagavcaggttggcacagcccccctgctggcacastctggggagtsctgccccaggatgggagagaatgcagtacctggctacaaacttctctgtggcagctccacagatgaggtcttgctgggagaygctgggtcagcccaaccmtgctgcctctcctgtacctggmttccmagnaagaaactgtttcttgcttttccttcagtcagttcatctgggcatcctggstctstggnnktkggggcatctttgagaagctttgctcatccangtggcnccttccagntnagntcccactgtgccttaagggancatgnctgnacagnttgtttctttggcttaaaggnaggaatggtgggaaaggantgtntccanttctttntnnatnnntccgaggtgaaggtggggatggnantgtngggntggttggnctncttccggttgaaaaccttaatattgacccgttttgaggctgntaggtgatagcttatgnctgtggtgggagtggttcccagggntgggggntctgaaagtggccccaagataggtttggagtgnctgtccctntnttnagnntgtncctntttaaggnnaggtgtggnacaactnttcanggggtttgtagnagagaagtggaangagnannanantcnaggnaagttggaagaggcgtsgggcacactgtgatcgmtgctatgtag

SEQ ID NO: 296529 - DNA, 890 bp, Homo Sapiens
  misc_feature (192)..(192): n is a, c, g, or t
  misc_feature (205)..(205): n is a, c, g, or t
  misc_feature (207)..(207): n is a, c, g, or t
  misc_feature (303)..(364): n is a, c, g, or t
  misc_feature (399)..(468): n is a, c, g, or t
  misc_feature (499)..(579): n is a, c, g, or t
ttgttcctggcttttgtcgctggggccctcgggggcgtctgcggtgttgctgtgggctcccccctggscccggtgccgggcctgctggccttgccctgggcctggggccgctcgtgcctggggcccgcttctcctgcgggtccgggtcccgccggggcccccgtsccccggcgtctggscctgcgtccgggntccgtttccccgngngggcgtgtggggcttctcccggggcctctcgctgcccgtgtgcccggtgtccctggtctcttccgtgtcttttggcccctcccgcccctgcctggnnnnnnnnnnnnnnnnnnnnnnnnnnnnnnnnnnnnnnnnnnnnnnnnnnnnnnnnnnnnnnctctcgggctgcgcctccggcctcgtccgcgtgtnnnnnnnnnnnnnnnnnnnnnnnnnnnnnnnnnnnnnnnnnnnnnnnnnnnnnnnnnnnnnnnnnnnnnnggcggctttcggcctcggggcgtttggctgnnnnnnnnnnnnnnnnnnnnnnnnnnnnnnnnnnnnnnnnnnnnnnnnnnnnnnnnnnnnnnnnnnnnnnnnnnnnnnnnngtgcggcggggctgtgcggcctctccccgggccsctcggccctggtcttccgggccggccccycctttsccccctcctyccttycctccgcggtcctctgcgcgtggctccccccgctggcccccccggcccsgctgtccgggcgtgctggtggccgggggctgtccccgccycctsscctgggctgtggcccccccctggccgtgctccstcgcgcctgcgggcgccgggcggggccgcgsgcccccggggyccctsccctgtbtggyccccccgttgcgcggaggsccccgggtcttttyccggggtgg

SEQ ID NO: 296530 - DNA, 1001 bp, Homo Sapiens
  misc_feature (33)..(35): n is a, c, g, or t
  misc_feature (140)..(141): n is a, c, g, or t
  misc_feature (321)..(321): n is a, c, g, or t
  misc_feature (324)..(324): n is a, c, g, or t
  misc_feature (388)..(388): n is a, c, g, or t
  misc_feature (444)..(444): n is a, c, g, or t
  misc_feature (457)..(457): n is a, c, g, or t
  misc_feature (494)..(518): n is a, c, g, or t
  misc_feature (582)..(583): n is a, c, g, or t
  misc_feature (586)..(586): n is a, c, g, or t
tcaatattttattwwataacatatttaaccatnnnttaaccaagaatatatwaactttawdccccccaacctgcccccgccccagatacgcagcaaaacacagtagtgatttcaaatatccttgatcatgaccaacaggnntatttcaaagtcaagtttgcractcaaaagttgaccttggaaaaactctgaattaadagagaaacataaagctctcacacagaattcttttatctgccctaaddtcaatgccggcgcaccaccacctgacaatactgctaggrtttttctttatgcatagtataacgactcatttatttngtnccccctttttttaatktkwtcggcgttttttgtcccgcttwatgttccttttccgcttcccctnggaaccagttaatttkgctgtctacggcagtcacaacatatgctctccccgccagnttaabgggcttgntatttcgccggggtgcctctkcgctattttkcatgannnnnnnnnnnnnnnnnnnnnnnnncccactctgccgttttttgcggggcgctttttggcacatccctttcatttaagcccgcttccgnntgnsattcccgtttgttcttcttgactcctgtttctgtctttctttaaacgacaacaaaaragagccaaaratacatcccatcaagtgtacaatggtagtcttgtgtcctaaaagtgaggagttcagctgtrgcgartmcgtmctttctttattctggcaggctttggtttgggggtgtactgattatttgcctrgtactcgagttctttwmggaagtagtgaattgctttgtttaaaccttcctccagcgggacmacgggctcccaccccagmatcagctttrctttttttgatgtmtggtwtwattttatgtgggtmatmctgggattmggagagaaacagactttcacttccgctaccaamaaggwttttaattaactgrsmaattctaggatwgtgtgtamwtmtgggtwcccc

SEQ ID NO: 296531 - DNA, 162 bp, Homo Sapiens
  misc_feature (80)..(80): n is a, c, g, or t
  misc_feature (134)..(134): n is a, c, g, or t
tgcagagcagagagcccagaggcaaagacccacagggcagagggtcagtcccagactgtgggatccctaacttaaggaanctcctgctgggttttgcccagctccatttcccaacctatttttggggtttttgncttcttttatcccctccctgttcccctc

SEQ ID NO: 296532 - DNA, 840 bp, Homo Sapiens
  misc_feature (14)..(14): n is a, c, g, or t
  misc_feature (33)..(33): n is a, c, g, or t
  misc_feature (61)..(61): n is a, c, g, or t
  misc_feature (70)..(73): n is a, c, g, or t
  misc_feature (75)..(76): n is a, c, g, or t
  misc_feature (78)..(78): n is a, c, g, or t
  misc_feature (264)..(264): n is a, c, g, or t
  misc_feature (301)..(301): n is a, c, g, or t
  misc_feature (423)..(423): n is a, c, g, or t
  misc_feature (443)..(443): n is a, c, g, or t
  misc_feature (514)..(514): n is a, c, g, or t
ggggggggcggsvnsgsgsgagctaggcgttcnaagtatagvkakaatactacaaggagcnacagagtgnnnncnntntggtttaagactgtggcaccttatttcttttgabatttsastttathaggtgtatgttgaaagssacaggagsakttmgymratkttktgtgagtgattgttctatgtgcccagaattatggtgtatctcttgttcctcmcactcgttagattaccgctttgtgtgtttcwccgtaaccgmgcmtnattgctttttcattggttttatacrgaacttatatcntgtcgtkcattmtaggccccttyccctwgwgaaaaggttttcgctattactatcttttttrttraaagagatgcccagtacgaatcgccacttacagcactctcttatttgatttatctaanacttgatctactcttarmtnatgttcgtttcttttgttgttttttratttccagtctttttgtgkggtggcrgcggtttgggtcctcttgngcgggggcttttgttkctatgactgttttdctgtctgtcggkattcgaycatgtttatttttttattcactatcgcctgtgtttrttagctgtdcagagtcatgtttatctgtrgmgcgccrgattkmttctcaccgggcgtacrcgthaactaacygggggattmcmymcwcagcttcctrsycsmtcccrwttcamcmgbctacatmccbyccatcyctctawgtaacggctcacrtragggtattttccactckcagcrtgrcccyggcmmtccctttaamcatcacctthtcgakctcatgaaawtrcmagcgctggtgatc

SEQ ID NO: 296533 - DNA, 404 bp, Homo Sapiens
  misc_feature (45)..(45): n is a, c, g, or t
  misc_feature (51)..(51): n is a, c, g, or t
  misc_feature (63)..(63): n is a, c, g, or t
  misc_feature (69)..(69): n is a, c, g, or t
  misc_feature (81)..(81): n is a, c, g, or t
  misc_feature (134)..(134): n is a, c, g, or t
  misc_feature (142)..(142): n is a, c, g, or t
  misc_feature (144)..(144): n is a, c, g, or t
  misc_feature (153)..(153): n is a, c, g, or t
  misc_feature (224)..(224): n is a, c, g, or t
  misc_feature (236)..(236): n is a, c, g, or t
  misc_feature (243)..(243): n is a, c, g, or t
  misc_feature (245)..(245): n is a, c, g, or t
  misc_feature (257)..(257): n is a, c, g, or t
  misc_feature (259)..(259): n is a, c, g, or t
  misc_feature (263)..(263): n is a, c, g, or t
  misc_feature (265)..(265): n is a, c, g, or t
  misc_feature (269)..(269): n is a, c, g, or t
  misc_feature (275)..(275): n is a, c, g, or t
  misc_feature (277)..(277): n is a, c, g, or t
  misc_feature (279)..(279): n is a, c, g, or t
  misc_feature (292)..(292): n is a, c, g, or t
acctcacagggacatttgtcgggccgtggcacgcctctcccctcnttccancaactcaatgantctcanaactgtcatctnaccctgaacaatgcctatgagctcaaggaatttcgttggggggctcttgctanaatcacantncgttacaanctcatacagggtcaccccgaagaccagacatcttacgcatagtagaacttataatccttcaggcactctgnggcatacaaaanacggggntntccccatcctyncncaangngtantaatcntngnctttcgggcacsngcytttgstaaggcaaagtycccgatcttgascagcctgtygtttgtccagcaasaygttgsgccsgstargkctcggtggatgkagtsctgcsgkgcarataaggcatgcc

SEQ ID NO: 296534 - DNA, 487 bp, Homo Sapiens
aaaagtattttatagccctatgtaaatagttgatgtctttttataaatgtttattgcatattcatcttgaatgtgaatttactgttgtaattcacatactggtgtcatgtttctgagtgagaataatgctagtcagtcagatcacagatttttctccatgaaggttttacttattgagagggacatctgaggcagtagtcttcgtctttaatttttgggggcagattggtgctttggttttaataaaaactaactttgatggatttttactgtcaatattttaccacaaggattttttaatagaaaaattactgaatgttacttcagcagagttctaactactttgagtctccattactactactgttgttcccctagctgtaacattgatccatataggggcaagctactagtccataaatagctgtaataggaaaacagttttttaaaattctaacacgtgtatttcaccagccttaaaagattt

SEQ ID NO: 296535 - DNA, 302 bp, Homo Sapiens
aaagcccaggccaagggtacttttaactggaaactggggaggagggaagaacactagcagggagctaagaggcaggttgctgggtaagccatcctgctcctacctggtgcctgtatctacattgctgagtgctgtgcgccagtgcctttccttcatctgcagatggagcccatctctttccacctgggtgaggagaccctctgctactccaggggtaaaccttaaagaaggtgtcttgaagagcccaaaggacactcacgtgctaaggtgtccattttatgcatctttaaaatattttattt

SEQ ID NO: 296536 - DNA, 635 bp, Homo Sapiens
  misc_feature (332)..(358): n is a, c, g, or t
ggaaagtaagttgaattcatccattgtcactgattcaccaagtggatgttgcattgtggaatttgcctgagtactgttgtcattctgctcagccaggcacggtcagtttcttggccagggacattgctatgtgctgtgtgcaagctctttagaagagagattggattttcttggcattatcagcactcatgctatttagtctacttctattttgactgactctttaaattagtacaatttttctacttgtcatataactcctggaacaatagtacgggaagccgtgatccttttccctgactcatgattttagtctttttccaaatcgctgnnnnnnnnnnnnnnnnnnnnnnnnnnngctggctcccaacgacccagcattgtgtttgggaaccaaaatcttccatggggaaagccccaaaaagggggaactttggttcaaccccaaataaacctaattcctggcaaaccttgccccccttaaaattcctaccgggggcaccaaggaaaacctaacccccttttaatatacacggggagagcccccttggccccaaaaaatggccccgttggggaaaagggggccccaaatataaaattctccggggaaatttctccgaaaaacccctcccccc

SEQ ID NO: 296537 - DNA, 424 bp, Homo Sapiens
  misc_feature (398)..(398): n is a, c, g, or t
tggaagaaaggatgaaggaaggttggcaggaccccagccttactctgtagtgacaacccagaggtacctttcccggaatgcagggtcaagtttatgtgtgaagggactctagaatagctggtaaaaatggctacatggtaaccattcttgacttagtccagtattcccataatttgtaattccataaatttattctcagctgtcccccagccatttctaatagaaggatgtgtaccccagttttgacaatgttcttgaaatcaagttagtgttacctggcattgcattattaatgggaactatatgtacatgtttaaaggggatccgttttggattccttttcgggcaagggaatttgccaaaaaattagttttttacccaattacccgtttaaaatnggggtagggtttggactttggggggg

SEQ ID NO: 296538 - DNA, 413 bp, Homo Sapiens
  misc_feature (189)..(189): n is a, c, g, or t
  misc_feature (371)..(371): n is a, c, g, or t
  misc_feature (392)..(392): n is a, c, g, or t
aggaatagtcacagttccgtggcattgtactagcaaaagggtctgatcaaaggtctcctgtggagcttgcatggttccctttcatactacgaccataattaaaaccactaattctcttttaaaatgctgcaggatgccatgtaggcatctgtctggagtgtcctttgtgatgtcataagctgttaaggnccagtgccgagggttttgagtgaaatgccagtcatgaaggtgcttcaagacaagggtgcctctaaaagcttgacagggccttgactgcacaattcgagctgaatttgccccttgtcagctgccagtaaataaatctcaaagggggaaaagctgaagttttcattaacctgattcctgggggntttgttggttttgggcatcanaaagggggaagcttttggccc

SEQ ID NO: 296539 - DNA, 192 bp, Homo Sapiens; identical to SEQ ID NO: 261052

SEQ ID NO: 296540 - DNA, 577 bp, Homo Sapiens
  misc_feature (140)..(441): n is a, c, g, or t
atcattaacaataccacctaaatgaaggaaacatatctggatatccagtgtcacatacttttatgtatttatttcaggaattactattttgtcaccataattaggaaacagactgtgttctttatttgaaacacaacagnnnnnnnnnnnnnnnnnnnnnnnnnnnnnnnnnnnnnnnnnnnnnnnnnnnnnnnnnnnnnnnnnnnnnnnnnnnnnnnnnnnnnnnnnnnnnnnnnnnnnnnnnnnnnnnnnnnnnnnnnnnnnnnnnnnnnnnnnnnnnnnnnnnnnnnnnnnnnnnnnnnnnnnnnnnnnnnnnnnnnnnnnnnnnnnnnnnnnnnnnnnnnnnnnnnnnnnnnnnnnnnnnnnnnnnnnnnnnnnnnnnnnnnnnnnnnnnnnnnnnnnnnnnnnnnnnnnnnnnnnnnnnnnnnnnnnnnnnnnnnnagaagagaaaaactggagtgagaactctcctcctctcataatcatagtatccacgttaggaaaatgcttctgagagtaacttaaagtactgtgtgtgcatcttccttcaaaaccttgcttttttctccgtttttgt

SEQ ID NO: 296541 - DNA, 154 bp, Homo Sapiens
caagagcaggtgacgtgtttattgtgggacgcctctttctgggggtcgtgctggctgtgagggaaccctcacaatccccaggtcccagaacagacagatacaagaacttgaatccaaactgcttgcacataaatagaacggaggttggcaaagg

SEQ ID NO: 296542 - DNA, 286 bp, Homo Sapiens; identical to SEQ ID NO: 119581

SEQ ID NO: 296543 - DNA, 304 bp, Homo Sapiens
caaattgtcttctgaacaggaattaacattggttttgatgaaggtgagggtcagttctcaagatttgtgctaatcataaaatgaatgaatgcaaaacaccttgtaatttcatatggaattataaaaattaggtttgctgggttttggcctaataagagtgctagtatgtattggttagaatacatcttactatttcacattttaaaaatcagtacactcttcaggattttcttttatttcaacttggagcctagattactttgccaaatgtattattttcataatgcaataaaatataaattag

SEQ ID NO: 296544 - DNA, 447 bp, Homo Sapiens
  misc_feature (228)..(284): n is a, c, g, or t
tgaaccttaaaatactttgtttgaatttctaatcatcattcaaaagagcagtaaaaaatggttacttgttcttgtacaagctactaattagactatagtaggatattttaaagagctgaatcacttttggtattttggtataaatattttcatttgttatgtcccagtatattcttactggaaaattcttgttttgatctgcctgaagaaaatatctgttttctatannnnnnnnnnnnnnnnnnnnnnnnnnnnnnnnnnnnnnnnnnnnnnnnnnnnnnnnncacaaaggaatgtaccttatgaatgttgttgacattttatgaaattatgtggattcatattactgttacaagatagaattgaatgcaaaaagaccaaaacctcaataaaatttgaggaaaacgtgttattatgtaattgaaataaaaacattttataattgtg

SEQ ID NO: 296545 - DNA, 573 bp, Homo Sapiens
atagaaatcccacttggttttcttgtaaatcccatttggttcaaaaggagggagcaaagaatgtagacctgaagtaggagttggggcccgatgatagcatacgttgttgaaattgagtgagtgtgagacaatagcaagtggtgtgagttttgctgtgtttagagaaggtaattgttgccacctaagattataatctcagtgttgctggatcttctaaaattgttaaaagcagccaggaattcagattccttttctgtgaaatgttctaattgataaatgttggcttgaagtctaaaataatgaaattaaacaaaacataccaggctgtatttgaaccgcaagttactactttgtgagctcatctgaaatttcacctgggttcaattctaactctgcaactagtaagcactgtgaccttgctataccctccatatagccatatttttacaagatttgggggtgtcaggaattaaatatggctatatgttttatatacctatatatttctctctccagtatatagaataagacataatgccacttaaaagattgagaaacttaaatgtttatctg

SEQ ID NO: 296546 - DNA, 543 bp, Homo Sapiens
  misc_feature (111)..(124): n is a, c, g, or t
aaatgtcctgcgtgtttcccagagtgtctgtcctaacaccgcttaaagattagccactgctagacagtgatcctcaggtatatggtctcaggattggccccaagcacacgnnnnnnnnnnnnnnataaatatatcttcacaaagcataggtacccattaaagccatattgctttgctgaatggttctaatagctacagatgatttctagcctgaaagaaaagcaccacgaattgtttgaagttgacttgtcagatgtggcatgcttggtctaagttttgacaggaagggtatgtgggtaggggtgtacggagcatctcatgagaccagttctcctcctgagaggtccgtgatgttggaactgttgccccagatggactttgcccttgtgagactttatacttttcaatggagtttttccctctttaaaactcgccagcttttatgtagtgttttataaaattacaggaataaaaagaatatcttttatgctttttaaccaatgaggggagagggagaaattatttgtcctctgaaatgaatgc

SEQ ID NO: 296547 - DNA, 444 bp, Homo Sapiens
  misc_feature (281)..(310): n is a, c, g, or t
  misc_feature (337)..(337): n is a, c, g, or t
  misc_feature (388)..(388): n is a, c, g, or t
  misc_feature (431)..(431): n is a, c, g, or t
ctgataaacccactgtaagttgaaaatactgttaaattccaagtgcatttaatacacctaacctacctaacatcatagcttagcctaccttaaatgtcctgagcactcttacattagcctactgttatgcaaaaccatctaatacaaggtctattttataataaagtcttaaatatttcatgccatctattgaataatgcagtaagagtaaaaaacagaatggctgtatgggcattcgaacggtttctactgaatgtgtattgctttcatagcattgcaannnnnnnnnnnnnnnnnnnnnnnnnnnnnntatccccactttctgcctccaaagganaggaggtaaaaacttaaaagggcggaaatgaaatccacagggcaggacagnccaggcggccacaccctggggcctgggtaggttaaaggtccgncccctggacctaa

SEQ ID NO: 296548 - DNA, 365 bp, Homo Sapiens
ttttcatttagtctttttgttttattcaaatgtcaaaatgtaagttccaagatacaaattatgtttgatttaaaaacatcgactatgctttgttaacaacttccaaagccaaatgtaagttgttgtgactaaaatgcccccccagtacatttctggaggattaaccttaatatgtttagcagctagtctgatttccactctacaaaaaggaaaatgatgctataagggaaagataatgaacaaagttataatatgtaagacttcctgggaagaacttgaaccattactagggagaccaaggagaggtgtttctgttccatactatagcaaccagccttaacactctgtaatacaaagggcatttc

SEQ ID NO: 296549 - DNA, 925 bp, Homo Sapiens
  misc_feature (74)..(163): n is a, c, g, or t
  misc_feature (523)..(523): n is a, c, g, or t
  misc_feature (564)..(572): n is a, c, g, or t
accgtctcccctgcctccctgtctttcagtccctgtttttcagccccgtctccctctcggtttctctcccccannnnnnnnnnnnnnnnnnnnnnnnnnnnnnnnnnnnnnnnnnnnnnnnnnnnnnnnnnnnnnnnnnnnnnnnnnnnnnnnnnnnnnnnnnagtctgcctccccgaaccggcgacaccgaccgcactcgccgcaggaccggccctcccggatcacggggtgcagccctcctagagacccagcacactcccggctcgacaggaaagtcgtactacttcacaacccctaagcaccagtcccggaagagagccttggcccggaaagcccccactagtgcgccgaagaaagggaaaggctttggccgacgcctggctggcccgaagggacgatagccttttattagacccgcggctaacgtctgagcagctaaaacagaatacaacgctaagccattcgcccggataatgcgccccttcttgcccccacgatacacgacttaccgcgccctgttnttatttaccctaaccgcagacccgccactcctggtcgctgnnnnnnnnntctcccaccgcaaaatgcaacgcccgataaaccaccaccgatatgatagatacgaatgcgctttccgattgcatccccgagccgggagaccagtccctgttaatgacccataatctcacccctctaccgctatgtcctgcgttggtgaccaggacagcctttatcgccctcgcgcccagacataacgccatttatcgcgcaacaaattcccgcagtatcactcccgtgatactacgcgcaagacacccctagcagataacaatgagtgatacccccgaatatcgagtgtattcccctgtcgcacatttactccccctagccagctgctgatgcgccagcggtatgtgaaaaag

SEQ ID NO: 296550 - DNA, 462 bp, Homo Sapiens
atagaaaataaaaactttatttttttcaagtttataagatagttcccattacatataacattacggtcacggattctacagccacaaatgcccgcagtcacataaatatatccaatccaatcaatgccttttcctgctaacagaggcatctgaagttcagagggagagtcgcattttgagtagaagtcgtccttaatgggagggctcctgtcagtgcattaggaactagccaaggagccttgcttgccagagctgtctgactcagaggagaggaagggacagatggcctgctgactggggctgaggcagaactagattttctctcttgtggtttaagatattttagaatctcggaattcagatcctatagtgtgaatatctggggagttctaacttctggatgaaaaaggaaaccaatttagtggtaagaaatagaagcctgcttaagagggaccctaactg

SEQ ID NO: 296551 - DNA, 328 bp, Homo Sapiens
  misc_feature (169)..(221): n is a, c, g, or t
  misc_feature (242)..(242): n is a, c, g, or t
gtttgttgttcagatgaatgacacactcaagttacaaaaatggggccttaaaagaagcacattgtacaatgaacaagcagattggagttaagaacactgaaacactaacccgctaccacgagaagagacggagggggtacaggaagggaaggaaggggctaccaacacnnnnnnnnnnnnnnnnnnnnnnnnnnnnnnnnnnnnnnnnnnnnnnnnnnnnncaggtctactccaggggctgntttctggatgccggttcctggggcacccttgcccttgtactttgccaccccctccaactttcacccacccccattccaacctgggg

SEQ ID NO: 296552 - DNA, 809 bp, Homo Sapiens
  misc_feature (654)..(728): n is a, c, g, or t
ggggaaggagaacgggaggctgccggcgtggaccgtgggaaggcggggttggggctcggcgggaggccacccccgcagccgccccgagatgaacgcgcccagcagctgctggacgccgtggagcagcggcagcggcagcttctggacaccatcgccgcctgtgaggagatgctgcggcagctgggccgccggcgcccagaaccggctggtggcgggaacggttcagccaagtctggagcgccgccccagccatctgtatcggccagaggtggccttcccaaggatgctggcgatggagcctccgagtcttgatcataccctagccgggcaccctgacttctgtccctttccagggcccgcggctggactgtgacccactcccttcactaaaagggggccagtcttcacgggcagttgcctggtacttggcccctccgcctgggatgtcaactctactagccgcctgggttcaactcccccctcgtccttgcgccgaatgcccccccttctgctttcgaaatggcaccccaatgacgttccccccctctgactcccccggattccccgaatcctcccccctgcctcccctgatttggtttcgggacctgtctccagacctgacacaatccttccccgccccctttcatgcccggnnnnnnnnnnnnnnnnnnnnnnnnnnnnnnnnnnnnnnnnnnnnnnnnnnnnnnnnnnnnnnnnnnnnnnnnnnnaacacctccttcgtcccccgtcccataaccctataaggccgccacgctccgtgatccacttctatcccctcagacgcgtcg

SEQ ID NO: 296553 - DNA, 285 bp, Homo Sapiens
  misc_feature (19)..(19): n is a, c, g, or t
  misc_feature (32)..(32): n is a, c, g, or t
  misc_feature (52)..(52): n is a, c, g, or t
  misc_feature (54)..(54): n is a, c, g, or t
  misc_feature (58)..(58): n is a, c, g, or t
  misc_feature (117)..(117): n is a, c, g, or t
  misc_feature (121)..(121): n is a, c, g, or t
  misc_feature (127)..(127): n is a, c, g, or t
  misc_feature (156)..(156): n is a, c, g, or t
  misc_feature (172)..(172): n is a, c, g, or t
  misc_feature (177)..(177): n is a, c, g, or t
  misc_feature (254)..(254): n is a, c, g, or t
  misc_feature (264)..(264): n is a, c, g, or t
  misc_feature (269)..(269): n is a, c, g, or t
aaactcctgggcccaagtnatcttcttgcttnagcctcccaaagtgcaggtntntccngaattggtgggttcttggtctcactgacttcaagaatgaagccgcggaccctcgaggtnagtnttacanctcttaaggtggcgcgtctgggtctggantttgtttcttctgatnttccnatgcgttcggagtttcttccttctggtgggttcgtggtctccctggctcaggagtaaagctgcaaaccttcgcggtnagtattacanctctnaaggtggcgcgtctgg

SEQ ID NO: 296554 - DNA, 340 bp, Homo Sapiens
  misc_feature (80)..(80): n is a, c, g, or t
  misc_feature (167)..(167): n is a, c, g, or t
  misc_feature (240)..(240): n is a, c, g, or t
  misc_feature (267)..(267): n is a, c, g, or t
  misc_feature (289)..(289): n is a, c, g, or t
  misc_feature (321)..(321): n is a, c, g, or t
agggttctgaaaagtttggactgtctttttctttttgtatacaaataaagcagcagatccttctctgtgaaggttgttgnagagtcccgtaccagcttataaaatgcggctgtttaagcaggacttgggtgggcagcagaattctgcacatgacgagtggctgcagnttagaaagcaaattttcacctgattccagtactgtgattttaagggaacgggtaaaactcaaagtgccagtantgccatcaaggcttcagtaacatgccntttcctcaggcagcttaaaggncaaaagggttattttgggtgggggggtagggnttcctttcgcttttgcagt

SEQ ID NO: 296555 - DNA, 989 bp, Homo Sapiens
  misc_feature (526)..(546): n is a, c, g, or t
  misc_feature (680)..(680): n is a, c, g, or t
ggtacggtccggaattagggatatcgtcgaccacgcgtcggatcggtgaggaatggcttccaccccctggcccattcccctgcaggctggaagatctttctcctgtctggcttctcttcttttcaattcgctgcaccaagtgcttccagtggcccaaaaatgcttttgaagtgtgttttgaaacagcccccaccaacatacaccccaccaggagtactgatcctgcctcccttcatgtctaggggaagcattcgcctttgagcacttgttgcaaatctggggagtttgagacctcctagcatctcttcccttctttccctgcagtctattcactcccgcagccaaaaaatctctggcgttcaggttagcagtttctgggtggttgtgtgggttttgttgtgtttggggcttattttttttcaaaaagtgataaagacgggtgggttggagggaggggactgatgggctggtgggctttttagttttcctttgagaaaaagactggtttatttaaaacttgtccagnnnnnnnnnnnnnnnnnnnnnggggggtatcttggcttagaagaagtctcttggataggccctttgtggctgtgggggtgggttgagtgttacattacattctatatcacaagattgataggatgttaaagcaagatgtcttatttccgctgagnccctacaaattaaagtcaagaatttctttttttgagaccggatctgtgtcctgtccgcccaggctgtgatgcagtgtggccgacttgggtcactgaactccattggaggttttcctgactaagctcccaatagtctgggatacggggcagccacatccttggtcatttgggtcttctgcgacaccgggttccacaacccatggcgtggcgctcgagaaatattgggctcgtgccgttttcgttaaatttgcaaccggacaatcacacacgaacaaaaagggggctatcaagggacagaacagcgcttag

SEQ ID NO: 296556 - DNA, 441 bp, Homo Sapiens
  misc_feature (132)..(148): n is a, c, g, or t
  misc_feature (164)..(219): n is a, c, g, or t
  misc_feature (301)..(301): n is a, c, g, or t
  misc_feature (326)..(326): n is a, c, g, or t
  misc_feature (353)..(353): n is a, c, g, or t
  misc_feature (371)..(371): n is a, c, g, or t
  misc_feature (376)..(376): n is a, c, g, or t
tccagctcaaaaaagagaaagtaccagattgtacttttaaatctgtctagcgtattgagaattttaatgggagctgttgatttatttctcagggcatacatgtgccaatctgtctcattgttgtctctctcnnnnnnnnnnnnnnnnngagacagtctcgctgnnnnnnnnnnnnnnnnnnnnnnnnnnnnnnnnnnnnnnnnnnnnnnnnnnnnnnnnattcaagcgattctggtgccttagcctcctgagtaagctgggacttacaggcacgtaccactactaccctgctaaaatttgntatttttagtagagacagggttttnccatattggccaggctagtcgtaatgnccctttttaacactgaanatggntaggtgggttttcttggatggatttaggggtaacccaggtaataataaaattggtttccagggta

SEQ ID NO: 296557 - DNA, 758 bp, Homo Sapiens
  misc_feature (27)..(27): n is a, c, g, or t
  misc_feature (428)..(595): n is a, c, g, or t
aattatttttggagaggaagaggggcngtgagacagccagcctgggcatgtggggaccaccacaaccacctcccccatgcactgacctatgaggcatgcagcactgataaatggccctgatgacaaagcaggacagaggcctggcagtgtgatgctcaccactcctgcctgtcaactccaggctgaagatgccaaccccgttatgacagactcacttgccagcctgtgccatttgtattcctcatggcagttactcagtagctggcatttataggtctataaagaatataaggttatgaaaaacctgcttctaattttccatgcttttccctacgtcccatgttacagttgcccccccaaataatcagccaccagggtgcatggcctattaacagtcctgaggtgcacacttcaattaaagttctctnnnnnnnnnnnnnnnnnnnnnnnnnnnnnnnnnnnnnnnnnnnnnnnnnnnnnnnnnnnnnnnnnnnnnnnnnnnnnnnnnnnnnnnnnnnnnnnnnnnnnnnnnnnnnnnnnnnnnnnnnnnnnnnnnnnnnnnnnnnnnnnnnnnnnnnnnnnnnnnnnnnnnnnnagtatgtggtctctggtgagggcacttaagtgttggctgtaattatgttactattaatttgtgagttgagatttgaaggataaaaagatgcagccacagattcttacagacactaactctgtaaaccgataggaaaaacatcggcattaaaggagagtcatta

SEQ ID NO: 296558 - DNA, 225 bp, Homo Sapiens
  misc_feature (119)..(119): n is a, c, g, or t
aaaagaagggaagtgtcagagatggctctgctagactcacgtatttttcagtagaatctgggtcaggatggtgcggtcagaagatgcttctggagctctgggacccacaagcctgcgtngtcccacggtggagtattaggacaacttgaaaacatagtctgcagttcatcctccaccacacccaatgtgctcaataggatattgggttaaatgaataatgggggc

SEQ ID NO: 296559 - DNA, 394 bp, Homo Sapiens
  misc_feature (157)..(157): n is a, c, g, or t
  misc_feature (195)..(209): n is a, c, g, or t
  misc_feature (329)..(329): n is a, c, g, or t
atattttaaatcctatcttacctatccataggttacatatttgactctcaggaacacaggtaactcattgcctggaaccatagctctgagccccaaaggcatcacaaagtgattctagttagtgtcttgaagcttatgagctttgctgataagcagncatcacagtaaaagcaatatttgtttttaggatttagnnnnnnnnnnnnnnncatttaactaagagccttcaactgtactatcttcttggggtgtttgataggggcagggacatctatcattggattccctattaggggatggataaagccaaaccattccaaaggggactngtggaaacctaaatgttggcaccagaggtagagcccggggggttaccactctggatccttctgtg

SEQ ID NO: 296560 - DNA, 350 bp, Homo Sapiens
  misc_feature (86)..(167): n is a, c, g, or t
  misc_feature (313)..(313): n is a, c, g, or t
  misc_feature (321)..(321): n is a, c, g, or t
ttctatagtgccctagagtttcggtttcttctaggaggcagtataacatagtacctaaggggacaagctttagattttaaaaagannnnnnnnnnnnnnnnnnnnnnnnnnnnnnnnnnnnnnnnnnnnnnnnnnnnnnnnnnnnnnnnnnnnnnnnnnnnnnnnnngtttctttatctacaaactagggatgatggtattaacccctcatagttcttaagattaaatagggaaggggaaatgtgtaaagcactaaggcattgcttgggcacgtacccaaacatggcaaatgttaccctctgaattgctaccnggggggtnggggggacaatgggtaggtaggttaaccc

SEQ ID NO: 296561 - DNA, 155 bp, Homo Sapiens
gtcctttgcataatgcatggcaaaatgagcctaaaacctatatggccattttaattttgcttttgtaataataccaagcccagtttctttcaacttgagagatgagctatttattcttttacttaatgaagatgtaagaaatgatcttctgttct

SEQ ID NO: 296562 - DNA, 471 bp, Homo Sapiens
  misc_feature (248)..(320): n is a, c, g, or t
  misc_feature (421)..(421): n is a, c, g, or t
  misc_feature (433)..(433): n is a, c, g, or t
  misc_feature (456)..(456): n is a, c, g, or t
ttagaagttaaccttaagactttattatctttacaataatattaataataaaaagattgaaacttagaactggatcatttggccctttcttctcttcttacctcctctaccagcattctcttagatctgaggttgggctcaacatgttcaagccttagcactattttcttcctagttttaacccttttctagaaaaataggctcagtctgcctactgagaggtgaagccatctgggacttcctggggnnnnnnnnnnnnnnnnnnnnnnnnnnnnnnnnnnnnnnnnnnnnnnnnnnnnnnnnnnnnnnnnnnnnnnnnnaggctaggcaagagggattgttaaaatgcacccaatcaggcactctggtaaaatggcacccaatccattgctctggttaaaacacacccaatcactggggntccctaaaggtngcctaggggcggggaggggttgnaaaagggggcctctg

SEQ ID NO: 296563 - DNA, 373 bp, Homo Sapiens
  misc_feature (75)..(135): n is a, c, g, or t
  misc_feature (217)..(217): n is a, c, g, or t
  misc_feature (229)..(229): n is a, c, g, or t
  misc_feature (281)..(281): n is a, c, g, or t
  misc_feature (329)..(329): n is a, c, g, or t
  misc_feature (346)..(346): n is a, c, g, or t
ccaatacttgtacaaatctgggagaacagttaataagcaccttcagtggtttccacagtttaagaatttaccatnnnnnnnnnnnnnnnnnnnnnnnnnnnnnnnnnnnnnnnnnnnnnnnnnnnnnnnnnnnnncatgatgaacatttgatatagagggtttaatatgaaacgataaatacaaaaagtgagactaatttatggatttgggctacgnaaaagacctacnatgggcctcggaatcttgtggattcttgggggctatatttgcctctcaaggnccaaacctcccaattattcaagggaaggctttcctttcaattccgggntcccaatggtacctgcnggaggccaaggtgagggccaaaggccg

SEQ ID NO: 296564 - DNA, 487 bp, Homo Sapiens
  misc_feature (238)..(239): n is a, c, g, or t
  misc_feature (331)..(401): n is a, c, g, or t
  misc_feature (465)..(465): n is a, c, g, or t
gttcttcatttaacctcacattcatgctctgctgggccttgatgagtcttgtgcacatgtgagcctagccctttaacaatgacctatttcgaactcccacattgacttctgtcctcgttctgtgcatagctcctccatcttcagtgccctaccaggtaaatcacagctgcattaacagcccccaaatttccatctctgtctcatcagtgcagttacaccgtcatgatctgcttggttnnaaacaaactccccgccacaggagaattttccccacccatagggcctgggcaaacatgaggctctcaccctgacaataccttatgtctatgannnnnnnnnnnnnnnnnnnnnnnnnnnnnnnnnnnnnnnnnnnnnnnnnnnnnnnnnnnnnnnnnnnnnnnattaagctgaatatgaacattcagtatgacagtaattccccctggcatataatcatcctaaagnttacatgtggccaaaagggtat

SEQ ID NO: 296565 - DNA, 418 bp, Homo Sapiens
  misc_feature (128)..(153): n is a, c, g, or t
  misc_feature (265)..(265): n is a, c, g, or t
  misc_feature (343)..(343): n is a, c, g, or t
  misc_feature (348)..(348): n is a, c, g, or t
  misc_feature (370)..(370): n is a, c, g, or t
  misc_feature (394)..(394): n is a, c, g, or t
tggtttatcccccttggttttagaagtaaaatgtccttgcaaagagaaaagtttccataaagaattttgtcagtctagatagaatgactgtaaaaattatcactacacatataatgggaaactccacnnnnnnnnnnnnnnnnnnnnnnnnnntctcatttatttgttcagtacatttttgaatgtgaaaggatcccgggaaaaggaggaaggaataaaaaatgcattctaaaatcaggggaaaatcaatagcctgaggagggangttgtaccatacacacacccggggcatttcatcaccgggctccctcccacaccaccttccccaatgcttcaccgggcnggccnaaccccctttctcttgggggcngccccggtccggttcccggtttgnaggggttttcttccaagggtcggg

SEQ ID NO: 296566 - DNA, 748 bp, Homo Sapiens
  misc_feature (593)..(689): n is a, c, g, or t
  misc_feature (706)..(706): n is a, c, g, or t
  misc_feature (724)..(724): n is a, c, g, or t
acttgtgtcagttacctgtgagaggcacagacaagtctttctgacttctcaagagtgtcccaaacaagttagggttaaggattacccaggcttccatggagaagggtgccttacggaagaggtcttgacttctcagtgtggaagaaccttccaggtctcagctcttactgcttgaaggtccttggggtttcctactgagctctgcctctcctccttctaagaggcaagctgcctcacccaggccagggccgctctaaatgcagcctgtggacacgctttttgcttcctgttctgctcagcagtgctttaactgggcagtgtgttactggattgatgattgaccaagactgcacacctcaacgttagcaaacacctggaagcttgtttgcagggcctggcttttctcttgtctccaacaccctagtgcatgtgctgtgtcactatcatcagaggtccaaattcaagagtctgttttcttgttaatataataacatgtccatcacggatcttggtcccccaaggcaagagtggagtatggttaaaaaggaatgcagggaagggaaccagtatgtgcaagtcttggctcggtcatnnnnnnnnnnnnnnnnnnnnnnnnnnnnnnnnnnnnnnnnnnnnnnnnnnnnnnnnnnnnnnnnnnnnnnnnnnnnnnnnnnnnnnnnnnnnnnnnngcttgtagcactgttgntctttgggtcagccctgntctaggaatgacaatctctgcatg

SEQ ID NO: 296567 - DNA, 437 bp, Homo Sapiens
  misc_feature (232)..(286): n is a, c, g, or t
  misc_feature (307)..(307): n is a, c, g, or t
  misc_feature (327)..(327): n is a, c, g, or t
  misc_feature (342)..(342): n is a, c, g, or t
  misc_feature (375)..(375): n is a, c, g, or t
  misc_feature (387)..(387): n is a, c, g, or t
agctaactttacttcctaatatcccattcatgcatcaacccaatgtagagtagcttctattctaactactctaccaaagctgttcttctataccgttccactcctttcactcaaagtaccccatatttttgaagaatggtatcattcatgatacaatgttctctagtaaggcaggacttgggacatgggagatatatactaggggagtgcccttgaatccaagggcactgtnnnnnnnnnnnnnnnnnnnnnnnnnnnnnnnnnnnnnnnnnnnnnnnnnnnnnnnctgggggcttggaaaaaggangtcctggggggcccacaggntttggggcttcattnttcacagggggggactttttggaaggattaaanggggccccactngggcatttccctttttccaccatttggccaatggacatggacttgaggtc

SEQ ID NO: 296568 - DNA, 329 bp, Homo Sapiens
  misc_feature (134)..(134): n is a, c, g, or t
  misc_feature (196)..(241): n is a, c, g, or t
aaacatcctcttttgtccctcatgggaattaacaaagaattcttgagtctgtctggtagataaaaacgtcaacagtgaaaacacagtttcaagaaaagtatttctttcttgatggggtgactttcacccattgnaaggaggcatgctcttatggaagttgtctatttcacaaatatggataattttatattaaagnnnnnnnnnnnnnnnnnnnnnnnnnnnnnnnnnnnnnnnnnnnnnntggaaatggctcttaggcatatttactctaccattaataagggtttccaaaaccatatttctttccccaccatttatattttttcctt

SEQ ID NO: 296569 - DNA, 740 bp, Homo Sapiens
  misc_feature (646)..(657): n is a, c, g, or t
agcattagaaaattagaacatttacattcataatctgtttaatcttctgttgaatgcccttgtgcactctctttgccctgttttagttccctacttgctgtagattataagtgcccttaatatctccagtatctccacagagaattttgtcttcaagccttggcatcctgttttccactgtgccttcaacctgagacttcagtgatttcacaaatgctctgaacaatggagttttgaaatggttaccatttgtattagtttcctgtggctgctataacaaactaccacaagcctggtgacttaaaccatcagaaatctattctctcacagttctggaagccaaaagtccaaaatcggtatcattgggcgagaagcaagatgtcagcagggctgcattccttctggatgctctaggggagaatccttttctttgccttcctcagcttctgctgaccactaccgttttttggcttgtggccacatcactgcaatctcagcttctctggtcacattaagttggcctcttctgtccatgtggaatcttcctgttacaaggatacatagaattgtagttagggcccatctagataatccaggataagctccatatgtcaaaattcttaatttaattatacctgcaaagtcnnnnnnnnnnnncatttaaattaatattcagactccaagagttagaacgtggacacattttgagatgtcattattcagcccaccacaccatgttt

SEQ ID NO: 296570 - DNA, 396 bp, Homo Sapiens
  misc_feature (12)..(12): n is a, c, g, or t
  misc_feature (32)..(32): n is a, c, g, or t
  misc_feature (141)..(141): n is a, c, g, or t
  misc_feature (205)..(205): n is a, c, g, or t
  misc_feature (256)..(256): n is a, c, g, or t
  misc_feature (259)..(259): n is a, c, g, or t
  misc_feature (264)..(264): n is a, c, g, or t
  misc_feature (267)..(267): n is a, c, g, or t
  misc_feature (269)..(269): n is a, c, g, or t
  misc_feature (277)..(277): n is a, c, g, or t
  misc_feature (291)..(291): n is a, c, g, or t
tcaactgaaaanccatttctttctcaaatgtncctccaacaaaatgataaggaggaaggggaatctgattccaggataagagatcttacctaggaccatttcaaagattttctaaggtctgcttattacttctctcatggntatccttctcctcagttacagcccatgttctctggcttcttggtggtggcagagaaccacactngagtgaaatggcttcccacacaagctccaattgtgctagagctgacaaacnacnacccnccncngggacccnaccccaaaaacacncaggggggaactttttcacagaggtaggaatttatttttaaaagtggggattatggttttatattgtcccatctctctctttgggaaggaacgtgtcccttaaat

SEQ ID NO: 296571 - DNA, 438 bp, Homo Sapiens
  misc_feature (53)..(65): n is a, c, g, or t
  misc_feature (203)..(227): n is a, c, g, or t
  misc_feature (333)..(333): n is a, c, g, or t
  misc_feature (357)..(357): n is a, c, g, or t
  misc_feature (385)..(385): n is a, c, g, or t
  misc_feature (403)..(403): n is a, c, g, or t
taaaccgcctgctcttgaccttcgtccatttttgctatcaggctattttgtcnnnnnnnnnnnnncactgatttaaaaaacttccagatattatagatacttattcttcttaaatgtctgcaagtacttcccccactttgttatttctcttttaatatgttcagaaaaaaagaatgacatagcaattaagaatcaccatgtcnnnnnnnnnnnnnnnnnnnnnnnnngcccattgtcaatgttttaatgtgtgcccttccagatttcttcctctacaaggcttgcttgcacacttaaggcatgcacatgcatgcaaaattgttttaacaaaantggaggttcacactggaacatggntactttggcaccctgtttccctttgggnttaataaatttgggaggnacctttcagtgttcaaccctttacggaggttaacc

SEQ ID NO: 296572 - DNA, 443 bp, Homo Sapiens
  misc_feature (362)..(392): n is a, c, g, or t
agatgatggggagatatgtaaggagttaccatttggccagactctgaataaaacacaagagccatgtgcgtgaagtggagcataaccaaactgcagcaatagttctgtttgtaaagtccttttatcaccttaattgaatgggactgtcctgtggcctcagggctacctaggatgcaaataaaatcacccactattggctttgtggtatcctgagataccacagtcacaagaaaggggcttgagatccgcagagatcattctccgctatccaagctctgaaacccttcagtctgaaggctgaaaaacactgattcattgtagttcaagtctcacctgatagcaccactcttgagtctgcagtnnnnnnnnnnnnnnnnnnnnnnnnnnnnnnnggtacccaacttgcaggtttttatggacaaccttaaagagtatgtattcgg

SEQ ID NO: 296573 - DNA, 429 bp, Homo Sapiens
  misc_feature (27)..(27): n is a, c, g, or t
  misc_feature (175)..(175): n is a, c, g, or t
  misc_feature (198)..(198): n is a, c, g, or t
  misc_feature (301)..(301): n is a, c, g, or t
  misc_feature (347)..(347): n is a, c, g, or t
  misc_feature (362)..(362): n is a, c, g, or t
  misc_feature (373)..(373): n is a, c, g, or t
  misc_feature (393)..(393): n is a, c, g, or t
  misc_feature (404)..(404): n is a, c, g, or t
  misc_feature (414)..(414): n is a, c, g, or t
tactctcaggagactgttttgtgcttnccaaatttggaaagcatctataaactgctatatttacttacgagtattcaagaaaagattagaaacttctagaaggcagaaatctgccctgtgaacttggtaaatgtaagtttactaaatatgtatgagagcttcaatttagtaagtncaagcagatgctagcagagcagntaatcaggataaggacacatgggattgggacaaaggcagaaagtgagccctaccacaggggattgggcaaactactgggggtacggcacatgggtgacggcgntccatcaaatgtcattctgtttcacacttcaggaaaaaggccacanggaaggtgatagganaactgttgggntgaggggcactgtttcaggngctttttcccnaattttaccntcttgggggcttttt

SEQ ID NO: 296574 - DNA, 260 bp, Homo Sapiens
  misc_feature (33)..(33): n is a, c, g, or t
  misc_feature (174)..(214): n is a, c, g, or t
  misc_feature (222)..(222): n is a, c, g, or t
ttataaggaagaaaatttttgtggcttgccatngaattgcataacattgttctagggggaaatgcattctgacctcaaactcacctaaaactacagatttttgaaacatgacatatatgtttagggcattacatgagaccacactttttctcacacatggtaactatatttccnnnnnnnnnnnnnnnnnnnnnnnnnnnnnnnnnnnnnnnnngagacagnggctcaactctgtagcccgggctgggagtgcaggtgat

SEQ ID NO: 296575 - DNA, 289 bp, Homo Sapiens
  misc_feature (118)..(118): n is a, c, g, or t
  misc_feature (140)..(140): n is a, c, g, or t
  misc_feature (147)..(147): n is a, c, g, or t
  misc_feature (164)..(164): n is a, c, g, or t
  misc_feature (257)..(257): n is a, c, g, or t
  misc_feature (268)..(268): n is a, c, g, or t
agctcttaaacgtgcatatcattttctggctgaggtcagaaagttgcaacatgaaaagtagtccaccccctgttgctgggctttgaagatgggaaaaagggaagccatgtaccagggnaccctatagtttctgggaaggntgttgantgaggcctttgattttntacagctttgcaaaacttgttaaataagggcccgataggaggaccttcagttccttaaaattcacccaggaacttaattttgggccttaattnaccccccattnaacccggccacccttttttcc

SEQ ID NO: 296576 - DNA, 414 bp, Homo Sapiens
  misc_feature (316)..(316): n is a, c, g, or t
  misc_feature (325)..(338): n is a, c, g, or t
  misc_feature (389)..(389): n is a, c, g, or t
  misc_feature (400)..(400): n is a, c, g, or t
gcagtttggaaaccatgaattttattttctctagataagctgcagattagctggtagctagcaaagaggccagtaaggatattctgatctcaggcacctagatgggtcaacaaagaaagcaatttcagttatctaaggactctttagaagacagaattttgctgttggcatgcgtgacaggctatctctgtacatctggcggtgtactttgttttctctgccgtctttgttattccaggtctgcaccatttccttctcagaatatctaatatgtgtccattagatgaaccataatggtgtgttagggttttgtaanatccttgcnnnnnnnnnnnnnnaatgttactgatccggctccaaaaaaggaataaataaatagtctattgccnaagaataatancctattccccattt

SEQ ID NO: 296577 - DNA, 336 bp, Homo Sapiens
  misc_feature (239)..(239): n is a, c, g, or t
  misc_feature (257)..(257): n is a, c, g, or t
  misc_feature (296)..(296): n is a, c, g, or t
  misc_feature (307)..(307): n is a, c, g, or t
  misc_feature (322)..(322): n is a, c, g, or t
caccaagcatctcttttcatgtaatattttactgtagactttatacataggcagtgtgttgcatcaatatcagtgtagtatgtggaaatcttttacagtagaagtgttttcttttatttggcgcacaatagtccaaatttctttaatccttcttttgcatgtttgtttttcaaccctttctgtttcttccgtctctagaatggctggcttttattgtatagcagtctgtttgttcggtntttaagaagtaactcagnaagagttgtatttgcctcaaatttgtaaaggctttaaanatgttttgccnttattatttaaggtncaccttgggctagg

SEQ ID NO: 296578 - DNA, 353 bp, Homo Sapiens
  misc_feature (131)..(181): n is a, c, g, or t
  misc_feature (310)..(310): n is a, c, g, or t
ttttccctccccctgggaacctgggcctggattatctcatccatcttcaggattactgacagtcttatgactaatcctaacagatcctactcttacagatacacccacgtattcgttctcttttttattgnnnnnnnnnnnnnnnnnnnnnnnnnnnnnnnnnnnnnnnnnnnnnnnnnnncttagctctatctttgactccctgacacttctcttcctgcctcttttcacggcttatggacctcaggtgcccagagtgagatgaatgacaatcccatggggcaggctccttccgggctgtggggcaatnttccatttctaattcagtcgttcatgtgtccattcattctttc

SEQ ID NO: 296579 - DNA, 268 bp, Homo Sapiens
  misc_feature (24)..(24): n is a, c, g, or t
  misc_feature (31)..(31): n is a, c, g, or t
  misc_feature (45)..(45): n is a, c, g, or t
  misc_feature (47)..(47): n is a, c, g, or t
  misc_feature (59)..(59): n is a, c, g, or t
  misc_feature (62)..(62): n is a, c, g, or t
  misc_feature (65)..(65): n is a, c, g, or t
  misc_feature (68)..(69): n is a, c, g, or t
  misc_feature (71)..(71): n is a, c, g, or t
  misc_feature (76)..(77): n is a, c, g, or t
  misc_feature (79)..(79): n is a, c, g, or t
  misc_feature (89)..(90): n is a, c, g, or t
  misc_feature (95)..(96): n is a, c, g, or t
  misc_feature (102)..(102): n is a, c, g, or t
  misc_feature (108)..(108): n is a, c, g, or t
  misc_feature (115)..(115): n is a, c, g, or t
  misc_feature (118)..(119): n is a, c, g, or t
  misc_feature (122)..(122): n is a, c, g, or t
  misc_feature (124)..(124): n is a, c, g, or t
  misc_feature (135)..(135): n is a, c, g, or t
  misc_feature (140)..(140): n is a, c, g, or t
  misc_feature (147)..(147): n is a, c, g, or t
  misc_feature (151)..(151): n is a, c, g, or t
  misc_feature (160)..(160): n is a, c, g, or t
  misc_feature (164)..(164): n is a, c, g, or t
  misc_feature (177)..(178): n is a, c, g, or t
  misc_feature (183)..(183): n is a, c, g, or t
  misc_feature (198)..(199): n is a, c, g, or t
  misc_feature (201)..(201): n is a, c, g, or t
  misc_feature (206)..(206): n is a, c, g, or t
  misc_feature (219)..(219): n is a, c, g, or t
  misc_feature (223)..(223): n is a, c, g, or t
  misc_feature (227)..(227): n is a, c, g, or t
  misc_feature (229)..(229): n is a, c, g, or t
  misc_feature (238)..(238): n is a, c, g, or t
  misc_feature (246)..(246): n is a, c, g, or t
aatttatcttgctgaaaagtcttntttcttncttcaaagaagttnantcaaattaatanttnccntannanaaacnngnagacctgctnngtctnnacaagntggccngggactnggnncantncctcccgacancctgnaggcagncagntttgagggnccantcctcacaaagtnnagggnccttcttttggaatnncngcttnccaacatggggtntttntcantntgggcactnaagcagantagcatttgggaaggcaaataa

SEQ ID NO: 296580 - DNA, 367 bp, Homo Sapiens
  misc_feature (110)..(198): n is a, c, g, or t
  misc_feature (259)..(259): n is a, c, g, or t
tgagctcaagcaatcctcttgccttagcctcctgagcagctgagactacaggcatgcgccactgtgcccaggtattttttaaaatttttgtagagatagagtctcattcnnnnnnnnnnnnnnnnnnnnnnnnnnnnnnnnnnnnnnnnnnnnnnnnnnnnnnnnnnnnnnnnnnnnnnnnnnnnnnnnnnnnnnnnncacgtctggcctggaaatttttaaaaaacatattttcaggatcaagttagaaattataatnggaattgtaaaaatactaaaaattggggtgataatgacaacatcacattaccaaaatttgtgggggttcagtaaaagctctatttcaatctaaatttatagtgtaagt

SEQ ID NO: 296581 - DNA, 465 bp, Homo Sapiens
  misc_feature (26)..(26): n is a, c, g, or t
  misc_feature (94)..(94): n is a, c, g, or t
  misc_feature (355)..(355): n is a, c, g, or t
  misc_feature (397)..(397): n is a, c, g, or t
  misc_feature (399)..(415): n is a, c, g, or t
  misc_feature (440)..(440): n is a, c, g, or t
ctgtactgtcttcctttgtggttttnctggttttctgtggttgtatgttttgaatcctttctttttatactttgtgcaactactataggttttnactttgtagtataaaagttgcagataccaagatgaaattactcttctcaatcccaaacaaattgcagccagcaaagcacatagagagagaggtcgtgtgtgggatgtctgaggataaaacctatctcaagtactttctaaaatagccacacaagaactttttcatgtccttcacatatctccctcccacaaaggggacccaaaagggcgagggaaaggggaatatcctcctccaattcacttttccccctgtaggaaaccnggggtctagggggaaattctctgtgtgtgccactgtcccggntnnnnnnnnnnnnnnnnnacagtccaagggaaaccgttcccgnttattggttcaggccacaggttttc

SEQ ID NO: 296582 - DNA, 302 bp, Homo Sapiens
  misc_feature (49)..(49): n is a, c, g, or t
  misc_feature (131)..(131): n is a, c, g, or t
  misc_feature (209)..(218): n is a, c, g, or t
  misc_feature (225)..(225): n is a, c, g, or t
  misc_feature (265)..(265): n is a, c, g, or t
attttgcttttcttggggaaaccagttaattttccttttcacttaacanactacctacccatcttggctctggtgccagccagtgttttgtggggcttagggggcggggatagtgtggggaaattgaggangtgctgcagatcatcctctactattcaattttggaggagagataatgtaggagtatggaaaaggaaaacaaaaacacnnnnnnnnnncaagagnatttagtactttttggcattattgttaggcaaaggtacangtcttgtctctctggttattctagtcatcgagaatcc

SEQ ID NO: 296583 - DNA, 429 bp, Homo Sapiens
  misc_feature (370)..(370): n is a, c, g, or t
  misc_feature (386)..(386): n is a, c, g, or t
  misc_feature (408)..(408): n is a, c, g, or t
  misc_feature (417)..(417): n is a, c, g, or t
tgttttcccacagggctgtttgacatcacacagctttgaacctgtgatcataagctctgaggccaggagggatttgattctgcaatctcagtcatccctccttatccatggttttgatttctgccatttcttaccctcagtacagtacaataagatattttgagggagagaccatgttcacataacttttattatagtatttgttataattaccctattcttagttattgttaattgtgggctatgcctaatttataaattaactttatcataggatgtgtgtgtatagggaaggaaggcataggtatatggctatacaggggttcagtactatccccaggcttcagggcatccacggggggtcttgggnatatacccccgggggntaagggggtccctggggacctngattgggcnggggccgagggg

SEQ ID NO: 296584 - DNA, 630 bp, Homo Sapiens
  misc_feature (476)..(504): n is a, c, g, or t
cccgcaattctagcaagttgtttaaaacatttgaatcccttgtcttctcattgatttctcagaatttggtttattcttaccaaaaagttattgttatcaatgcaagtcacacttcagtgttccaaaagtctactttaaaagtaaatacatactctagttgtctctgaaagtatgtcatactttcatatcacttttgcccttagacacactcaattctttttattcctgaattacaatataaaattctcatttccttgtgcatctcttcttctaagaagtacaatcacaaatgatacaattccatggtattattgctcccttaaaatgctatcttctgcttttaactaactgctgttaacaattaagcatccttaacttttcaagaaaattgagtaataaatgtaatcagaaatcacatctttacatacataaaaaggactcttgccattactaagtgctttaaaacatggacacannnnnnnnnnnnnnnnnnnnnnnnnnnnnatagattctatgtttctaccattactaccagtacataccatgacacagtagaatgcaaaatataaaaactaaaacccagccatttttaacagggattgggttggtatatttaatcctgcccacaca

SEQ ID NO: 296585 - DNA, 734 bp, Homo Sapiens
aacagcgacattaccacatcgaaatgtaagatgttattattccaatgaaaacaagccactgggggactctgcacacccacctagcccctctcttctccctgagtccgtgtgaggttttctaaagtttgaggccgtcctaagaactaggattttcgtctccattatcatggatgagtttcatttcttcttcacatagcaccacagtcctctcgtgattattgccctcatgtggttctttttttaaggaccagcagcgtgctgagctctgtacctcacacccagaagggtttcgtggagcctaagagaatcaaatttaaggataaagcattagggtggccagaactctgatgtcacttttcaaactaactttgcacacagtcagacccaggctttaaacctgactccactccagcaggctgcatgaccttgcaaccgagcacttagcctctctgagctccgagttaccttctcttcatggggttggcactggcctcagcgggacatttggtgactgaccaggatgccgtgggagcttcagacggcatgatgtatggggagcgcgggtcggtgggagctacttgttgcccccctcttgctacaaatgcagatttttcacagaaaagaacatcatcgtgttggtacctcttagacacctgattccatgacaaagacttccctctaagcacccacatacctgagaaccccatgtcgggctggaatcaacacagtgtatg

SEQ ID NO: 296586 - DNA, 349 bp, Homo Sapiens
tggaaatatgcgtaaggtaagtggctgctgaagtgaagaaacatctaagtcagagtgaggggctcataataaggcacctaccttcattcttatcctcttattttcatgattgatctcccttggtggtcacctttcacttcgtggttcaaggtcctctattcttttctcactgctgtctcttcaagtatggatggaccagagatcattcaattatattaatcctcataatattcaatacattctttaggcacttggctcatgaaagtagatgtgttgttgtgaaaatattgtttcaacttgtattttattttagctgttgtttatttttcttctgtgaaagcccttggtt

SEQ ID NO: 296587 - DNA, 222 bp, Homo Sapiens
  misc_feature (60)..(60): n is a, c, g, or t
cactgccattaggattatagaaaagtagaaatgatttagtgaaggccacctgtgactttncctcggctattaaggtaccataaaaatatgattaaaagttataaaaagacaataaaggagaagccacaaaaaagaaaatactattttggaaagtgctcatacaagcagcagtggaggagaatctgacacaaaattagtactttgaggattggcggggggagt

SEQ ID NO: 296588 - DNA, 339 bp, Homo Sapiens
  misc_feature (100)..(205): n is a, c, g, or t
tggctcactttaccctccaactcctgggcttaagcagtcctcctacctcagcctcctgagtaggtaggactacagatgagcagcaccatgcccagccaannnnnnnnnnnnnnnnnnnnnnnnnnnnnnnnnnnnnnnnnnnnnnnnnnnnnnnnnnnnnnnnnnnnnnnnnnnnnnnnnnnnnnnnnnnnnnnnnnnnnnnnnnttattggtgtgagctgctgtgcccagccaatgctttcttttatatatttatttagatttggtgtttgatttttttgttaataagggaccttttcaaagatacttttaaatgaaaagacaaagggttcagaaaat

SEQ ID NO: 296589 - DNA, 309 bp, Homo Sapiens
  misc_feature (49)..(222): n is a, c, g, or t
  misc_feature (279)..(279): n is a, c, g, or t
acatgaataaatacatgatggggagcactaatgacaagattatactggnnnnnnnnnnnnnnnnnnnnnnnnnnnnnnnnnnnnnnnnnnnnnnnnnnnnnnnnnnnnnnnnnnnnnnnnnnnnnnnnnnnnnnnnnnnnnnnnnnnnnnnnnnnnnnnnnnnnnnnnnnnnnnnnnnnnnnnnnnnnnnnnnnnnnnnnnnnnnnnnnnnnnnnnnnnnnncctataggtaaaaaaatcttgaggggtgggggccaacaatctgttttcaagggcctncaaactgatactgattaatgctaaagtttg

SEQ ID NO: 296590 - DNA, 216 bp, Homo Sapiens
  misc_feature (114)..(114): n is a, c, g, or t
  misc_feature (199)..(199): n is a, c, g, or t
gaggagagaggcacaaggtatatctgcagaagtaaccatggatttaaaagtagctacagcattcaatttaaaggttcaatgaaggaatgtacagccatgtaggaactacaattnggggggaaacagggaattattctaattggaaataggaccccagttcgcgattaccttttcaaggccccgttcagcttcagctttntttttttgggccttttc

SEQ ID NO: 296591 - DNA, 255 bp, Homo Sapiens
  misc_feature (92)..(117): n is a, c, g, or t
  misc_feature (184)..(184): n is a, c, g, or t
tggtttctccaaggaaatacagaccaattctgtatatgtattaagcatgtcattttgaaagtttatgaatttagaaattaaaagtcaaatgnnnnnnnnnnnnnnnnnnnnnnnnnnaaatgaccttaggattttataacagtttagaagctccagatttgaaatctgcagtaagtgtattttnggcaatacctaagatagtggaaagcagcacgatagctattcatctgggaaggtatgcagggatataaacgt

SEQ ID NO: 296592 - DNA, 366 bp, Homo Sapiens
  misc_feature (150)..(194): n is a, c, g, or t
  misc_feature (247)..(247): n is a, c, g, or t
  misc_feature (348)..(348): n is a, c, g, or t
ctgtatttcttctgtaaattgccagtttcttgactggattgtttaccttttactcacaggtttgtatattctggaacattctttgtctacctatggcaaatagattctcccagttggccacttttttacgacatcatttgtcacaaagannnnnnnnnnnnnnnnnnnnnnnnnnnnnnnnnnnnnnnnnnnnnctggcatctaaatcttctaagtagcttagaaaggccttccccatctgatgggntactaaaaatattattctatgacagtaggacacaaattggggttgtttgccctatgtgttatttctcctcttctctcccaggggctggactggatcccaancacaggtccatacccgga

SEQ ID NO: 296593 - DNA, 384 bp, Homo Sapiens
  misc_feature (155)..(155): n is a, c, g, or t
  misc_feature (164)..(258): n is a, c, g, or t
tggacaccttcactctgccttgtaaagaaaaggccctcctagagcgtaggagttttcttggagtttttgggtggcatggaaagttctcatcataacagcactgacaataacaaaatatttaacagtggttctcagtagtgggttgggtgacagtnaggaatcannnnnnnnnnnnnnnnnnnnnnnnnnnnnnnnnnnnnnnnnnnnnnnnnnnnnnnnnnnnnnnnnnnnnnnnnnnnnnnnnnnnnnnnnnnnnnnattttagcatgcactaagccttctacaccacacatgacagaccccccaacttaagagttatctgggcccaaaatattcagttctgcccaaggtttgaggagaccctttgaggattatccttaaacc

SEQ ID NO: 296594 - DNA, 318 bp, Homo Sapiens
ccagagtctcaagacaatctaagactggagacttagattccccagggttacccatgacttattgtcgaattacttccgctttttccatcctgtgattgaatgtctacctagagacttcatagtgtcatagaatccaagcataggaagggccatagtggggttcatcctggctaccacacatatgcattgcatccctaccccagcacacccactaagctgttgcccaacttcttcctaacaccttgggaaactggaagttcattacctcatcaggtagcttacagtttcagtcagttctccattagaaagttctgcctt

SEQ ID NO: 296595 - DNA, 445 bp, Homo Sapiens
  misc_feature (186)..(223): n is a, c, g, or t
  misc_feature (414)..(414): n is a, c, g, or t
  misc_feature (424)..(424): n is a, c, g, or t
gcgagtgtgcatttaaagcaaacagtagctcaatgggaaataatatttgcatctctattttatctaaagtctatttttaaaaggcctataaaatcataaaagtcatgtggcattatttttcaactttctaaatggttgcttggcactcattcaattagacaggatagtttaacagcagtgatactnnnnnnnnnnnnnnnnnnnnnnnnnnnnnnnnnnnnnngaccacatcttcattgaaggcctcatatgagatataggtcactgcatcaggtaatggagtttcaaggaggcataaagtcttgaggatcttatcaagttggggacgtcagagtaactacattcctaaggtaattcataatggcaggccgcctggtgcttaatgctaatggactgacgtgatattttggggantggggctccngaggtcatgtggtggtaccct

SEQ ID NO: 296596 - DNA, 339 bp, Homo Sapiens
  misc_feature (213)..(230): n is a, c, g, or t
  misc_feature (268)..(268): n is a, c, g, or t
  misc_feature (297)..(297): n is a, c, g, or t
  misc_feature (312)..(312): n is a, c, g, or t
atgctaaagactgtttttcatacagaagtcccatatccccagcttttagccttgaattaagaaacacttgtaaagatgatcggtttgaagcaaaatgaaatctaagtattcaaccactcattcttcagttatttccacttgcattgattgaactgattaagattgcccccgtcattgcacgtaaggaagggtagtgcagaggtttcccagcgnnnnnnnnnnnnnnnnnnaattgtaataaatatcacttattcttattactataggnattaccctttttcacaggtttatcaaccngggggggcaccctgnctgtttaaatcccgggggggtcatcaa

SEQ ID NO: 296597 - DNA, 397 bp, Homo Sapiens
  misc_feature (129)..(288): n is a, c, g, or t
  misc_feature (386)..(386): n is a, c, g, or t
ggcacgagggatgtgtaaagtctacttgggtttgtaagaccagcctttggttgaagaccttccttgggtcctagcagacagaaaccaggagagacagagacatctatatccggctacatagagaggttnnnnnnnnnnnnnnnnnnnnnnnnnnnnnnnnnnnnnnnnnnnnnnnnnnnnnnnnnnnnnnnnnnnnnnnnnnnnnnnnnnnnnnnnnnnnnnnnnnnnnnnnnnnnnnnnnnnnnnnnnnnnnnnnnnnnnnnnnnnnnnnnnnnnnnnnnnnnnnnnctacttaggaaattgaggaggatttactttggagggattggacccacatgattgtggggggactaggccaagttccaaaatttggaagggttgggagntttaggggaga

SEQ ID NO: 296598 - DNA, 305 bp, Homo Sapiens
  misc_feature (52)..(79): n is a, c, g, or t
  misc_feature (98)..(98): n is a, c, g, or t
caaaagttgtttttccttatgtcctatcttttcattctgcacctaaagaatnnnnnnnnnnnnnnnnnnnnnnnnnnnncctagagtcctttaaaganatgaaagagaagcgtgaattgtgtttaatgtttggtaattgtttttaagtatttaagtccccatctcccacaacaagtaggcaatacctaaagtgatttataagaaatcctccaaagagagctctgcaaaggggtcctttcctgaagctctgtgaggactgtgactgggaggggctgggatgctgccgacagctgggggggaaaagg

SEQ ID NO: 296599 - DNA, 409 bp, Homo Sapiens
  misc_feature (254)..(280): n is a, c, g, or t
  misc_feature (283)..(283): n is a, c, g, or t
  misc_feature (381)..(381): n is a, c, g, or t
  misc_feature (386)..(386): n is a, c, g, or t
gtccctttcacctcccacagtatgtgtgtcagctgcagttcgtcaagataaatgagcaggagacaacttcgtgtaaaaagtgtgtgaacctaggacaggacttttcgacccttatgaagaaagaaaggaaagaatattgcagctagatgtgttgggtccggactgaggtcagagttgcacagctttggacagatagcctggacacaggaaaccatgttctctcaattttaaacaaaaatggcaattatgtattnnnnnnnnnnnnnnnnnnnnnnnnnnnatnacacacattaaaattcttaaccatgggtcagcttatatcgaccttttgggtaaagacattattccttttgaaacttccagaagcacgagtttgttttntgganaacacatgccttggcttaccttt

SEQ ID NO: 296600 - DNA, 501 bp, Homo Sapiens
  misc_feature (277)..(305): n is a, c, g, or t
  misc_feature (461)..(461): n is a, c, g, or t
  misc_feature (480)..(480): n is a, c, g, or t
ttaattaattaagaagtagattctgctattaagaccaagacccaaagtacctgtgacttcaataaaacaagagtttgtttttcagttatgtgactgcccaagcataagcattacagaactggaataatgggtctgtggtgcgagggactcaggacccttctatattgttactcacctatctctaaggcattgtgctcattggagtggttgagggtcactcattaccacttaccaccaggtatagattgcagctgctaagtaatagggaaaggggaannnnnnnnnnnnnnnnnnnnnnnnnnnnnatgtccattcctcatcatggtacattccagaagttacacacatcatttctgcaaatatctcatgggccagaactgtgcttcggccccgggtttgccaggaaaagcctgaagaaaccatggtggtgtaatcctgagcaggactccatcacctaatanttggaagtgcacccggaancccttggcaaccctttacccg

SEQ ID NO: 296601 - DNA, 211 bp, Homo Sapiens
  misc_feature (60)..(93): n is a, c, g, or t
  misc_feature (199)..(199): n is a, c, g, or t
aagggttggacaagctagccttaggtcatgtccagaatgcaatttaacaggaatttcaannnnnnnnnnnnnnnnnnnnnnnnnnnnnnnnnntatcattttgggtaaatgcactgtctcacacactttactactaaggtcccattccaaaccatgacgaccctttacataaaattagggcattctcaccaagtttctnaagatgatttct

SEQ ID NO: 296602 - DNA, 333 bp, Homo Sapiens
  misc_feature (210)..(210): n is a, c, g, or t
  misc_feature (234)..(234): n is a, c, g, or t
  misc_feature (284)..(284): n is a, c, g, or t
  misc_feature (313)..(313): n is a, c, g, or t
gggcagacagcaaccttttgcttgccaagactcaaaccttcttagctaacagaacctccccaccttagccgtcagcacattcatgatccaagtaagcccagttactctagccctgtcactgcatcttaaaccagctctgtctgtgagcaagttagttccaaaagtatattgatttttcctgaaaagatgggggctgattccagggcttgnctaacctcttagggatgggtaatnaatggattaattaattaaacacatagttcctgtacatcttggcccagggnactgtttcacattaggcgctttacagcantcttcagtagggtactattt

SEQ ID NO: 296603 - DNA, 500 bp, Homo Sapiens
  misc_feature (296)..(337): n is a, c, g, or t
  misc_feature (393)..(393): n is a, c, g, or t
  misc_feature (438)..(438): n is a, c, g, or t
  misc_feature (480)..(480): n is a, c, g, or t
cttctgtagcctgctcaaatgcacatcttcctttaagcctcctgtgttgctccttccccttgttagaaacccgttatctgtactcttatggaacttagtgtaatagcaaacccccacccctgctccaagggctattcacagactgtcagagttagggaggagaaatgacttagaggaatggggtaaggggttttgatagttcccggtctgctcctaatagtgagacccgggcagtcagtcatggctcatctttgtggttcagtttttctcagctgaggaatgagtggtttggattnnnnnnnnnnnnnnnnnnnnnnnnnnnnnnnnnnnnnnnnnntgaggtgctgtgctgagaaggactctgaggctgcatcctgactcagctaaatgatncacttagggaatattcgccatggggagtgggagagttgaaaagcnttacgaggaggtattctgagcctgcttttgggactagggttnattttaaatgtccccttttt

SEQ ID NO: 296604 - DNA, 335 bp, Homo Sapiens
  misc_feature (138)..(211): n is a, c, g, or t
gtgtaagccactggcctgtgagaatatattggtaggtatacacaggtgctgggtggggcccaggttgtcaggatcagggtcaacctatagctttgagtggaagaacatggagtttggaacctgtgactgaggtctcgnnnnnnnnnnnnnnnnnnnnnnnnnnnnnnnnnnnnnnnnnnnnnnnnnnnnnnnnnnnnnnnnnnnnnnnnnntgacgtgagaatacttaccttgcaagtggtcgtgtagactaagtaggtaacacgtaattgggagctgttaggttctacactagcaccactaccacccccttttctggctaccaaatgtatattt

SEQ ID NO: 296605 - DNA, 199 bp, Homo Sapiens
aatgttcttttgaaagaaaaggtaaccaggacctttcgttcatttgctttcgcagagttccgtttagataaaatggttaatttttataatgttatgaaaactaaaaagtgaactattttagagaaaagtaacactgaagattgccagtttgccatcggtatccttgatttgctcttcttcatctctaataacagataca

SEQ ID NO: 296606 - DNA, 640 bp, Homo Sapiens
  misc_feature (444)..(492): n is a, c, g, or t
  misc_feature (494)..(582): n is a, c, g, or t
ttctccctacatgtaccatatcacctacaattacctcgtgtaccactattttgcaaataaatgccagaggcaagagtacattttgatgctttagcctagcactcaaagccctcctcgatttgaatctttccagcctcatcttgcacagcccctccatacccagacctcacccactctatttgccatctccagaacatacccctaactttctcacctctgtgcctttgtgcaagctgctccctctacctggaaacctccatttgtcaagctgctgctgtcttcaagatctacctggtcagaatctcctgctgtcctcttctgccacccacagcaatgtgagccttcactggctggccttccctactcactggagcagagctacggcatcagaatgccctggagcaggggttagaaacacagatttctgagtctacactcgaagannnnnnnnnnnnnnnnnnnnnnnnnnnnnnnnnnnnnnnnnnnnnnnnnannnnnnnnnnnnnnnnnnnnnnnnnnnnnnnnnnnnnnnnnnnnnnnnnnnnnnnnnnnnnnnnnnnnnnnnnnnnnnnnnnnnnnnnngagccctgaaccttgtaacatgaacatttattagttatatctggaaaaaaatataaag

SEQ ID NO: 296607 - DNA, 620 bp, Homo Sapiens
  misc_feature (162)..(162): n is a, c, g, or t
  misc_feature (406)..(426): n is a, c, g, or t
  misc_feature (475)..(517): n is a, c, g, or t
  misc_feature (586)..(586): n is a, c, g, or t
acatgtgagatcatatccagctgtttagacacacacacaattaggtgattttaactgtgcttctctgagctacacccatcccttgttgcttaactgtaaaaatgtttatttaatttctacttgcaacaactcatgtatatggggcttctgttctgctggaantctggatcctgtggcgtggggatgccgtcacagacttcacagtctgatagaggaggcagctgatgtaagtgccacctccatatgtcaagctgcatgtcagatggtacgctgggactagttgattctctgtgacttgccgcaaaagttccttgccacagtaatcccttgtttcccaagggtgatgtagatcatcctatgtgacagtaacaataggctaaaaacagccaaaggacttgaaagcgcnnnnnnnnnnnnnnnnnnnnncctagagtgactgaataatgagggcaaaatgggtgtcagtgggcatgannnnnnnnnnnnnnnnnnnnnnnnnnnnnnnnnnnnnnnnnnngggtggggacctggtgaggagtgaccactgggtgagcattctgtgtcaatggatttccagctcacattnggcagcgaattgcacattatttcatccattcctg

SEQ ID NO: 296608 - DNA, 514 bp, Homo Sapiens
  misc_feature (46)..(46): n is a, c, g, or t
  misc_feature (62)..(62): n is a, c, g, or t
  misc_feature (71)..(71): n is a, c, g, or t
  misc_feature (74)..(74): n is a, c, g, or t
  misc_feature (84)..(84): n is a, c, g, or t
  misc_feature (90)..(90): n is a, c, g, or t
  misc_feature (94)..(94): n is a, c, g, or t
  misc_feature (103)..(103): n is a, c, g, or t
  misc_feature (115)..(115): n is a, c, g, or t
  misc_feature (117)..(117): n is a, c, g, or t
  misc_feature (134)..(136): n is a, c, g, or t
  misc_feature (139)..(140): n is a, c, g, or t
  misc_feature (147)..(148): n is a, c, g, or t
  misc_feature (154)..(154): n is a, c, g, or t
  misc_feature (162)..(162): n is a, c, g, or t
  misc_feature (166)..(166): n is a, c, g, or t
  misc_feature (180)..(180): n is a, c, g, or t
  misc_feature (195)..(195): n is a, c, g, or t
  misc_feature (226)..(227): n is a, c, g, or t
  misc_feature (229)..(229): n is a, c, g, or t
  misc_feature (401)..(401): n is a, c, g, or t
  misc_feature (468)..(468): n is a, c, g, or t
  misc_feature (488)..(488): n is a, c, g, or t
accttttaatatatggtatgatttatttagtttactgtctcttcantattagaatataaganccttcaggncanggattggtgnctattnaccnccgtatctncagcatcaagantncttggcagcaagtaggnnnttnnttgaggnnacaacntaaagaanaaangaacaggtacaganctggttgcctcactnggaggatcccccaattattggttcctggacnncntttcttttgagccattcagtctctccagcttcacagctggggggttgggcctcatcctcagggttctggctgccaagcaggggaaaagggacttggcagcttcctgggccagtgtgtagactctcatgtaacctcctgttttctgccctgctccttgctgagtaattcccgngtgatctgcaaggatagaaagaatgatctttcaaagaacatgggagagagattggcaataggggctngcagaaaaaaacagcaaaantaaccacccaaaaaattcacagccca

SEQ ID NO: 296609 - DNA, 126 bp, Homo Sapiens
tcagcagagaatagatctttattagccacaaattcttctacagaaatcaaatggtcagatcataaaaatcaaattgccagttattgctgccactaatgggaaataacttatcagctgcaaaagaac

SEQ ID NO: 296610 - DNA, 293 bp, Homo Sapiens
  misc_feature (54)..(54): n is a, c, g, or t
  misc_feature (81)..(81): n is a, c, g, or t
  misc_feature (84)..(84): n is a, c, g, or t
  misc_feature (92)..(92): n is a, c, g, or t
  misc_feature (97)..(97): n is a, c, g, or t
  misc_feature (99)..(99): n is a, c, g, or t
  misc_feature (111)..(111): n is a, c, g, or t
  misc_feature (114)..(114): n is a, c, g, or t
  misc_feature (126)..(126): n is a, c, g, or t
  misc_feature (131)..(131): n is a, c, g, or t
  misc_feature (137)..(137): n is a, c, g, or t
  misc_feature (145)..(145): n is a, c, g, or t
  misc_feature (147)..(147): n is a, c, g, or t
  misc_feature (156)..(156): n is a, c, g, or t
  misc_feature (174)..(174): n is a, c, g, or t
  misc_feature (188)..(188): n is a, c, g, or t
  misc_feature (214)..(248): n is a, c, g, or t
  misc_feature (262)..(262): n is a, c, g, or t
  misc_feature (283)..(283): n is a, c, g, or t
tttagcatttaggaaactttattgcacttaatccatttacatggtcctaatttnccagtaacataaaagcaagaggcaaanatnaccatttnagtangnccaacagttagnganggaaataaaagnggaangattanctaaatgngncaataaatnccccagttgtttctctgnttgtctgctgggtncttgatttcacccaattaatagggannnnnnnnnnnnnnnnnnnnnnnnnnnnnnnnnnnttaaccttgcgganggggccctcctaaaactttcngggggggaaa

SEQ ID NO: 296611 - DNA, 545 bp, Homo Sapiens
  misc_feature (124)..(136): n is a, c, g, or t
  misc_feature (150)..(214): n is a, c, g, or t
  misc_feature (223)..(265): n is a, c, g, or t
  misc_feature (460)..(460): n is a, c, g, or t
  misc_feature (493)..(493): n is a, c, g, or t
  misc_feature (499)..(499): n is a, c, g, or t
  misc_feature (508)..(508): n is a, c, g, or t
  misc_feature (513)..(513): n is a, c, g, or t
  misc_feature (533)..(533): n is a, c, g, or t
taaaatgaagaaggtataggtaactataatatgaagaatgcattggaagtgtaaattttaaaggagtttgctgattaataactcttttgttgtaacttttgttcaatgatgtttgacaaatacnnnnnnnnnnnnnaatttgaggcagannnnnnnnnnnnnnnnnnnnnnnnnnnnnnnnnnnnnnnnnnnnnnnnnnnnnnnnnnnnnnnnnttgggctcnnnnnnnnnnnnnnnnnnnnnnnnnnnnnnnnnnnnnnnnnnnccttgtgccaccacgcccagcaaatttttgtattttattgcagagatggcatttcaccatgttgcccagggtggtcttgaactactggacttaagcaatccgcccacctggggcttcccaaagtggctggaggtttacagggcatgagccaccgcgcctgggttgacaaatactttttaaaaatatcccagtttntgggattttatttcacctctacaaaatgatttnagtccngtaggaacntgtgnccacaattgacacagtattntccagcatgttt

SEQ ID NO: 296612 - DNA, 364 bp, Homo Sapiens
  misc_feature (34)..(34): n is a, c, g, or t
  misc_feature (139)..(239): n is a, c, g, or t
  misc_feature (333)..(333): n is a, c, g, or t
cttgtcttagagtctgctattgggggaaccaaanctaaaactggcctctgtacagcaggttgagaggcaatatagcatggtggtcagggacataggcttggagcagagtgcctgggctcaagcctgggcccacagtttnnnnnnnnnnnnnnnnnnnnnnnnnnnnnnnnnnnnnnnnnnnnnnnnnnnnnnnnnnnnnnnnnnnnnnnnnnnnnnnnnnnnnnnnnnnnnnnnnnnnngaatatgacacagttaaagtgagtccccaataaatgctgttattttcttaaggagcatccaaatgttaggagggaagtgttgcccctgagggantgaggcacaccctgctttttagcctgttcct

SEQ ID NO: 296613 - DNA, 783 bp, Homo Sapiens
  misc_feature (307)..(431): n is a, c, g, or t
aggcagattcagtgtctggtgagggcccacttcttagtttttacaggactgtcttactgctgtgtccttacatggcagaaggggctaggcagtctcttaggtcccttctttaagggcactaatcccattcattagggctccattctcatgacctagtcacttcccaaatttcccacctcctcatgccatcactttggggttagaatttcaacatatgaattttgaagggacacaaatgttcagatcatagcatatatatttaatcccacatctcctgtgactatgtaagacctatctcttcctaagnnnnnnnnnnnnnnnnnnnnnnnnnnnnnnnnnnnnnnnnnnnnnnnnnnnnnnnnnnnnnnnnnnnnnnnnnnnnnnnnnnnnnnnnnnnnnnnnnnnnnnnnnnnnnnnnnnnnnnnnnnnnntgaagagtcagttcatagatgaggtacacattggtcagcctcccagagtggagagtggatttgaagaggccaactagtgacgatcaatccgccttctctgacccatctctaggggaggccaatcacaccagccagcctcagaatcccacagccctccagtcatgcctcaaatagagaacatgttaggtagcactgaattttctgtttatccatcagtttcccctattagattttgagctccttgaaggccaaatctacaatcctagtgtatagtaggtactcaagaaatgtctggtgactaacatatatattgatgcttcaagtcattccagagtcctcaatcttggtaaag

SEQ ID NO: 296614 - DNA, 399 bp, Homo Sapiens
  misc_feature (21)..(21): n is a, c, g, or t
  misc_feature (71)..(139): n is a, c, g, or t
  misc_feature (163)..(163): n is a, c, g, or t
  misc_feature (168)..(168): n is a, c, g, or t
  misc_feature (221)..(221): n is a, c, g, or t
  misc_feature (259)..(259): n is a, c, g, or t
  misc_feature (337)..(337): n is a, c, g, or t
  misc_feature (368)..(368): n is a, c, g, or t
  misc_feature (381)..(381): n is a, c, g, or t
atctccctctactgcccaggntagagtgcaccggcaaattcatagcaaccttcgaacttctgggctcaggnnnnnnnnnnnnnnnnnnnnnnnnnnnnnnnnnnnnnnnnnnnnnnnnnnnnnnnnnnnnnnnnnnnnnttaaaatttttgtagatatagggnctcantatgttgccagggctgacctataactctcgcctttaaatgtaaacttgttcanttgatacgctcaaataaatataatcttgcacccagggncaaaaaacttgcattcataattacgtaagggttaagtactaaatgttacacaagcaatccctcctaacctcaggtctncccgaaatggctggaaatttaccagggtctngaaacaccatggncctaggcctatttcctaa

SEQ ID NO: 296615 - DNA, 398 bp, Homo Sapiens
  misc_feature (245)..(314): n is a, c, g, or t
  misc_feature (373)..(373): n is a, c, g, or t
ttttttaattattagtaaaatatgcttgtgtccaatggagaagataaggcatgaacctaaataccataaaactcagaacaaagtacctaacgcaatccccggtgctgagcagaaacttggtaaataatttctgaactactgaaagtcaactgactgtaccatagatatggtccaccccactcccgccatcgctcctccctggctttggtgatcacacctgagagcatgtcataaacttatctgtnnnnnnnnnnnnnnnnnnnnnnnnnnnnnnnnnnnnnnnnnnnnnnnnnnnnnnnnnnnnnnnnnnnnnnactatcccccaaattttggcacagtatctgggcaaacggtcagtggcttgtttgggtgnaataaatggaatggagtggtatggt

SEQ ID NO: 296616 - DNA, 456 bp, Homo Sapiens
  misc_feature (54)..(117): n is a, c, g, or t
  misc_feature (242)..(242): n is a, c, g, or t
  misc_feature (369)..(369): n is a, c, g, or t
  misc_feature (394)..(394): n is a, c, g, or t
  misc_feature (406)..(406): n is a, c, g, or t
tcagtcactctttcaccctgccaaagcttcactgtcctactgattgaattgtannnnnnnnnnnnnnnnnnnnnnnnnnnnnnnnnnnnnnnnnnnnnnnnnnnnnnnnnnnnnnnnaagtcttaatttacctaatacacacattgtgacagatgttcttaatgtcccaccccatattgttacatgtccagctttgaggatccctggcatgtgggggtaggagtttctgggcatgctggatncaattcccacttttaaggcatctgtggcctctgtggcctctgtggccttcactgttatggaagggatttatctggggcaccataggaaactttaccatggcacagtggacaacctaggagggggtgnggaggaggggccttcaggcccaacnggggggaccagngttcgtggggttagggtggtttggggggttttccctcttacccgtggggg

SEQ ID NO: 296617 - DNA, 556 bp, Homo Sapiens
attttaataggttagagattaaaatgtcatccatctttgatttatctaggcctatatgtatatacacccctaccctgaccaacagacaattgtataattctctctatactttaagtgccacaagagttatttaatgtgtcacttagattaatccacatatttaccctttttgttgtttcttcattccctgaatcttcatgtttcttttacaaacttcaagttttttcttctgcttaaacaaaaactttagtatttcctttaatgtaggtattctggtaagaaagtccataaatttgtctacaactgtccttgtaactttatccttgaaggcattttcactggttatggaaatctaggttggtagttattttgtttcagccctgtgaagatgtcattccattatcttctgtcttctattgtttctgtggagatggtagctctcagacaaattgttggttgctcgtttgtacatactccccactcccatcctgccctgggtactctaacattttttcactttgtgtttagtttcagcagttttaagataacatgccta

SEQ ID NO: 296618 - DNA, 724 bp, Homo Sapiens
ctgaaacagaatggggggagaggactggaggtacaagtggggtctccactttccacagacatagcttggtttaactctcatcttttcagtgtggcaccctgccttcgatcatgcctgccaggctcctcctggtccacaagcctttttccctgtccagataataagcttagttgccttcctcagtaggaaaggagaggttttcctacaagtatggagtaggaaagaggaactaggaatcttaacacttcttaaccaactctcaacccttccttcttattggaaagcctcacttctggaaattcctgaaccgaataccctcctcccaattccagagtcttaaggattttctcatgtaaaccaggttggttcttccctttccccactgttgtttgataattgagcctttttgtgtctgccaagtcagttacttcctatccattcattttccagtttcagaaattgtgttcctttggactgtagttcttcccatcagtatcaactcagatctgggcaagagggggcctagctctgagctgctcccatcatatagaggcaaagatctcttgaagcaatgggtatgcccacctagagtctgaaccatcccttttgggatcacattctgtttataaaagattcccaaattccctttccaagcagtcttcaggacatctaggagcctgcaaggatttcttcctggggcagtcaagcagactgcattgcccat

SEQ ID NO: 296619 - DNA, 484 bp, Homo Sapiens
  misc_feature (146)..(437): n is a, c, g, or t
  misc_feature (443)..(443): n is a, c, g, or t
  misc_feature (461)..(461): n is a, c, g, or t
aaagataatattccttccagagattggagccaaatctcctcatagaaacaggagaaagagacaataagggcttcccgtaaacattctttatcctaacagttttgcaaattgattggggagagaaggtgtaaatacttaaatcaatnnnnnnnnnnnnnnnnnnnnnnnnnnnnnnnnnnnnnnnnnnnnnnnnnnnnnnnnnnnnnnnnnnnnnnnnnnnnnnnnnnnnnnnnnnnnnnnnnnnnnnnnnnnnnnnnnnnnnnnnnnnnnnnnnnnnnnnnnnnnnnnnnnnnnnnnnnnnnnnnnnnnnnnnnnnnnnnnnnnnnnnnnnnnnnnnnnnnnnnnnnnnnnnnnnnnnnnnnnnnnnnnnnnnnnnnnnnnnnnnnnnnnnnnnnnnnnnnnnnnnnnnnnnnnnnnnnnnnnnnnnnnnnnnnnnnggcttncccagccagggtgggaancgtggaggtcaattaggacccct

SEQ ID NO: 296620 - DNA, 298 bp, Homo Sapiens
  misc_feature (35)..(35): n is a, c, g, or t
  misc_feature (37)..(37): n is a, c, g, or t
  misc_feature (99)..(99): n is a, c, g, or t
  misc_feature (118)..(189): n is a, c, g, or t
  misc_feature (198)..(198): n is a, c, g, or t
  misc_feature (207)..(207): n is a, c, g, or t
taggaagcaagctaacaagcagcaggctacggctncntacaagtgtacataggtatctgcctgtccccctaactgggcatcagctccaggccagcaggnttttcccctctctttcagnnnnnnnnnnnnnnnnnnnnnnnnnnnnnnnnnnnnnnnnnnnnnnnnnnnnnnnnnnnnnnnnnnnnnnnnaagcctggnaaaccaggntgtgtcgtgaagataataggcagccactgaggtcttactgcatgagaacaaggaaagctcagctcagtgtagattgccggacctaaatttt

SEQ ID NO: 296621 - DNA, 417 bp, Homo Sapiens
  misc_feature (211)..(211): n is a, c, g, or t
  misc_feature (218)..(301): n is a, c, g, or t
  misc_feature (318)..(318): n is a, c, g, or t
  misc_feature (341)..(341): n is a, c, g, or t
  misc_feature (353)..(353): n is a, c, g, or t
  misc_feature (394)..(394): n is a, c, g, or t
atttttcttctctgatttgaaaaagcaatagagttcagagcttgtcagtgtacagctgataatacaggccctaaagtctcagttctcaccttatttggaatggctatttagcattgtcttagaattaaaaacaaatattcagaatacaggctgttgatggactgtaatgactctcaagagtcaattatcaacagagcctttgaaagatggncttggannnnnnnnnnnnnnnnnnnnnnnnnnnnnnnnnnnnnnnnnnnnnnnnnnnnnnnnnnnnnnnnnnnnnnnnnnnnnnnnnnnntggggccaaccataggntgaactcccatcctcttaccttnaaaattccaaanattttacccgggccttggccgggcaccacactttgttaatncccggcttctttggggggggctt

SEQ ID NO: 296622 - DNA, 363 bp, Homo Sapiens
  misc_feature (164)..(164): n is a, c, g, or t
  misc_feature (198)..(302): n is a, c, g, or t
actcaaactaatctttgtcatctattttcatgtttctacccactctatgttttagagttggaatgtattgtgactgaaagttacctaattatttgacctatgcaagaatattgaaacatctcttggtattgatctatttcacaagtcaggccaattcctttttnggatatctttttctattagaatatttttcatctnnnnnnnnnnnnnnnnnnnnnnnnnnnnnnnnnnnnnnnnnnnnnnnnnnnnnnnnnnnnnnnnnnnnnnnnnnnnnnnnnnnnnnnnnnnnnnnnnnnnnnnnngacttataaaaatccttgacttatttgaggtacacctgaataataaaattttaaaattctc

SEQ ID NO: 296623 - DNA, 683 bp, Homo Sapiens
  misc_feature (454)..(519): n is a, c, g, or t
tagagccttgtagaatgttcactggacgaacttggagaccgtccacgttcgacctcacccaagagctctctctaaaaggaccctggctctgtgctcccccaagcacgcagaagaccctccctcagtttgcactgtgcctgggattctttccagcatttcctactttatacagagaagccaagagtggtgtctgacaacttctgtgtaactggattttctggaaatatccagtgtagctccagggacatcacttttattcttctacactttccagcacccaccagacaccatgcatagatttcctttcttaaaaatctcatttttctaccttgccatggggctgatttgtatccaaaagtaatgctgcgtgtctaggactgaatgatggttaacaggatgatctaattgggatggtgagatggtcaaaagcataaacttgggggttgggtagacnnnnnnnnnnnnnnnnnnnnnnnnnnnnnnnnnnnnnnnnnnnnnnnnnnnnnnnnnnnnnnnnnngatctactgtgtggtgtctgggcagatgaaagtacactgcttagtgtgatgcttagcatggggcagatgcttggtaaattgtaatcacttttgttgtcagttaaatggatatttcactgttgcctcttaaacgcttacgataatatatactaattatacatgtt

SEQ ID NO: 296624 - DNA, 759 bp, Homo Sapiens
aggctttaatctctgtaaaatgtttacaacagcacttagtgagttatttgtaaatgtatataaccataatgatgttattgttgtcttatgttttaccagactggcccaaagtccaaagaacatattattcaagaagtgcaattccatgttaaacatgagtcaaatttagctgaaggagcaagtttggacaagatgcctaaagcacagcagtttttcacaatgttagaattgataagtgctgtaatgtatctgaaaatataagtaataagtaggtttgcagtggtgtgctaaagccagcttatagacatgcaggaaccaattgttagttgacgtgttgatggcttcaaaccagtcagtgaaagtatttacattatggaaatcaggaacttttttcctcacaaagaaagattgttgttaaaaatttacctgctcaccactggatttgggacgtctgagggtatgaggcatttggttggcggaatcatgctactacatccttttgcactcttggcttgggtgtgtgtcttttcatttcatcagctgtcctaaattctggaagaaacctgtcagggtaaagtgtgtattctgtctttggctcaaaaaattataggaatgctgaccccagttacacatgattctctatcagcctaatacctaaacaggaaatgctttaaagtatcctaagttccagctcaaccttctttttagctatgtgatgaaggcaaagctttagccgtaatgactctcaatggtaacatt

SEQ ID NO: 296625 - DNA, 224 bp, Homo Sapiens
  misc_feature (25)..(26): n is a, c, g, or t
  misc_feature (48)..(115): n is a, c, g, or t
  misc_feature (142)..(142): n is a, c, g, or t
  misc_feature (148)..(148): n is a, c, g, or t
  misc_feature (170)..(170): n is a, c, g, or t
ttgaacagtcagtgaacaaaaatanntggttctgtgcaaagtgaattnnnnnnnnnnnnnnnnnnnnnnnnnnnnnnnnnnnnnnnnnnnnnnnnnnnnnnnnnnnnnnnnnnnnttgtgtcaggcagatcaagaagatatnatggcnttggcataaaaaaattgctggnttatgttgccttttaacaagttgattatgaatggggacccatattaattatgac

SEQ ID NO: 296626 - DNA, 449 bp, Homo Sapiens
  misc_feature (320)..(320): n is a, c, g, or t
  misc_feature (399)..(399): n is a, c, g, or t
  misc_feature (406)..(406): n is a, c, g, or t
ctgaggatctgatctaaagcataagttaattaggtgggtttttctgtagaccagacattgtaataaaaccaaaatcagttttgttttggtttaatgggtcctggttggaaaaaaactgaatatttcacatgcctggtttttcaacgtcttttcttggctacattccatctttggcaaaatgttggaaaaccatggaagtgaaataattagccatatggcaaatattggttttgttgaaccaagtcagacctttggtcagtttattctagtttatgcaaacagtgtggccaactaccaaggacgttcatgggctgtgcatnaacatgtccaactgttacacacagagtatttgtctcttagggtcctacccacgttattctcaggtctctttgactaccnattattntaagggtactgtttcaaacacttaaattaaattgtaatttttg

SEQ ID NO: 296627 - DNA, 405 bp, Homo Sapiens
  misc_feature (31)..(32): n is a, c, g, or t
  misc_feature (118)..(231): n is a, c, g, or t
  misc_feature (243)..(243): n is a, c, g, or t
  misc_feature (304)..(304): n is a, c, g, or t
  misc_feature (327)..(327): n is a, c, g, or t
  misc_feature (342)..(342): n is a, c, g, or t
  misc_feature (372)..(372): n is a, c, g, or t
taagagctagcaaaaaatatggcaacagctnnaatgtctaacaatagggaataggtcaatcgaaagagccttcgttacgtgtatttgaattccagttctagcaatgactgcataaccnnnnnnnnnnnnnnnnnnnnnnnnnnnnnnnnnnnnnnnnnnnnnnnnnnnnnnnnnnnnnnnnnnnnnnnnnnnnnnnnnnnnnnnnnnnnnnnnnnnnnnnnnnnnnnnnnnggcacataatanaagtgctgcttattattatggtacgtccttacagtataatattcagcacttaaaatgggtnttgcagatgaattttaacatggnaagactcagaatgtnttaaattatatatattgagtatatatgctntataatgagaaaaaatgtggagccaccgcgccc

SEQ ID NO: 296628 - DNA, 442 bp, Homo Sapiens
  misc_feature (402)..(402): n is a, c, g, or t
aacaagaaacaatgtattttaacaaatacattgagaatctcaatatctatatcctttgaaaacaagaatctattacaaataagcttggcctaagagctagagttgggaatgtcccattttcaccctgggttggtgactgcattagtttgctagggttgccataacaaagtagtacagattgggtggcctaaacaagaaaaatgtattttccagtaattctgggggctggaaatccaagacgaaatgtcattgggttggtttctctgagacctctctcctcggccctcttctctctgtgtcttcaaatgatttcttcctctgtgaggtgtaagtgggcccaaatttccttttccttataagggggcataagtcaatttgggatcagggttcacagtaatgganctcatttaactttaagggacccctttaaaaacccttttct

SEQ ID NO: 296629 - DNA, 394 bp, Homo Sapiens
caaacccctaccccctgtaatttggtctacaatatttaagacagagagaaaagtaacgggttgatgtttgactctctcagcattttgagtctggcttcccaattcctgacttgactttttgtctcatttgaggtcccaattctaagccaccaaaccacctgactaaagaaacttttttcttcagagtgctcccacctccctggcttcatcctcaaataggtcatcagtagcagtccacagtcaacagcaatggctgcacgaccttccccatccttgtgtagcagccccccaagtcctctgcttaaagggcaaagcaaagtgagaaacagttacctgggcaattcagatgccagataactggccccgatttctgcttcgtccttgggtgggcatt

SEQ ID NO: 296630 - DNA, 409 bp, Homo Sapiens
  misc_feature (216)..(295): n is a, c, g, or t
  misc_feature (327)..(327): n is a, c, g, or t
  misc_feature (354)..(354): n is a, c, g, or t
  misc_feature (373)..(373): n is a, c, g, or t
  misc_feature (390)..(390): n is a, c, g, or t
actggaagaattaatgtcctgaatgctcatttgtatttaactgaaaaagtggtccatctaacagtttctacattaatgagggaaaaagaatatatccatagtaagaccacaccaaattatcagtactgtagtagttttctctaggtgaatgagattagggtcatttttctcccactacatctgaaaactggggatgataatgatacccaccaactnnnnnnnnnnnnnnnnnnnnnnnnnnnnnnnnnnnnnnnnnnnnnnnnnnnnnnnnnnnnnnnnnnnnnnnnnnnnnnnnctcaaatacttatttttgccattatccatttncttccatttttacttatccagtagttnccaaaatttctacaagagntactactttttttaaancaaagttcctatttgtttt

SEQ ID NO: 296631 - DNA, 459 bp, Homo Sapiens
  misc_feature (22)..(22): n is a, c, g, or t
  misc_feature (148)..(250): n is a, c, g, or t
  misc_feature (296)..(296): n is a, c, g, or t
  misc_feature (303)..(303): n is a, c, g, or t
  misc_feature (422)..(422): n is a, c, g, or t
  misc_feature (448)..(448): n is a, c, g, or t
acagggtcttactctgttaacncagtctggagtaaaggatgcaatcacggctcactgtagcctggacctcctgggttcaagtgatccttccacctcagcccactgagtagctggcctgcaggacaagtcaccatgcctacctaagttnnnnnnnnnnnnnnnnnnnnnnnnnnnnnnnnnnnnnnnnnnnnnnnnnnnnnnnnnnnnnnnnnnnnnnnnnnnnnnnnnnnnnnnnnnnnnnnnnnnnnnntgcacttgttgcctgggcctgaaaccactgatcttaaggcaaaagnttgcgtngcatctaattcattttttaatagtttgtaattaagggatgtccagagggagggtgatgtttgccaggggttacccaccatatattattcttataaattctacccagtttctcataatantacatctgttcctacccctaataggngtgatatgagg

SEQ ID NO: 296632 - DNA, 539 bp, Homo Sapiens
  misc_feature (387)..(473): n is a, c, g, or t
  misc_feature (503)..(503): n is a, c, g, or t
ctgtggtccagtgatctccaaaaatgctttgtaacagcagatgattagattttaaaagatcagtttagctggcagtttgcctgttcatctactcccataaattcagtgggtgggcctgactcagtgtgtcggagtagaagctcaggtgaggaaccttaatctaacctgaccaggctgattgacagcagtggagagactgccatacaaccaaaccatggggacacatgaacttctttggaaactggcctgtctgggtcacagtgtgtcctctgcttgttaagaagatgcctggcacagcagtagttagattacttgtaaaatagaaaccttggaatgtctaatgactagattgggaaataagataattggattctagttctgtatttnnnnnnnnnnnnnnnnnnnnnnnnnnnnnnnnnnnnnnnnnnnnnnnnnnnnnnnnnnnnnnnnnnnnnnnnnnnnnnnnnnnnnnncatttgaaaatacttctagttttattatgntccttgaaatatgggacctattggcacccacccccc

SEQ ID NO: 296633 - DNA, 109 bp, Homo Sapiens
  misc_feature (42)..(42): n is a, c, g, or t
  misc_feature (72)..(72): n is a, c, g, or t
agtagccctcttagggactacttagggtcggatccatttagnaactgaactcctagtgagcttgtattgcanatcctctctattgtcccagccgtgaagtacttctctg

SEQ ID NO: 296634 - DNA, 151 bp, Homo Sapiens
  misc_feature (30)..(30): n is a, c, g, or t
  misc_feature (42)..(42): n is a, c, g, or t
  misc_feature (45)..(45): n is a, c, g, or t
  misc_feature (68)..(68): n is a, c, g, or t
  misc_feature (87)..(87): n is a, c, g, or t
  misc_feature (97)..(97): n is a, c, g, or t
  misc_feature (104)..(104): n is a, c, g, or t
  misc_feature (106)..(106): n is a, c, g, or t
  misc_feature (115)..(115): n is a, c, g, or t
attataagacttatgtggaataggagaatnatattgggaaanaantattttctctaacttgaagactncagagacacttttcttagncgtgaccacnaatattntncatatattntggaagaaataagctcctcactataccaccagttag

SEQ ID NO: 296635 - DNA, 362 bp, Homo Sapiens
  misc_feature (158)..(205): n is a, c, g, or t
  misc_feature (245)..(245): n is a, c, g, or t
  misc_feature (257)..(300): n is a, c, g, or t
  misc_feature (325)..(325): n is a, c, g, or t
  misc_feature (336)..(336): n is a, c, g, or t
aagagataattatctaaaacaaatataccaatatatacaagaatttataatgtatgtagcagtaaaatgtataacaacaatagcaaaaatggggagtatacaaaataaatgcatactcttttaaggttctgacaccacaggaaaatattatcaattgnnnnnnnnnnnnnnnnnnnnnnnnnnnnnnnnnnnnnnnnnnnnnnnngattacagggcgtgacacctggtggcccggccaataaaanattattaatccnnnnnnnnnnnnnnnnnnnnnnnnnnnnnnnnnnnnnnnnnnnncttgacagggtcaccctggggaggntttaggagggncggcaccctttcaccaccactgtggg

SEQ ID NO: 296636 - DNA, 248 bp, Homo Sapiens
  misc_feature (51)..(122): n is a, c, g, or t
  misc_feature (136)..(185): n is a, c, g, or t
  misc_feature (215)..(215): n is a, c, g, or t
cctaaagaaaattttgacagtaagcagatgttaacttttgagtccaacagnnnnnnnnnnnnnnnnnnnnnnnnnnnnnnnnnnnnnnnnnnnnnnnnnnnnnnnnnnnnnnnnnnnnnnnnatagacagagtctnnnnnnnnnnnnnnnnnnnnnnnnnnnnnnnnnnnnnnnnnnnnnnnnnngcctcagtctcaagtctcacaggctcaaanaagatcctcctcggcttccggcttcccaaaggt

SEQ ID NO: 296637 - DNA, 416 bp, Homo Sapiens
  misc_feature (157)..(338): n is a, c, g, or t
aactgagtttacaacattgagatcaggccctctgagagacctttactcctctgtcatcatatctataaatattcagatattagtggtgttagaaaataaaggaaggactgttacagagctagactttaggtttaagtttattaagcattaggtttannnnnnnnnnnnnnnnnnnnnnnnnnnnnnnnnnnnnnnnnnnnnnnnnnnnnnnnnnnnnnnnnnnnnnnnnnnnnnnnnnnnnnnnnnnnnnnnnnnnnnnnnnnnnnnnnnnnnnnnnnnnnnnnnnnnnnnnnnnnnnnnnnnnnnnnnnnnnnnnnnnnnnnnnnnnnnnnnnnnnntttagattacttcaagttcttaagtacattttagggatatttgaaagagagttctccatttcaggactcctgcttttt

SEQ ID NO: 296638 - DNA, 401 bp, Homo Sapiens
  misc_feature (67)..(89): n is a, c, g, or t
  misc_feature (291)..(291): n is a, c, g, or t
  misc_feature (300)..(300): n is a, c, g, or t
  misc_feature (366)..(366): n is a, c, g, or t
  misc_feature (390)..(390): n is a, c, g, or t
ttttgcaaaaagaggaactttagctccgcactttggagatgccagtgtctttgagatgttaaggacnnnnnnnnnnnnnnnnnnnnnnnaattctttaactatgttacaggtttagcaatgcctccgattcaggaatttgtttaaaaccccccagtggcttagagctgcacataggaataaaatctaaactgtttctcatgggtctacatgggtcagccattgtttacctggacttaactaacctctccgactttcccctgacacgggctgcctcccggggcttgtacggntcctgtggnttattcttgtccccgtacaaaggcacatccattctcggtgtggaggggcttaggcaggcacctggntcctggctggccttcaggaagggntctttccctgg

SEQ ID NO: 296639 - DNA, 277 bp, Homo Sapiens
  misc_feature (217)..(217): n is a, c, g, or t
tcaaaccatcctcccacctcagcctcctgagtagctgggactacaggcatgcaccaccacgcccgactatttcttctattttcagtagggacgaggtttcaccatgttgcccaggccagtcttgaactcctgagctcaagcaattctcccaccttcgcctgccaaaatgctggggattacaggtgtgaaccactggcacctgggcctgattttattnattatatattacatatcatcactgcatcactggaaaaatcggttaaagggtcctaaggga

SEQ ID NO: 296640 - DNA, 666 bp, Homo Sapiens
tagcttaatgggtatgtagtgcgtctaagattctcttgcacaagattaaaattgttgtacatgttaaatgtttccagatggagaggcctccaccagagccaggaaggggtggcggggggagggggtggaactgttagaagggaagcggaagagcagcttgaattggctactatggaggagaacacaagggaaaaaaataggtacaaggaaccccctgtccacaatttttggagcaggaaccccctttccctgggtggtagtgacaaaagcattcccatgagaagtggcctctgttgggagcctagaaagctcgattaacatactgaaaccacctaaggaagaataactgacccacttcctctctcattatcccatcctgggcccaccttctttctgtgactccctaagaacattcccctgctatgttctgtctttgccaggcgtggatctttatttcacatttgggttctaaatttcaaacccagctcagtctggtagttttaacagttgtagggggctgggggtggaatgtgtttgaattctgagaaaaagtgcgcaaaaatcttcttggaaatcagcattgttcccattcatcattgtggctcctaatttgatttgatgagttaaatagaaataaatcaaaaacatgtggatcaaatttatgtt

SEQ ID NO: 296641 - DNA, 379 bp, Homo Sapiens
  misc_feature (115)..(115): n is a, c, g, or t
  misc_feature (167)..(233): n is a, c, g, or t
aatctgatgctaagttactaatcagaaacattgaagacaaggaacggctttgtcaaagatgcagtacaaaagtcagcatgtccgacatatgaatgtcagaaaacagccaggaggnaaaagaacactgggccagcagctagaacttcatcccaccatttactggttgnnnnnnnnnnnnnnnnnnnnnnnnnnnnnnnnnnnnnnnnnnnnnnnnnnnnnnnnnnnnnnnnnnntacaaaactgtagttgagattttaaaacacttaacctagggtgataagattgggcaaagtctatggacaaaaagaagggattttgttaagtgttttaatggattaaatggatggggtgactcaaagtccaaattggacctctggat

SEQ ID NO: 296642 - DNA, 126 bp, Homo Sapiens
ccagactggtcttgaattatttaccttttacaatagttcagggactgtggacagggagatatgggggggaaaatataccttcatcttcctattttgtttccagactggattgtcttgcctgtttct

SEQ ID NO: 296643 - DNA, 418 bp, Homo Sapiens
  misc_feature (303)..(303): n is a, c, g, or t
  misc_feature (337)..(337): n is a, c, g, or t
  misc_feature (366)..(366): n is a, c, g, or t
gatgaggattccaagcccctgagaggagaggcgatttactctcagacacccagcctagctataagacagaaccaggatcagaaccaaggtcattttggtgtcaaagccatgcatgttttaaaatgtttttctacaaactgtcttgttttggccacgctctcagaataggtcatgcctacaggagggtgccattgttgaggcttgttaagagtgtagagaaaaaagaatactgggcaggcattgtgcagtgggactgtgcatagacgatcttcatttattccatttgttacggtcagattaggntgaggtcagggggcagggtttcgaacccatgttntccctggacaggcagaacttcagggtggnttcatccactttgcccaacccagcttttccacttaggatccattaggggtta

SEQ ID NO: 296644 - DNA, 506 bp, Homo Sapiens
  misc_feature (166)..(232): n is a, c, g, or t
  misc_feature (308)..(308): n is a, c, g, or t
  misc_feature (324)..(324): n is a, c, g, or t
  misc_feature (368)..(368): n is a, c, g, or t
  misc_feature (440)..(440): n is a, c, g, or t
  misc_feature (449)..(449): n is a, c, g, or t
  misc_feature (468)..(468): n is a, c, g, or t
  misc_feature (474)..(474): n is a, c, g, or t
  misc_feature (486)..(486): n is a, c, g, or t
ttgacaaagaaggtaaaagtaatttttaaaggaaacatggaatctgttcccagtgtgtttatagattggcttaatagaaataatgcatagtttataaagcatctccatgaagatatcactgaacacaggacataggatttggactaacactaaacctgactaaacnnnnnnnnnnnnnnnnnnnnnnnnnnnnnnnnnnnnnnnnnnnnnnnnnnnnnnnnnnnnnnnnnnnttgctaagaagtaaggccaataatacttgggtgactaatcaagaggctgtaaggtaaagcattttgcacagtcccngggtatacagtaagantttaataaacaggaaactactattatcatccggggcaggaggantaaatgggagtacttaatcctttttactaattcaagtgtgtgctaattgaaatctctaacacctcattatgngggatgctngggagttaggtgggtcccnctgggncaaaatttcccnaattccttaaggtgttatta

SEQ ID NO: 296645 - DNA, 440 bp, Homo Sapiens
tgaggtcctgtcctaaattctaggaaaactgactcagactatttagaaatgactagagttactagaaattactgtctcagggtaaattaactgtagaggcataaaaccttttcagacattagtaccccagtttgaaactatatttcattttaagaaaatggcaaaaatttagatttataaattgggtgtcactgttcactttataaagatggtttgctataggactcccttagactagcaggctgctttcatgcatgacgatattatccaacttggggatgcattaatctattgtgcgaggcaaggcacacctcaactaggcagtttaactgcaccagcaactgtccctaagaaagcctcctgttacacacttgagaaagttcactgcctctggctcattaaaaacagtgtcaatagagaatagaagaatggctatcaca

SEQ ID NO: 296646 - DNA, 334 bp, Homo Sapiens
  misc_feature (111)..(212): n is a, c, g, or t
  misc_feature (231)..(231): n is a, c, g, or t
  misc_feature (244)..(244): n is a, c, g, or t
  misc_feature (263)..(263): n is a, c, g, or t
  misc_feature (284)..(284): n is a, c, g, or t
  misc_feature (290)..(290): n is a, c, g, or t
  misc_feature (308)..(308): n is a, c, g, or t
ttgcaatcacagctcactgcagcctacacctctgggactcaagcaatccttctacatcagcctccctagtagctagggccacaggcttgccccactgcatcctgctaacannnnnnnnnnnnnnnnnnnnnnnnnnnnnnnnnnnnnnnnnnnnnnnnnnnnnnnnnnnnnnnnnnnnnnnnnnnnnnnnnnnnnnnnnnnnnnnnnnnnnnttcagcaactgtgcctggntcttcattaattnctatgactatataatgggnccagagttcatttaattaggnccctantgataggtttttgagggnactgccatttaaacaatggtaaaatg

SEQ ID NO: 296647 - DNA, 172 bp, Homo Sapiens
  misc_feature (59)..(79): n is a, c, g, or t
caacaaatatttctgagccactcccctccacgtataaaacatggctctaggtgcagagnnnnnnnnnnnnnnnnnnnnnaagcatgagactcagttccccattgcaagaagcttgaactaacagtgtaggaagggcaagttgacaattaccaaaacaaggatgatccccctg

SEQ ID NO: 296648 - DNA, 321 bp, Homo Sapiens
  misc_feature (70)..(82): n is a, c, g, or t
  misc_feature (250)..(250): n is a, c, g, or t
  misc_feature (275)..(275): n is a, c, g, or t
tgcaattcttattttatttataatgaaatacgaccacaaggttacatagtagtaaattcacagtagtgannnnnnnnnnnnncagtaacaaatccgtaaatcacaaacactacccagaaatacttaaatcactttacaatcgcagggtctctgctgcaggactatttaaataaatatgctaacatttctgtgctactgtaagtaacctatcactttttaaaaataaagcccaatttttaagttaccttanggaaatatctaggtaagggcttccnggggtaggtgaaggtttgaggcggtaattttcttaggggcttgacc

SEQ ID NO: 296649 - DNA, 411 bp, Homo Sapiens
  misc_feature (64)..(64): n is a, c, g, or t
  misc_feature (123)..(123): n is a, c, g, or t
  misc_feature (130)..(130): n is a, c, g, or t
  misc_feature (139)..(139): n is a, c, g, or t
  misc_feature (172)..(172): n is a, c, g, or t
  misc_feature (264)..(264): n is a, c, g, or t
  misc_feature (295)..(334): n is a, c, g, or t
  misc_feature (336)..(336): n is a, c, g, or t
  misc_feature (350)..(350): n is a, c, g, or t
aggaaaaacctgaaagccagaatgcttccttttatttctcaccatttggggcagcacctaagtngttttgtaaaatgcagcatctggtgctgtgggtctctctcaggccttgagggacacttncttcctncccactcgnctcctctccactagacttttggttcctagaggncgttggggcgggtctgaggttctttgcctgccttccctcccattggtctttggttgctcatccctctaactgcaacccttcttgggtccttnctgcacagacttcagataatagataagtcannnnnnnnnnnnnnnnnnnnnnnnnnnnnnnnnnnnnnnntncccaaagccatctngttgaggtcattgtggggaccaggggactgattattttttcaactgggatcacaaagatgg

SEQ ID NO: 296650 - DNA, 373 bp, Homo Sapiens
  misc_feature (190)..(190): n is a, c, g, or t
  misc_feature (301)..(301): n is a, c, g, or t
  misc_feature (348)..(348): n is a, c, g, or t
gccaaaaaaattattgtttttaatcaaatataatcaaacataattgaaaataaatggagacattacattcagaaatgaaacacaggaaactcaaaacttcctgggaggaggaaggtgcttattctcaccttcctgaaagccctgggtgagaccagtcactgcagcagaggaagaagctcctatctagttnggactggacaaaagcatagtagctgtgaggctacaagataagggtcagtaacagcaggaacaaaggtgcttgccaaacaaatcgcatctcatactgactcaatatacaaantaggggaatttgaacatcagagaacaatctccacccatgacagtctngcattaagctctcctgggtaaaagg

SEQ ID NO: 296651 - DNA, 452 bp, Homo Sapiens
  misc_feature (279)..(405): n is a, c, g, or t
acaaaagaaagagggttaattcgatttacagttccacatagctgaggaggcctcacaatcgcggcggaaggcaaggaggagcaggtcacatcttaagcggatggcggtaggcaaacagagaatgagtttgtgcagggagacacccctttttaaaaccatcagatctcgtgagacttattcaccatcacgagaacagcgcatgaaagacatgcccccacaaatcagtcacctaccaccgggtccctcccacaacatgtggaaattcaagatgagatctgnnnnnnnnnnnnnnnnnnnnnnnnnnnnnnnnnnnnnnnnnnnnnnnnnnnnnnnnnnnnnnnnnnnnnnnnnnnnnnnnnnnnnnnnnnnnnnnnnnnnnnnnnnnnnnnnnnnnnnnnnnnnnnnatccggaaactgcacatttctttcagtgactgaatggttaaacatca

SEQ ID NO: 296652 - DNA, 141 bp, Homo Sapiens
aagaagtatgttgaccaaatttatgtgaggggaagggtagggggaaaaatggtatgtaagtttcttattttaaagaaagaactctttctgacaactttgagtctcttatatataaaagtacccaaaacaaagttgttcagt

SEQ ID NO: 296653 - DNA, 453 bp, Homo Sapiens
  misc_feature (272)..(298): n is a, c, g, or t
  misc_feature (404)..(404): n is a, c, g, or t
  misc_feature (410)..(410): n is a, c, g, or t
  misc_feature (418)..(418): n is a, c, g, or t
gcatggtaagctctatcccacggcatcctccgtccatcaccacacacactggaatgtatcccccccgccctgccccttcgataacctcctgaccttgtctttcctataatcaccacaaactcctagtgcaaattggatgctgctttaaatgtgaaaacaattgttcaaaagctataaaacctgaatgaaagctgaagctgaatttataagccttgttgcatatgagccaaaagtgcaaaaagctctatataatgaactaacctgccactcgnnnnnnnnnnnnnnnnnnnnnnnnnnntaaattccagactgttctacaaaattgtgtatttgtatttttgtgtacgtacaattttctgctaagcagaagggagggtgtagtatagggtgctgtgaggaagggntttggnttaatccnatttctttggttaacttattttttgttaacatcag

SEQ ID NO: 296654 - DNA, 386 bp, Homo Sapiens
  misc_feature (272)..(272): n is a, c, g, or t
  misc_feature (335)..(335): n is a, c, g, or t
  misc_feature (368)..(368): n is a, c, g, or t
ctgagcatcacacccggtggaagtaatatttttgttgataatgtccaattctatgaagttattaaattcagtcagaagagaatctgcctaagtgggaattaaaatggctaaagttttaacctcaattattttgaaaccagaacattttccccactatagacgattttctaacctgtcttgggagggtgatcaggaacttttcagtactatttgggcaagccaattttaggggcttaagggtgcccatggggaaatcatctagggactaggtncggatggcctggtaccttggcccaaataaggaccactttaaggttcttgaaggaatatacagnggggtcatataggcccggttttggggggaagcnggggggtaggacccgggg

SEQ ID NO: 296655 - DNA, 275 bp, Homo Sapiens
ttccattgtgcacataatgctttatgtacctgctgttaaaaattggaattaaacagaagtgggtaattagtaaaggctaaaattaaattgcagaagtaaactggcaaggattttttgtgcatgtcacattaaaatcatcacctacttttcaacgggagagatcataaaatttagccaactatttgaagtatcctttaataaactggggtctgaacatttgaaagacaatgcctatcctgtttttgtagatttttttgaaattaaaactttgtttc

SEQ ID NO: 296656 - DNA, 265 bp, Homo Sapiens
  misc_feature (40)..(40): n is a, c, g, or t
  misc_feature (50)..(62): n is a, c, g, or t
  misc_feature (179)..(179): n is a, c, g, or t
  misc_feature (207)..(207): n is a, c, g, or t
  misc_feature (240)..(240): n is a, c, g, or t
attactgcaggtgctgatagaaagcagacttaattgtacnaataataacnnnnnnnnnnnnngacattcacatcacaaagaattctaacaatttcaagttataagtgcttgaaaattatatgttccttttttagtatcaaacttactctttttttctcatttggtgcacatttgtgtgncattcttgacttgtgctttttaaaattnagtttaaaccttccttggtggtttgttgcttanttttcctggataactgcctccatgt

SEQ ID NO: 296657 - DNA, 362 bp, Homo Sapiens
  misc_feature (14)..(14): n is a, c, g, or t
  misc_feature (27)..(27): n is a, c, g, or t
  misc_feature (63)..(63): n is a, c, g, or t
  misc_feature (119)..(119): n is a, c, g, or t
  misc_feature (136)..(136): n is a, c, g, or t
  misc_feature (147)..(147): n is a, c, g, or t
  misc_feature (162)..(162): n is a, c, g, or t
  misc_feature (196)..(196): n is a, c, g, or t
tcccactgagatcngcaaatattttgnggcagtctttggcatgtctgaacggctgagcttggntataagcagtcagaaattgggctgacttggcacaagcaggagtagggatgattccnctaataccccgtgtccntcaaaaacccngggaggacttacccnatcagaggcagttatgcatcaggcacaccacccngagactgatgagatggcaaggaaatgatgctatacccgccttaagaagttcttagaagttttgtcacttgatttgacagctgaaattggcatggcccttcccctctctgactttaggggccagtggtccctggggcctccagggttacaacacttttctttccttt

SEQ ID NO: 296658 - DNA, 379 bp, Homo Sapiens
  misc_feature (123)..(163): n is a, c, g, or t
  misc_feature (305)..(305): n is a, c, g, or t
  misc_feature (334)..(334): n is a, c, g, or t
  misc_feature (347)..(347): n is a, c, g, or t
gcatttgttcataaaacctttcccacaaagacttacaggcaggaaaattaggtattaatcaaatcacagaacctcccaaatgctaagtgaggattttaccctttgagcatatcccattaaaannnnnnnnnnnnnnnnnnnnnnnnnnnnnnnnnnnnnnnnntttcaggtgaaacctagtgagataatgtgtatgcagctcttagcacagtgtcccccacataattgggtgcataagtttccagctgatgtaaggaaaaatacaggaaaccccaatcttaaatctattctctggaaactcttanttattaactttaaggttttttgttatccnttggggcggtgtncccctttaatgttggaggttccctttgtttgt

SEQ ID NO: 296659 - DNA, 453 bp, Homo Sapiens
  misc_feature (395)..(395): n is a, c, g, or t
  misc_feature (415)..(415): n is a, c, g, or t
gccacacaaagctctgtcatgtatggagtgatgtgattagatccagttcatgcggtaacctcaccatcttaaagtcatataactggcatataacaacatagtcacaggaatggtgtctcatcaccttaagaggctttagagacaagggtgtggcatgtttggggaccatttcagaaattccatttaccacagtaggacactcacattcccccatctgcaaagtgcatttaccctctcccctgaggtttccagatttcatgtcattaaacgcattagttcaacatgaaaaatgtcatgtacgaccacatcagatcaaaaagtttaaaaatcccatctaaaacatccacaccaggtgtgaaatgaggcttcccgagagtgtccattaagtgcagatncttgacataaattcccttanctctgtcgacctgtggaactggaccaacagcttattct

SEQ ID NO: 296660 - DNA, 439 bp, Homo Sapiens
  misc_feature (300)..(349): n is a, c, g, or t
tcaaaggttgttaacagttattgtggaaaaatcagtacctctattctgttgtagcagctgggtttaaaatctgcagtgagagttttggggacagttttgttcttaagaacaaagcgccttggcagggaaatgttagatattcaaattagtgatctggccactgaaagatacccagtaaccaggttgggctgcatccagccactggaaccactcaataggtacagagctgggactggaggagaaatcactcacaggggttcctgccaagcctgcctgatacctactctctaaggaacaagnnnnnnnnnnnnnnnnnnnnnnnnnnnnnnnnnnnnnnnnnnnnnnnnnnggttggttttgggtggttttcaaacaggtaatagcttcaaacttaagctgattccaggtcagcaaataaagccaataacatggagaacag

SEQ ID NO: 296661 - DNA, 184 bp, Homo Sapiens
gactgaggtctccattcttataaggagaaacaaaaagtattaatagggaaaggaggttatgacttcaccatcagcatacccaaatgagaggctgattcctccatagtttcaagtgactattaaaaaggaataacacaagccatggaagactgaattagcatcaagaaatctacatcatactgtg

SEQ ID NO: 296662 - DNA, 345 bp, Homo Sapiens
  misc_feature (275)..(275): n is a, c, g, or t
tggaagactctagagaagtagagatttggtattggtttcagacacttcatgggaagcagtagaggataggagaaatcacatagcatgtggaagtgactccatttaaatttgaattttgacagtgacattaccaattatgtggacttacgcaagtaacttaacttctgtaagtctagggattccccatatgtaaaatgggtatacactgggtatctacacttataaaccttattaaatctggaattacatggaggctgggtgcccacataatactnccacatgtactctgctaggctcttgtctcccttttctttctccccttacttaaataggcttaaggtggat

SEQ ID NO: 296663 - DNA, 127 bp, Homo Sapiens
aagtttgcttgttcaattcattttaatacactgtattagttccacaaaatgggcttttgaaaattacagtaacttgcttgaaacaaactcttctccaattcgatactgtttttaaatttttggcttt

SEQ ID NO: 296664 - DNA, 311 bp, Homo Sapiens
  misc_feature (65)..(128): n is a, c, g, or t
gtagaaatatcaatattcaagtaaacaaatttattaaatccaacagcaggtaaccttccaaatannnnnnnnnnnnnnnnnnnnnnnnnnnnnnnnnnnnnnnnnnnnnnnnnnnnnnnnnnnnnnnntactcaaggggccatttggagagtgcaacagtgcagaaaatacaaacaaaagtattaacttttgtcaagtttgtacaacctcaacaaacagacacactggtcacaaaccaagagggatccacaaaggtggaagggtcacatgagcagtggactcatcacctcagcgggtttaaggcagggtat

SEQ ID NO: 296665 - DNA, 119 bp, Homo Sapiens; identical to SEQ ID NO: 270575

SEQ ID NO: 296666 - DNA, 209 bp, Homo Sapiens
ccacagttttccagcatagatataaccaaggatgaattgattccttcaaagaactgggaggcacggatattgcattttttgtttacatccagtagccaagacgcctcagtgagccagtcttgggcagaggctgtcacatttaggcagattggaagttggtatgttctaattctcactctggactacagtgaggctgaatttatcatgtc

SEQ ID NO: 296667 - DNA, 318 bp, Homo Sapiens
cttactactgctatcattaaatccacaagcttaagctgttgtgaaacttctgtagctcaatgactgtcgtatattagaggatattactagacccaaaaagctaaagtgaaggttgggaacttaagggggcatttcggaggagaaatggtaaaatggctaaaatggaagaactgggagatgttaagagggcagactgatttaaaaagtgaattttttacaaggagattttgctatggggataagggtaagaaaagaagcataaaaaacttgaaaagaacttgtcaaaggaaagttagatgccagaagaatgccatagct

SEQ ID NO: 296668 - DNA, 403 bp, Homo Sapiens
  misc_feature (265)..(265): n is a, c, g, or t
  misc_feature (313)..(326): n is a, c, g, or t
tgcacatactaagttgcttttattaatccagaacggcatgctacagatactgtacagcatgaacatttattcattacaaaaatggcttccaaaccattaaaaatgaacttggaataagagcataaaacggaacagtaacatcacaactgttaggaaacattcaaagtattcacaaaaaatgttatagttagcattttaataaaccagagaaaaatcggagacagttttacaatcgcttcatgtcaactacaatggcactgaatgnacaggtttcagctttatacagcattttgcaacatcaacatgcctaggnnnnnnnnnnnnnnaaagtctgctgcctaactcgtatgtaatatgtggtacataaaagcgggccctgggttttttcggtttaagagtaatc

SEQ ID NO: 296669 - DNA, 124 bp, Homo Sapiens
ttttcccagtttcatggaacttttattgagtttatttgtgggatgcatgacaggaggtctttccatcattagtaagaatgaaaggtcattttcacagtcactttggcacacgctaacgtctcat

SEQ ID NO: 296670 - DNA, 511 bp, Homo Sapiens; identical to SEQ ID NO: 45643

SEQ ID NO: 296671 - DNA, 171 bp, Homo Sapiens
tatcctttaaagaatgaatctgaaaagctacacttacacattataacagaaaatacatgtctagattggaaaaaaagtaactttaaatgaaactagagattcttccccattattagctcctaactgaatttgaatgttttaaatataagtagtaagatcaactctgtaagt

SEQ ID NO: 296672 - DNA, 352 bp, Homo Sapiens
  misc_feature (40)..(40): n is a, c, g, or t
  misc_feature (49)..(49): n is a, c, g, or t
  misc_feature (96)..(96): n is a, c, g, or t
  misc_feature (99)..(99): n is a, c, g, or t
  misc_feature (104)..(104): n is a, c, g, or t
  misc_feature (126)..(126): n is a, c, g, or t
  misc_feature (133)..(133): n is a, c, g, or t
  misc_feature (213)..(213): n is a, c, g, or t
  misc_feature (252)..(252): n is a, c, g, or t
  misc_feature (261)..(261): n is a, c, g, or t
  misc_feature (267)..(267): n is a, c, g, or t
  misc_feature (272)..(272): n is a, c, g, or t
  misc_feature (316)..(316): n is a, c, g, or t
  misc_feature (322)..(322): n is a, c, g, or t
  misc_feature (332)..(332): n is a, c, g, or t
tctcactgattcacagctacttcggcttattaaggtcatntaacccttnaattgtcaactgggccacaagtgcgttttcccaggtaacccactcgnctntcagnctggtttatgggcgaggctggntgctggnctgcttttccacgctcaagggtcactttgttatgggagccaactccagctctccttgcctttgtgggtttctgtcttctngaacagagcgagccaaggtttgagggttcttgcgggatntgttagggntgattnctaantaactggggtggaaagcgaggaaacaaatgtaaaaagttttctncttgcnccaggcaagncaagggttgttcatgaccgg

SEQ ID NO: 296673 - DNA, 111 bp, Homo Sapiens
  misc_feature (86)..(86): n is a, c, g, or t
  misc_feature (94)..(94): n is a, c, g, or t
gattataagttgtgaagccactgctgggggcaaagatgtcctttttaaaaaacttgtcaattaatagagggacttctctaggggangcatttgnttaataaattttatttt

SEQ ID NO: 296674 - DNA, 383 bp, Homo Sapiens
  misc_feature (88)..(88): n is a, c, g, or t
  misc_feature (231)..(231): n is a, c, g, or t
  misc_feature (314)..(314): n is a, c, g, or t
  misc_feature (320)..(320): n is a, c, g, or t
atcaaacccaggtttctgtgacactacagcgtactcttcacacctcaccaagctgcccctcacaagagagtaggtgtgatgcctgggntgatgaaatggcagcttaggacgtaaagtgaccatttcaaaggcagcaaaactgcgatttcatctttgacgttaataaaacggcaacaagaagccatcttcagtaaatctcgtacaaagaaactctccagaatctaatgggcntcaagatcctcgatcagggattttaaccccgatttgtctttgtttcttttagaggaattcaggttttcttttcaggtattttnttttcngttttacagttcttttcttcagggactggattaactttacccaattggccgtgtttttttact

SEQ ID NO: 296675 - DNA, 355 bp, Homo Sapiens
  misc_feature (109)..(110): n is a, c, g, or t
  misc_feature (112)..(113): n is a, c, g, or t
  misc_feature (115)..(115): n is a, c, g, or t
  misc_feature (121)..(164): n is a, c, g, or t
  misc_feature (169)..(170): n is a, c, g, or t
  misc_feature (172)..(172): n is a, c, g, or t
  misc_feature (174)..(174): n is a, c, g, or t
  misc_feature (221)..(221): n is a, c, g, or t
  misc_feature (249)..(249): n is a, c, g, or t
ctggcacttggcttgcacaacttccatggggcaagtgcttcatacgcaggtcagcagccgagatctctctcaataatgaacgatattactaatataaaatttgcctcanntnnantttggnnnnnnnnnnnnnnnnnnnnnnnnnnnnnnnnnnnnnnnnnnnnccttnntntntataataggtgttatcattcaggaggcctagactgaaccaatacttngcagctaaatgtaatttgcgaacacaantttaacagctccatttagcgacttttcacaatcaagatgatttcaacagtctctgaacgccagccaagataccaccaaagtatacttaaataccagcaaatattac

SEQ ID NO: 296676 - DNA, 365 bp, Homo Sapiens
  misc_feature (34)..(35): n is a, c, g, or t
  misc_feature (56)..(57): n is a, c, g, or t
  misc_feature (105)..(105): n is a, c, g, or t
  misc_feature (231)..(231): n is a, c, g, or t
  misc_feature (247)..(247): n is a, c, g, or t
  misc_feature (251)..(251): n is a, c, g, or t
  misc_feature (278)..(278): n is a, c, g, or t
  misc_feature (300)..(300): n is a, c, g, or t
  misc_feature (324)..(324): n is a, c, g, or t
  misc_feature (333)..(333): n is a, c, g, or t
ttgagacggacttctttctgtccccaggatgganntggagtggtaagatctcagcnnactggaacctctgcctcctgggtttaagcgattcttctggcttagccncccgagtagctgggactagaggcacgcaccaccacgtccagctagttaacaaaggatatattcttatgggatttctgagtcaatatgtctggatgcttaattgagcaaaaaatctatacagtgctngttcattgggttacanactngggctaagcatatacaaaattctgggngcaaaaaggaaaataggtcatntcaacaaactcttatttaaggggnactatggtngaaaaggggagggactggggaaagcagggtgc

SEQ ID NO: 296677 - DNA, 289 bp, Homo Sapiens
  misc_feature (88)..(132): n is a, c, g, or t
tgaatactactgatattgcaagtacaaacaatgccaaagaagaaagaatagtaagaacagtgccaaagagcacatattctacttgctnnnnnnnnnnnnnnnnnnnnnnnnnnnnnnnnnnnnnnnnnnnnngtgttagacaattttgtgtctgcgaaagtctcagagttggtatgtccccattaaactctacagctccccaggtttatcttgtccaagaaagttacccgcccaacctctagggctagttcattattaaaagtacccgctaaaattgggagtacacaga

SEQ ID NO: 296678 - DNA, 157 bp, Homo Sapiens
ggaatctgcccaacagctgcctctcccttgggggaaaaaaagagtaaaactgacaaattcttattagcaaaaattaaacaagtgatgagatagtagtatagggatatattacttaaagatagaaaaaataaagatcactgaaatcacattttattgg

SEQ ID NO: 296679 - DNA, 464 bp, Homo Sapiens
  misc_feature (271)..(271): n is a, c, g, or t
  misc_feature (371)..(371): n is a, c, g, or t
  misc_feature (439)..(439): n is a, c, g, or t
  misc_feature (454)..(454): n is a, c, g, or t
ttctgttgcatctgggaaaatttgttccctaggtctgtcaactccagccgcatcgtgtctccctgcagatcttcacaagcatctagcgcagggtccatgaggaaggggacgtcccctttctgggagtacagaagtgggtcactggagcattagaagaacatcaacatcatctttctaacccaatccttttgaagtgatttacaacacacaaaacaaatagactatttgtaaatgaacatccattaggaggtcatgctcatttttgtctttnttttactgatagagctaggaaagccacaaaacgcagggagggccagtgtaccctatcaatataaccaccccatggggacccaacccctcccaaggacggnaccaatacagcttgggaatccgtggggcctaccctgtatttacccattaccttgtggacccaggtganggggcattttagggnccccgggggg

SEQ ID NO: 296680 - DNA, 341 bp, Homo Sapiens
  misc_feature (230)..(254): n is a, c, g, or t
  misc_feature (304)..(304): n is a, c, g, or t
tcttgagtaggagttaaatacagctttactcagccaccccctggattctaagccctaaatttaactccaaagaaacttgtcttgccctacttcatgattccaaaccatagacagaaactattacctgtttctgcaaatcagagagccctgacaatggagcaccaggggaggtgtgtcatccatcctgggggtgctgggctgcaacactgggagctgtcgtcagctgactnnnnnnnnnnnnnnnnnnnnnnnnnaacaaacggccctactttgtgggccctaaatcttgatgaacatgtccccngggggagccaggggagagctattttgtacaagcccag

SEQ ID NO: 296681 - DNA, 426 bp, Homo Sapiens
ttaaactttgagaaaattaacataaagaaagaactgcatgtgaaagctgagaatttgagaaaacactgtgtgataggtgttagaaaggtatattaggttggtgctgaagcttgggaagtggggactcactcttggctttctgccttttgcctatacatttatcttcttggtgcctaaattgttccatctataagtggactacactcctgtctgacagactctacaaagaataagtccaaaacccagcacaggcttcagcacagtgttggattaatgggaaaagtccagggtggtatgaaataaatatccagcaccccatctcatagatgattataaattcagcacaggaaagacaggagctgttaaaacaaagcactgcctactccagtaataatctacagatacatgatggatgataagactcca

SEQ ID NO: 296682 - DNA, 332 bp, Homo Sapiens
  misc_feature (100)..(100): n is a, c, g, or t
  misc_feature (164)..(164): n is a, c, g, or t
  misc_feature (190)..(190): n is a, c, g, or t
  misc_feature (250)..(250): n is a, c, g, or t
  misc_feature (277)..(277): n is a, c, g, or t
  misc_feature (292)..(292): n is a, c, g, or t
acaaaatcaatattaatataaaatcaactgctatatttttaaagagtagtgtttggattacataagcaatcataaaactcccgttggctttagaagaggnttagtcctgtaaactccaaaggttttctgtgtgtgctgagcagacaagcatcctaacagaatangccagaactttcctagccatcctagncatgtttgtgccttgtaaggatattcccagttacatcctttaatttgccaaagggcagtnaaaagatttggggtaaggttaactttncccacatggcacaantttaactgctgtttttgggatttccacacaggggggccag

SEQ ID NO: 296683 - DNA, 107 bp, Homo Sapiens
ataccctgcctactgatgtgttgctttttaagcaaatttgaaaaatgtttatcataaggtatttatgacattttaaccgtttcatttacagtaactagaacaacatt

SEQ ID NO: 296684 - DNA, 287 bp, Homo Sapiens
  misc_feature (103)..(162): n is a, c, g, or t
  misc_feature (168)..(168): n is a, c, g, or t
tatttgatcacaagacgcaaaaaacttgccattaaattgaatctacttcctctcgtgcgattaatcccttatgttttcagctaaaatggagtatctggtagannnnnnnnnnnnnnnnnnnnnnnnnnnnnnnnnnnnnnnnnnnnnnnnnnnnnnnnnnnntctttnttctaaccacaaatacattctattcagatccatactattctgcaagtttcagaaacaaacacataaagtaaatgcggttgctctctcagggctctgtcactagggcaacattttttcat

SEQ ID NO: 296685 - DNA, 430 bp, Homo Sapiens
  misc_feature (192)..(219): n is a, c, g, or t
  misc_feature (225)..(282): n is a, c, g, or t
  misc_feature (299)..(299): n is a, c, g, or t
  misc_feature (312)..(312): n is a, c, g, or t
  misc_feature (366)..(366): n is a, c, g, or t
  misc_feature (415)..(415): n is a, c, g, or t
ccagagcacttatgttaacttggaactgtttagagagaatttttttgctttcttgggtcacatggctcagtagccattagccatagcttgattttgcaaactggcaagggcctggcacacctttccttccaccagggcatggtgtttctggaagagtttgaagctagatcctggtatgccaaaaaagaagcnnnnnnnnnnnnnnnnnnnnnnnnnnnnctttcnnnnnnnnnnnnnnnnnnnnnnnnnnnnnnnnnnnnnnnnnnnnnnnnnnnnnnnnnntggaactatttggtctnctcttttggccanatgccctgctgggggaaggaaaatggaaggtaagcaaacaaggctcctctccanggagagctcatggcaagacagcagagcaggcaagtttgcctctccaaanaggttctgggaaggc

SEQ ID NO: 296686 - DNA, 487 bp, Homo Sapiens
  misc_feature (311)..(401): n is a, c, g, or t
cttgcataaaataggtgcccattgagcatgcagatactctcttccacattgtcctgcagaggtgtttgccttctcagtacaccagctaggcacttcccaactctgcaggcacatctcctgctgtcttatatttccaatggggccttcggtttggactcagctgcacttgtttgtgtgacttctgcctctcttgaatccactgatcccctcaattgcacgatcaggtctactctagtcttgagcaactcagaccaaagctggacgtgttgggagacaatatgtgtatgtggtttttacaagcctgctgggannnnnnnnnnnnnnnnnnnnnnnnnnnnnnnnnnnnnnnnnnnnnnnnnnnnnnnnnnnnnnnnnnnnnnnnnnnnnnnnnnnnnnnnnnnatgggctggatccaattaaaagaggacaaatcactgaaattcagccccatcagccacttgttgagctttcctgacgttacctccca

SEQ ID NO: 296687 - DNA, 275 bp, Homo Sapiens
gaaaaaaattactagaagatttatttcaacatattaagatataactgtgattaatgggtcataaattggtaagccatgataataaaagattatctagtaacacaggagtaaattcaacataaagatacatccaaatagttgttaaacatttggttataaaacaaaatgcaaacactaaaatcgtttttaaaagaaaaaatacaaatattaaaagaataacttgaaatggctgttaatataatttgtggttgatattaccaatctcactatccaat

SEQ ID NO: 296688 - DNA, 164 bp, Homo Sapiens
ttactaccagcgtgaacaaccagcatttttattgcatttgagaatgcttataatgtcagtaattagtactgactacacaacatttttttattgtctgtatccgcagacatggaatgatggaattacagttgatgtcaaggaatgagtttcttttatgccttatc

SEQ ID NO: 296689 - DNA, 125 bp, Homo Sapiens
  misc_feature (18)..(18): n is a, c, g, or t
  misc_feature (39)..(39): n is a, c, g, or t
  misc_feature (44)..(44): n is a, c, g, or t
  misc_feature (46)..(46): n is a, c, g, or t
  misc_feature (48)..(49): n is a, c, g, or t
  misc_feature (57)..(57): n is a, c, g, or t
  misc_feature (88)..(88): n is a, c, g, or t
  misc_feature (95)..(95): n is a, c, g, or t
ccagatggccatgactgngctggagctgccttgtgacangagcngnanngtttctgngacagaggatcatccggcctcttaggagaangagaagnagctgaaggagatcacgggtcttggacaat

SEQ ID NO: 296690 - DNA, 466 bp, Homo Sapiens
  misc_feature (391)..(414): n is a, c, g, or t
attatcatcatggatccatttatttttggggtctgggtggagaaaattcaactggagctagaaatggaggttgcaatgccaagaatggctgggtagaaaatgtgaccacagggagccctgggctcttctggtgaaattggacttctcaaaattttctgggtcactgttgctaacaagattgtgtggagttttactgtattgggattttggctgctctcttccccagagttagggtattctcaggggggacagcatctgaagagctccaaaagcaaacagaagagctcagggcccatcgatactcaacaaggccagtggttggggccagcaaaaaaccagggtagggacagcagactggcaggaatgagtgacagttctatgcaaatggagnnnnnnnnnnnnnnnnnnnnnnnnataagggcaggtttgtaccagaactgcacagtatggcctgtgacttctgcgc

SEQ ID NO: 296691 - DNA, 726 bp, Homo Sapiens
  misc_feature (574)..(677): n is a, c, g, or t
ctgatgacttcataacttcacccattcattaagtgtttactacacacttaccacatgccacacaaccaggaggccgcacacacagggctcagagcaggatctcacacccctgctcacctataggattcaccaagtaccatcatcccagcacctgcagttatctgtagcagctgaatgttaagcaaatgtattttgcctggccaattctgaagatattgatccccacctgcaatgcagcagaaagatcaataacttgatctctaatgctggagaatttccctgaaacaagcacaagaaagcaggaagcacggccaagtaaatgtcctacaggtccgtctcccaggaggccaccagtggccccaaagatgcccatcgaaatctccccaaggaggctcttcaaaatcctcttaccaaaaagtaagcacttcttcaccttttgggtttgctgtagtaaaaattgcccagggatgacaaagggaagggctttatacagtctagaaggatttctcttactaagagcagctgtgcatgttgaatattacatttccctgtttgctaaaggctggggctgtgnnnnnnnnnnnnnnnnnnnnnnnnnnnnnnnnnnnnnnnnnnnnnnnnnnnnnnnnnnnnnnnnnnnnnnnnnnnnnnnnnnnnnnnnnnnnnnnnnnnnnnnngacttggtacaggcaaaagaaggtaaaaacagcgaattaatacttttta

SEQ ID NO: 296692 - DNA, 254 bp, Homo Sapiens
ctcaagtatgactctttgggcctcaccaaaatacaatttcacaaaataatgtcacattatttgggggaggggagaggccaccaaatttcatctcgaagcctcttccctcatttccaaggaaataggcattgttggaacaggtaaggctgtaatatttggtttagctttgccctcctgagccacctacctctagaggcacgtgggggtctctttctttgccaactgcaccaattcctccacaggaccgtgcagta

SEQ ID NO: 296693 - DNA, 492 bp, Homo Sapiens
  misc_feature (122)..(160): n is a, c, g, or t
  misc_feature (213)..(213): n is a, c, g, or t
  misc_feature (477)..(477): n is a, c, g, or t
ttaaatggaagcagtttaggtctttaatgcagtctagggatgacagacaatgttcccattcagtacacctagaaagaatacctgaaagaaatgtgaccttacaggtccctgactgctcagcnnnnnnnnnnnnnnnnnnnnnnnnnnnnnnnnnnnnnnnagcacccttcccggcctgtccaggaagagcaactcccaacccagctgcgccanttgtgcagatcacatctgcttctcttgtcacctgtcctggattctggacaacagaggcgggccaagaagcaagtggaaatcctgccttttcttgcagcggggatctcagtagactgcaaacactggacaagttatctttcacgcatgcctcagtttccttccagctttttgtgctggttccttctacagcaaggaattggctttgctgaatggctctcctgatttgggctctccattaattgggccatgggttttttggggttngctctcctagggtgg

SEQ ID NO: 296694 - DNA, 365 bp, Homo Sapiens
taagtgacatagtttgacgtcattatcctccctggttggtctcttctgaatattgttttccagtcaacatccttgttaaatgtggcattacaaaactgagccgcagataacatgtggttttctgaaggcacacaacctcacgatgcagtgctgggagcagtcatctgatgcctgtccccgtgcgccatccattgaactttcataatgattggcactttttaggaactatgaaaaacaaacatctttgcttaatatccaattcctgacttctgtgaggcttaaatgacaagtgcctcgtccagtgactggttgtatatctaagagtgttgctactgatattgcaacacaatgctttggcatgggag

SEQ ID NO: 296695 - DNA, 107 bp, Homo Sapiens
aagattgactaagtaaccacctggaagttccacataaattactatgattaacttcctgataaggatgaaattttccaccctctactcagacaatttctcatggccag

SEQ ID NO: 296696 - DNA, 350 bp, Homo Sapiens
  misc_feature (180)..(256): n is a, c, g, or t
  misc_feature (323)..(323): n is a, c, g, or t
ccaataaaaacatgtggtttctaaatgtagatccactaatttctctttgtggcagtcatttggtctatattgtttgaatgcactaggagacattgtacatattaatgaaattaggtttgttaagcttgtttgctagagatgtaagccctagtaaaaaaacttcaactttgagatctgacnnnnnnnnnnnnnnnnnnnnnnnnnnnnnnnnnnnnnnnnnnnnnnnnnnnnnnnnnnnnnnnnnnnnnnnnnnnnnttcctgtaagacgaagaggaaataattaccctaagcctaagttgtgggtttgtttaatggaaaaatntataatggaagaatggaatggtaattt

SEQ ID NO: 296697 - DNA, 447 bp, Homo Sapiens
  misc_feature (145)..(209): n is a, c, g, or t
  misc_feature (213)..(226): n is a, c, g, or t
  misc_feature (409)..(409): n is a, c, g, or t
  misc_feature (424)..(424): n is a, c, g, or t
atggtaaaaatagtagggactgcgggagagagaaagagtagtgtcccctgacaagtactagaatgacataggtgccaccattaaacgaaactagctaggatggttactttcgattaacactttgctactcaagagtgtggtctgnnnnnnnnnnnnnnnnnnnnnnnnnnnnnnnnnnnnnnnnnnnnnnnnnnnnnnnnnnnnnnnnntcgnnnnnnnnnnnnnnaacaaactcttcagcaggtttagatgtagctttgtttggaggaagtgtgagattcgttttaggatttctcaaggagttccagccttcaatcagtgaccatggggatctggcaggagggcttgaatttctagctgattcttctattctggtcttaccctcctgtccttcccatcattttctggnattggctaaatctcntatccccgggaggaaatcccatg

SEQ ID NO: 296698 - DNA, 469 bp, Homo Sapiens
  misc_feature (34)..(34): n is a, c, g, or t
  misc_feature (382)..(382): n is a, c, g, or t
  misc_feature (449)..(449): n is a, c, g, or t
tcttggcggattctcaatttccctataaaaaagnaaattcatttccagccactaatgtaatgtcagcgtgctgtttactaagcatggatgatgtatagggggacaccactttcagaggactacttaatgatgcatagaattaaatcctgagctcctcagctgagcctcctccctccctcctggttcccaggctcccagtgcatcctgggagaagcaggcttggcataacctgtctccctcattactaagaattctggggtctctgccgaagaagcttggaaatcgcccttaactttagcagacacatttgcccttggggtaagaccagaagtgagctcctaaggcaagtaagaagctgatggcccaggggaaagcagactgntccagtgcttgaggggaggattagaaaccagggaagttcacaggatgcaccagggtgttgggggttncctgtagggaaaagggctgg

SEQ ID NO: 296699 - DNA, 241 bp, Homo Sapiens
  misc_feature (183)..(183): n is a, c, g, or t
ctgaccgccggcttccccattgtgcctggggataagatctctgagaactgctcaagagtcgccggagttctcagatcctgaatcccagcaaaggctgcgccaatcaggttgaagtcccaacgagggagcccattcagcagaatcgtttcttcacctcctgtcccaggattcacccctcacttncccaccaaccaacgaccctacacccagccgcccccgtccagaccccaaatactcagga

SEQ ID NO: 296700 - DNA, 179 bp, Homo Sapiens
  misc_feature (154)..(154): n is a, c, g, or t
ggcccaggttcttatgttactgctgctatgggtatctggtacctgtggggacattgtagatccgcagaacattcagctcgtaaacgctaatggcagctggcacatcaacaggactgccttgaattgcaatgagtcctcaacactgggtctgcgntgttctatgtaacagtcactgtcga

SEQ ID NO: 296701 - DNA, 238 bp, Homo Sapiens
  misc_feature (49)..(49): n is a, c, g, or t
  misc_feature (61)..(61): n is a, c, g, or t
  misc_feature (67)..(67): n is a, c, g, or t
  misc_feature (69)..(69): n is a, c, g, or t
  misc_feature (90)..(91): n is a, c, g, or t
  misc_feature (101)..(101): n is a, c, g, or t
  misc_feature (157)..(157): n is a, c, g, or t
  misc_feature (168)..(168): n is a, c, g, or t
  misc_feature (184)..(184): n is a, c, g, or t
tttttaacctcaaaataaggatttggggtgggtggagaaggtgatgggncagaagaagaantttttngnggagagtttgcagattgaaannaaaaggacanctgatagccacttaaataatgtcatcgttagagtgatacctattttttgtaaaaanaaaacaatatnctccattcttacaaancattgattgtattttatatatacaatgtaaatactatcatgcagtgtgtcagga

SEQ ID NO: 296702 - DNA, 207 bp, Homo Sapiens
tgtcgaatagctaaccagtagctaaggtccaaggtctcctctcttccttctatgtggcactcttgtttctggttcatctacgccccttggtgtcacctccttgagtgaagtacctgctggagatgagaagagtggaactggatctgcatgacagctttgattaggatcggagctaagacttggctatctccctgttttgggtttgat

SEQ ID NO: 296703 - DNA, 228 bp, Homo Sapiens
  misc_feature (42)..(154): n is a, c, g, or t
  misc_feature (181)..(181): n is a, c, g, or t
gtaatttgctgaccccaatcatggctactgatccagctgtannnnnnnnnnnnnnnnnnnnnnnnnnnnnnnnnnnnnnnnnnnnnnnnnnnnnnnnnnnnnnnnnnnnnnnnnnnnnnnnnnnnnnnnnnnnnnnnnnnnnnnnnnnnnnnnngaatcggggccagtcatatagtaactnctcaatacatatagctactacatcactacgcgctatcacactgttag

SEQ ID NO: 296704 - DNA, 136 bp, Homo Sapiens
  misc_feature (56)..(56): n is a, c, g, or t
  misc_feature (114)..(114): n is a, c, g, or t
gggccagcaagcccccacctgacttgaccttaggcccatagagagggctgtgcgtnctgccccagccaggatctggtcgctgccccaggggactgatgggcagagtgcctgtgntggactgtgaccatccctgatg

SEQ ID NO: 296705 - DNA, 172 bp, Homo Sapiens
  misc_feature (35)..(35): n is a, c, g, or t
  misc_feature (56)..(56): n is a, c, g, or t
  misc_feature (89)..(90): n is a, c, g, or t
  misc_feature (96)..(96): n is a, c, g, or t
  misc_feature (111)..(111): n is a, c, g, or t
cgatccccgaagcgagctgaaatacggctggagcnttcccaggctacagtttgtangacgattgtggaagactaggagccggagaggtnncccacnctcaggagcgttgtntggagggcttctcattttcccaataccacattaatcgtctcatctgaggaggatccacaga

SEQ ID NO: 296706 - DNA, 231 bp, Homo Sapiens
ccttgatttaggcacgattcaaggccccagcttgcgttcctacaggacaactatgctctgtcaatgcacttcagtgagctatttctgccctccccatctgtccatgagctccttgagtgcatccttatacatttttgttgctccagtctctggcatggtcctgtacaccataaggcctctaaacatgtatatgaattaataaatactgaaaattgtgatggtactggaggt

SEQ ID NO: 296707 - DNA, 157 bp, Homo Sapiens
ggacagaaattttagggtctatatttggggctctataatttctgtccaactctgctagtgtagaaggaaattttagggtctatatttggggctctataatttctgtccaactctgctagtgtagaaggaaagcagaatagacaacatgaaaacaaca

SEQ ID NO: 296708 - DNA, 214 bp, Homo Sapiens
ggacttcagcttaacacagggagtgagggagagggcaagagcatgggcaagagggagggtttagttttgagcagatagatccagctcctagtttgccttagaccctggaacactggcttctttcattcggccctttagaggagtggcccagagtagcctagcagggactgaactctttcggatggcttccagagcattgttacccaagaccctc

SEQ ID NO: 296709 - DNA, 241 bp, Homo Sapiens
atttctggtctctggcagcttctggcacatagtagagactgagtatattttattgcattgaattgactatggctgtgtatctcctacagttagattttacaggggcctgtttgtagttctctccatatactgtattaactgttaaccaagttcaggctggttgcctgcctttctgttgaatcagtgtctcatatgtctttattactatgtctgtatgaaagcatacgaatttaaccctaaa

SEQ ID NO: 296710 - DNA, 119 bp, Homo Sapiens
cttgaccaggcttttatcatctgtttctaagaccactgtaatagtctccttacttctctgcctctactcttgattcctttatgtaatccatttcgcttcacaagagcgcaggaggcttt

SEQ ID NO: 296711 - DNA, 135 bp, Homo Sapiens
  misc_feature (79)..(79): n is a, c, g, or t
atctcggtttacggatgatataacgtgaggcacagagagaggttacagaacttgaacaaagttatacaaacagtaagtngtagagataagagtagagcatacatcactaaactcaacattacacacacttaaatg

SEQ ID NO: 296712 - DNA, 233 bp, Homo Sapiens
  misc_feature (196)..(197): n is a, c, g, or t
ctctatgagggctgtgtgtactcccaacaaaaagatgccttcagggagagaactgaaggtattttctgtaagcaacctgcagcctgtggagttgaatgcagaggagacataatatactaacattaggcttcatcataatcacattccttattctaaaagagttcagaagaaatcatggtggacggtgtattgcccnnccctagacacattttccctctcaaatcttttataaa

SEQ ID NO: 296713 - DNA, 230 bp, Homo Sapiens
acaatatataaaaataaaaagtcaacacaaatcgcttttagataccctttcacgaatctaataggttgtcacacactgtacaaaactatgtgagaacgtatactacttctcagccacaactactatttttagatattcataaaataacctctgtattgtgttttcacattgacccattcagttctgtccaatcttattaattctgattaaatgtctssssctcaaaacta

SEQ ID NO: 296714 - DNA, 260 bp, Homo Sapiens
  misc_feature (237)..(237): n is a, c, g, or t
ggttaccgagcccgatcagcagagactctctttagactagattgcattctcaggattctcttacttcgtatctttcaactatccttgttttctatttatatttatttccagtatcacatttatagccagtaagagatctcatagatcatagagctaaaggtaaaacaatgtaatgtatcgtagccatggaagaacctgttcacacctgttcacagagttaccaaaccgatccaacgnctctctatgaccaggtaaatagg

SEQ ID NO: 296715 - DNA, 201 bp, Homo Sapiens
  misc_feature (104)..(104): n is a, c, g, or t
  misc_feature (150)..(150): n is a, c, g, or t
  misc_feature (163)..(163): n is a, c, g, or t
  misc_feature (172)..(172): n is a, c, g, or t
wctgacaaaatacgttcctctcattgagattacatagttattgcagttcataatggtggttatcgttctgatttctcttagagatatgagatttttataaaganaaactcgctgacataacaccccaagaatatcagaattcagtattcnctgatagcctttnccaaagtanccgggatgaattgcctggctccccttctt

SEQ ID NO: 296716 - DNA, 218 bp, Homo Sapiens
  misc_feature (28)..(28): n is a, c, g, or t
  misc_feature (70)..(70): n is a, c, g, or t
  misc_feature (73)..(73): n is a, c, g, or t
  misc_feature (106)..(106): n is a, c, g, or t
  misc_feature (134)..(135): n is a, c, g, or t
  misc_feature (164)..(165): n is a, c, g, or t
  misc_feature (167)..(167): n is a, c, g, or t
  misc_feature (172)..(173): n is a, c, g, or t
  misc_feature (177)..(177): n is a, c, g, or t
tcccctagaccagagtggtcatccccanctgtggggacattgtacaagaaagggttgtaggaggactgcnagnctgaagggtcacctcggtgaataacgacaacangcttaggactcagggaaagaaacacccnnagaggaagttaaggacaattaagactttnncnccttnngatngagaacctgtataccctctcactctagatctgaagcaatag

SEQ ID NO: 296717 - DNA, 285 bp, Homo Sapiens
catctggcgaactaactgaataccatgaaatgcaaggacatttagccttgtttaaacataagttttccacattccatacctctcaaactctgcttttcacttagcatttagagctggggaaatgaattcaagtaggagaggaggagtcttataagtccgaggtagcctgaggctgtctccataaagagtaaagaaactatacatgaggctccaaagacatcaatgagacttttttttaatgaaaggggacatactcatatgctgatatagactaatccacgcact

SEQ ID NO: 296718 - DNA, 163 bp, Homo Sapiens
  misc_feature (29)..(29): n is a, c, g, or t
tactgacaagctgaatgtctctgggcaancacttccgtctctgggctctagtttcccctctccacccatatcctctgactgcagaggcttcctgagatctgtgggcctgagaataggggagcccgtagagcagccccattggtgtcgacttgcgagatccttc

SEQ ID NO: 296719 - DNA, 135 bp, Homo Sapiens
gagcggcctcccagagtgctgggttgggattacggcgtmgccgcgtcgctaggacccagtttggctgctggttccagcaggggactcggggatatcgtgtgcacaatgagttgtctcaaattttgcgtgtctgca

SEQ ID NO: 296720 - DNA, 112 bp, Homo Sapiens
gttacaagtttgcctctatactgggattatccaggcacttactcaagggaatttactcgggaaatattcttggagtttaggagagataccacttattagtttctgacttact

SEQ ID NO: 296721 - DNA, 115 bp, Homo Sapiens
gggcgtacgccatggcgcccagcggaatgsatggtcttgaagccccacttcacaaggactggcagcggctggcacgtggttcaacagcggccgtaagatcgcagacgtaaggccc

SEQ ID NO: 296722 - DNA, 189 bp, Homo Sapiens
  misc_feature (150)..(150): n is a, c, g, or t
ggataagactcagggagatgctgcaggaagcacgggcaggagagaaaaagcagaagctttggacagatcatcgggctaaagcacagctaagaaagtgaccatctctggagagacctttaatgtcttctgatggcctaccaatgacctcantcaagagaaattctgcatagaatagctggrgttgrrtta

SEQ ID NO: 296723 - DNA, 133 bp, Homo Sapiens
  misc_feature (44)..(44): n is a, c, g, or t
  misc_feature (99)..(99): n is a, c, g, or t
taggtggattaactaaacacagctacgcaaaatcttagyatacnccactattacacacatagtattaataatagtagtctacgtytaccctaatattanattcttattatattatttatctaatactatgtat

SEQ ID NO: 296724 - DNA, 135 bp, Homo Sapiens
  misc_feature (14)..(14): n is a, c, g, or t
  misc_feature (94)..(94): n is a, c, g, or t
gggaagcaaatgtnctcgcttgacccgtctgatgtgctgccgtggsccttgactgagagtggcagagcactaggctaacccaaagtgacacatncctggcgggatgttcagtctctgtaaacccatatggttttt

SEQ ID NO: 296725 - DNA, 175 bp, Homo Sapiens
  misc_feature (126)..(133): n is a, c, g, or t
  misc_feature (161)..(161): n is a, c, g, or t
cctgttcagtgtgttttcgctctaacccccgattctcttgtactaacatcgctacagttgctgttggtctctgcttccaccctccctgtcatttgtttcagctgtgttacggaggcctttgctttnnnnnnnnacacatctcaggttctctttgatagganagtttaacccgttg

SEQ ID NO: 296726 - DNA, 196 bp, Homo Sapiens
ggaaaaaggcacttactttgcaggttacagaaattactgggagaggatatcgtcataaaaagagccaggccaaattggaatatttttgtgatctgcatcatgatgctgaaaatagcaattatttgggaattgggttgaaaactgaattgttgccagagaattaaaccaggtgaaaggtccttttgaattcagattg

SEQ ID NO: 296727 - DNA, 140 bp, Homo Sapiens
tctttagccaaagaacccttctcaaagacgcctccagaaatggacaaaatggccttcccttcgttcctttccaggcaataatgacatcattagtgatgcaattctatttgtctttctctttcctctctgtcctttttttt

SEQ ID NO: 296728 - DNA, 112 bp, Homo Sapiens
tttgcataacactgacatttttattagaattcatttgtaacaaatggaacttgtgtcagcaaagaactgattttcatacagacttctttcgccaccaatgtaacgaagtaag

SEQ ID NO: 296729 - DNA, 349 bp, Homo Sapiens
  misc_feature (48)..(48): n is a, c, g, or t
  misc_feature (330)..(330): n is a, c, g, or t
tttgaaatagcctttactgccatagatcctctcaagccccaagatggnaatgtttctccttaaggacaacttctgtctcctctgactgccacctgtctgacctgttactccaaggtctgctgggtcttgcttgcattgtcaccagtttcatcatctacccacatgtgggctgtgccaatccattttaccctagacatcactgactctttgctctttgtggcttccaatgtagactcaggtttctctacagcttttgccatcatgatacgtgtacagccatctacgacaaatgctgaagcactggtcaaatgtcttctatcacttttaagnaaaaaggggctgctttgat

SEQ ID NO: 296730 - DNA, 112 bp, Homo Sapiens
tagaacaggtactttccatgacacaccaactctttaccagaaagagtagaaaataatgaatgaccattataccacacaacaacctgcaagttgtttatcattttctctgctc

SEQ ID NO: 296731 - DNA, 240 bp, Homo Sapiens
atttaaaataaaacaaagcctatccactgtgttgggttttggccctaggagataatttttacattcttatatcattgccccactggcacaaaactcttcctccctcttctatattagtacattcgtaacttaatacaagtgccagcgtgaccattttgaagaggatagagaagaagattttaatgtgttacttaaaggactgactttagaaacaatctacaatagttgctgagagcactg

SEQ ID NO: 296732 - DNA, 577 bp, Homo Sapiens
aaggatgagtgaggatatacactttaaaacacggggctaaaccaccaaattgtcagttttttggatggccaaattgagatgaataacctgaattaaaaatataatttaaaatggttaattaaaacattagcatcatcatttctcctttaatgaaattcaaaaaatgcaacaatatatgaaagcagaactaccggtaaatcatttttcaaattttgggtcatatttgggttaaatttcagatgttaacaagttctcaaccttgggatcactgtaaatataagttcaacacaccacacccataatgcaatatcacagatgggctttcataaatatgtacactttagccaattggaaagatcacttccttcaaattttatctaagaaataaagtgggtttgtcaaaacaacatgaaagagaaatgaaaggtaaggaagggcactatggcaaaaagccagattatgtatctgctgtcatcttttagcctcataaatttggaataaacataaaataggataatgactgatattttcataaacataccagaacttatgcacccaaatgaacgtggtcctttaa

SEQ ID NO: 296733 - DNA, 553 bp, Homo Sapiens
ctctaagactgtattttaatcttttgtgtaattctgatgtctagcgccatgcctggtgcttacgtaatagttgctcagtcagtttgagggtgagtccattaactgccctctaggagcttgatatttaatataaactagtctgtgatacatgacaatgctgtgacagtgcagatgagaaaatgtgacttctaactggggtgctcagagaggatatcctggaggaactgccattttaactagacttttcttttaagcaggcagattttgtttggttcaggcttcagctggaagcccaagcaatggtgcagatatgagctggactatgacagactattgggccagtggggctgacaaggttaacttgggggttaccatagagggccttcagtgctcatgtgcactgtttcaagtttgtacagggcatctggaaaccatggaagaagattctggaaagggcagggcaggtaaactggatgtggataggaagttactgtggcaggtgaattggaagatggacaggttggaggcagggagatggtgagcgggctcctgc

SEQ ID NO: 296734 - DNA, 133 bp, Homo Sapiens
gagtatcaatcaggtgtgaaggaataatgaaaaatattttacacatgtaagttctaaaaattgttaaccttccatacatactttctcaagagctactagaaaatgtgctccatcaatagtaggaagtgagcca

SEQ ID NO: 296735 - DNA, 583 bp, Homo Sapiens
ctgggaagcaaaacaagcaaggctgaaagatggctgatagaagtgtccagaggtgttggtggatgggagatcaagctggtaatgtatagcccagtgagtagcaatggagacataaaagggaactgggtgactatgccacaggaacattctgaatcgtattttggcactggggtcattctgactgagaacctgggcagagaagggcaggtttgagtggctgaagggatgagtagagatgaggagagatgcagctcattaaggaggagtttgaggaggtatggctaggtaggaggaagctgccagaggttagtaacagaccagggtagagaggaagactgagaaagatagtgataccatccaggaaagttaggattgagtcattgggatccacagtggcagacagtgatagatttttccggtaatgtagtgtcaggaaaacagtggtattttttgctgattagcgtggcggctttgtggagggttattttagaagggagaatgactgaaaacagcaagaacgtcatgagcctttctaagtagtcctgataagcctgaaagcagtatttgaaatgatttcttagaa

SEQ ID NO: 296736 - DNA, 276 bp, Homo Sapiens
caaatataaaatgatctataatacagcagtgacaataatgtgaaatcagaaaacttttaaaggaactgcatatttttatgactacatctaaaacaaaaaagttggaaaagaaataccaggtacaaactaataaaaaggaggtaggcatagttatattaattacctgaaaaacatatatttcaaaacaataattattaggagtagagagaatgactacataatgataaaatgtttcattcaccagaaagatataccagttctaaacttacacatatt

SEQ ID NO: 296737 - DNA, 528 bp, Homo Sapiens
gcagtgatacaggctgacccacagtatttgtggctttccaggcagcccgcttcaagtgtggggagagagtcggggtcatgtttcagacccagagatgtgttcctgcagtgggatctcaaaaatccccagccagccttctttgagggccacctcattgtactctgggctcctacgtcacatctaccggaactgtcaaatgctggagttagccgagtttctgggtttgtgcctgcaggagtctgtgggcagagggatgctgtgggtcagcagcctcgaggtcttgttccttttccactgaagtcctgtgtgtccatatcctgctccccttcccctccttctctaggggtttctctttctctctcaaaacaagagtttagagaattaacattccatggctagtgagtgggatgcaaaagtcatcgtcaggacaccagcatcacctcttcatatcctcctgggagccactggcatggagcagccgccgatgggaaccgtcagagttctagggacatttccaagtcagtctat

SEQ ID NO: 296738 - DNA, 578 bp, Homo Sapiens
  misc_feature (262)..(270): n is a, c, g, or t
gcttacatagtctctatgaatctacaagtttgcttattctttcttctgacaattcaaatctaccattaagcctctgagtttttaaaaattatatttattataacttctaagtccaaaatttccatttgattcttttctataatttctttttctttattgatattctctagttgatgcaacattgtcgtacctttctttacttctcaatcatgttttcctttagttctgtgaatctgtggataatggctaatttgaagtctcnnnnnnnnngttataaatctgttctcacaggcagtttctgttgtctgctttttttcctagtgtatgggtcatgctgtttctttgcatgccttgtaattttttgttgcaatctggacataataggtaatatattgtagcaactttgtgtataggtactcccctccctccaggacttattgttatctgctcatttatttgtttagtgactggctgggttattttaatgaaatgtattcctgcatcctccctccagcgtaaagcctctgtgttgctcctcggggagatgcagcatcctatagtcaccatggggtaacact

SEQ ID NO: 296739 - DNA, 531 bp, Homo Sapiens
gttccatttggtattgtacacgtctcctgcctcgcttgggttgccatgtttgagcgatggccctgttgatttcaccctgccttttactgaatctgtaaattgttgtgcaattgtggttatagtagactgtagcacattgccttttctaaactgctacatgtttataatcttcatttttaaagtatgtgtaatttttttaagtatgtattctattcatatggtctgcttgtcagtgagccagacttgcttactatattcctttataataatgctagccacttcctggattctttagtaatgtgctgtatgcaagaactttccagtagcagtgaaggagggttgcctctccaagcttcctaagggatgctgccctgtgtggggatgcattgcagaggcactagtagcatgggggctagagtggggagcgagatgtaaaagggtggggggataggagaattccagagtgcttccagcattagggtcctgagaacttctgagttcagagaaacatgcaaagtgactaacaaaata

SEQ ID NO: 296740 - DNA, 556 bp, Homo Sapiens
gtgaggtgttccattaagtgccttctccatcgccagcactcaatattaaatagctatttttcttaggtgagattctagtttaagaatgaaggtttgtaattctctaccaaaaaaccaaagtaaagtactgaaaggtttcacaataatacatcttttgattttcaggataaccatgaattagagttttcttactcacattaattaaacctgacacctgagtacccacttgatttccacacccagctgtggaattccacagtaacttataattaatagacagttgcttataagagatttggaacttgaattcagagcaaaaataagtagagaagccccatgacaaagggaagagttgctgatactgggcccttttctcatgctgacgagtttggagggtaaatggccatcttaatggtatcatctgactgcattttgtgctgccgagattgtgctgagtggaaatttccctggaagtagcaagagtggcttagtttcattacagtgaaagaattggccaatgttggggcaggttactgacaatgggtgtggaatctgt

SEQ ID NO: 296741 - DNA, 370 bp, Homo Sapiens
aggctttagaagattggcaagcaatcatgggtagcatgttaaaatttgacacctgtaatccttaaagttgctgaaatacagattggtccttgtggctttgtgtgcacacggtttgctttcagggtctttttatagatgttgaagttatacttaaacatatagtcttatattttgttatagctcttcttctttctgtttatggaggaaaatgatgcattattcatttttaaagcgccagcatattttcagcagacatttattggctacccagaatgtgtcagacactgcagagtcctggagcttctcatactctgaaaaaccaagatgtatacaatcccaaacaaatatgctgagggcttcagtttgtggt

SEQ ID NO: 296742 - DNA, 422 bp, Homo Sapiens
gcaacactgtaaaatccacatatttttttcctctaccccctctcattttacattttcaaattgttatagcagggtgagccctgaagatttcctttcacctcccttgcttttgtattcaaagatgaagatactggaacctagagatactccctaaatgggtttgcttttaggcagataagaacatgaatttaagaaggcagcatgttaacagatgtgtgagaattgttttctgtgtatccaaatccttgtttcacattgaatgtttttaaaatgaatttgaaattcagtatctattcaccatgacctaagagtatacagaggaaacagttagaaatgaccagttgagggtagggtgtttaattgagaagtcagcacacactggcagctcttaaaccaaatattggctcgtttaacttgaaact

SEQ ID NO: 296743 - DNA, 192 bp, Homo Sapiens
  misc_feature (151)..(151): n is a, c, g, or t
  misc_feature (180)..(180): n is a, c, g, or t
attaataaaagaatacttctgccatacttttttttaatcttcctcttctttaagccctaggttcctgggagtttctgggatgtgccccaaatgggatgtgtttttcttatagacaagtcgttcactttgaaatggaagatgctgctcctgncagtactataacctgcctctatacttgtngctgagaaggta

SEQ ID NO: 296744 - DNA, 520 bp, Homo Sapiens
  misc_feature (227)..(239): n is a, c, g, or t
taccaagtggttcagtcaggcagtgcaacttaattctcctacaagatcaaagtagtccaatttataccatgttacatacgaagggagggaagaagatggcaaaaaggatggacgaaaggaacaaaaaattataacgcagttgagaggtataatgattagaccatctctacctctagaagctcaaaatcttacaatacctttaccaggcttgtgatctatatttgggnnnnnnnnnnnnnaatcttcactattttgtgacctttaaacctaatgcatagaaatgagaaatggtttgcttatgttccttcattatgtgagatcagagtatttacatatactctttctttccttactgctcaactttactctgggaaataaccttttctttactgacccattgtgagagcctcactgaactctgcatttcctactcagtctgagtcggagatctcaccctagtgtgtgctctcatagactatatccttgtggcaaaatggtccttaaaagatgtgacaaaaaa

SEQ ID NO: 296745 - DNA, 239 bp, Homo Sapiens
gggttgttcaggtacgttcttcagatgtgtcatagtttgatagagaactcatcaaaaagatcgccactgggaatctagatctttgttgaaaagggaagagaaagagaagcttaatgagcacattgaagcacttaccagaaagaagagggaagacttctggatgaaacctctgtgagtaccttaacattcacatggaagtagtaaaaataagattctgggtgcagttctccaatgacagg

SEQ ID NO: 296746 - DNA, 666 bp, Homo Sapiens
  misc_feature (543)..(543): n is a, c, g, or t
  misc_feature (561)..(611): n is a, c, g, or t
  misc_feature (641)..(641): n is a, c, g, or t
aactcacattgtcctatcattagccaaagaatagtatgctggtcctcacagtgtccgcatactataggaagatgagagaaaatgtagaccctttgtagaaagacactctagaagtatctggcttctttacacaggaaaattttgtttggaaagtacaatggctactctgatattcactcataggtcaggctagaataaaccagaatagatatttagaagaaacccattacagtgcagtgtttgacaatggagagaaaatgagacttgggctatggaaacaaggatttggccaagtatgtcatgttatctttcaagtaattagcatattaatatactttccttatgcttaccttacttattaactgatcaaactgcctaaccagcatttcttcaggtggctgttgaagggcaggtagttgggtgttagtacacttactgtgcaagccattaaaatctgtgcctgcaagaagagcaaattcctgagaagaacagtcatcagctttggcacaacacagagctgttgatgtcaaactcttggtgctntaaaaccatgcagcatgnnnnnnnnnnnnnnnnnnnnnnnnnnnnnnnnnnnnnnnnnnnnnnnnnnntgggtaagaggtgtgttgagaatctgcatnttaacatcataattctcatggaggg

SEQ ID NO: 296747 - DNA, 439 bp, Homo Sapiens
  misc_feature (13)..(13): n is a, c, g, or t
  misc_feature (79)..(79): n is a, c, g, or t
  misc_feature (418)..(418): n is a, c, g, or t
gttctcaaccggnatgtcttgagtgcccattatgtgcaaagtcctcttagtttctggtaatacaacaaatgaaggtcantaacccttgtcctcaatgatctttaattagacattgggagaaattaaccaataatagtatgatttaagaactaacaggaatgaatacatcaggtgccactggagaaaagaggaattcctcattcagcttgtggttagtggaggctcccaagaggagtagacatctgtactgaagcttaaggaccaggaagtcagctgacaaggaagagggaagatcagcttaggcaaactcccaggaagagtgaatatcagcttaggcaaactcccaggaagaggagagggcatggggtattttgaatattttatgtaacactttattgcagctagaatgttcagggtntatgacatcatgaagtggctg

SEQ ID NO: 296748 - DNA, 231 bp, Homo Sapiens
caagagttgtgacttcagatgcctcctgaaagtggcttggattctccaggtgtccatatgtcatactttggaaacggatgatatgaattacaatgtgttgccctctggatttgtgcactgtactgtgtgcacagtctgcatgaaaattgcgtagacttcagtgtgggaaaattaggtgctgaactgactgattctttgttgaggaggatggtctcaacatcattatggaga

SEQ ID NO: 296749 - DNA, 555 bp, Homo Sapiens
aggatttggaccatctaaaaaaatccagactaaaatccaggggactgtgtttaataaaggtaggatttctcataaatggttatcagaacagtagactctgaaattgtaacttacccgagtacttctccctctcttcgttttcttttctatatggtgtcttatctggtcacacttagttgtaccacagctcagaacttctgttgactgtgtatacagctacccaacttacggcccctttgtacaatatagactttaaagttattatgggacagtttctaaaattgttggaatattacatatatgtatttcctgtctcaccccctataatgttttttcttgttactgttattgaagttttcagaggtaacagctaaggtttccagatgagaagtataaagagtctttcatatcagactgaaagagaatgaaagaacagccttggaaaagtaaaattactagtgtctcctcccttaagaaccataagaagtttgaagtgaaaagacttaaagattatctagtgtgggttccaattttactacaagtaaaattaagctg

SEQ ID NO: 296750 - DNA, 483 bp, Homo Sapiens
  misc_feature (234)..(242): n is a, c, g, or t
gtttgtattggctatacttgaatttttttattgcaaaaatgtctgattttctgagactggttttctaactatttataaagaaaattggttgtggtctctttggaaaatgtagaatatttgtttttgtgtgttctagtgccttggccagataggcttgctagtctttattgaagttttatgtattctgacatgaatacaataactaataagggctaaagttgtattgttgttgcnnnnnnnnncttaacatttgcaatccacattgaacagtgttttataacaaaatcttagcttatgattcagaataaataattcagaacattcagaataaataatttggtggcagcagcaggagttaagttagtgattttttagagttaagttttaggagctacaatttataaattaaaaatttccctattaaagctaccagctgtgtcttcgtgaattttctgaggagagattgtattaagggattaatga

SEQ ID NO: 296751 - DNA, 168 bp, Homo Sapiens
agatcagaatttgtatttaccaatccaagaatggaacaattaggtttttcatctgctctctacattgactgtgcccaggataccgaagtcaggtatttagtttttacgtttgtaaagctctgatgcttccagtagaacagaatttctgtaggacaatgaattggcttt

SEQ ID NO: 296752 - DNA, 269 bp, Homo Sapiens
agagcaagataagactgaacctagaccatctggagaatgtagaaggaccagacgccagatggttttatatacctgaactgggaattgtagattgtttggtgtgataaatttaggtttcaggttttgttaaaagtaagaagggaaatgtattgatgtaattagttttgtttatttgactgaggaaaatctacttaacaaaaacacttttacataataacctagccaccattttataaaagttactaaagtactgtacatctggaggtttc

SEQ ID NO: 296753 - DNA, 211 bp, Homo Sapiens
ctacacagccctccttcttctttatcttagctggagtcaggggcaccttcagcttctccaatcacctggccagtggctcttgtttccagtcctgctgttccagggtggataggccttcaggcggagacccaggaatccagctccagactctgtcccaagcagcctcttcagtccgggacgggacaggaagtgtccggcggaggtgggggtg

SEQ ID NO: 296754 - DNA, 572 bp, Homo Sapiens
aggagactatttatactagtgctttttcaagcaagtttatctaaattttgaaagctttggttatcagttgcttctttaaacaatattttactactcccccatttgttttggttgccaactgggtaaaaagctatcagatatcttattgagcagtatataatttgcctctgagttcatatatttcatccaaaggcaagcagattatgtttcggcctggatagcattatataaagagaatggtcaattccacttggcattttttgtaatattgaaaatagctcacaagtaactctgcctcaatcttagtggcccacctctcacagtattactatatcacactctatcacacacactattaattttgagacctgccaagagactaaagaacccaggttgaaaatctggggggagagggagcgaggaggaatgttacattaaattaactgccaatactttgcctatgataatgaagaactttcccagagttgcccagagactgggcaagaagaaggaagaaatgcaaagacctgttcattacatctttgaaatacctgtaatcatgacttattacg

SEQ ID NO: 296755 - DNA, 300 bp, Homo Sapiens
agacaaaggtgacacttcagtgtgaaaaggatggtcttttcctaaattttagtggtacagtgggtaatcatgtaagataaaagaaagcccttaccgcacactatatataaaaaatgtatttcaagtggattttaactgtaaactgaaaggcaaaataacacatcaaagagattacttagaacatcttcaaaatctaggtgtatggttaagatttcttaaacaggaccaaaaaatccttagtcatgaaggaaaacagtgataaaatggattacattaagatgaaaagcttttcatcaaaaa

SEQ ID NO: 296756 - DNA, 424 bp, Homo Sapiens
  misc_feature (353)..(353): n is a, c, g, or t
agcttagtctttgcagagggcatggaagcatgtgccatcttgtggctgtgttcttgctacatcttttaatgtctcattgttttcctccccaacatttgctgtagcactgtctgactgatggttatgtggctctgtaaggagccagatcccttgattcttctttgccagcctagtgtgataaaagctctcgatgtagcctcagaagagcttcaacactgttacttgttttctgccttttaccctctgatccttgagaatgaaggaaatggcctttaatttggctcagctacaggtacccggatggccaaaattgagctcgttggcaagatagctttctcctttttttgctgttntaaggttctaaagcttttctgcatgtggaaatgcttaagatgctcttaatttattgctttctcagttgata

SEQ ID NO: 296757 - DNA, 580 bp, Homo Sapiens
ttcttgagcaggggtcacttattctgagagcattagttctcctaaaaagctccagcatagaaagggaagataaaccaaattctagcttgtgtttacccacagaaggatacaggacaaaggaatagtaactggcctgtttggatactaaaatcgaaaataacttttagcctcctccttatgatagccgccagagtaaatgttgagcattactacagaaaagccacaaaccaagaatctacctgtttggaaagatcttttgcatctctgaaggtgcttaaagcatacttagtgcctttccttttaactgggaagataaaagaagtatctgtccaagatattaatatgtaagataacattgtagacatgttcttctgataatacaaggtttattctatttgcattaggatatttgtggacatgtccatctaatataaaggaaagttttttaatcattgaggcatgtagggctgagttatataatgtagaaacttctaaagataattggatgagaatatacatattgacctgtatattatgactaatcatgactcagatcttaatacagggatgatctcatagc

SEQ ID NO: 296758 - DNA, 594 bp, Homo Sapiens
  misc_feature (190)..(471): n is a, c, g, or t
  misc_feature (509)..(509): n is a, c, g, or t
  misc_feature (579)..(579): n is a, c, g, or t
cacattgatgagcatatgaaatgcctttgatatagcacaaaaatgtagaatttatatcaaaaaccagcaaatattttgaattgaactgtgtctagatagaataattatggatttgaatttcttaactacatataccatgtagtcagtccacaaacactgaatcattctgccgatgaaaaaagtgaagggnnnnnnnnnnnnnnnnnnnnnnnnnnnnnnnnnnnnnnnnnnnnnnnnnnnnnnnnnnnnnnnnnnnnnnnnnnnnnnnnnnnnnnnnnnnnnnnnnnnnnnnnnnnnnnnnnnnnnnnnnnnnnnnnnnnnnnnnnnnnnnnnnnnnnnnnnnnnnnnnnnnnnnnnnnnnnnnnnnnnnnnnnnnnnnnnnnnnnnnnnnnnnnnnnnnnnnnnnnnnnnnnnnnnnnnnnnnnnnnnnnnnnnnnnnnnnnnnnnnnnnnnnnnnnnnnnnnnnnnnnncaacaaaaaaatgtgaagggaatgaatgtccttttatntctttggcagggaggagataatgaatcagatagttgtaatgctgaactgaaatcttcatttccacagtanattttttcattcttg

SEQ ID NO: 296759 - DNA, 255 bp, Homo Sapiens
  misc_feature (202)..(202): n is a, c, g, or t
  misc_feature (223)..(223): n is a, c, g, or t
atcccaaaggcaagagggcctgggtggtctcaggtagcccagggcaaggttagattagcaagttagcaagttgtaatcgccatgtgaggaagacttgctaggagggacagcagacaggttgaggcctgagctagaaggaagcaaaggaaatagaagggcagaagtggagcctgcagagtgagaggtgcagaagttatccagnggtttggggaagaataaccanggtgaactcagctggctcatgaggatgtgagg

SEQ ID NO: 296760 - DNA, 197 bp, Homo Sapiens
ccacacaggatagtagtgttttcaaatttgcaattacaacatgtgattgcagttgtttttctaatagtcagtatagattttgtagatttttccatgatttcactcatgctatctcacattcctcttaatctcataaaacttgtataatacttaagacataatccattggaaatgcaatcaccagccatccaaagttc

SEQ ID NO: 296761 - DNA, 409 bp, Homo Sapiens
ttacggccggaagttttaacgtgcaaattaacatatagaagtcactttgtgaggtttcatttaaatgtatttctcagattttgctgaatctgtaatagccattgaaatatttaagtaccttggctgttcctggcatcaataaacagatttttctttccctcctcatgccatacaaaagttgacaatagctttatcaccacaggaagaaagctgaccatcattgccctttatttgggcccagttgccatggttacagccctttagctaaattgggaatggtaaccaaaataacatttgcataacattcccttgttctgcccacctctttgcacatcttcaatcaaggttttggtctgatcaccatactatgctgtagcctacttttaggaagtactttaggctaaataga

SEQ ID NO: 296762 - DNA, 492 bp, Homo Sapiens
ttatgcaccaggctttgttctaaaaactttataactaactcatttaatcgttaagtactattattacctcccagcttccaaatgcagaccaagaggttgaataactgtcccaaggtcacacaggtaatgaacacggagctggaccgggagggctcttagctgtgtaaggtggctgaggctcgtgagaccccggctaaagctgtagctgtaaatctacagtctccctggttcagggctgacctccagcagctggtgtgtgtaggaatccttggagttaacacccgctggtgttacgagtttgtgctcagcattctctgggtcaactgggagaatccaccaggattctcattcaggtctctttgtgtcaacatctgcctacaacagcgcatcgtgctagagaacagaggttcctagcccaggcattcacagacccagttaaatgttcctccactgaaatgcagcagtgtgcccttttcccagtgcttcccccca

SEQ ID NO: 296763 - DNA, 478 bp, Homo Sapiens
gatgacaaagtaatagtcatgaaattattgaggatcatctgttgaaagattaataactaaatatttgcagttacatatccaagacttaaaaaccaactctacctcatagctgataagggtctagtattcttctccatggaaagtccttaattttgaagatgatcttgtcacaaactagatgctgactttactcaaatctggttttgttctataaaggacttgaagaggcttacagagtacatataagacaaagggataaaaataaataattgaagaattttaggcaaagggaaaacataggtgggacaataatatagccaggggcaaaattttgaaaatgtagaatatataattctgtgtaaccgttagaagtcagtgaggtatacagttgtaaagttctgatgccaaacgtgaatatgatgctctcttattcttcacacagcctcctatgagtgagagcatgtcagtcaatctctga

SEQ ID NO: 296764 - DNA, 611 bp, Homo Sapiens
  misc_feature (284)..(284): n is a, c, g, or t
  misc_feature (427)..(548): n is a, c, g, or t
  misc_feature (561)..(562): n is a, c, g, or t
gggttgggctattcaggttagataaatattaaattttttcttatgcaagtcttaggttgttaggtatttgtaatttttgtaattcctgatttttgtgtacattcatttctagatgaataaatctttaatgaactcttcttttagttctgttacgaaaccaaacttttagatatgtatgcgtattaatcctttatatgttcccttgtcttctctttatccttgttgcagttttacactttatgcagtcatatttactaactttttctttatgctttctgattttntcttactgtagaaaggctttttacatctcaaaattatataaatctgtagcttttttgtttttgttgtcattttatggtcaatgcatctgtgtttttcttttttgtatgtagagcaaggtggggttccatttatttatttaaannnnnnnnnnnnnnnnnnnnnnnnnnnnnnnnnnnnnnnnnnnnnnnnnnnnnnnnnnnnnnnnnnnnnnnnnnnnnnnnnnnnnnnnnnnnnnnnnnnnnnnnnnnnnnnnnnnnnnnnnnccccacctttttnnccccccagtagagagatagggatttacaattattttctatgtggtattc

SEQ ID NO: 296765 - DNA, 508 bp, Homo Sapiens
  misc_feature (279)..(279): n is a, c, g, or t
  misc_feature (427)..(427): n is a, c, g, or t
accatacttttcaagaatccctgccttaaaatctttcctgtgagttgggaaatgaatattttcattcccttttattgggaatgaccatgctatacagaaatgtaatttgagacctattatttatgactcacccaaacaagcacataaatcctttactattattcggatgtttatcaaagctgagaacacccaaacaccactgtagtttctcagtctctggttgcctaggcagatctgaggccatcaaagcaagtctcttgctgggatgaggcttagaanaggccacagaccagtttcagccccatagtcatccactccccagcccctttgctgggaacagtacccgtgacagtccaggctgagacttgcggctgttgggatcatacccaaggttccagtggaatctcacacaaatcctgtctggttnattttctttctgtttgcacctcaggtcctcagttccctctgaggtccccaccatgcctttcctggcctgtctctccttcgc

SEQ ID NO: 296766 - DNA, 539 bp, Homo Sapiens
  misc_feature (269)..(319): n is a, c, g, or t
ggtgggctgaggattcaggtcagtgagaaggccagtgatagaattgtctgtgtgggtgctgctgatagggatcagctgctgatcatggctagggctagcggctgagcacacgggcaccagcctactgctcgggcagcaaggcagcaggatggaggggtttgtaaaaatgccttccacctaccctgctgggcttgcccgagaggctctgagtgtgtgaaggggaagacaattatcgctaggctggagaatagaaagagcaccatcaggtnnnnnnnnnnnnnnnnnnnnnnnnnnnnnnnnnnnnnnnnnnnnnnnnnnncctgggacacaagaacaagggctttgcttgctctagggctttgcttgctaaactcctagggagcacacaagtgagaatccagggcagagggaagcaggatgggtgccctgagtgcttggccccatttcctggggcttactggcctcgtgggtgggagttttataggctactgctccttggggaggcctcagtgattgaggatactcctgtatgagcctcg

SEQ ID NO: 296767 - DNA, 575 bp, Homo Sapiens
  misc_feature (282)..(291): n is a, c, g, or t
gtaacacatacatatttcaaatgcatcctttctgttgattggaagacattttgtggtaaattatttatattgaatgccttcttaaatgcttatcctaattgttcattattttttaattatatgttcattgcattttgacttgggacatacttctgtactcatgaatgcagaatatcaaattctaagaattatttttaaagtgctaaagtagcaaaattaatgcttctagtcctaggcagagaatattcttctgtagaaaaattgtaattgacatttctttcnnnnnnnnnnctatccattgtttctttctgccttccttcctctaagctcctcaaaggaagagagggttagagtgattcaaataagtataactggatgtctgattgtagatatgtagttggaaataaaggagcatactttaaatgggactcttttttgaagccatttgtcttctgccaactatagaaaagtacactggtattttgattaattgtggtacatttgattccaacttgtcattgcctaaaaaagtaaatgaagttgctatacagagattcatgggcctgcccttttta

SEQ ID NO: 296768 - DNA, 435 bp, Homo Sapiens
ggggttatgattgatcccatcacccaagtactgagaatagtttttcaactttttccccctttcctccctctctgtagtagtccgcagtgtctttttttcccattgttacatccatgaaatacccagtgtttagctcccatttataagtgaaaatatgtagtatttggtttctgttcgtgcgttaatttgcttaggataatggcctccagctgcattcatgttgctgcaaaggacatgatttcattctttttttatgactgtgtagcatttcatggtgtatatgtgccacgtttcctttatctagtccactgttgatgggcacctagtttgattccaggtctttgctgttgtgaattgtgctctgaagaacacgtgagtgtgtgtctttttggtagaaccatttattttcttttggttatatacccagtaatggga

SEQ ID NO: 296769 - DNA, 552 bp, Homo Sapiens
aatgactcctttatgtatagtctgtatttccttcagtgggggcctttaacaactcagacctctggaggtcttttatccatccataggaatttagagtaattaatgaacaaggcttccaagcttgtcagcttggaaacaactctacacagcttaaagcagggccatctttcatgcacacataaaaattaatgatcatcatgaatacaattgtgggttagttcactttgaagctaataattgcgagtccaccttataggcccatttttttcaacagctgtcaactctgccaccctctagcaaagaatacaagttaaattaatggattgactccattggttcttctgtcttcctggagttcatcgcagtctacatctgcactgttattttagaagcagactcattttgccacagttagcatctttttacccatttttgaacaacttacctgcgtatgttttcccttagtaatgaatctgcttcacaagtaaccttcaaggtctttgaccctttgtcccagattgcctcgttctaagctgtgtgatgcattttagc

SEQ ID NO: 296770 - DNA, 472 bp, Homo Sapiens
caaaaagttcaaaactttatttgaagtcaatgaatccataaaactaaaaacacacacatacacactagagaactgttaaaaatatcaaaattggaaaagcctttctctgaattacaacaaactcaaagcataaagtaaaatattaacaaatttgactaaattaaaatattggaaaaaggaaattgcatttatactctgatatctaacccagataccaccctgtagtaagagctttacctccacgtgtatttggaccgataaaatttctcaaagttttaaaagttctgtttccctgataatattctattgggatttgactcaacatttttagtcagttataagaatttcatttactaaatcataaatctagacattgtactaagcacttctacgtacatacattgatgaatttcttatcacaattcttaaaaagagaggttaaaaatataagcaagctgcaggatgttcccag

SEQ ID NO: 296771 - DNA, 392 bp, Homo Sapiens
  misc_feature (129)..(129): n is a, c, g, or t
  misc_feature (327)..(327): n is a, c, g, or t
tcaatgaagagttaaggttctttgaaaaagggaccaggagtgccttcctttggtcttgctgcagggatacttgccctgctgccttcaaggagtccagtccctgtggttctgagctggtaagtaggaaanagaactaggaaacagctgtaaccacaatttgtcgattcccttaccatatgctgaacattgcttggcgtgctttgcgatcccacctgcaacccactcaagtgatcattgtatctccacttagagctaggaaaatgagggcccacaggggttaatagtttgcccaaggctgtatgcgagtccatggcagagctggggtgntctgaccattgccttatctggcctgggggccgccttccagcctggaacaggcagtactgataaca

SEQ ID NO: 296772 - DNA, 338 bp, Homo Sapiens
agcagtccccagaatacaacctggtttagccacacctaaaggttgctcttgaatattccttgagaatccacatccctagaatgctgggtttcaatgggccctttatgtacctatcatggtgtcatttctgagcatttctaaatattccttcatgtcttactgacagtttttcttgaataaatcttaggaatattagtgccattatcagtattttgtttggtctgttcacaccacaaataactacccaggtctgctacttgcccctatttctctacctgctaatgaaaatgcttttgaaagtttgagtaacagtattggattgtgcacagtggtattgg

SEQ ID NO: 296773 - DNA, 550 bp, Homo Sapiens
agaggaaacaatagagaaaagaggaagtgcctggctctttttaacaatcagatcttatggtaactaatggagccaaaactcactcattaccacaaggatagcaccaagccattcatgagggatctgcccccatgacctaaacacctcccaccaggccccaccttgagcattggagatcacatttcaacttgagatttggaggagacaaatatccaaactgtatcaagcatgttatgaaactactttcatttcattttcatttcatgaccttcactaaaatcctaggaagaagagacattgtctggcagcaaaatgtaaggttcatttgagaaacatgcttctcctttccctgggcatctgtaatgtcgctgaagctactcagttggggctgtaatttccctgatgctgctcagcttttcctgaagctatcatgtggatagattgatacattagttttgtgacaaccatattacctagttcctttggcttagggatgttcctcattctgatgctaagccattttcctatgggaaggactggagattttttt

SEQ ID NO: 296774 - DNA, 702 bp, Homo Sapiens
  misc_feature (293)..(301): n is a, c, g, or t
ggggaaaaacaaatgcatgagcttcaaacccagcagattagcaagatttggagaaatggcaaggcaggaaaagttacaaagaaatcacctattcccataacatagaaatgttggaaagtgacatttggagagtgagaaggggattatctttaagaggtaaaactcaaaagaaggatgactttctcctatcctgaaatgagaaaatacattcatttttctttttgtcatcaaagtataaagaacatgttacctatgtatcctgcctcttataaagctcctggagaataaatacnnnnnnnnnaagttgtgttcacatattttatagtgagttgaaatttggtaggggcaactataacataaagtaggtatcctgcctcctaatattttaatccagtcatccaacatttgacacatttttggggcactgctgtgtgccaggtgcctggggtgcaatactgaacacaaaggacgggcttcaagatgtgcgtgtatgggatctgtgtcaccacctgctacatgtatctgtaggggctgtgggtaggcaggggtcagagcagagagcaatgtagcagaggttgcccttggccttggccaaagttgattgagtcttgaatgctggtacccaagcattactccatcactgtttctgaggatggtgttactgtcagattcttaagagtccccagtcacctctgccccacc

SEQ ID NO: 296775 - DNA, 677 bp, Homo Sapiens
  misc_feature (47)..(354): n is a, c, g, or t
  misc_feature (621)..(621): n is a, c, g, or t
taacattttatttgagagtgattacaatgagaaaaaacgattctctnnnnnnnnnnnnnnnnnnnnnnnnnnnnnnnnnnnnnnnnnnnnnnnnnnnnnnnnnnnnnnnnnnnnnnnnnnnnnnnnnnnnnnnnnnnnnnnnnnnnnnnnnnnnnnnnnnnnnnnnnnnnnnnnnnnnnnnnnnnnnnnnnnnnnnnnnnnnnnnnnnnnnnnnnnnnnnnnnnnnnnnnnnnnnnnnnnnnnnnnnnnnnnnnnnnnnnnnnnnnnnnnnnnnnnnnnnnnnnnnnnnnnnnnnnnnnnnnnnnnnnnnnnnnnnnnnnnnnnnnnnnnnnnnnnnnnnnnnnnnnnnnnnnnggattccttaatcatggtaaagccatggtagagtatttgattagtatgaatggtagtgaagcactttgagaatataaataatgctgctaaccatttttatacttatagtactgtgtcagaggtagctgaataagtgaaagaagtgaataagtaagagacttacttttgaatttattttgtaaaaaacgtttattagtaagcagtgtgcttgaaacacgtttctggaaaccacatcctaaaacaaattgtatttgcttataggatttnatttatgttgggagaacatattctcaatgaaggattcaaagaaagttaaatgtatt

SEQ ID NO: 296776 - DNA, 801 bp, Homo Sapiens
  misc_feature (65)..(189): n is a, c, g, or t
ttcacttatttgatctaccccaacttaacacacatttccaagaaaataatccatcacactagaannnnnnnnnnnnnnnnnnnnnnnnnnnnnnnnnnnnnnnnnnnnnnnnnnnnnnnnnnnnnnnnnnnnnnnnnnnnnnnnnnnnnnnnnnnnnnnnnnnnnnnnnnnnnnnnnnnnnnnnnnnnnccatttgttcctgcaaacctaaacctctttgtagtaagttctggcagaaggtgtgtttctggagttaaactacaggcttggaaatggaatttcttagcctaatttctaaattagaactgcttatgcaaattaacactccgtacatttcaacaagcagttggctgatttcttctgtccactccacctgcagatgcagaggtggccccatcctgtgatgtgccaccacatcccttttcagtgaagggctttgttggctgctgtgggcattctcatggcctctccagggatggcctccactgtagagacctatgtcaccaaggccaggccctctcagggggctccatccaacgaccattctgcctcagggtaagaggcccggccctctcagcctgagtccattctggctccagagctccctgagagcttgcctggcaagttactcttgcaattctagcttccagcaggcgttgatttctggggcacttttgataaactcctggcaggaaactcaatctctgggggtcagagtccacttcctggggagcccaatctgtgacccctaggagtggggaccatggaagcacttggctctccagcatgtgctgaataggg

SEQ ID NO: 296777 - DNA, 376 bp, Homo Sapiens
cattgcttgaagtaagataaacattttaaaaactactaaactcattgagactaatatcaggatattgttaataaataacttctgcagtacactaattgcttctctgatgactagtgtttataaatcttttaaagttgtaacataaagaatttacttaatgataaccctgcctccaaaaatttccaaattactgagttctaaaagcttttttgtccattgaaagatcctcaaccagtggctagtatttgtttttgtctcctagcattctagttatggtaccagaatgagataaaggttttttattctaattctctataatcttctcttcatcctttgttttattatatttttagtatactagagtattgaatgggaa

SEQ ID NO: 296778 - DNA, 155 bp, Homo Sapiens
caaaaagaaatgcagatggataggagaatgattggttctgcctgaaagatgaggtaagtcttctcagaagagttaatatttcatcaaggctatgtcttttcatgagttttattatacaatattcataacaatcctgtgaaatagatcttattccc

SEQ ID NO: 296779 - DNA, 407 bp, Homo Sapiens
  misc_feature (344)..(346): n is a, c, g, or t
gatgaatgtcaattagtaaaaacaatagctggcagtcatagaaaaaaatcagacaccagaaattaaaatttggaaaagtcttatgtcatagtacaaaagcaaaatgctgaacacaagttaacaaaaagtaacgtgcacagtatttactgagtcacaagaaaaagacaggttatgcttacgcaatcttaaaaagtatggctgtgtgcaatacacttagaaaaaatttccagttgaagtggttaaataaaataaaagcaattctaacacctacgagctggttatcttcagttatctggaaatggcagctatgcaaagcaaatagataaggaattaatatataatannnctctcctaaataagaactttcaattagctaattcattttaaagcctcccgtactcccactt

SEQ ID NO: 296780 - DNA, 574 bp, Homo Sapiens
ttacggcctggggtatatataaaattctaatcacttatgatccttagttaacattttataagctttgtattttacaggggcctctatttatccaaatttattgtttttgtccatttttctcagccttttgcaaaaaatatgcaagagtgctgaaacttggataaaacgggtcatgtatacagagaaaataatctaaaagttatctttaagagggttttagtagtgtcaactttttaaaaaagtactatgtgaccataacatacgtatattttaaagagggattaagattaaattaaaataatttttttcataaaataaatatttgaatacagtatttacttttgtaattgaagcatgattccacaaccagctgtggcattttatttcacttttctagatcagaggctttaatttgtagttaatcatgatgtggaaagtcatcttctctctactccatcaatttttttcatccgtttttgaacatgctgaagcactttgatcttgccataagtgttgtcctataccactaggtggtgttcactaatgggagggcctcagctcaccggctctccaa

SEQ ID NO: 296781 - DNA, 592 bp, Homo Sapiens
  misc_feature (379)..(507): n is a, c, g, or t
  misc_feature (563)..(563): n is a, c, g, or t
gttttcatcttttgaccattgtgaatactgctgttatgaatatgcacgtacatgtgcttgtttgagtacctgttttcagtttttttgggtgtttaccaaggagtgggattgcagggtcctaccattagctttgcaacatcagttgcaaagtgatgttgcaaacatcaacacggtgaaaaagcaaataacatcttactatgaaaatagttttgatcttggggactcccccagggatttgaagaccatattttaagattctctgtcctatagattctagagttgctcatgtgaatatgtgatctctcatcatccctcggttttcactagcaccacctaataatacaggctggctagtctccaaaactacatcttcaaagtnnnnnnnnnnnnnnnnnnnnnnnnnnnnnnnnnnnnnnnnnnnnnnnnnnnnnnnnnnnnnnnnnnnnnnnnnnnnnnnnnnnnnnnnnnnnnnnnnnnnnnnnnnnnnnnnnnnnnnnnnnnnnnnnnctgcactattagatgtgctttataatctgtaatgtatagatgagaaaattaaaatntagggagtataaatgtgacagaactgggt

SEQ ID NO: 296782 - DNA, 371 bp, Homo Sapiens
  misc_feature (44)..(44): n is a, c, g, or t
ggttcttctaggtctaaaagcctttttcatgaaagggcattcanaatatagttcaatagatacagtatttgggtccctgctatgagtaaatttttgtgttagaaattgtaaggaatgcaaacatgagtaagaagtgtttgctaccctaaagagcttacatttctaataagggaataatataaattcacaaatgactataaaataagaggatgagagtatagtaagggataaggaaggtagaagcaaagtgttgttcaaaggaggactgcttcatatccagttgggcagctcaagacaggctgtgaaagattgtttcaggtagcttaacattagtaggtattggttttttaaatccttttaaaattaatacc

SEQ ID NO: 296783 - DNA, 265 bp, Homo Sapiens
  misc_feature (37)..(37): n is a, c, g, or t
  misc_feature (226)..(226): n is a, c, g, or t
  misc_feature (234)..(234): n is a, c, g, or t
ggggccataataaaaccaggtaaatgtgaagaccgtntatgaagtcttgaaataataaaaccatttaatttttttaaccttgacatactaatatacacaaagtggaagtaaaatatttggtctcctttattataaggtatcaggaaaggttttactgagtttgaaagatacataggaaattaaacacagaagccagaaatacaagcttaaatgtgatgatgctttnttcttttnacgagattggaagacatttgtgtctggattt

SEQ ID NO: 296784 - DNA, 558 bp, Homo Sapiens
  misc_feature (465)..(465): n is a, c, g, or t
  misc_feature (504)..(504): n is a, c, g, or t
gttaaagcattttcattttccattttttgcgagggcttgagatatttctgctgcatattaatattcctttcatggacagcatattattgggacaaacatgcggtccagctaaaggcattcaaaatagcagttgctttctaaatgcgattttctttggcaggttctttgacaccattgcatcttgtgggatatgcttgtcatgctctgtggctcctactaagttctagtccttaaattggttccatagccagacatgttgcaatgtcttaacctcattataaagtaaatgtttttctggttatccaaagataatgaagtaacagtgtagcaaatttcaaaacctcttggaaatgttattttaccattcaaaaaggcttactaaggttctcgttatgggtggccctctttttgcaaaaggttttcaggcttaagctccatttctaggtgctccaacactccattatntgtatatgtatggaaataaaagctgtgaccacccccaancctggcccccgcccagctgaatcctcagcacagtatttctggaaggctcaagat

SEQ ID NO: 296785 - DNA, 599 bp, Homo Sapiens
  misc_feature (566)..(566): n is a, c, g, or t
catcacagaatacagtttaaatacaagcgaagacataatctgagaatttgcttaacttacagtaaataaaaatacatctagaaatttatgagagaacaaatataggttgtagaattgtaaagagggatttcaatttggaaaattttcttttatgcaaatatctcactccatctgaattctataacaaaataccataaactggatagcttttaaacaacaaaaatttatttttcacagctctggaggctgggacctccaagatcaaggcactggcagatttggtatctggtaagcatccttatattcggaatctgggatggctctacattctggtccatagaaggtgcctactgaggtgtcttaacatggtgaaaaaagtaaaccagctcccttgggcttcttttataagggcaatagttgcagtcatgaagactccaacctcatcacctaatcacctccccaaaggcaccacctactaacactatcaccttggggttagattttcaatgtatgaattttaagggacacaagcattcaggcagcacagcagcaaataaaatctcatntattcagccatacagtatattaatagccagaat

SEQ ID NO: 296786 - DNA, 415 bp, Homo Sapiens
  misc_feature (403)..(403): n is a, c, g, or t
tcaacaaatgaactgtcccggaaacatcaagaacttgagatgtgattgaaatattcaggtagcagaatgttaaaaatagaagtgttggctaaggcctaaaaacaatatagatacaatttaaagtgaagtaccagacccctgctaccagagtgtaccatgccaaaatgcaaaaaaggaagtaagagaaaacctgttttgtgactttgaaactcacccatgtagaaggtgttaacaggcctaatattagagattagaggaggatttcttcagagagaactctttttttctgaaatacttccccagccctttacactagaggattcactgggggaccatttggggagttatgtgtcttgtgtggtgaaggggggaatgctgtggactggtgtctgactcaccctgnaacatctttttt

SEQ ID NO: 296787 - DNA, 636 bp, Homo Sapiens
  misc_feature (548)..(548): n is a, c, g, or t
  misc_feature (553)..(553): n is a, c, g, or t
  misc_feature (626)..(626): n is a, c, g, or t
gaaactaaataaaagtccctttaaatcacatgtcaagcaccatccttgggcacaaattcttcctgggagcaaagatgtacagtatgagagttaaaggaatgtgtttaacaatgacatgtcgctttgtcagggatgtctttgtaatgactaagaagcaggttaataggatgattagaatgaaggctaaatatgacaaaagcacaaaacactttcttcatgtcattcctctgagatatgtgggtggcaaatattatctctgtttcgtagattgaaaaatgaaatagtttaagcgctcagaggcattttactgacattcagatttttacacaggtgtaatttctttttatagatctctaatagtaattacatcagctttaggctcctgaaatattttcaaatgtctagggttgttgaaacaatgaatgtttcattcttcactctttttaattcttcataaaccctttaactctctttaggtaataagagttacacaaaaataagaatgttatttctaattgcaaagagaatatgtaagatttagaggtgtnttttnaagaacatttgtaagatgtatctcattattggcctttatacaactgataccaaaaatggctatttgacacatntatcatctgc

SEQ ID NO: 296788 - DNA, 630 bp, Homo Sapiens
  misc_feature (535)..(536): n is a, c, g, or t
  misc_feature (605)..(605): n is a, c, g, or t
tgagagagattagattaataacaaactgaaatcatatgtaccagctgtttttgacaaataagatctcatgaccttcaactttttgtcctccctttaacaaaaaatatattggctagcccaactgcctcattgcaagtaagtttaaatgtcaaatccccttgaaaaggcttagcatagtttttcaggcagactcagtggcttttactactttgcacagtgctgtgttcttgtctcttattgtaaggctgaataggtagcattgtaattatttctgccaaatgactatgccccaaatgcaaagatactgttttgttcaattttgtatcctcagtgcctagcatttgaggcatgtataggagacaatggctctagtattgagtgaaggataaaactggaactcaaagttgagtggtctagtcaaagacattttggtagttagtggtagaaactccttcgttttaaagaatcttttctgccttttatttctgatttattaaagatctggatggataaaggaaggacatatctggctatnnttaacataacaaaaaagactaagaaatgaaacttctgaggctcctaaaaataaacccttaattgaagtntactctaaattagatcatagagtat

SEQ ID NO: 296789 - DNA, 118 bp, Homo Sapiens
aaagcataattgaatacattttactgccttgcagccagagtaaatgatttttccattgttaagagtaaaaaccaatttgttagtaaacggagcagatatgattcaagggaagcagaaa

SEQ ID NO: 296790 - DNA, 562 bp, Homo Sapiens
  misc_feature (149)..(169): n is a, c, g, or t
aagagggagggggctgtcctcactatgttgcccacattggacttgaactcttgaggtcaagcaatcctcctgtctccccagaagctggggctacaggagcttcaaatgactcttgattgtattatatttccaatacatgctgcagtgcnnnnnnnnnnnnnnnnnnnnntagctgaaactgaagtttctagaatacttagttggacctcccctttttacaggccaatcatggagctaaatggttactttgttacacagattgagggagtaaatctctgtgttaatgaatacactatcttatcggcttcaagaagagtaacctcaagcacaaaaagaaaagaattaagtctaactgaaggtaccatgattagcaaaaacactttggtttcaggaattgcaaagacagactggccattacaggaagttgtattaatgctgacaatgttaaactgtttacagaaagtaggaagctgtggggatgttcctcccactgtcacacacactgtcctgtcctacgtaacaagtgttgccttatttctcaataagtgaatataaattaaac

SEQ ID NO: 296791 - DNA, 483 bp, Homo Sapiens
cggcaatacggccgtggacagaagaacttctcctctgagagtctcttcctaatcacagagtttaagggggcagctcttctagagccaaagcaaaaagggccaaacggactctgtgaatgtcaccctgtgctttagccagagtccagtgaaatgtaagtgacccaataatctaataaggctgagaatcaaataaggctaaacttttaaagacatcaagagtctgtcaattatttttccagacaaacaataatcagatttcctagaattgtaatgatcttttgtaaattagtcacaattattctaaaactgaacacagattccacagactgcagaaggtggatggacacttttgggtctgagaaggcttccatgcaaaagaaaagttattattctcttatttattcaaatagctctcgtaatcatcagtttcttaagtcattgagtcctccttccctggctccttagatctattttgtttaaaaa

SEQ ID NO: 296792 - DNA, 557 bp, Homo Sapiens
tctctgaaggaaactacaatctcttcaggcagataatagataatatgggtatcttccatttctacaaaagataaaaatgtaggtgatagagaaagagcacttactaaaagttaaatggagtcagcagaacctgagatttccaagtgatagaaacctggacaggcagcagaggtggagaagcacagtctaagtggagagtcacatgagcaaaggagactcagaaatcagagttctttggaagtgggaggttgctaagaaagatcgaaaatgccaggaaggcccttacttccaagatgagcttgaatttgatctggtaggaattgggaaaccattttggatttctgagcagggatccaagctttaaatgcacggttttgaggacatttacttttctggagtatacaaactcagctgttaaagagtgggatcagaagctaaagatcagctaggaaaaattacagtaatccaggcaggtgagggtctagattgcagcagaaaaagagagtctctgatgaattcaaaagttattggaaagtggaaattgataggacttggtg

SEQ ID NO: 296793 - DNA, 466 bp, Homo Sapiens
caaggcagagaccaggaaaccctcttgcacttcccatcttctctctccagctcttgtagcgctaccctggccgttccttcggggatcctgaagtcgttcatgaccatctggttcatctcctctcgcctcctctgtacaaaccgggggtctggggttctggaattagatcagtgtctgctctgcctcaggcctccctgcctcctcatgggccctgactgccaagaaataacagttgctggagacatatcttgatttggggtcagcgtaagaactttctagaacccagaatccagcaaaggcatgagctcctttgaggtagaggtctggttcctgtcctgccacatttcacgtggaactgtggtaacttgtcagggacattgaacaagggacatgggtaccaagctgacctgaggactcagctaactaaagttccacatttcttccctccttcccttgtctacctctt

SEQ ID NO: 296794 - DNA, 494 bp, Homo Sapiens
gaggcaagagttgaagcttaactttttctaatttagttgggtgactaatgaaccggtgaggattcaggacaggcataccagagggtgctcagaaatgaaggtaattgagtcaattatagtacttttgaataaatgcagggcagattgtcattatgtgcagaactctgatttaaaataatcattgttggcatgtctccttgctgcatgtgtacaatttcatactcctataatgagtgttttagcttgggagaaccacttagggatttttctcattgcacttggccatcgttgttttatcccattgggaaatgagaaactcaatttttaaaaataaatcgtgatagcatcaggtgatatcttgggcttgaaaatataaaatcttgagccactctcatttcactttctttctcatgacagatgtctttatgaatggagttggctacagattgtctggtagaattgcaaaattgataccttgatttagtttatagtgg

SEQ ID NO: 296795 - DNA, 533 bp, Homo Sapiens
tgtgcatggaaggaattcactgaactttacaaaattcatctcactaaggttagagatttttcttgcatcattccttcagaaccattgatataaaatgaaaatgtgatgattttattcagccatttcatattgagatattttaaactaccagtacggaggaaatgctttattatttttttcaaacctctaatctgttaattatgttctgacttgagttgtcatgttttagccaagacagatttttataacttttgaaaataggacttcccaacaagaatgactgaaaccgaatttgttttgtacatgcaaattaaagattaatttctgcgaactgatttttagaatttttcaacttttttcttatcagtaaatattatcatttagaatctccccttctcatttctttttcattaaataaatagatactaattgcttctactagataattcatttggccattgaatgagaggaaaggggaatgtatttttataatagcacattgccaggatataaagaacagtttttagtaaatt

SEQ ID NO: 296796 - DNA, 513 bp, Homo Sapiens
gtgtgatttttaactgcatgctaaaccttttaatatgaattatttcatcctcaaatagtgtgcttttgctctatgatcatattaactttattcaacttaaaagtgaaaggatacgaattaattttaaaaagattacctgtcttattagtgcattggggttttaattacgtttatattagagcctgttttcagttttatcaaaatttaagaaataaagtagaagtccaaataggatagtttgtaaaagcataactccgtgtaccatgaaccaacgctattaccaggaacaagcagcccagataaaatacctttgaaatcatatctcttgttgcttagggagatcatcggggccaaagcagcaatatgaaaaaaatagtattaattctggtctttgtcccattcagtgatgttcctcagccaaaatttattagaaactcttcctaaccttactggttgcaggggtatgtgctcaggacactcgtatctttttttgataaagctctcccactttga

SEQ ID NO: 296797 - DNA, 223 bp, Homo Sapiens
gagattgggaaagaagatttatttctgcaactggttacagggagaaggtcgttgtaactaaccagaccaactcacagttgcaatttatttcagcttatatatataattgaagctttttgcttgcctgcaggagtgtttcttaatcaatctaatcttaactaggggtctgcaagtaggaaagtttattagatttcttcctgaatggacgagtttaagaaaatcc

SEQ ID NO: 296798 - DNA, 434 bp, Homo Sapiens
  misc_feature (306)..(341): n is a, c, g, or t
agaaattataaattgaaacaggatataaatttctaatttctactgtcttattcagtggtaattttttattcaaagttcttaagctgcagaaataaatttataaactgcagtttttgtaaacagccaggtataaatgatttatcctttacccttgtaatttgaaattgtcacctgtctttgaatgttaataaattaatggtgtctattgtttttctgtcaacaaagtaatcttgagataacagttactgtttgagattcttacagttgtgaaatttggagaaaactaaaaattaattgggaagtggnnnnnnnnnnnnnnnnnnnnnnnnnnnnnnnnnnnngctatagcgcaggctaaaaggacggtagaaagttttcttcaaaaattaagaacccaaggttataagaatactaaaaagttaagaaattgagat

SEQ ID NO: 296799 - DNA, 627 bp, Homo Sapiens
  misc_feature (370)..(446): n is a, c, g, or t
  misc_feature (586)..(586): n is a, c, g, or t
taactgatgataatttagatgactataatgcattgcaagagaatctgggaatacagtgtagttgggcagtgatatgtagttactatggttgaaaggaggtcataatttggcagacaaccagcagtctctgccacaacacacaacaccaatatagtagtctttgaatttagcagtttgtgaatgagatctggaagttatctttggagagtatcttataacttaatctatttattagtaccactgttaagaaaggtcatatcaagagtagataaaaatcaaattaccaaaatttcagtacctcaattattaaaattttcagttattattttagaaaacttttgtttaaagatattggaaagttgaagtcatnnnnnnnnnnnnnnnnnnnnnnnnnnnnnnnnnnnnnnnnnnnnnnnnnnnnnnnnnnnnnnnnnnnnnnnnnnnnnaacgagccttatagtcgttcctaattcttaggccatgtgctcatcaaatgagaatgtattatacataaagcacataacatttcctacacagtagctctcaagatagctgttattgttatcatagcattaggtacctggtnttggacagaggcagtttaaggcatttagtatctaatacatg

SEQ ID NO: 296800 - DNA, 585 bp, Homo Sapiens
  misc_feature (517)..(517): n is a, c, g, or t
tggtgctagttcatttctgcagtgtcatatgtcgggctatgttgtaagttagagtagctctcaatattgagggggtggggttgagcgagagggaccgtgttacgcacaatgggctatggtatagaactcaatttagaatagccttcctggagatctcttctttcacccacattttcagctcaatttattcttacagatttaacacagttggtgccactgatggggctgtaatgtgaagccacataggaggctacattattgttaatttctagttcaccttacatttgcctgtctttactattaaaagttccttaattttaacctttcagtaatcttagagaatatataagggaggttgataatgagttagattttgatagatgtccaggttgcagcttttcatcggcccaatgtgaaaaaccgtaaattgggaatccagaccatcaatataaaatttaaggtctagcctggccacttattagccatgtgacctaattttagttactgatccctagtntccttatgtgtagtatatgcgtcacctgccttgccatattatgtggaagggtacatgagatgatatgt

SEQ ID NO: 296801 - DNA, 262 bp, Homo Sapiens
ctttgagtgaagttttgaatgaaagcttattggtaattagaagttattttcataggttccggtttatttggattgcttaatcctaacagtcaattaaaataataagcataaaataaaagaacacagaatggaaaagaagttcaattatagtaagccctcactgaatattaattcccttactccttttctccttcacccaacaacttctagttgtatttccactgttagtaaaatgtactggacttcacttccccaccccgcg

SEQ ID NO: 296802 - DNA, 645 bp, Homo Sapiens
  misc_feature (564)..(564): n is a, c, g, or t
  misc_feature (589)..(589): n is a, c, g, or t
ggggcagagggcctgagtgattagattcctcctggccatcataagctcatggagccctggctgtttcacagctttgcgcttcttggggaggttttggagactgtgaggcagagctcccctggcagtcacttcccatttgttttatcaggctttgccgtctctgtctcatgtttttccttaaagaacacacctctttaactttgttctccgctaatatgtgtcatgtataaaggccaaaatctcaaatggtagataaaacatccttaaaaatatataggtgttgtcgtctgcttcgtggcactaaagtcatccggcactaaaataatcaagggacagtgctgaaatgaccagcatccaatggtctagtggacacacttgctttgtgcattatctgggtaacataactcatggttaattaaggcatagttagcacacatacatgtacatcgtgcacctctccatgccatcaggcttgggcaagaatgatctatttttgtgtaatgttgatgataaaccacagtgctaattgacttcagtatcatcctcaccatgtccgtgtcgtanaatgacacttagtaaccatgtattnactttggtatatatttaaaaatatgcaaatatatttatgctatcctaaatatgttc

SEQ ID NO: 296803 - DNA, 523 bp, Homo Sapiens
  misc_feature (109)..(400): n is a, c, g, or t
gctagaatcatggtatcttcatgtcagaaagggcctcctctccagcggtttggataaagattgaggtgcacccggggctacactaaaagagatttagccccgcatttannnnnnnnnnnnnnnnnnnnnnnnnnnnnnnnnnnnnnnnnnnnnnnnnnnnnnnnnnnnnnnnnnnnnnnnnnnnnnnnnnnnnnnnnnnnnnnnnnnnnnnnnnnnnnnnnnnnnnnnnnnnnnnnnnnnnnnnnnnnnnnnnnnnnnnnnnnnnnnnnnnnnnnnnnnnnnnnnnnnnnnnnnnnnnnnnnnnnnnnnnnnnnnnnnnnnnnnnnnnnnnnnnnnnnnnnnnnnnnnnnnnnnnnnnnnnnnnnnnnnnnnnnnnnnnnnnnnnnnnnnnnnnnnnnnngagatttagtccgacatttacgacttggaaagaggctgggcagagtcacatcagcacagtgagagtgccatggagcccatggtcagaaagtggcagaaaaagtgcgtcttgcagtcagtgccg

SEQ ID NO: 296804 - DNA, 647 bp, Homo Sapiens
gggctttttcccctttttaacccaacagaatggtaaacatagatttattggtctatgagcaacttcaggcagaatctggtcattttcgcgtttgcgtttcccgtggagaccacagcatccagcatgcaataaagtctccacgagcatggggtgagttaatggagaatgggcaggcatcgggctgcactgatgggccacgcagtctctcccaacattaacattatgaggtcacagtggcacaaaacattgccagaagataaagggcctagagacctcaaacttaatgtagaacaagttacatttcaggtcttagcactgtgaaaaatggcccattgtttgagctatgagtaagcagagacaccttccacatgggagtttcacattctgctttagagaaggtcagagtgcccttcctgtgcctgccgctgctgtcgttattttttgtgtctttgacttaaaaccatcaacatgccaacatggtgtattttgaggtgctgttttctggacaccttcattgcctaatttaattcccctaacaactggaggaggtcactgtttgcatttgctgatgtgaaaacaggctcagagaaatgacaaaatgtaccaatctcttacagcagctaaggggacctccttccctctgtccc

SEQ ID NO: 296805 - DNA, 297 bp, Homo Sapiens
  misc_feature (132)..(141): n is a, c, g, or t
cgggaaagaactgtgcagttgatataacaatcagctgaggagtgggtagagtagttagggaagacctctcaggagctgacatttgaatgacttcatggtatgcttttgacactgtgtttccataaaaaagannnnnnnnnncctgtatgagttatctgactaatgccagatgatttctggaatttaaaaatagaagttgtacttaggacatttcctttttagaattaaaagcctggggaatgcttggaacatgtattaaactctgcttctttcggtatatcagatgcccgttttggg

SEQ ID NO: 296806 - DNA, 442 bp, Homo Sapiens
cgggtcaccaaaatgcccgtgcataattatgtcaagcagtaatccttccattgtccactgtctagaggcttttgcccatattaaggcatgtgggaaaccaactgaatcgccagaatgctgtttggtgagatggcatcggagtaaatggagttggacaatgtggacagaatccactacccaggttgggaattaatctgatgaacccccgacagaagttagtaacccttctagcacctgtaatgagagcagagtggtggcctgaattagcgaccccaatccttctatgaaattcattttctcttcctgaaaacgtggcggtaagattgccgaattctctttaggttcctttttaggctttgtgcagcttttttctaatacaagtgagtactgttttctgtcacgtttatctgagtctacatcctggtttgcatgattggacttg

SEQ ID NO: 296807 - DNA, 622 bp, Homo Sapiens
cgggtcaaacaactagaactgcattcaacaatacatacttccttcataatggccaactcgaatccagccctaattaaaggccatgtgtaaaactgacgaagatctcagttataatgatgatgaaagaaagctctggtaaatggagaaaccaatctttatcccaggcatcctccttgttagacagtgagtattgagtcatgtcaaaagaataaaagtccaacttaaagggtactttgaatcctaagtaactaacttctactcaacaacacagaacactgcatttaattgtagcagatgttaagacagctagaatgccagcagattgacctaaatgtccgaacactgaaatcactaataaaagtacattctctcaatgatgtatcacacaccattaaaagtcatctaaagactattaagtaacatgtaaagattttacaatgtaaaattaggtacagtaaagggaaaaacacaaaattgcatatgccctacaactgcaactatgaaaagaaacacacaaacatgtggccagggaacgaaaggaaatatgtaaaaatgaaagctgtggctgtattacgcattaggattatgggtgttttccacctctccctcccacaaaatcaat

SEQ ID NO: 296808 - DNA, 533 bp, Homo Sapiens
caatcaactgatagtggctgtcctgcagctttgtgctgtgagtgttcctaagattgagcataagctcacagagaaagagtgcagtgatcagatagcagtgtctacaacgtgtaacagtctcggagcattcttccaaaggatttgacaaaagattggacttaattgaatacgtccatttttgatagttctaagaagtttagagtaagatttcaagggaacagcactaaggatacatgacaaaagagacaatgaatgttaagactgtttagaggacctcaaaatggatgatggagacctgccaaagatagtcttccccttgctgaccttggtgggctctctagcatccttcatattctttacgacaagcctatgtgtcccaaaactaaataatgacagatgttttgggggttgtttttcaggcaaatatgtctctctcacttgtgatatatctttgcttagaaaaatggtattgagaatatgtgagtagcagaattaagtaagatactgtcagccttagagcttatttgatccaa

SEQ ID NO: 296809 - DNA, 452 bp, Homo Sapiens
ggtgccaacaacctatcgtgtctaaatctgtacttccacggaatgatgggttccctgccctttgctctcatccagagcccagctgaaattcttttcagtggaatttatgccacttctcctttactctctcttcagtgaaaatagagaagaccaggagaaaggaagactaaaaagtaaagtgaaaaccgccttccaatagaatttggttgcagaaataatttccatgaaaaatggtcgggctgatattaggtctggagtcttaatgatggagtagtttccttttaatcatggtgctgtcttagaaatgcctgtctggaatgtgaccatgggcgggggttggtgtctggccactgcgtagtcggccttcggggaaagggtagccacaagatgttcccactcttctgtgagccctcaggaatttgaaaataagactcatgtgaaaacaggaacaa

SEQ ID NO: 296810 - DNA, 548 bp, Homo Sapiens
taccaaacgtttgcatgcttcctgcaaagcacttaccaagtgatttctcttgaaccgtcggatataattttgtatgtacatgtttgaggaaaaaaatgtaaagcaaaaccttttactgaacagtgttctatagaattatgacactaaaacaaaattgtttgtggaagccctgaaagctttatagtcctggacatcaaaaattttatttgagatgacgaatgttttgttttcatcttttcttatattaccacaattgagatattttagtaattgaaggaacatacacagatatttggcagaagtcgagtaaggaggggaaaaaaagagtccgtgagtttcagtcattttcactgctcttttcaagaagattgtgttgagctggtagaagactaaagatgtcactgaagacatcacagatactatatttatcttttggctttgtgtacattagagaatgttgattatttttatacaaaaatacagcgggtaatttttttaatctttagatgcctcttgtttgaatgtatgctttgtggaattctttgtgt

SEQ ID NO: 296811 - DNA, 105 bp, Homo Sapiens
gccataactctgacagtttaataagattgatgggctatagatgtgacttaactcttgccttctgtggcctcagatcttgtttataatttggtaaaggagtctttg

SEQ ID NO: 296812 - DNA, 474 bp, Homo Sapiens
ctgtctcattttaataactcttatcaataccttaaattcttttgctcttctttgatttttttgttgcaccttcctgatgccaccccaaccctggatgaactcagtatgctttctctttatctgtgcttggtgtgacaagaaaaatctcgagtacagattagtaccactataaattcataaccactacctgtctccccatgccatcaacacatcctggcaactctaatatcttctgtggtcagtttactccttcacgaagactgttccaatctttgattatcctcagatctttccatatttttgctcttacttttagcagatgatgtcatgtgatttttcataaagaaaataaaacccattaaatgagaattacctcagcctcctaaccccaaagttgtatgcttacctgaaaatgcacataatctctcctccagtgttgcaatggaaggagataggtctccagctctctttaag

SEQ ID NO: 296813 - DNA, 549 bp, Homo Sapiens
  misc_feature (202)..(218): n is a, c, g, or t
tgagcatttctgaggaatgacaaagatggcttccttggagcaattactggaaaagaagctggtgttctattaaaaaaaatatatgcttagataggaaattaccaagaaataaataagggtaggaataaaggtgggatggagtacattccctgatgaaaaaatttactttcagaaaataggactccttacaaattatttgaannnnnnnnnnnnnnnnnaatttaagaatgacaaaaaagtacttaaaacataaatgtgtcccttcatgaattatcacaaaacaaacttctattaactgccacccactcaagaatcaccattgcccgagtctcagaagacccccttatgcttctgcccatctcacttactccattttcccaaatgtaactactactaacatctagatgtacctggttttggactttaaataactggaattgtataatgtatacttgtttgtgtctgacttctctcagtcaacattgtatgttgcaactttaattatttcatttttattactaaatacttttccactggatgaatgcacta

SEQ ID NO: 296814 - DNA, 399 bp, Homo Sapiens
tcccctttcccattgagacacacaaggtgactaggtggcattaacagggttgtcccatcaaaataagcagccctgcctgggaagtgctcattctccctgcaggactcttttgccctaacctagatttgccaggtggtttggcctagggaaaactcctcacacccctcaggcagcatcagcagaagcaagttggggccccagaagcaacagataaattaagcagactgaaatcgcagcataaagatcctaaggaaaattaaattgtcattggaaccacggcccacaaaagtagaccaggacctgcctcctaacataaacaagatgactccctgctaaagtaaaacatttatatgggagcagagccccctaacataatatacaaaatgtctaggatacaat

SEQ ID NO: 296815 - DNA, 414 bp, Homo Sapiens
ctgatgaagtcagatagcaggatttgcagcagctgcaactgtatttacttagaggtttaagaagtcaaagtcaaaaacaaaaattgtattctacaaaggcgtctcctaacctagtataacaatgtagaatggccacttgcaccttgcgaatcatgaatatttaacaaacaggtcactacactcaattagaaacccaccgcgcagaacgctttgtttcctcttagtctgttttctttactgtttctcattacaggtactgtctgaaaatcaaggcaagaactacaatcagtttctagtaagtcaagttttcatctcaaattatatctatttcgtactataatagcacaagggtgatgctactctaagaaagggcaaaagttctttaaacagattagggaagatttctgtacataa

SEQ ID NO: 296816 - DNA, 565 bp, Homo Sapiens
agggaagttgctgcatatgcgatgggggggttgctcaaatgtcctttcagggccagtgtacttactccctcagttattggggcttgttggctgctgctgatgcacatctgagcccctttccatgcattactctgtgctgatgggagctgccttgcccaagttatccctgctccaggggctcagcccttgtctgattgctggtcgatttagggataggatacagctcagctatctcctttccccaaatgaggaacaactctaaaaggccatctaagctccagagccccctgtaggatcagctttggtccctgttccaacagtactgcaatcccaattttccttctacccagtcccgcattcctcacccctgagaagcgttattcccaagatcactccccaattaaccttctccacaccactcttcatcttagagtctgcctccccacgggaagccgatctacaacaacatgcatttctagaaatgaatttaccctcttttgatctggcagcctttttgaatggtgacacatctgatgttgtggtcacgatacataacaaatctggc

SEQ ID NO: 296817 - DNA, 190 bp, Homo Sapiens
aaaacagaattcatatgctcattaatttggaaagttgtgagaattaataattaaattattgttgaaaacatacctgaatattttattcaaatttctcatttaaaaaagttttggaatacttgcacgtgttttttaaattgagtaatacattaattttctactaaagttatttcttaaacttgaccactta

SEQ ID NO: 296818 - DNA, 536 bp, Homo Sapiens
  misc_feature (435)..(449): n is a, c, g, or t
gtagtttggagtattttttcaacatacaaaagaaaatctgggcatttttgcaaaattaataaaaaataataatggtattaccaatactggaattccttattcattgcctgtacttattcaggtttcaacattcataaacaaaagatggcataatttgatttgaatgatgattttattttattataataatctaaagagcaactggttaccttgttatattcttatgttgagaaatttcttgtaatttgattcatatctagaaaaattgcatgctaaattaacacagtgcctgtacattgagtccctattatccacaaaaacgaatgtattaaaagccatgttagttgttaggacttggctgtatcttaatttctatattgatttcggctgttttaccaagctgtgttttccacaagaagaccacctaagactgannnnnnnnnnnnnnnatgtgtcttcccccccagcccccatggccttccaatgaaggcagtgtgtatatctgagacttaatgctagctggaatggattcttga

SEQ ID NO: 296819 - DNA, 504 bp, Homo Sapiens
catctttagcttttgagattggctacttccgtaggttaaattaccttctggggactgggggattgtatagaagttagataggcctcttgctgatttctgacccaagagtaattagacttataataaaaaagacatcttaaatcttgctggtaagagcatgattggaaatgaaacttttgaaattcgtttctagtttcacagatggagttaaacagaggcatagacttactggagaaaagttgtcaacgctaatgatagcaacagttaccatttactgagtgtgtcctgtgtgcaaagcctacgctgctttacattttaacagtactgtgagagttttagaatgactgtttgagagcggaagaaactgagtcttaagagtgggtcagtaacttgccgagaatcacagaattactacatagtgatctgaggtttgaaactggatctgtctgacatagatgtgctgctcagttctatactcggatactttaaaatgagaaataatta

SEQ ID NO: 296820 - DNA, 471 bp, Homo Sapiens
ttagaagattcagataagcaaaagcacctttaagcaccacatagttaaccactcttatgatgttaacctctatttatatatgtatgtaaatataaaaaaccagaatacaattttctgtacacttgtaacctactgtgttagtctactagggctaccataacaaaataccacagactgggtgacttaacaacggaagcttattttctcacagtttgggaggctagaagtccaagatcggggatggtctctctgaagcttacttacagctgctctctcactgtgttctcatgtggcctattcttcgtacataagcatgcttggtgtctcttcctcctcttctcaggacactagtcctgttggattagggtcctacccttgtgacctcatttaatcttaactatctctttaaaggccttatctccaaatatagtcacatggagggttagggcttaaacatgaatttggggtagg

SEQ ID NO: 296821 - DNA, 243 bp, Homo Sapiens
gtcagagatgccaaatcagtggtctgaggtcacgcgcctgaacgtccaggtttttactctttctataactattacggaaagccctcaacttcccttttgcatcccctaccaccttctcaagaccaatcttctctgtggttcttgctgtatctcctgccccttccaaactggttggaaggtgttactaactgggtacagggactgattggctgatgactcacataggatagccgtagacaacat

SEQ ID NO: 296822 - DNA, 465 bp, Homo Sapiens
tttgacctaacacttcctctttactgtacattccaagagcataaaggttgggtttgtagtgttgtaaaacacatgagtcatcttaaagtacttttcatctgctgggcaaatgattaatgcctgtggtggtaaaattaattagtagaaacaaaagaaatactatgtttatggtaactccaactttagttcggtaactttaaaattgtgtaaaattaagatatttagattgttcacatatatagctgacatctggcagctctaaacaaaaagcaaaacatatactatattagtataagagaaattcatctttaatcatataaaaaagtgaacacagcattatgctagattgttaactttgtttacttttttatgctcatgactacttaggcaaagggcacactgtttttatgtcatcttttccaacggttagtcatggctcaattttaattgcccagaacagtgaaa

SEQ ID NO: 296823 - DNA, 515 bp, Homo Sapiens
  misc_feature (133)..(396): n is a, c, g, or t
tatgaacagaaacaatatcaggagtcctggttagtttttgtctctcgaggatgggcaggatagagttataagaggaagtggaaattcttgtgtgtttcaaatacattccttctttgtaggcggggagatggannnnnnnnnnnnnnnnnnnnnnnnnnnnnnnnnnnnnnnnnnnnnnnnnnnnnnnnnnnnnnnnnnnnnnnnnnnnnnnnnnnnnnnnnnnnnnnnnnnnnnnnnnnnnnnnnnnnnnnnnnnnnnnnnnnnnnnnnnnnnnnnnnnnnnnnnnnnnnnnnnnnnnnnnnnnnnnnnnnnnnnnnnnnnnnnnnnnnnnnnnnnnnnnnnnnnnnnnnnnnnnnnnnnnnnnnnnnnnnnnnnnnnnnnnnnnnnnnnnnnnnnttagccactgtgcctgagtcaaatacattcctaatgaatccccaggagacctttgctcacatcttctgtcaccttatcctggctcttgcctcatttttcttttctagagtcatcctagg

SEQ ID NO: 296824 - DNA, 366 bp, Homo Sapiens
ggggaataggctaggggtctcgacatgattattcagattcactttatctccatgtgttaagtatggtaaacttgcctgcaactatacctagtgtctcttaagccagagaccttctagttttgccctctccatagaataaacctttagctttcagtttttcctcagggttggggtggtacagaagcccactgtgtagattgtttaggggttctggaggtataactgctttttaaacagagtggtaaaaatcctgttgtatttttacttgcacctccagagtattctacatctagaggcgtcactaattcctaaatcttttgtgggatctatgatgtaaattggattggttttaattttaggattggg

SEQ ID NO: 296825 - DNA, 503 bp, Homo Sapiens
gtgtgcagccaatgttaatgtgacaaaaagtgcagagttagtcccagagcgtgaagtcctccctgtcctaggcccaggtggagagccaggagctgctccccgggctgcctggaccagacttttgagctcttgggaccctggcgaacatcaaagctgttgcaaaagtcagagctcttgcaaaagttggagctggcccatggcaggtggttgagaagtggctacatgactcttcccatgcagagcggttagagggtggaggccgatttccagtatccctgggaatccaaagaaagaggccactgaggggcaggggagggcccctccgaggcttccagaaaaaggcagtgcagcagctgggcaaaccaggataaggcatgcatccctaagcccaaaaatcaggtgatgtgaggcaggccgagctccatggcagacatgctgagctgcctctgtgtgtcttggctaactctgccctttccttaaccccacggctcaccctgcccagg

SEQ ID NO: 296826 - DNA, 487 bp, Homo Sapiens
gggtggtgaatttttgcactatagctttgtgagggagctggaaagagcctttcagtttttcatgactgggagtttaatttggtttataacattacttaaagataactttgaaattggtctaagaacttagggttgttcctgaccccaggtcaatggcctacttgacctaggcgagagaagaaagagttaaggatagggagttgggctttttgctccaaaatctatagagggtacacccctcttatattccggagtcttactgggtttctgaaaatgcccttgtgggtcatgaaacaatagccctttgaatatttttctgccgctgctgatgtgagctgattaaactggcaggcagatgatggaaggaatagttacatgtcccaggcgggaggtcatgacagttggatctgtggttgacagaagaatttcaacacacattcaaatcagctcctaagatagattgtctgagttccctgggcctgcctca

SEQ ID NO: 296827 - DNA, 504 bp, Homo Sapiens
atacttgagaactctgattatgaatgttttacaagcactatcactatgtctcagacatacacctctttgtgaaagagaaattgttcaaggaaagatactttcccatttgatctgccactgtttttatttctggggaaaaatatgaagtatatataaggtaatgtaagtttgatgccaaaatacttctggttttgtactgctacccttgaaggtttcagaacttttgggttttaagattctatataacattttttagatgaagtatcttctatatccaagggaattattcttgttaatagtgttctcgtttaactttggctttagagatgatgttaaaaaaagtttgttcctctcctgattctctcaagtgaaatagaatcatgattctctcaagtagaatacaatagtttctcactctgttagaatagttcttcacataattcatacaatttattgttatcccttgttagatatggcatggcacagtattattgtaataggata

SEQ ID NO: 296828 - DNA, 492 bp, Homo Sapiens
ggtcctctaggggttggctctctcatggtctttctcttctgatctgctctgccccgtcgtgggcatcttggaaccacctcagaagcaaggccacagctgtggactggtcctcgtgagagtctccctggatcctctgtacctgtaataggtacacagttacgttattatccaacctccaatccccaaaaagcctccttaatttgaaagagaaaaggtatatgtgccttgcattttgttatcggtccagattttgcatctggtggtggctggggtgccattgggattttggaatgggagcagtttgattcctccctcggaaggaactcatggctctcacaaaccagtgtctgtggcagtgacaagtcacagaatttgtgtttcaaggcttattccttcttccctttaagactttttcaacttcctgtcacttcgggctgagtctcaatttcagtcatgttttgtggcttcctttgagcacagaaacctctcctt

SEQ ID NO: 296829 - DNA, 312 bp, Homo Sapiens
tcctaaagaaatttatttgaataaaataagagttacttcaatttaaagtaaaccataaaagagtaaatagtgaaagaatgtcatgtttcccaccctaaatttggaaagaggcactccttaaatttgctctattttggggaaatacaaagggagcataatattttgataaatgggattcgttttctagaaaagccattcctgttgaatcatgttagcattttatggtaatgctaatcatggtgtatttttcattcactgtgtatttagtaggtagtaaacctggaacatcctcaaaagctggatgtgattaaa

SEQ ID NO: 296830 - DNA, 257 bp, Homo Sapiens
  misc_feature (146)..(160): n is a, c, g, or t
tcccagaggaagtgattacaaggaagaactacattgagtctaaatgtaattcttaatgaagcagtttccattttaattaaaggcaaacttgtatgtgaacatcagcatgaaagggtcagttagagtcccttcattttcagcagggnnnnnnnnnnnnnnngctatgtccttttttagtgacacagatattaaacctaaagctgaaatggccactaggtcctacagctcccaatccttcttccccaatgccatctttt

SEQ ID NO: 296831 - DNA, 352 bp, Homo Sapiens
aatgtcaaatagacactggtaagtatagattgctcctctccttgcatcacaaatgttaattcatcttgcccccacacacattaaaactcagcatatttcacaaattgagtgtttcatttctatttcaggtagacttatggtaagtcagttttgctccccaaataagttagccatatagtacttctatatgcaaaatttgaatctcaattttactactcaagcaggaagtaaaagtcatttttctatatcttctttgctcccagactgtgttacagtttacagatctgaatattgtcacttgtacaccatacatacacagaggtctaaaactctctacaagtaaataaagacg

SEQ ID NO: 296832 - DNA, 492 bp, Homo Sapiens
caagcattgagcaggacttcaaggatggataagatctgatgctgaaggaaggagaagagggtgatactctccaggagaggaagagacagtgtgaataaagagagtggagagtgggaaggaagtgtttgggaggccctgatctgaccagtcttgttgaggagagggtgcatgaggcaggctggtaggagatgagaaaaagagaattgggggtagatttaggggtcttgaaggctggcctgagaatttgataaatgacccaataggcaaaaggaggcacggaaggattgtaagtagggtcaggaggtaacattgaatgccattgcctacacccccatgtccccacctgaaagtaacatccttcgttgcgtggttttctaaacatcgggactcttcatggtttgatggctggccccagggtagttggcacttttcatttttctcccgttcctgccccaccaccatcagaaggcttggacacctccatcatcgctg

SEQ ID NO: 296833 - DNA, 527 bp, Homo Sapiens
attcttggcagtggcacatgtgttttactctcttccttgataaggtgcttatagtctttctctttgtttttttactatctttttgatattatttaattattgcctataatagttttcataaatgtggtcaccagaaagatgagtcatggaggcagtggtagtatatgaatgcatgaagggttgtgtctaggagtgacgactaaggtgatatcttgttgtaaaggatgtgtctgatacgggccaggcagacatgatatcgtctggaagggaggtttgaaggtatagaggcttggggtcctttgccatgtttgttgacatagggcttccatcaggggcttgcactttttattctacagtggatgactactagctggtcatttcgtaacccaggcttacatgtgccatcttaaaatgggttgttcctttgtgattgcatctgtagttctaatagaagatcagcttattcttgggtggactttgtggaaagaagcaggatttaactggctttcagagaaatgaagactttg

SEQ ID NO: 296834 - DNA, 516 bp, Homo Sapiens
gaggcttttcagtcacagcaccctctgtgacaaacgtgtggagcaccgcacgacttcttcaaccagctggtttttctggcattcgaataaaagtaaaaatagaaaacaaagagggagaagaaaagtgacaagctgaaacctgcgaagagaaagaggacaagaaatgaacaagttgatctggtcttgagggaggaggaggcacaggaacacagtaaaggaacctatctgaggagctgcagacatgaaccaacaaagccagaagagcctgaagcaatactgcaagtgggtgctttggtactgctttgaagcatctttccagactctgcagtagccaaggcctgtgactccagtccctgagaaagtaccatcaggagcaatacgtaagcttttcagggacaaagaaccttgtcctcttaatctggattcacaattcacaattatacccctagcctgcccaacgcctttttctcagtctctgagaagtattgactctcttttacctaagagcaggagtct

SEQ ID NO: 296835 - DNA, 530 bp, Homo Sapiens
gaaatgggttttaaattaccgccttttaacggtgaacccagctaacaggaaacttagaaatccagctgcctaagtcaactgctaaatttttaaaaagtgaaatacaatatgtaatacggttccccccgcaccccagcatcttaaacatccctctcctttaaaaatctccggagtgctaggctatactagttattaccaattgaattttcaatagccaactttccaagccctaactttgacaaattttatttcacatttgtcaaaggaaataaagctgacagcattacagggactgtgtactaaaagtagtatcacaattccagcagtctgtccaaccttttcttccctaggggagcattaaatctggacccaattcacagctttgtttgaacactatattttgccttttctttgcacctttgatatatatttcagtgttaaatctattcttcccttcatctattaccctgttttatttctgtttttgagaacctatatttttgctaataaatattcactgcaccatttca

SEQ ID NO: 296836 - DNA, 521 bp, Homo Sapiens
gtccctttggcagttggaacctgctgggctctggagctcagcagggatgtccagattgaagataggaaaagtttgggagagctgagttgggagtgtatcaatggtaggttgaaggcatggtttgggtgaggttactgcctgtattcaagttactaagaaaaccgaatctgaggcaaagctagtgttagcactttattggagggtgaagtctcagagcagcgagagtgaaggaaaggaggaaaagaaaatcaaaggttggtgttagtgagctggctcctgcctcacaaagacagctagtcacttgcccatgttggatgtctctggatggactacacagaaacaccatgactggctagaacattgtatttggattgatggaggggaaattcacctgttctgcttcctgcccatgctttactgctcaaagtttgccatggagccagtgttagctccccactttcttgctgggatgatatttcttggccactgcgaaagccagatcccatgccttgcggcatggc

SEQ ID NO: 296837 - DNA, 122 bp, Homo Sapiens
tatggggacatttttggggcaattggcaacagttgaatggggcctgtgcattatatgataatgttatggtattgatttctgattttcatgatttttatagttctgtaggagaatatctttga

SEQ ID NO: 296838 - DNA, 285 bp, Homo Sapiens
  misc_feature (88)..(88): n is a, c, g, or t
gggaaggaagtagaggaatgaactactctaataggttcctgctattgaagctagctcttgcttacactaactcatctatacacagggnagcagttggagcatctctagaagcataattctaggtagttcttgtaaaacattgtgtaattcaaattttttagcttgaacatgtgggagcctgccagttcaggtacagacattcaactgtgtcttggcataacctgtgatattaagtgcatttgatttttctttctcaggtaagccaaagcttaaatgtctttgttt

SEQ ID NO: 296839 - DNA, 338 bp, Homo Sapiens
gtttccggttttgaaacttctagataagtagcttactctccatgtctttctggacactgttcttcatgttctcttcatgttcttcatgttcacctctgtcttcatcttgtgcaagtgaggattaacccgtctgtctttccttcttgggcagggggtggggatggaagggttgagggaacagtttccaagggtggtgtagtcagctgcatgtgaagaatagttttatttaagactcagtgcagaattactccttctccacgataatttaaagttcccctctttgtaaaacaactcctacgggtgacaggagggaggcggagtgtgggagttggcagagc

SEQ ID NO: 296840 - DNA, 479 bp, Homo Sapiens
caaaacaacatgagtaacttttcctgcagtggggctctttttaggtaaagtgcactttccttgtcctcaagaggcagggaaagtatagctaaagtagtgatcttcagctgctaacaattaaagaaaaagcagtatgctaaggatactggtaagggacataatggtatttcttttccaagactatagtcttacatgttgattcatatgaaaggaaagtccaagggaatgtgaatgagcaatccaaaaataaactagcttcggtaggtgaaggtgagtgtacgtggtttaagtttgatacagcctttattatagtccttccctcggtgtatcgcacacttctaggttctcattaaatattactaaaataagtaattcagagtatgataagctttgttcaggataagtgctgtaaactctacccaccaggatcacttcctctctatctataatccaacagttatttttgggttatggaccta

SEQ ID NO: 296841 - DNA, 537 bp, Homo Sapiens
gaaagcagagtagcagcaatgggaaactgactaacttggaatgatggtcactgcaaatgtattgtctggaaatggtagcacttccgtttgcccacatatatggtagtaacttggcaagtttaccaaatactgtgtttcagtcagaattcctagtaaaatactgatttacagttctctagagtacctttaataacactcttagtaggtcactaataggtggatgtcagttacatgtgaaaatggaagcctatgggatggtttaaggaagagtcaaaggaaagccttgcattcgttttgatttatttgaagcccacctatcagtggggcctcagacaatatttacttgggaaatcttcagtttagtacagttagttacaaaatagtctcccttccttgggaactctgcgactctttaaacttctgaattctgtatgtggttgaaaaatggtttatcttgttgaggattagggagtgtcaggaacaaatttggtcagatgcttctattatgtctctccacagaggagtagttttaacctt

SEQ ID NO: 296842 - DNA, 461 bp, Homo Sapiens
  misc_feature (189)..(189): n is a, c, g, or t
  misc_feature (207)..(207): n is a, c, g, or t
  misc_feature (272)..(272): n is a, c, g, or t
  misc_feature (312)..(312): n is a, c, g, or t
  misc_feature (315)..(316): n is a, c, g, or t
  misc_feature (391)..(391): n is a, c, g, or t
  misc_feature (439)..(439): n is a, c, g, or t
ggggagttggtttgttaagatgggaaatgagtcagttttcagggtcctgagaaaattgcttcattcatggctgtgtttgagataactaaagtaaattttttttcaggtatttggtgtcatgttttggagttaatatttagtgcttatataattttaagttattacataatttttattggtatatatttnataggtactaggtattgnattctcaccaaaccagtagaatggtattctctcttaatatgtgattgcctgtaatggccaggtanatataccttaaagtaatatgaaaggttttatatgtatatnaanntgtttgtacttttaaatctgtaaaggttatctggaatttttactgtgttaacttcagaattatatgggcattatnactttttcattgtacaaaaaattattcataaatgttagaatacagatnttccttgacttacgatagggtt

SEQ ID NO: 296843 - DNA, 680 bp, Homo Sapiens
  misc_feature (93)..(111): n is a, c, g, or t
  misc_feature (464)..(472): n is a, c, g, or t
  misc_feature (632)..(632): n is a, c, g, or t
gtgctaagtaaacatttcaccatggttcactttgtacaaaatgagaatctttactgaagcatcccagccaaacataagaatgtactttacaannnnnnnnnnnnnnnnnnnaagcctaaagtccctggaagaggctggcaaactggcttgagaaacacttcactgggcatagagctactgaagctgctcctagtccgtgtgttgatttcactcctataagttggtggctactctgaaatagttttcaaaatttttattgtaaaataaaaggcagttacaggagaactatacaaaagaaacctatggcttaatgaactattatagggcgaactattttgaaatcatgaaataggtccagacgcagatgtttaccctgaatcctggaaagccgtgtgacccatctcagtgctaacctccggcctctctctaaacatacccattcctttggcttttatagtaatcannnnnnnnngcgtttaaaaataattttattgtccaaatgtgccaccttggacacaatatttaagtcttgtccatttatttttaaatttgataagtctttaaaatcttagtctgtaggctcctcttgcttccttttcttcatgacttatctgttgaagaacttgggtgtntgacttacagagtcttaccccagtcttgacttagctcactgcatggcg

SEQ ID NO: 296844 - DNA, 612 bp, Homo Sapiens
  misc_feature (56)..(324): n is a, c, g, or t
  misc_feature (598)..(598): n is a, c, g, or t
acgggcccgggggaggtaagacttaaagctgcagacacttctgttggtggctttgnnnnnnnnnnnnnnnnnnnnnnnnnnnnnnnnnnnnnnnnnnnnnnnnnnnnnnnnnnnnnnnnnnnnnnnnnnnnnnnnnnnnnnnnnnnnnnnnnnnnnnnnnnnnnnnnnnnnnnnnnnnnnnnnnnnnnnnnnnnnnnnnnnnnnnnnnnnnnnnnnnnnnnnnnnnnnnnnnnnnnnnnnnnnnnnnnnnnnnnnnnnnnnnnnnnnnnnnnnnnnnnnnnnnnnnnnnnnnnnnnnnnnnnnnnnnnnnnnnnnnnnnnnnnncaactcaaacccttgccctgtctcatctgtcagtgatttcttcctcagtggcacatatccctagtcactacttatgagagttttaaccattggaatgcccaccttgtgccaggggctgtttgtactccacctatcaccagaaatagagtccttgttaccagttcttgggggcaggctaactcactgcagctgtgtcaaaccgtgaattagctgaaagctcaagtctggctgctgacccctggggacaccttgtccttccatgagagagaactgngcttctcatcttct

SEQ ID NO: 296845 - DNA, 444 bp, Homo Sapiens
gcatgggatcgggaggaaggcagtgatagaatcctagattgtgtgttggcaagggctttagaaatcaccctattcaacctcccactcgcaggaatcccttcaacagcttttatttaacttattaatagcttttctcttgatttaaactgttcccaaaaataaatattgggtgggtgatccaaggagtagtttgagagttgatattaccaggaatatcgtaatgaacaggcctcttcttaagcactcagaatttggctggactcgtgagcgtccatgttgcactttgtccttcccatctgagttttgttatcttgctactgactgcaaccccgccatggagacagcactcagagttttcacaggggcttggtgaagcctcaagcccataacagaccaccataaggactccatgctccctaaatgcattacacagttccaaggatg

SEQ ID NO: 296846 - DNA, 479 bp, Homo Sapiens
  misc_feature (421)..(421): n is a, c, g, or t
  misc_feature (440)..(440): n is a, c, g, or t
ttgggaaatgacaccgaaagcagtatttttatccaaaggattctaattagaaacagttgaatggatacgcacaccagaatgatcttctaaattgtacaatctgctgtctcgtggctatctatgcccatgcctcagtcagcaatgccccatgtgctgcttgcaattttacagtttctacctccagaaacttcacatctatctccttttggtgaacgaataaaacaccagttttctttttctgctatttcattcagagcagagttgcaggagaagtcgacttctgtatttcccttaacagttgctttgaggactatagggaagaatagagtaagactcctaaagattggaatctggtatgaatttgtgatgaggttgtgacataaaaagcataatacaatatatgacaagaaatggttagatnacagaactctagggagatntttagcaaggagattttaggacctgacatcctagtggta

SEQ ID NO: 296847 - DNA, 574 bp, Homo Sapiens
  misc_feature (54)..(135): n is a, c, g, or t
  misc_feature (163)..(256): n is a, c, g, or t
catgtgatttccaaggccagtccatagacaagatagcttcaacctcgtccttcnnnnnnnnnnnnnnnnnnnnnnnnnnnnnnnnnnnnnnnnnnnnnnnnnnnnnnnnnnnnnnnnnnnnnnnnnnnnnnnnnntcacttactagccatgcaagtgagacgnnnnnnnnnnnnnnnnnnnnnnnnnnnnnnnnnnnnnnnnnnnnnnnnnnnnnnnnnnnnnnnnnnnnnnnnnnnnnnnnnnnnnnnnnnnnnnagtaggagtggggctggctttcccttggaagcatgggcatgtgaatgcacgtaagtcaggtgtggcttgagaaaagagcttactgcttgcttctcagtattgtttaaaaaacacagtgagacatactgcacttttagaaatggaagcatgtggttcataataagcgtgggtatactgagttggctattctaccaaatgaattaggttgaaaatgttaatctttttgagcagatacattctcacacaacacaggtacaggtatacacttctttctgggactaggaactcaggatattcctgctactaggtctttttctg

SEQ ID NO: 296848 - DNA, 451 bp, Homo Sapiens
  misc_feature (112)..(112): n is a, c, g, or t
  misc_feature (115)..(115): n is a, c, g, or t
gaagtgaagagtttctgttgctaattccagtttaagttcttttctgtctcataatctgatttcccctttctctaatagttttattttatataggcacatgaaagatacgttnatnatgtcctctagatgtagacatttccatttcttttttctttttgaatcttactcaagtggcccgagttgtttcccaagtctgctgttcagtttctccttgttgccatcccttgagactcaactgcctgaaaagtaagagaaacccaggctaacctcaaggaaacaccagagaaaacataggcacaacattcgttgtattagtctgttctcatactcctttaaagaactacctgagaccgggtaatttatgaagaaaagaagtttaatcgactcaagagttctgcagactgtacaagaagcatggctgtggaggcctcagaaagcttacaatcatggc

SEQ ID NO: 296849 - DNA, 311 bp, Homo Sapiens
ggtttaaaaaaagaggggaggtgggtgtacaagagaatgtgctcttgggtgtcttgtgttgtggtggtttggaattcacaaaattgtctagaatcactggtgatacttgtaggttttccagatgtttcaaattacagagccaacccgttttttcctccttctattagtatactcatcttctaattttcttacagttttatcacactccaaagaaagtgattcctggacagatatccataaatctgagagagcaaatttccccactagttcccccacaacatattttaccttctctccttgacttatctatc

SEQ ID NO: 296850 - DNA, 686 bp, Homo Sapiens
  misc_feature (205)..(272): n is a, c, g, or t
cacccaaaggttactagaaggcagaggggcaaagttagacttccctgcccactgtgacaacccctctaagctctaaccatcccctcttcagaggtggcttagtggtgacctatctgtgctgcctaggcccccagtgctcttagccctctatggtgggttcttttcattgtttgggggctccgtcagggtagatatcacaactcannnnnnnnnnnnnnnnnnnnnnnnnnnnnnnnnnnnnnnnnnnnnnnnnnnnnnnnnnnnnnnnnnnngcgggtttttaaacctccccaataaagaggcagtgtcagtggcccagcaccacctgattctctaaacgaggcatggaagggagctgttgaactttccttgcctgctgtgggtgtccagcaaggtgtcaagaatgaactagggagtgcaggcttcagaggaagtgaatctttgttgttgttttgggtgtcaaccaggaagtgaaactgactagctgtgggaagcagcctacctataggagtgtgcctctgagtgaaggtaaacagtggtgtgggcagctgagccagggctacgcctgcaggtgatggcctagtggggctgtgacccatctggcttgactgggaggaggaagcagtgtcttctgtggtgacatcctctctgcacagacaagagtcacccagtccagcaggctgaga

SEQ ID NO: 296851 - DNA, 596 bp, Homo Sapiens
  misc_feature (533)..(533): n is a, c, g, or t
  misc_feature (581)..(581): n is a, c, g, or t
ggagtcctttccccagtgcttgttttttgtcggctttgttcaagattggatgattgtagttatgcagccctacttctgggttctttattctgttccattggtctatgtgtctgattttgtggcagccccgtgctgttttggttactgtagccctgtagtatagtttgaaatcgggtaacatgatgcttctagccttgttctttttgcttagatttgccttggttattctggcccttttttggttccatatgaattttaaaatgttttttctagtttttgaagaacgtcattgatagtctgataggaatagcattaaatctataaatttctttgggcaatatggccattttaacaatattgatacttctctgataagcatggaatgttttttccatttgtttgtgtcatctctgatttctttgagcagtgttttgtaattctcattgtagacctctttcaccttcctggttagctgtattcctaggtatctctttctttttttggcaattgtgaatggaactgcattcctgatntggctttcagcttggctgttgttggtgtatgggaatgctagtggtgtntgtatgttgatattg

SEQ ID NO: 296852 - DNA, 617 bp, Homo Sapiens
  misc_feature (549)..(549): n is a, c, g, or t
  misc_feature (565)..(565): n is a, c, g, or t
  misc_feature (579)..(579): n is a, c, g, or t
gattcgtggctaaactgcacatgtttattttctcggagttctgaggttggaggttggaaatgggttccgcagggccaggctcctccagaggatcctccttgcctttccagctactgcagctgtggtccttgcgtttcttggcttgaggcccttcatcttcaaggccagtggagtggcattttgctttattctttgcattgctttttcccgtgagatctccccctccctccctcttagaaggatacctgtgattacatttagggtcaactggaacaatccaggataatctcccatctcaagagcctgaatctaatcgtgctgcacagtcccttttgccatgtaaggggcattcacaggtcccagggattatgacccaggtatctttggagcacttgctcagccaaccccagccccaaatgtaaaggcatgcacagtggagagccgcttaattcagcatctcctcacagggcctccagtaggcacctccttccctctcccatctgctccaggaaatgtccgctccagcttctccccttccttgttccgtgngttccactcactgctncagtgagtcactgngactgtcttagaatgctggcattctctgactgggacat

SEQ ID NO: 296853 - DNA, 571 bp, Homo Sapiens
  misc_feature (64)..(78): n is a, c, g, or t
  misc_feature (376)..(387): n is a, c, g, or t
caagtctttaattcctttcagaaaatccttttctttgacactactagaaacatgcctatgtttnnnnnnnnnnnnnnntaggacccatgtctggctcccctggcagcagcaactttagtggcaggatctcacatgtcgggtagccaacaaggaccctggtcaatgtttggaactgacctcaccttctgcatccatttttatcgactacagaactttacttcctgtgtgaaatgcaggcttatctctgtctctctggaaacttgacgagcacaagcactctggcttccttcacccctaacatttccattgtcccggttgatgcttccttgctgttaccctttactacctcacaccagatcgactaagcagtttatcnnnnnnnnnnnncctgagtttggcgtctcaggtgccactataggaatagctggcataattattgcctcctcaacttaccaaaacctgtctctggaactgactcacaaaataaaaactactgctcagactcttacagagtgacaccaacaagttgattatctcgtggctgtagtctgaaattgtagaggtcttgctg

SEQ ID NO: 296854 - DNA, 271 bp, Homo Sapiens
gggtgaggaataggaggggacaggaagagaaatacttgatgagcagttgtcataggaagtgcagttagtaactgttaagctatccggactcagccaattggttccaaactctactgataggtctactgctccctcttctatcctttagtcattcttacagggttgtttcaaagatcagatgagatagtatataacgtgcttactacattgctgtaggtgctcaagttttaccacccaccccctcagacatttacttaaaatatattctggg

SEQ ID NO: 296855 - DNA, 664 bp, Homo Sapiens
  misc_feature (73)..(308): n is a, c, g, or t
  misc_feature (520)..(520): n is a, c, g, or t
atcctaacacatgtacttctaaatgtgtttgaagtttgagtcttactaacttatgtagaattcacatattttnnnnnnnnnnnnnnnnnnnnnnnnnnnnnnnnnnnnnnnnnnnnnnnnnnnnnnnnnnnnnnnnnnnnnnnnnnnnnnnnnnnnnnnnnnnnnnnnnnnnnnnnnnnnnnnnnnnnnnnnnnnnnnnnnnnnnnnnnnnnnnnnnnnnnnnnnnnnnnnnnnnnnnnnnnnnnnnnnnnnnnnnnnnnnnnnnnnnnnnnnnnnnnnnnnnnnnnnnnnnnnnnnnnnnnnnnnnnatttttcgcacaaaaaccttaaatattacagtgcagtggttagcaactctgaaagtttgtttgtttctaacaaccaccacctgttaaaggcatgatttaatctctttaagactcagagtagataattacagtaccaagctcatgcctgtccaggatcttatcatgccttatcatctctacctatatcattcacatccactgtctctcatgtntactactatcataatcccctgtactcagtcttgctcttctacagtctattgttcacatggaagtcagaattatcttttaaaaacatcttaatcaattgatatgactctcctatgcagaatccaccaatgactgcctgtaatagt

SEQ ID NO: 296856 - DNA, 524 bp, Homo Sapiens
gggcaattggaagtctcctgcaatcatctgagtaagagctaatccaagcttggaccagcataaacagtgagaatttgtgaaattctagatacagctgatgagcactgatgaatgaatccaactgggagcatgaaagaagagccagattcaaggatggctccaaggttttggcctgaaccaccacaagcttgttgctatcatttagcaagaggcaggggaagatcacatacacatggtttagtctgaaacataaagtgttattacacaccctcaattatccttcaggccacgtcttctcccatgttgcagaattagcacattcacttactgccatttcctgcctatgaggagttaaatggtatttttttcttcaagaaatattccacagtagttgtttaacatgttagagacagattgaagaaagagttaaaatagtattcataaatgaatttaatctgtatcgtagtctgaaagattgtttcaaggccaaggcccaatactcttctatattaaattatctcaag

SEQ ID NO: 296857 - DNA, 426 bp, Homo Sapiens
ggagagcaccgagggggagccagcagtgagtgcactggggagctccacacacgcggctccgcagctttgcgcgcccctctaccgcgagcggctgagtatccgcctggctcccctgcggggttcctccgtggtcttccggagattctttctgaagcagctttagaatagtcaagcctatttttctactccatttctttttgtaatgtggggtcacctttccgctctagaaattgcttttcttacgcgattcccaccccaactctcgccaagggccctggttctcatctccccagtcttagcttctgacaagcctccaagaaactgcgcttttttcttttctggagatgcagagtatgaaaatgattttgcaagacttttccaggtcatgaggtgctctctgagaaatctcttctgttccctaaagta

SEQ ID NO: 296858 - DNA, 273 bp, Homo Sapiens
gcctgagcaaccaggtgaatgtaatattaattgaagggataggggaacacttggggaggaaaaggtttggtgtgagggagaaatcaagaattctgtttgcttttcgtttgggacatccagatggagatcttagttaagcagttaattataaaagtctcaaactcagaggctggatcatcttagtatgtaagtagtagttataatcatggggcgatagaaaatttcctatgcattaatacagattgagaagaggattgaagactgagccttgag

SEQ ID NO: 296859 - DNA, 390 bp, Homo Sapiens
gcaggtggctgaggaaggacccagagtgacttgctggagccttagtcaccaaacgctcttgcagcttagtgggaaaggtgttcattgtaaaatacggtatttacacaaaatgcacaaaaatacgtatgtacagtttaataagttactgtaaggaaaacatccatgtcacccccaactgagtccaagttggttgctttagtttcatcatcacagtgacaccttagaatagtcctgagggtatgtgcttagttcacactttactgatgaggaaattgttgccgctccgagagtttaaaagtatttgctgatggtgccatgacttttaaacgatggcctgctgactctagaggctggtcctgcctaaccagttaatggcatgtgactggggaa

SEQ ID NO: 296860 - DNA, 394 bp, Homo Sapiens
tcttgggagcctttctaaacaggcagaggggcattgtgagtccagcaatgagagttatagttggagtaaatatcttgtaaaagttgttttgctacccactttgaatacagaaatggtttcaagttgattgtgtatcatgttaactggaaagttattttcatgattggcagaaaaatttagacatgataatacagatatctacaatattaaccttttaaaatgtagattattttgaatgaggagaaaagttgctaaataaataaaatcacaaattacaactttatagtcattttaaattgttatctgtgattgtgtggtctacataagctctacatattttaaatgggcatatattactgtaattgcatatttcccccaaatggaaaactatatt

SEQ ID NO: 296861 - DNA, 506 bp, Homo Sapiens
  misc_feature (60)..(85): n is a, c, g, or t
  misc_feature (457)..(457): n is a, c, g, or t
gaaatagaattccactttgacaagatctcacagcgtcagtgcctcatagggtatttctcnnnnnnnnnnnnnnnnnnnnnnnnnngcaggtacacagtaggtgtatatatttatggactacatgagatacaggcatgcaatgcataataatcacatcatggaaaattgggtattcatcacctcaagcatttatcctttgtgttacagataatccacttctactcttttacttattttaaagtgtacaattaaactatgattgactatagtctccttgttgtgctgtcacatactaggtcttattcattccttctatttttttgtacccattaactatccccacctccccactgcagttcccagcctctggtaaccatccttctactctgtttccatgagctcaaatgttttgatttttagatcccacaaataagtgagaacacgtgatgtttgtgtntctgtgcctggcttatttcacttaatataatgacctccagtttgatcca

SEQ ID NO: 296862 - DNA, 475 bp, Homo Sapiens
  misc_feature (183)..(402): n is a, c, g, or t
aggctaaagttgcatttactgagatgagtaaaactgttaagaggaataggttttgggtaaggattaaaagtttggttttagatatgttaagtgtgaggtgcttattaagcatatatgtggagatgtttagtaagcagttggatatatgtatctgtaattccagggtaagatgtagtctagagnnnnnnnnnnnnnnnnnnnnnnnnnnnnnnnnnnnnnnnnnnnnnnnnnnnnnnnnnnnnnnnnnnnnnnnnnnnnnnnnnnnnnnnnnnnnnnnnnnnnnnnnnnnnnnnnnnnnnnnnnnnnnnnnnnnnnnnnnnnnnnnnnnnnnnnnnnnnnnnnnnnnnnnnnnnnnnnnnnnnnnnnnnnnnnnnnnnnnnnnnnnnnnnnnnnnnnnnnnnntaaggaagcggtgaggtcctgtgctacctaccccgggtgctacgcttttccacagatttttacaatccatgga

SEQ ID NO: 296863 - DNA, 410 bp, Homo Sapiens
aactacacccttctctttttcctctctacaactgaatggtctttctccctgatataagaatcttctagatcactcccatccactgcattcttcttggtcttctgttatcactcttcttactcatcttactagcttttaacttgactacgttttcctttacttggtttctgccttggacttccacaagcttcaccctaataatcatgcagccttgaaaaacatggaggaaggaaaacgctgtcacctgccatcttgtacctgtttaaagctccactgttttcagtgtttaaactatgaagaaaggctccgatgatttaagctgtatagtcaaaactacagtgtcttctaggaatctaggattgagacaagatgtaaaaagaggaacatgtaatatattattttaccccact

SEQ ID NO: 296864 - DNA, 528 bp, Homo Sapiens
  misc_feature (348)..(398): n is a, c, g, or t
gtgattacattgggttcacccgaaacatcgggataatatcacatctcaaaattttaaatttaatcacaccagcaaagcctctttgaccgtgtaaggtaatatgcttacaggttctggagattaggatgtggatatattagggccattgctctgcctgccacatcatttgaccacagcttttttgtcatgagtacctggtgggaattaaaatgcccagtctgcaagtactctcaatttggaaaccgcagttttcttgattaatcccgtaagtggcaaagtgacttaaataaggggataaaagaggcatcatgtacctgctgtcatgatcatcacttgcctctttccaannnnnnnnnnnnnnnnnnnnnnnnnnnnnnnnnnnnnnnnnnnnnnnnnnnctccctgttgagatagtagtctttctgtgcacataatagaagatattagcccattctctgtcacttgttataagccgtttaactgtgaagaatttttgacaggtcaggagattctggaaatttcttcccc

SEQ ID NO: 296865 - DNA, 518 bp, Homo Sapiens
gccctcggtaaaataactctggggtcaaaagggaactataaactgacatggttgcatttcttcaaaaataaataataatgaaaataatgcatccattaaatatgaagagaaggaatgataaagagagagtgtggagtgtgcagtcagctagacccacagtggaatcttagttctaccccttatatgtgaatttaagcaagaatctcatttaattcaaataaccatcataggtagcgggaactcctctctactttatagacagtgatgcttagctgagaaatgagagttgaagcaaacggtagatctcggattcaaacccaagcctagccgaccccaagcccaatttctgaatcatcacacacactgcctctaacttcagcacctagcagagcagctcgcctgaactataagcaccttggccaggagttaatggtgtcctgggagctaaaacctgagaaccaatgacaaatgccacagcatcttggggctaatcccctcagttggtgacacacaggtgc

SEQ ID NO: 296866 - DNA, 362 bp, Homo Sapiens
ccgggagtaacagcctcatttgcctgtacaataacttataatacagtatttcataggtacattgtatgtgcacaggaaatttttctttaaatctggaggagcctttaataaacgggatattttaatattttaatgttactacatttaaaaaatagtgttttcctacaaaattttctgtattcagtatacgttaactatgaaaatgtcaaacaatgaaatcattgaaatatatttaaggaaaaattaccaaccaaaagtaatgagtaccctctatgtgcatatttactggaatgtgcatgtgaaatggtaacatttccaataacagcattttgaatctggggtgacacaaacatgatttttat

SEQ ID NO: 296867 - DNA, 177 bp, Homo Sapiens
gaagctgttttggaagcagaaagaagtgagttcaatttgggacacattcattttgaaacgactcagggacactgaagcagatgaaaaggtccagaaagcaataccgtatgttcttcttatcctcaaggaggtgtgggtggttcagaagccataggagagtatatattattgcctata

SEQ ID NO: 296868 - DNA, 537 bp, Homo Sapiens
  misc_feature (42)..(190): n is a, c, g, or t
caccttagtctctgctgttctacacatgaagtctggaattcnnnnnnnnnnnnnnnnnnnnnnnnnnnnnnnnnnnnnnnnnnnnnnnnnnnnnnnnnnnnnnnnnnnnnnnnnnnnnnnnnnnnnnnnnnnnnnnnnnnnnnnnnnnnnnnnnnnnnnnnnnnnnnnnnnnnnnnnnnnnnnnnnnnnnggaaaagtatgagatgcccccaaaaatataagacaaacacgcctgccatcaagagacaaagcagagaaagacccaagggcaacccagatgttgggactatcagagatggagtggaaataaccaagattaatatgacctaaaggcattgacagcaaaggtagacaacaaacatgaacagatgagggatttcagcagagagttggacactaagaaagagtcaagtgaatgccccccagaggcctatctgtgacctcaaatagccaaggaaaaaaatcagtgaatttaaagacaggtctatagaaagtacccaaaatgaagcacaaagactacaaagaagtgggaaaaaa

SEQ ID NO: 296869 - DNA, 322 bp, Homo Sapiens
gaaatacagattgcgtttctgaaacatagttacagcttttgcatgatgacagagctttacttcagattcttctaatttacagttaacccttgaacaacaggaagccaaccacctgtgcagtcaaaaatccgtatataactttacttcccaaaaacttaagtactaatagcttactgttaactggaaacctaacctataagataaacagttgattaacacatattttgtgtgatatatgtattatatactctattcttacaataaagtaagatagagaaaaaatgttattaagaaaatcatgagcgaaaatatatttactatt

SEQ ID NO: 296870 - DNA, 655 bp, Homo Sapiens
  misc_feature (619)..(620): n is a, c, g, or t
cagttagggagcagtgtgtcttactcattgttgagtcaccagtcctaattagtcttaacatgcagctgggaagcatatttgtggcgtaagaatatgaaggggaagggagctggttggattcaatacctgccccttagtactctttgtccccactgttttattttccatttctgtgtggagaaagaagagaaaagggatacgaatgagaaggaagtacgtatatgatttgtttcagaatatgttttgtgtacatgatggtggtgaagttaggtttagattttacaggggaagaaatggcatttggaagcgattgagggaacattttgataggactttgagagaggatacaggtagagaggtgactgaagagcatgacatttggaagtcagtcttgatatagccagagagttgcgttttccttgaatgcttgcatgcgtgctagggctgtgagcccacataggccagaattttgcaataactttcagattccatggggcatctacctctgcctgctgaaataattagttaccatccatgaattggtgttccagttctctttagttttcagggcaaagtttccagacattacctgagtaaaaccagcttatattatcacgtnntcagagcatagtctagtggtcaagagtacggactc

SEQ ID NO: 296871 - DNA, 181 bp, Homo Sapiens
cttaagatggtagataccttttggcgttgattagaaatgcagaactacatgttaatttaactccagcacctagcagaaacggccgcttctgcttgagtctcagatgatatatatcacatagttggagtaagtaccattaaaaacctgtcactccgagccattcccctaggatctgtggact

SEQ ID NO: 296872 - DNA, 505 bp, Homo Sapiens
atttcagaaaaggctagcacatgtaattgaagttatataggcatttgcagacttgactacctgaggtgtatggtgttcagacaagtttccagaagccaaagaatcaaaacaataatgaccttttttaatgctatgaaaatatcccaaatgtacgtaaagcagatttttttcagagattaaattatagagaagaaaagataagcaaatttccctgtagtattccggctttcctttggacaactgaatgctaacaatttatttgggaattgtatttttaaaaaatagagcaccagattgctattgaggtcttggatctttgccagaaagtctcaattccaatcgctgtggaaaacaattccctcaggcagcggtgacgtgtgagactaaatgtgttgcagttagcgccaacttgaaaaacatacaactgccctaatgttcaaggcatagtgcctttgtgttcaataatccttaagaatggattaaatcaatactttctatagacata

SEQ ID NO: 296873 - DNA, 452 bp, Homo Sapiens
ggaatctgaacaattaaagcttcattctagtgaactgatatagtatatagctgactgtaaaccatttacatttcaatgtttgtactagtttttatcagggactaggatgcctagtacttctttataaagcaaaaggacttggcgacaacctattaacatttaaaaaatactatatgactactttgaggtccttgaggtccatggtagaggtttcccctcatgaatgcaaaaatctgatatttaactccattatttaatcaaaatttgtcctatttcttatttaacatgtaaactatagttataattgtactgaagtgataagagatttagacagacaaagcttttgtgccctagcttccaccccagaataatatatctagtgcacattttatttgtggacagttaatacaccacagttccaacacatttgtttgacactgcttagtaacagg

SEQ ID NO: 296874 - DNA, 392 bp, Homo Sapiens
gacttaggtggaacgtaatacaaaacacatagtactgatgaggacaatcctgtgaaaggacggagagagtcaaccacagatactagatcaaagaaaagtacataaatatactgtaagcgcgtagcagaaaagaccaagggaaataaacagatttctttggtatcataaggctttggaggaaaaaatggcttgcagattttaagagcagaaacatcaccaggttaaaaggagggatccttacacacgtagtcttagcacagacagcagttagatttgtctggcgtggcaacaggtggaattgaagaggaaaaataatagcttataatggttagaccaacaattttgaacctgaaaatatgaatcaaatttaagttctggcaccccttagtttt

SEQ ID NO: 296875 - DNA, 573 bp, Homo Sapiens
tctccatgaggtgaactgttcaaaatactttgtgaataagcttaaccagtactgtcatcaaagagtatttttaagcattgaataatagctattattacacctatatgcttaatttgaacctattaattaatggtcatttcctgtttcccagtcactagtttatatcacgttttatgaaatcagttttttgtagataaattagtctaaaagcacattatctgcaggtaagtcgtttggctttagccagttaaataaagcctgactttattaaagctgttcatttaattagaatgaatttgttggttcggtagttacttatcaggagaaatatggccagtggtagagcaggtttttgtctttgaaaagctttcatagtatagacattttaacaaggtaattgaggaatcagttttcaaattttcttctggccttttctatttactgataattcattgctgtgaaggtattttattatttgatctatttattagtgcaacaaatagtttttgagtgcatactgtttgtaaaacaggagctatgagaacagggacaatgaatcaggtataaattatg

SEQ ID NO: 296876 - DNA, 399 bp, Homo Sapiens
  misc_feature (93)..(191): n is a, c, g, or t
  misc_feature (207)..(334): n is a, c, g, or t
gggaggttcctgaacacaaaacttttgtttcctctcccagtgagaggaaacccccgttgccatcacatcagtgtgttcagcagcttggtgttnnnnnnnnnnnnnnnnnnnnnnnnnnnnnnnnnnnnnnnnnnnnnnnnnnnnnnnnnnnnnnnnnnnnnnnnnnnnnnnnnnnnnnnnnnnnnnnnnnngtgcgcgccaccacannnnnnnnnnnnnnnnnnnnnnnnnnnnnnnnnnnnnnnnnnnnnnnnnnnnnnnnnnnnnnnnnnnnnnnnnnnnnnnnnnnnnnnnnnnnnnnnnnnnnnnnnnnnnnnnnnnnnnnnnnnnnnnnactgtgcctggccagatttctgtagctttataataagtattgaaattgggtactgtgagtcttcc

SEQ ID NO: 296877 - DNA, 613 bp, Homo Sapiens
cggccgggggtctttacaaacacagacccatgcaaaaggcccaactatcaccttcaacaacaatgcaatggccttccatggccttacagtagggccaagtcagcaaggacctaaacagcctccagtgtgactttgtcacagttcgcgcacctggttgttaatggccttcacctgacataaagcaaattgcctgtcacggatcatctgagcaaaagaagtcaaggaaattcaagtaaaaggaggaaaaatgtatgcatatgtaaatgcttactccaaagtcacctcatctaaagctcttgctcagaaagcaagtcagaatcttcactcctgtgcagcattaccgaatggaaaacacgctaagagtcatcaataaagtcagccccgtgtagccttcccactggagaaatgacaacctgaggtcctgcctccagcgctaggatgtacctgtgatgtggcttctaccttggactctgtccacggcctggaacaacctggactcaccagtgtgcaccatagcaggagcccaagcaggcttagctcaaagctccatgtttattgcatgaagcccttaaaaagtatttgttatcggaaggctttgcccagagctttggag

SEQ ID NO: 296878 - DNA, 177 bp, Homo Sapiens
cccaccatagcctattttctccttcctccttggcatggttcatgattccagtaagtccagattcatcaccccgacagtgtccctacaaaacagtctacttcctttcttgggtacagaaagaaatagggcacagaagtgttaagaaacaagcaaaccacttctacacagctctggcag

SEQ ID NO: 296879 - DNA, 439 bp, Homo Sapiens
tactcttctgaactgagggttagagctacttactctataacagcctggatatattcactcagcagcgcttgggttgtagatctaattaattagccattaaatttttttcccctgaaggaaactaacttctgaaactaatctcagtctctctttcccctgcctcattgaaatgattgtttaatgatgagatttctcaggaatactactatcatactctagcaaagtatattttattaagtgatgaggttctgaaaaagacctgaagactgaaaattgaatgaaatggacatgaaaggcatttcagaggaaaaataattacagatgaaatttaatagttgtttaaacagaagaaattggagtgaaactaatataggagaatggcttttaaactttttttgatggaactctggttctcaaatgaaatcctacatggtatcaa

SEQ ID NO: 296880 - DNA, 277 bp, Homo Sapiens
gtgagtaaatgcagtaattctctgtgtttcagggtctgagagggagggataagactttaactgtgacctattccttcttaaccttcaaagactgtcaaccttctcattactctctttaccatgatttcagttaaacaataacatcactttcaatcatgtttccactgcttttcatttgcctgctaaatggatgataatgtaaagtatgaacacgtcttttcaaacaaaatggggtcccagaggcacagaacttataaatgtaaaaagaacttttaga

SEQ ID NO: 296881 - DNA, 408 bp, Homo Sapiens
gtcctcccaggctaattggaccaatgagatcaattataccaatcacatttctcttccattctgctttgccaccattacccctgcaccttttcctgtttgtaaaagggccctgaatgtggctagattcaaaactctgttgacccatcatttcccaggctaataggaaaatgaacagggctgcaattcttttatccattgctcagctgatgccaagggaatggaaaggaactctacagctgcaccctaaatactaggtgacaatcctgcagatatttaggttaataactttctctctacctgctggcaggtctggggaagctctgcctgcagggacaggtctcagagccatttccaggagatgaagacttcagattctctaccaattcatagcattttgggaccaaggaa

SEQ ID NO: 296882 - DNA, 517 bp, Homo Sapiens
  misc_feature (97)..(105): n is a, c, g, or t
  misc_feature (108)..(453): n is a, c, g, or t
gcatgaaaaaactttgacttgtggattacattaattattagtaacagttagattctgccgacttgtattacagtagggtcttatttccttaaagagnnnnnnnnntannnnnnnnnnnnnnnnnnnnnnnnnnnnnnnnnnnnnnnnnnnnnnnnnnnnnnnnnnnnnnnnnnnnnnnnnnnnnnnnnnnnnnnnnnnnnnnnnnnnnnnnnnnnnnnnnnnnnnnnnnnnnnnnnnnnnnnnnnnnnnnnnnnnnnnnnnnnnnnnnnnnnnnnnnnnnnnnnnnnnnnnnnnnnnnnnnnnnnnnnnnnnnnnnnnnnnnnnnnnnnnnnnnnnnnnnnnnnnnnnnnnnnnnnnnnnnnnnnnnnnnnnnnnnnnnnnnnnnnnnnnnnnnnnnnnnnnnnnnnnnnnnnnnnnnnnnnnnnnnnnnnnnnnnnnnnnnnnnnnnnnnnntatataatcaacaaacaactctactttcttgttttcgtttgttgtgtttttgctttacacattt

SEQ ID NO: 296883 - DNA, 117 bp, Homo Sapiens
gttcttttagaaacaaaaaacaactaaatgcatccaagttaataatggaaaagtttatttactcgatacaatgtaatattataaatctagcaggtaatttagaggaaaagcgtcttc

SEQ ID NO: 296884 - DNA, 348 bp, Homo Sapiens
gtagatattatacaggcaaagaagaacagagggatagagctgtgaaggtacagattttgagctttaagcacatctagggggcttagtgttctggatgaagaaaacatataaaagttattgtatgttaggtattgtttgcaaaagagtagaaaatggagaaataacccagtgggttaaagaagaaacagactaaataaacaaacctgagtaagttgttcctaaattttattttaggggcaattcctcattttgctttagttttctcaattattgcctcacttttctgtttctttctctgtcagcatacatggaaaaaggagttaattttagattcaaaacaaaaaccgg

SEQ ID NO: 296885 - DNA, 467 bp, Homo Sapiens
gaggtcctgggacactctggtaaagatgacaactcaaagttacagctctgagctgggcgtgacaatcaactaagaattcagtgatcaatctcttgatattaaacaatgtgcaaaacattggaagctcagaactggggaacatttgcttgaaacccactaactcagggtaaatcaattaagcttgctcattttctcagctcatccagtttccatagaagcttttgtttgttcgttttcatgaaaattcagcccctacttttattgtcagtaagttagtaggctttatttttatattcttttattctgagatataattctttatgttcatagatcaatattaggggaaatttcttcgccaagtaatgatccatgtagttataataaaagggaaaaattccaaaggtttttagagccaaaaagaattattatagattcaagtggttccatgactgtgttgtccaaatgtt

SEQ ID NO: 296886 - DNA, 428 bp, Homo Sapiens
agtagaattaatcagaaaaacacaaaagttgtattagaatgtgggtctgcatttctctcttccatttccctttcaggaaaaattttaagttattcttaattgacaaaagtatctcttctacctgtcccaactttacaacattctccttcaccaaatggattatactttgtaaacgttttaagaggttctttccagtttaaccttagtgttttggtcatacgaagcgctccagtaagttgtcatttcagagttcagtaaatgactcttttaatgtgttatttctatttcctatattccattaaaagccactttgtttttccaatggttctacattcctagaatacacaatcagagtggtttcccttcagatgttttaaaataacataaaaatcctggactttatcaccagcccgtgcagtattctatgg

SEQ ID NO: 296887 - DNA, 520 bp, Homo Sapiens
tatagacaattacacagtaattgtgaactcatttccaatgatttgtttcttgactgtgccttagctaggcatttagttttcaggttgtaccatggaccttgccataactgacacataacctctcaaatctgctgatctcactgataaagtcagttccagcttgtttgtttggctgtaccaaccagtactgtaccctgatctctgatatgagttactgtcttagagttttagctggtctttcccttctattcccttctttgggtcttttatatttctgtttgatgattttcctagaatgtaaatgtgattattacattctggttagaattcttcagaggttttccattacttagagaattaaatgcacaaatagtgtgctatacttggcccttcacagtttgcctctggattttatcagttattgtctcatattctgacttttgtatatttttctttggccatattgaagtatttatgtgtggattttatcagttgttgtctcatattctgacttttgtat

SEQ ID NO: 296888 - DNA, 464 bp, Homo Sapiens
  misc_feature (140)..(219): n is a, c, g, or t
gctttcaggctttcggggctgggggctggggagaaagggctcgatgatcttccttttttcgtcgggtatagacgaggattacctagtgccttcacaatcggtcagagcaggattcagattcctgctcgccaacgcccagnnnnnnnnnnnnnnnnnnnnnnnnnnnnnnnnnnnnnnnnnnnnnnnnnnnnnnnnnnnnnnnnnnnnnnnnnnnnnnnnacgtgtactgtataatagtgcgtataaggcacgtaatgtgaagcctggcccctgaagatattagctattgttatggagataaataatacgcgtaatagaatgagaaaaattataaattatataaattcgctaattgtagtgccctttctgccatcaacttctttcctagaataaattaaagataagatagatataccaatttttaccaatgaaataatttgttatttgggaattgcctcaaaata

SEQ ID NO: 296889 - DNA, 432 bp, Homo Sapiens
actcatgatgaatggacaaatattaatgttcactctttcttttcctgataaccactgctaacacttgcacttctttagataagaaaaggtagcaatcacattttgacttcttaatgcactctcctttctggaattttcttcatgctgaatattatagagattgtatatttgtaaagtaatggtaagtttttaaaaagcgtcagggttgtaaacttgcatatataatatgttttttgaaaatgtatttttacaagcataggcttactaaaagtttaaaaggtatttacaaaattcgaatcaaatactgtaggcaattacatgccctcctttttaattctttatattaaacaggcttgttctggggagatttgttttggaacttcaactctgttctgaagaattcctaggaactaagctttctcaagtacattt

SEQ ID NO: 296890 - DNA, 151 bp, Homo Sapiens
ggaggaacaacggtggcaaaacatgctttccaaaagtagtggttccccagacaggaagaggaacttctgaaagagagaaccagggtgagcagggcaggaatactaaagcacaggggagagaaggctcagactcaataggtgagtagcgatg

SEQ ID NO: 296891 - DNA, 233 bp, Homo Sapiens
acaaaaaattacagtaacttaaggtacctctattccctttccccatatgtgaagagtaaaacttaccaatgggggaataaaatcttcatctctaaaagactttattgcaatatgttatacggcatgcagaactagatacgttgttcaatttctttggtattacagtgtcaaagccaaaatatgaggaaattgaggaagaaaataagattttttgtggttaattattatgtgta

SEQ ID NO: 296892 - DNA, 648 bp, Homo Sapiens
  misc_feature (562)..(562): n is a, c, g, or t
  misc_feature (578)..(578): n is a, c, g, or t
  misc_feature (627)..(627): n is a, c, g, or t
ttacggccggagaatatattgtttttcctatgatgcaattgtgtcttcctttacgaatatctatcataaagactcaataaaataggtaaatggtagaaaacttaaacactgattttctttaaggtaagagttttccaaacatagtgcttatttgtatactattttttgtttgacctgggtggttaaagtctgataaacataaagctagagcattgggaattttttctgtttgatgaacaaccaaaatgagaataaaataattcatggattagagtatatcaaataatattatgctatatacaaaatgcaacttatatagtaagttttagataacatgtattatgtgaagatgtattttgggttattaaccaaaagagacatacctaaccaacttcctagagagcgtgactcccctggtaggtttaaactgcaccagactagtttgttatttctcttgatgatgaaaaatattcattttaactttatttctttgaattgcctgtgacaaaatgtcttttgatatttaatctcatgcaaaattgagtactgtactaaagatggnacattattagtatggnaagataagttcccttaagtatagtatgaatttgaagtcttcaagaaaangaatttttacctggtttggtc

SEQ ID NO: 296893 - DNA, 651 bp, Homo Sapiens
  misc_feature (576)..(576): n is a, c, g, or t
gggacgagaagaattgtactaatgaggttattgtggttgagactaagttaaaaagtaggttccatgtaaagatacttccgtgctgattgaaaggaaggaatagatacgagagaaaatgacattagaacaagtaggactgtgctactgaatggatataaggtgtgaggaaagggggaaattaaagtgaattagactatgtataaaccaggggcccagaggataatcatgaaacagaggaagacttagtgtgtgtgctggtagaaggtagtggaggtacaatgaatttagttttagacctcttttaggttggtagaaatgggacatatacactattttgacttacaggcagttgcagttagtcaaggagatggatgaaaatgtaggaattatctgtgtaattgtgctaattgcacatgtgggaaggatgagatttattaagagaatatactgccagtagagtatagaatctcgaggaatgctttttaattaaatgtaattaagtatatgcttaactcatctgatttatattaggtgtgcaattacatgtttcttatctttcttccttttaaaggttangtgaaagtaaaaaaagtggtgagagatttgagacattgagtgagaggtattaggatcttggaaatgaatgatcat

SEQ ID NO: 296894 - DNA, 399 bp, Homo Sapiens
  misc_feature (132)..(132): n is a, c, g, or t
  misc_feature (191)..(191): n is a, c, g, or t
  misc_feature (368)..(368): n is a, c, g, or t
  misc_feature (375)..(375): n is a, c, g, or t
  misc_feature (384)..(384): n is a, c, g, or t
taggcatcgaactaatttatattcccaccaacagtgtataagcacgcccttttctcagcatccacatcatttgttgttttttcactttttagtaatagtcatcctgacttgtgtaatatgatatctcagggnggctttaatttgtgtatctctgataattagtgatgttgagcatttttcatgtgtttgtnggctgcttgtatgcttgtatttcttcttttgagaaatgtctgttcatgtgtttttcccagttttcaatggagttgtttgttgttttcttgttgagttgtttgagttccttgcagattctggatattagtcttttttcagaggcatgatttgcaaatattttctcccattctgtaggngaactgnttactctgntgattctatcttttg

SEQ ID NO: 296895 - DNA, 715 bp, Homo Sapiens
tgtcataaaaataatatgaagctataactttccaattgaaatactgtataacctaccattatagatttgcggaactaaggtaaatgcttcactaacattcaagggtagatacgatgcacattaaaggatctgcactgtaagatcattgaggaataaatgaaaattatatgtacattgataaacatacagcttggcagtttgccccttagttaaattagctgttattatatggtaggtagacagtaaatatttgtttaaatgagttctttgccataaagcaacacattaaaataagagctgcaacctaagaacaataatctgttgcttaagaactgagagaaataaagagtaggcatttagctatatagtttactaaatggttttcatttcattacaatatctgtaaacttttcattttatactcggtattctgtgtttacgtcatagattgttgtttgaaaatcaatatactttttccaaattctggaaagttaatctaccctggggagtacaaaattctttaaagaattttttatatgtatatatcagagatgaatcactccaaagcttatatttttacctgtgaacatttatccccatccaaattaacctttctccagtcatatgtataattatttagaaggcaagaatatatagtcaatgatttgagaacaaatgtgccccactctccgttgtacaatgattttcagtaaag

SEQ ID NO: 296896 - DNA, 782 bp, Homo Sapiens
  misc_feature (133)..(147): n is a, c, g, or t
  misc_feature (170)..(170): n is a, c, g, or t
  misc_feature (348)..(348): n is a, c, g, or t
  misc_feature (514)..(514): n is a, c, g, or t
  misc_feature (570)..(570): n is a, c, g, or t
  misc_feature (663)..(663): n is a, c, g, or t
  misc_feature (721)..(721): n is a, c, g, or t
  misc_feature (767)..(767): n is a, c, g, or t
agagaccttatctagtttaaatataattacctatggctataaaattatttatcttactattaagaatgatttttaaagttttaaagtgatgtattcaccagtgaattttttctgtatagctcatttgaaagannnnnnnnnnnnnnnaaagaatggctctttgcttttanaagaggagatgaagcttggtatgaaaataagggaatgagtcaatgaaaacttgataagaagaataagtgaaagaagtatctaattagaatatatagcctactgaacataaaggaagttttgtgaccagtcttatgtgcagtggggaagcaagggagacaatgagtgagcttgctttangcttgtcctcatgtttaaaaagatcacagcaagcgaaaatgtaatttgaaagttaaacttgagatgaggtatgaaactgtataagtgtgttgtctgatatcctgaagagcctggtttcatagaataatatgattcttgctttgggattgctattaacttaagcagngatgttctcatcattcataaatatttggcacattaataaacatattttaatagggngtgctggtaacacttatttcagaatgcttctatagaaacttcctttcagatattatgacactcagcatggttcataaagatcatttgcttcanaaagccaggtttctctggagatgaattctgtaatttgggtcaaggttgaagttctggngttaaacattaacattggggaaaggtaaatctggcaacatgacagnttttttattaatagg

SEQ ID NO: 296897 - DNA, 233 bp, Homo Sapiens
gaatcagaagtaaagtaacttgtggggaaagaatgtaaagaaaacactgggtagtttggctagagtataataaatcagattttctggttttcaaaaatttgaattgcagtaaaaggaaatttcgatgtgctatttttttcaattttcggtagtaaataaatgtgtatagagaaacaataatatagactgtcatatttgagtacctttaaaaaaacaatcccaatgtgtaagtg

SEQ ID NO: 296898 - DNA, 651 bp, Homo Sapiens
gggaaggggactcgccttttgggttatggagctggaaaatgccagttaatgactgctggcagtcctttccctaccatgtggaaaaagtctgcatgagacgagattgaggttaacacatgaaaggagtcaagaaaaagggaggagtataatagtcaacattcttgattatgaacaacagatccattccaaatagtccaaaaataagcaaaagtggatttattaaaagatattaggtagctcaaggaatttccagaattgctggaaaacaggcttgatagttcattgccatggacattgaagctaagaacactggctgatcttgctgaaaaattatactggcaaaaacatcattcctactacctgttgccaattgatatggcaccaaccctgaacctgaagccataatctgtgttgctgttgccccaaaagaactagattccttgaccactgtccttgtcaggaaatcaatctcccagtgtggggccatcactgattataactcccctccacattcaagtctcctgtagttatatctgtttggcaatgcctagatcatacacctttactctaaatgcaaagaaatccagtaaatgtaattaaaaatattctacttttagaaaaaaataattcacaatatggaaaactataaaa

SEQ ID NO: 296899 - DNA, 701 bp, Homo Sapiens
gagttcatctgcgcttacagtgagcttaaaaattgcatgtaaagaaatggatttgtagaagggaggctttcagagtttctgaagtgttgggaagcatatttgcacctggcagcaccaccagtccatttggccaaacttggtcatgtggtgaataaagctgaccttgttaataaataatttaaactcattaacataaatgccacctaaaaggagttcagatgcatttagtagccacatataatactatgggataaatgaagccagacatcaaataactggacatctttggcccttgcagaaatgttttaacgaattgtgtttctgttttgtaatcagcttgttaaaagaaaatgatatgaaactgcatgttacagatgttacagataccttttagacaaagtgctttttattttttggcacatattacaaaaaaatatatttttccagcatcctagtatagttgcagggaactactaaaggctggaggccacaggcacagggctttagctgcccctagtcctattggcccctgagggctgaggatcactatctcctcacccctgtaaaccattcagggctcaccatggggagagggctgctattttaaagggagtagttccctatatttcatgaggtcctctcttaggaggacccacaggagaaatcttccctagaattcagtgcttcaccagttcaccagt

SEQ ID NO: 296900 - DNA, 512 bp, Homo Sapiens
catacagaactgctaaggtgtcttcaaaaaggacttgagaagatgaaagcatctttagaagggccacttaaattcacttgcttgatagaaataaagcctcaagcaagttgttataacttcaggattcgacttcactgactctaagagtatagacatccataatttgaactaatgaatagtccacttctgttcattgcttctctgtcacccccatttgccactaccataatgagtgatagatacatcttcatcacctctggaaatcatctcaggatctaaatggaaactgtataaagcctatcatttttactgatttaaactatgtaaactcattattctttttatgtaatgtgctgttgttattggttacctgcataaaaatatttatgagggttttcaacagtttacttgagacctcatttttgcccatttttttccttcccgatatcatgatctcctcagctgaactttcttaccttgggggttgttcaggaactgactctcatggggaa

SEQ ID NO: 296901 - DNA, 380 bp, Homo Sapiens
aaacgataagaagtctgatagttgagaagagaggtgataagtatctaatagctgtaaatagttatacacacacaagtgcaaaacacacgtataacagtatacatgtatacatacagattgtcaatgttgtagttacagatgtgttgaaatctgtttctctgtggaatagttttcttagatttttagttcattctttgatctggaatcagaggtaagaattaagttgtttctcacttttctaaatatacagatcaatattctgctacctaaagttatgattcctacataatacttaataaaaaatacttatttgttaagtgcaagtgaaaatgtgtgttaaataagttggttttgaaaatattcttttaagcgacataaga

SEQ ID NO: 296902 - DNA, 205 bp, Homo Sapiens
gtgtgagccagtgtgcctgcctctcagacccagttcattgtaatagctagattctttgccggtttattctgctctaaagattctccttgagggaggtatgaaattagaacaagctgcctttctcttatttgtaaatattacactgtcttcctcaggcatttggcctctctttttaaattattgctctaaacatagcttttttata

SEQ ID NO: 296903 - DNA, 356 bp, Homo Sapiens
ctgtaggcccatgacagattacagatttcttcatttcaaaaagtgaggttaaataatacctatttcgtaaatgttgaaagagaaaaatccatacaaaagcacccaactctttgagagactgtttactttcaaatattggtttctttctcttttcccatagaagtagtcagaataggacatggggatatgtgaagtgatccccgaatgttcattgtaactaaatccttcatgtgggttcagagctcacactagatcaggtttcttgaatttaaatcccagcacaaatcctggtttggaattcgcttttagcagtatgactttgggcgagtttcattatcttcccttggattcctcaa

SEQ ID NO: 296904 - DNA, 511 bp, Homo Sapiens
atggcaagagtgaaacatagtatcttttcttagcaggactgagatctaagcaacacactggaatcctaaacaaaggggaaacgttacaggagtgcaggtggggttgagcttcaggtatgtatcttagttctcagaacaggacataaggttacttaagcccagcttccatagggtcaggcaaaacagcttgaacatccccaatctacaaatccaaaatctgaaatgctccaaaatccaagacttttgagcaccaacatgatgccacaattgaaaaattccacacataactacttaacacaacttcgtttcatgtgcaaaattatttacaatattgtataaaattacctttaggctatgaatataaggtgcatgtgaaacataagtgaattttatgtttagactagggccccaagccccagatatctcattatgtatgtacaaatattccaaaatccaaaagcattcaaagtccaaacacttctgtccccaagtattttgaatgagggagaga

SEQ ID NO: 296905 - DNA, 539 bp, Homo Sapiens
gatgccaacagaatgtattgtacagttccttttggcaagttaccaaattttataaaaagccactccttttattctcagggtcttctacattttcttctctttgcttagaaataatttgaggtaggattccctaccatcttttgtggctcagcaaaaatatgcaaccttaaagatactctagcctcattggccaggttaggtcctccaataatatactctcaaaacatgcagtactttttctttctacaacccatacatatcgttagtaatgaaattgtttattgaatatatgtcacccacattaaacattcacctcagtgaaagcatggtggtgctgaatgtgaagaagataggcaggtgtattgaaaagatagtgataaagagctaactactaaaagtgcttagtttaactctgaggcaaaggcaaattctgacaaaaaatggaattgagatgttacatagcttttattttctgatgagataaagcaaataaaacttagatctggagaaaccagatgttctctagcatagggaaataa

SEQ ID NO: 296906 - DNA, 481 bp, Homo Sapiens
gggggttttcgcttcactttgttgattgtttccttttctgtgcagagctttgtaacttatgattccgtttgtccgtttttgctttggttgcctatgcttgtagggtattggtcaggaaatttttgcccagaccaatgtcctgaagatttctccaatgttttcttgtagtagtttcgtagtttgagatcttagatttaaacttttaacccattttgatttgatttttttgcatatggcaagagataggggtctagtttcattcttctgcatatagatatccagttttcccagcactatttatcgaagagattgtcttttccctagtgtatgttcttggcaccttgttaaaaatgagtgcactgtaggtgtgtagatttgtttctgggttctctgttctgttccattgatatatgtgtctgtttttatgacaataccctgctgttttgattactatagctctgtagtaaaatttgaggtcagg

SEQ ID NO: 296907 - DNA, 521 bp, Homo Sapiens
  misc_feature (90)..(90): n is a, c, g, or t
  misc_feature (379)..(379): n is a, c, g, or t
  misc_feature (500)..(500): n is a, c, g, or t
taaagaaaggatcacatctctatcttttcctcattgacctccctagttctagacaaattctatactttttcctttctttttctctgtggncgattatgtcattattccctccccctcaaaacctaccttctcccttggtctccgggaatactgcactctagtgattttcctcctactacggaaatgatttcattacctctctggctggtatttctttgtctttaggtcctttatgaaaacacaacctgttgccctattttctctccacttgcccttttaagatgtcctgtactcttttataattattctggtgcgtctcagatgtcttgttctgaattttctattaagccttgtctcttatttcagctacctctagggnattttcatcatcctttttgagttcctgttgcccatactaaacaaactgcccttttcttgcatgcctcttccattctggccttctccatgactttgagacactgctattctttccccttcangggttaaaacctgaagctctg

SEQ ID NO: 296908 - DNA, 663 bp, Homo Sapiens
gggatgtttgtgagtatagcacagaatgtgcttggaggtgctcagaaagagaaagctctagaaaggggcaggtctacggttgccctgggggtgtttggtttgagacatgtgccgctcaggatgtgtgagtttctgcagtgaccttgctgccgcaagtggtctgttgaagggtcagatgctggttgaacatgtagcaaattctctaggcctctgatttttccaaccacgttttgccttgctgtttttggttcttctgctgtgttctggcctgtagcctgctcttctgagaacctactatgcttctatttactgtcttcaaggagtaccttccctgtttcatttgcctggctgatttttactggtcttttatgttttgcttttctggatgtctacttctccttccagttcaagagttaggtgcttgacttctgtgctcccatgtaccctgcacttaacttttgtgttcttataatgccctgcacttgacttctgtattcccataaagccttgcacttgacttctgtgttcccataatgccctgcacttgacttctgtgttcccataatgccctgcacttgatttctgtgttcccataaagccctgcacttgacttctgtgttcccataaagccctgcacttgacttctgtgcttccataatgctc

SEQ ID NO: 296909 - DNA, 506 bp, Homo Sapiens
  misc_feature (308)..(446): n is a, c, g, or t
agggaagagaaagaggaactcctaaatgaagatggaagaggatcaatccaaaggttccaccaaatgagaaactgagaggttggaatgtgtcccctctcaaatatgttctgctggagatctggggagtgcagcgaggtgtcctttaccatcagtgcagtgagcactttcagtttctcaaaagccccatctccaggtcagagaactccttcaccataggttccacagattaaaatgataggacacacttaaggagaaagaccatttcccatctaaatactgcccaaagtgtctagtttcagtgcctctcnnnnnnnnnnnnnnnnnnnnnnnnnnnnnnnnnnnnnnnnnnnnnnnnnnnnnnnnnnnnnnnnnnnnnnnnnnnnnnnnnnnnnnnnnnnnnnnnnnnnnnnnnnnnnnnnnnnnnnnnnnnnnnnnnnnnnnnnnnnggtaggcagaatggaagcacagggtctttgtcactgaaaggagacaaagacttagattac

SEQ ID NO: 296910 - DNA, 422 bp, Homo Sapiens
  misc_feature (194)..(194): n is a, c, g, or t
  misc_feature (197)..(197): n is a, c, g, or t
  misc_feature (270)..(270): n is a, c, g, or t
  misc_feature (292)..(292): n is a, c, g, or t
  misc_feature (321)..(322): n is a, c, g, or t
  misc_feature (373)..(373): n is a, c, g, or t
agttgttcaggctacagtgagggaacattagacagcaactcaaagtcttaagaagaaataaagaactctgatgaaggtaactacaaaggtaaatataaaagtcagtattattttggttatcggtttatattactttttctttcttatatcacttaaaagacaaatgtgtaaacataattataaatgtatattantgnacacacaatgtataaagatttaatttgtgacaaaacagaagggagatgaagccatataggaacagagattttntgtgccattggagttaatttgntatcaatccaaactacattgttgtaaatnnaggatgccaagtgcaatcccatagtaactactactgaaaaacaatattaanacatacacaaaaggatgtgaggagggaattaatgtggcacactacagaa

SEQ ID NO: 296911 - DNA, 462 bp, Homo Sapiens
ggtattaattcaggttaaagctattattgtcattttctgtcatagcctaaaattatgcagggccaaaaaagatgctataaactatgttatttgcaaattagaaataacttagttgtaactttagtatttttagaaatacgtaacgttgattaagggcattggctcataaattcttaattttgacattggctaaaggaagatagcggcaaggctacccagccttttatttcctactgagttctctacttttactgatagtgcctctgagcgtaggtttttagctgtccgccccaaatcaggtcagcctgttccagtagtacaggttctttttatgagtagccacactcggtcctgcccccttcaaaagaactgttggactaacagtatgggggagatgggggtggtgctgaggtggatgggagcaacctaggtaaaaatgccacagactcccactgttttacc

SEQ ID NO: 296912 - DNA, 401 bp, Homo Sapiens
  misc_feature (339)..(339): n is a, c, g, or t
  misc_feature (383)..(383): n is a, c, g, or t
gagctcatttaaggtttttttgctattgcccactgaactgtgctgttcttgccggaatcaatcatttccttcacagataaaccgtgcaggtaacctctataagcatgatggaaacctatgacaaggaagatcatgaacaaagagtatgagtgaagatgtgcatgttgatctaagcagggggtgaggtaatcagtaggtgtggaaaagatggaaaccaggcaagtttttaataaatatgatcttatcattttgttaattataacaaaataagcaatgtagagagaactgggctgaataagaacaaggcagaagatactcaagcatggattatattagtangcagtagtcaaatacacattttccttcatccctgctctcctaanataacccagaaaggagtg

SEQ ID NO: 296913 - DNA, 374 bp, Homo Sapiens
ggtatttctgtttaaatatttccattcagccattgaaagtgtgtgttctcccttcctgcctctttcatttcatacagtgatgtagacattttgcttccattctgaggacacccaaaaccctatcactgctgtggacctgagcaactgggacagtgtcttaagtgtacatatgaagtcttcaaagaaagttagttgatggtgaaaatgcctttcataaagttcagggcagagaatactcttatgagcacatttaaaatatctaagtttaaacctaactcagaagccagagtaagccaaaatgtttattgtattgatcttctttttctgtagttggcatttgctcctgactgagtcattagtattcatatatatat

SEQ ID NO: 296914 - DNA, 411 bp, Homo Sapiens
  misc_feature (57)..(189): n is a, c, g, or t
gggagagttaaggttactaaggcaggggacagatatgcagtgtatgtacagcctccnnnnnnnnnnnnnnnnnnnnnnnnnnnnnnnnnnnnnnnnnnnnnnnnnnnnnnnnnnnnnnnnnnnnnnnnnnnnnnnnnnnnnnnnnnnnnnnnnnnnnnnnnnnnnnnnnnnnnnnnnnnnnnnnnnnnntgaagacaatcaatagtcttaaaaatgtttcctgtctattttaaatctttaagcggtgtcagtagagtattaaataattgaggtagttaaaaaggacataaaattgaggagtcaatatggataagattatagaaatgacagggaaaaatacagaagtattgtagattaaatgtcaatattctgctgctgctttaatattcttggagaatttggttacagata

SEQ ID NO: 296915 - DNA, 368 bp, Homo Sapiens
ggataactgaagaaaattcaaagtttctcatctgtagaacaggctagtgacctgctttgttgccctcataggattttttaggatcggttgagaaaatagatgtgaatagtatttgggggcttttaaatcactaattgtcttataaacacattaatgtttacgtggtactgtgtaaataaagcaaaccatgaatctttaatctctgccatctggcattttatatttattttatccctggatgagatactgtgcccaagaaatgtagataataggacaagagagtaacattcataaatggatgctaggtatgtatatttaatactgaccaagtaatttactggcatatttaaagaatggatgatacaagg

SEQ ID NO: 296916 - DNA, 571 bp, Homo Sapiens
  misc_feature (439)..(439): n is a, c, g, or t
  misc_feature (441)..(441): n is a, c, g, or t
  misc_feature (480)..(500): n is a, c, g, or t
ggaaagagagagtggaggaagtgataacaatgaggaggctgcagcagcaatccccaagagagatctggaggcagctcagccttcgggctcccctttccatgcatttgcactggctgctccttctctcctttgccttcacattcctacattctcttttggatcatccacattctctccatacccaagtgttgttaccttgctgaggccttttctgcactctccaggcagcaggattcagccctctgtcgcaccccagcagcaggctggtctgccactatctgacccctatagagactgctttgccttcctaactccctagctctaattagcagcactttggacccatatcaagatggaaagaagaaagggttttttaaagtgactgttacagtggattggagagggctcagaatttggggacagaacataccccagtttnanacctgcttctgccttatgctttctccaggagatgaagtnnnnnnnnnnnnnnnnnnnnncttatcatagaaatttcaagcatagatatgaattgggagaacagtgtaatgaacctctgtgtacccatgac

SEQ ID NO: 296917 - DNA, 510 bp, Homo Sapiens
gtcactgctaaagtttttagtcatggacagtcagaagcaagtctgtgtaaactctcctggcccctcctggcttcacatctcttcctctttctctaactctacttctcagaagacaatgctctttggtttctaattttctagaatccagaatactccctcccctttagggaagtgaaatagggactctggggatattccaccccctgaccatcaaagacacagggaaggggtcatcctgtggctaaaagccaggggagatcagaaccaaggccaaggttgaatttctctctgaactaaccctcaactctgacctagaaagtcccccttttgaggttctttgtcatagatacagcaacagcaatgcagaatcccacagagaggtcacaatgttcttgttcttcccattaatacaggccaggatcaggggctttaattttgagatgaacctctcacacttatcttagtaaatcttgttgctgaagtaggtccccgataaataaactcttgagt

SEQ ID NO: 296918 - DNA, 676 bp, Homo Sapiens
gcctgactttaaaatgtgaatgtttatttgttgtagtttgcgtttctgtattaacctggtattcctgaaatggaagatgaaacaaggacttgggtacagatggcttatatggggatgtgaaacaaggtatgaacaactaagagaagaaaaatagggaaacgcaaggcaagagtgtgctatcgagctagtcctttcccttggtggccaagagttgccatggccaactccctgacccttccaggtctgtgtgtgcaacatgatggctaaccagaatgctgcaggagcaccatgacagtgaagcagggtgctgtcaggtcgtacctggatgcagctggttcccatggcaatggctgttatgaaaaggtgggacaagaggatatgagacagggcacaagaagaatccagtgcagtccactgcttgtattggtcaattccgggtgcaccctacttcaagtccaagctgccacagagcctttaagatgatgactggccccaagctgtaaaataacaatgcacaaagttagtgaataagtgacagaccctgcttcagccactgcaattaatattcatctcctccctttctctactcccttcccccattctagattccctgatttggacaacatttcagcaggtctggtttcttacattgtgagaagagacagaactttatctg

SEQ ID NO: 296919 - DNA, 714 bp, Homo Sapiens
  misc_feature (32)..(32): n is a, c, g, or t
  misc_feature (623)..(623): n is a, c, g, or t
atagcaaatattgctgcctgatccttcctctnggaagcctcatcccagaggggcacccgcctgtgtgaggtgtcattggcccctactgggaagtgtctcccagttaggctacatgggtgtcagggacccacttgaggaggcagtctgtctgttctcagagctcaaacactgtgctaggagaaccactgctctcttcagagctgtcagacagggacgtttaaatctgcagaaggttctcttgccttttgtttagctatgccctgccccaagaggtgggatctacagaggcagcaggccttgcagagctgtggtgggctccgcccagttgagcttccctggctgctttgtttacctactcaagcctcagcaatggcagacgcccctccccctgccaggctgctgcctcacaggtcaatctgcctgctgccctagcagtgagcaaagctctgtgggcgtaggacccgccgagccaggcgtgggatgtaatctcctggtgtgctgtttgctaagaccattggaaaagcacagtatttgggtggggttgtcccaattttccaggtacagtctgtcacggcttcccttggctaggagagggaaatcccctgacctcttgtgcttcctgngtgaggcgatgccccgccctgctttggctcacctctgtgggctacaccactgtccaccagtccaatgagatgaccaggtactcagttggaa

SEQ ID NO: 296920 - DNA, 410 bp, Homo Sapiens
gcagcaacatatatttttaattgaacttttatgtgtcaagtcattccaatgttttgaatttgtaggatgtgaatgccttgcagagaaagtttaatttagatcatgcatgtagtactcccacatgatcattgtcgatgttactattattgtaaataaatactactctttgtgtaatacaacttttgaaatactatatagatttgaggtttgtagtctaacatttccaatttctggtgtgagagaatgttttccaatggaatcactttgatgaagactaagtcacttagtatgtaagcataaccactttgcttcttgcacaagaactcctgagaggtgattgaagtttatgtttttggagaaaagcagtaacgtccgtagaagcaaagtcacttttagaagtctacagatct

SEQ ID NO: 296921 - DNA, 659 bp, Homo Sapiens
gaagtatagacagtcaaaaggccattacaatgtgtaaatattaagtgccgtaactccttagcttctaccacaatcttaccatggaaaagccatctcaaaggatgcttttaattgcatcatttcctatcctcttgtgattcccacacaaaaaagacctatcactgtcattttcatttgctaatattgtgtttaaattttcttttccaaatgaactcatctactaaaagcaaatgagaactcaaaaccattttataaaaccatctgggtaataatgtaagagctcagcaattttcaattaggtggagacaatgtccccaaataggaaattcgcctgaatgttggaaacagggtattaaacagcacataccaaacatcttgtgagccttccatatctaacacccaagagatcatactgcatttttcagtgagaacccaggattactctaagaagttgtctttgatttcttttctgagcacaatacctgctttaattagcctaaatgaaagtgtcttctattagaccacgctcaatctctaaacctggctactgacattcttggaagaagggtgagtgtacatgaatgtaagcggccttcccatgcacagtgaccctcatgccatgctcttcacatggggtctcactaaagtgtgttctgagg

SEQ ID NO: 296922 - DNA, 267 bp, Homo Sapiens
gggcaggttcttctttgtgttgtttgtcttatgtgacctctaaattaggcctgcataggtagtacacagtaggccctcctatgtatgacgtccatcacttctattagatcataaattggagtggttaggaggcatgtaattcctgtaaattgaacactgctgttttatttgtcatatatggtctgaaggctaaatagttctgattattagtaataagcagcttctaatacctccctctttttggaagatagaccctcaactggtcta

SEQ ID NO: 296923 - DNA, 137 bp, Homo Sapiens
cggggttgaacaaaaatgtaactggatggtataacagaggataccattttagtactggtcaaaagaatacttaagtatgtaaaactatccacaaaaggcacaaagagaagatcatgatatcgtttttcatgacaatt

SEQ ID NO: 296924 - DNA, 657 bp, Homo Sapiens
  misc_feature (269)..(350): n is a, c, g, or t
  misc_feature (398)..(441): n is a, c, g, or t
  misc_feature (633)..(633): n is a, c, g, or t
ggaaaagtgatacccaaaataaaaggacatagtatactcatattattattgtatcgcaggtggcattgcctttatgtcttgtttaattttttaaaactgagatagcttgttaatcataatatagtacagcttgtacttgtgacctgaatttacttagggtgctgagcgtaattaacctgatggagccatgtcatctatcagtatggttggaaagagagaacagacctaagctctgaatgtgactagagcagaggaagctatgctgaaannnnnnnnnnnnnnnnnnnnnnnnnnnnnnnnnnnnnnnnnnnnnnnnnnnnnnnnnnnnnnnnnnnnnnnnnnnnnnnnnngtatgctgaaatttttaaaacttgatagattcttcaaaaggccaggtnnnnnnnnnnnnnnnnnnnnnnnnnnnnnnnnnnnnnnnnnnnnaattgatgcctgtcacaactccagaaaattctgtttgtgtagcagttgacaatctaaaaaacaaatggtcttttccagacattctcaactgtcgtggttgttttgataacttgaaagcaaactgtttctagcacccatttcttgtccttcctaaggagaaaactatctcattgaaataaagaaaggcttgtnttatgactggtgcctttctggact

SEQ ID NO: 296925 - DNA, 499 bp, Homo Sapiens
ggaacagtcaattagggatttccttgtgatacagggaaaacaaaactgggaatagaatgcaataaacaagtctaggattaaaataaacactatcagcaggatttgtagcaaagtgtcataatccaagttaggaaggctgacatcagataaactcagaaggtaaagagcattcattgtgtttctgaggaaggcaggaagctgctaccgtttaactggctcacatcctacagggaaagatgagcaagggagcctctgactaggttgagaggcagaacagagatggagcaaggtcaatgtttggtaattttctccaccaacaaaaatattaataagattttaggatattaaaataaggtctgtctttctggttttcttggtcttcggatatatttcatttatgtccaatatttaagttatttgaaaagtctcaacagctggtaagtcataagacacttatttttctacaattaagaataaagttaagagcctggaataagtg

SEQ ID NO: 296926 - DNA, 238 bp, Homo Sapiens
  misc_feature (100)..(100): n is a, c, g, or t
atcttaagtggtagtatgcccataagttatttgcatttgaatacagcattgtgcagtctccactacaaaaataagggctgagtaaatatgtgaagtaaanctttaaaatttaaatttcccattcttgaacagtagaagcctcctcaaactggcttctgagtcttttgaaggatcctcagtctagacgtttgaagcatgaatgtcaagctcttactactaggacttattgaagtgtatg

SEQ ID NO: 296927 - DNA, 115 bp, Homo Sapiens
agttgggagtgaacagttatgagtttatatgttaagagtgtgatacttcaatgtgtagttaaatgttgattttaatatttgaagttatctatataaatataaaactgcttttctt

SEQ ID NO: 296928 - DNA, 423 bp, Homo Sapiens
  misc_feature (385)..(385): n is a, c, g, or t
  misc_feature (391)..(391): n is a, c, g, or t
ggagcaggtttcctttatttgctgagcagcctttaccgttatgaatcttgcctttttgcaggaccagtggattctgcaaaggtttattgatcttgatttaatatattcatatgaaagggtacaacagtgagagaataaagcttatgtaggcgttgcaggggtccctttgggggttcactttatattactcatagcagtgaaaagtaaaaatggcaagttatattagctaagttcgagatacaaaggcaatatttatttcacaggaagtgtaaaaagatatgcaatgtgatcaactccgaggaaaacattgcaatataccactcctggctttgaaattatgcagtttaataaacacttgttaagaagcttcacacaccaaatatcnaatttnaaagcaagtgtttctgatcacgtactgttttt

SEQ ID NO: 296929 - DNA, 647 bp, Homo Sapiens
  misc_feature (586)..(586): n is a, c, g, or t
ttataagaatgtggaaggtaatgtgtggtggtgaggcaaggggtgttgagaacacagtgacctacattccaaatacaactcttctaaactataaggcagagaatagactaagtaaggcataataagttaggacctgccacatggcaaactgattttgggaagcagtctagaaagatgcttgaaaaatgtactgatgtgtaatgccagcagcaggccattgtcatggtatggaataatggtgactgaaagtcattctcccttgcttgggatgatctgtcttaagcatgagcagcttgaggctgaattgtagacaataaaacgtgagtccaatgacagtctttgtaggttgagtaagagtatttgtgtactagccattttagttgtaatgcattcacagaatgattacagtcagaattacagtaacattttaaatacaaaggagactatcttccatgtcagcttcatagttctgtacctattcccagccctgtgatatattccatatgaaacgttacatcagcatccttatataaagcatacctataaactggggtgggacagagaagtagtggccagagaatggagnttgtcacgctatgattcagcccgtgggagtgatttcacactgcctgtcagcctcgtgcgat

SEQ ID NO: 296930 - DNA, 639 bp, Homo Sapiens
  misc_feature (559)..(559): n is a, c, g, or t
gagtgggtggtagctaatgggaaatgtggcgtctggggggtcaggtagggaggataatgtgggagagagtaggatggaaggatttagtggagacaaagaaatagagagatacaggtcacagagagggtaactgataatgacaggttctggagaaggcaggaaagggtgggagccacttatctaaggcaagattggctgtggatagagagtggggtatctccatggaaacagcggtgaaggaggagaggatgaagtagatgcaggtgggtctgtcagtttggtggtgggaagctggtagagtttcttttatgtgggttctgttaactctctggagtaagaggcaagattgtctgctgagaggctgaagatggaatttatgtgatggaccagcaccagatgaagcctgagaagtttgccgaaagaacaaaggagtgagtggaatcgctaacatccatataatattgtataatttacaaatcacccacacatacttcatttcatttcaaccttacttcaaacacatgtgttggttgatattatcctctatctttaagatganaataaggtccaagttgggttccaattattatgggacccatgccccactaaaaggatgctgaggagcccattctgcactcc

SEQ ID NO: 296931 - DNA, 623 bp, Homo Sapiens
  misc_feature (485)..(485): n is a, c, g, or t
taaccataaataaatagttctggaaatcaaaatatatataatcaaagaataatttggtacttgttcctcctccttcgttttaaatcattggctttatttatagctatatagggaacagtattccccacactggtgttaatgaagtgttctctgaccatgtatttgggaaaccctgtattagtgtttttaattgcaccatctcttcagttttcagttcattattgtgcattatgatgctcaaaaatgaggacgtatgtaacttaaatctgtgcctacctattaatgacttacagaatttagagaagttgataatcacagtcttcatttccagagttactttttaaaatatttctttcagtgtaaacaatgtgtttctcaaatattggtctataggtaattcaattttgaaactttcttgcttttttataaatatcaaatataaagttcccaaaattattgtttctaaagaaatcttgatttgtgtntaggctagcagtacagattatttgtaaaatgaatttgaaaatgctcaggtttgccagtttgttttgagtaatgcagctaataaagctttaatcttaactcttataactggtgttttgctatttgcatctattcagaat

SEQ ID NO: 296932 - DNA, 707 bp, Homo Sapiens
  misc_feature (508)..(508): n is a, c, g, or t
  misc_feature (582)..(582): n is a, c, g, or t
  misc_feature (587)..(587): n is a, c, g, or t
gtgttattaaatgagccaaataggagtgttttaccagatgttagataaagttcttaatgccgttaagtagggaggtatgcatgcaaagaattgttttctcctgaaaagaaacttacagcacgcaaaatataactttttggtttttgaaatttatcattcttggctgttggaagtaaacagtctcagacatacttggatatgaaaaagtttcgttgttttttacttttaaatataatggtgtatatacattctttctatttagtcttaatttggcagtcaggaagtgatataacttagctgctatttacaacactagaaatttagtactttaagtaatttcacatctatgataacatttgttactttatttttaatgatttttttacagtagttatgacagtaggatggttatggaattggaatttaaactcccaactaatgagcttaagctgcttggaatattaattatgtagtttttacattccattttaaaacaaaaacttagaanaggtgctggcattctgaggcctgccattaggccacatagcagaagcttgctccttccttatctgggtgaaatanttatntttgcactttgagtcatattcccaccccctgtatagctacataggagcctgaatgaattgggtaggaaaggaaattatgcaaacaagtctcagctagtgctgaatgacccccatttgggt

SEQ ID NO: 296933 - DNA, 466 bp, Homo Sapiens
  misc_feature (436)..(436): n is a, c, g, or t
caacaacaaagtaaagatgtggaggaggcagcggggtgcacacagctgtaggtctaggaggagagccaagctggagacacacatccaggcacgctgagtgtagagatgggctttggaaccatgggatgaatgagcttgcttaggaagtggatgtggacagcggtgaggtctgagaactgcaccccggggtgctcctatgttcagaagtcaggaaagctaggaggagcaagcagaggacatggaacaacagcggccagagagtaagggggagacgccaggctagcaccttccaggagccatgggagaatgtgtcttgagggggagagaatgaccaccttgtcagatgaggactgctgagtgggaagggcctggagagcagaaggaggtggtggcagagtttgaggatgtgggatgagagtgtggagggcccagtgtntggaccattagggtgagccaagtgctctgg

SEQ ID NO: 296934 - DNA, 529 bp, Homo Sapiens
  misc_feature (361)..(381): n is a, c, g, or t
gatacactcatttgttagcatgtatcagaatttcatttgtttttatgacaatactgttcaattatacatatatgccacattttgtttattcatctaatgatgggcacttgagttattttcaccttttggttattgtgagtaattctataataaatactggcatgcaagtatctgtccaaatcactgctttcagttacttgggatatatacctaagggtggaattgctgagtcatatggtaattctatgttagctttctgaggaaccaccaaactggttttcgtagtgcctgcaccgttttatattctcatcagtaatgtgtgagttgcaatttctttacatcctcatcaacacttgttacnnnnnnnnnnnnnnnnnnnnnaatagccatcctagtagacctgaggtatctcattatttttatatctctttccctagtgactgatggtgttgagcaccttttcatgtgcttacattatttgaaaatcagagtgtattttcccctggaaatactgttgaatttcagctga

SEQ ID NO: 296935 - DNA, 656 bp, Homo Sapiens
  misc_feature (564)..(564): n is a, c, g, or t
  misc_feature (576)..(576): n is a, c, g, or t
gaagcaacctccagttttgagctctgttctcgaaaggatcaggaattggaataattcctcttggaaaaaaagaaatagggacataaaatatttgtactatcagaggaagaagggaaagagagtttttgttttattttaggcagactcaggtcagatagatggtttttataggcccaatataaaggaagaactatctagcagtgaactgcgtcttacaatagtgagtgtcccatcaccaggagggaaaagctgaggtcagatgactcactggagatgctgcagaagacaagcagaggtgttaaggtgcccctgcagccaatattctgtcattctacagattaaccaccaggtaaaggaacttaagaatgcctatcaccatgatctaataaaaagtataggccaagcagacactatgaaaaacagccaatacttttctcagccagtgatgacggaacttgctacaggaagcaaaatctgtaggtgataatccattgtccagaatactaactcacgtgaattaagaaacaaatgccactaggaggaaaagagaagatagagctcacnttcttattacanggggtgagaggaagaaaaacattagacacagaaatagattccaaagtctagttactgaaggatatttttcacatgtggaa

SEQ ID NO: 296936 - DNA, 556 bp, Homo Sapiens
gggagaagggccttctgagtggtggcagtggggacagagtatggacctagcttgagacatgatggcagcttaatactgaggaatgaatgcttttgcttggcagcctttgagtggaggcttgagttcagagtgtcagccgaatagcattgtgtatccccgagacccctacataggtctcagccattttattacaaggaatctagcttttcatccaccttatctggaggtatttactagtaagatagaccttggaaggctgaggtttggtatgttttctttggtgaggtcacagaaatggaagagatttccaataagcaggtgtaggatttgctgtatgatcttttggagcccgactgtgaatggcccaccaagttctagccacatcattgtccacagctgactcttatcctggcctcattccagcttggacaagctctacctctaaggactagttttaactcagcactttttgcttcctgcccaggtcagtatgcagctctgggcagaacacctgcctcactccacccaagagatggctgtatggttgtagtgggtg

SEQ ID NO: 296937 - DNA, 484 bp, Homo Sapiens
gaaaggtgcttgtttaccaaaaaattggaaaaggtgggcttacgtgttcttctgaaaggtacaactaacaacaatgaagggtgattatcacaggaaactaattttgttatcattttaaagaaacacttcctatcaataaatctgtctcatgacagaatgggaagcataaagagcagaggcaccgagtatgaaaaagaagggacttgacagagactctgccactcctttttactgatttcctcattctacttcagtattctccccgtgattccacagttctacagttggtatttctcactggtaaaatacaagggatttctgaactgacaaatgagatatcagtgacttgggcccatctagttctaactatgtatgatcctgaatatcactttgtggcacttctggcttaataactatggtaacctacttcacaaatccctctgacaatatacattgttacttgtcatttaaaaggcaacctgta

SEQ ID NO: 296938 - DNA, 467 bp, Homo Sapiens
atgtctgccactgtatgttcctgtgttttattgcatgggaaaaggtaataagtgtcatcaataacagccatcttaacatgctgcaggaactgtcaagtggcagtgattattgtaaaaaacgagctttctaatttccttgtcgcttacagagtaatctaagtgaaaatttccaacgtcctatctttacaaagaaacaaatacatttattttttcctctaatggaagaacttatgtacatgattcctacttgatggtagatcatggcacgtttttcaaagcttgggtctctcaccattgcctcagaatcacatgaggcacttgtaaaaagtgcagatatctgagttctcttccagagtgatgaaatctgattcttggggctaaggaggtgggggtgggggtgttggagaggaatgtgtagttttctcaaattctccagctaaattattagcacatttgaagtctgaaca

SEQ ID NO: 296939 - DNA, 187 bp, Homo Sapiens
gcccgccttttaaaaacttctaaattggaaaaaccctgggttacccaaattaaacccctttgaaaaaaatccccttttcccaagttggtttaaaacaaaaaagccccgaaccaatcccctttccaaaaatttgcccaccctaattggaaattggaaccccccctttaccggcccttaaaccccgggg

SEQ ID NO: 296940 - DNA, 485 bp, Homo Sapiens
ctttgaaaaaacaaccatatgcactaagcatcttctactttgagatgccttgctgaacatgtagatgaattagtgatggcgagtttaaggagcttacaggaaatggcttgaggtagtaaaggttaaagtggctgaagatgggtggaggattatgaagtagttgaggtgcctactttatacaagatactttgttaccacaacccaaatggagcaaaacctactctgtaactccaggcagcttcactagcgttttgttctcattcctaaatgctaatctgttcctttggcccctagccagtactgagatagactagaggttgggggaaggaaccaagcaaaggaaaagtgaaaagaaaatttgaataagacatagaattgtctggagatagaaatatgtggtattaccatttttaaggcattttacagtttacatagcatactttggtataaactgtattattagttccgtgttacagattaagaaa

SEQ ID NO: 296941 - DNA, 108 bp, Homo Sapiens
gtggtcttctcagttatctgaggcatatataataactggctgggacaagggcccatccatggttaggccatccttaaatgggggttttccggcagggggcaatgctga

SEQ ID NO: 296942 - DNA, 472 bp, Homo Sapiens
  misc_feature (441)..(441): n is a, c, g, or t
tatgtcctctaaaacttaattccttgcatgccaccacatagaagatccaagttcaccatttggcattgctgccagttttaaaaccagaataactaaggcaaaattccataggaaaatatggctttggaaaaattactttaatgagtagagttataaggagtgttgtctttctgtattttgctcatgattctgaaagtctgtaatccttagatttaattgaccatctttgccatatgagagaagctctattttcttttagtgttacttccaaagaagccgctgtagaatatgatatgatatgtgcttttcttgatctagattggatacattgcatgtcaaagcatttctgtttaaatatttcagtcaatataatactatgtaatggcacaaaaggtaggtgtaagctttttccctcagcactcttatagttgaatttgtcanggtcaggaaaagaaatgaagtagacctctat

SEQ ID NO: 296943 - DNA, 146 bp, Homo Sapiens
tactattggatatttaacagatctttcatggggccaacctatttgcttccttaattttcaaattaagtcctaatttgagtcctaaaaaaatctttccttgttagttgcaagttaaacatttaataaaattattttcccacgttttt

SEQ ID NO: 296944 - DNA, 431 bp, Homo Sapiens
aagaagctagttttggaataatctctcagtgataccgcaccagggcaggtttcgcctagatcagcttttcctctcagcaggatagcatttggaacagagctgcaagtgatatgcaagcaggctcccctcagcccccaacctgccagacttgcccaatagctaaaattctgccattggcaatttattcatttttccaattgcagcatttgcttagaaggacacacagaaagcctagtaagtgttcggtaaatatttgttggaatataatactcagtagattccgcacccagcccagcttgattttcttaagcataaaatatagatctttttctttagactgaaaagtagctgaggactgagaatcaccctgatttttttctttaatcagaagttaggcaattgattgatcagaacaatattgtcttgtttta

SEQ ID NO: 296945 - DNA, 534 bp, Homo Sapiens
  misc_feature (337)..(337): n is a, c, g, or t
  misc_feature (401)..(401): n is a, c, g, or t
gctgtggaattttttgttacctacgttatattacccaactgaatttctccatcttcacacacagtcagtgacaactaaaagtctcatcattgatcaagctataccactgtcagtgttttctagctaataataccagttagctctttaggaagtttcaaaagagggtctcagaatgttatgaacaacacctacatcattggatgagtgaacctttccaaagtaacttctttgggaaaagtggtattcatttggatgattacattaaggcttttagttacgaggttatttatattattggtagactttgtatagttacttggtcatagtcagtcattgnaagtatcctgaaaatatgcttctgttttatctttacagtagtttggtgatcaagtttatagaanagttgataattagttatgcatgtttaaagataccattaattgcttcatgctgataattttgataatgttcttgaaaaaaccatacccaacataaatctcagataactgtaatagataataatggttacatagt

SEQ ID NO: 296946 - DNA, 446 bp, Homo Sapiens
aattcattaaacatattgtcaaatccgcaaaaaaagccaatttccaaagctatttaatgctcaatgatagtggttgaggatagattttcttactcagaaaaatttcattcatgatcctgagctcaaacaccacacctaagtttatccctattacaggcatggaagtgctgtgtagtgagtggagtgagtcagaatattaaacttctatttctgagaaaacttctaggactaactggctaagcctatcagagcaaaacatattttctgaaaagtacttgctggtgaataatacgatgaataaccataggctctgaacaccttcctctgtaaatttgtccaagtcaccctctgctccatacataactttttgccactctaaattgtaacacattttagcaaactccgcttaaattgttttaaattaatgttttcttatttctttgaaa

SEQ ID NO: 296947 - DNA, 307 bp, Homo Sapiens
tcaaaatatggcaataaatgtaattttgcttctcatttgctgagtgttgtccccttgaagacacaatagcttcctttctattctctggtgtgcttttattttctagataagatttgagcaatcttttacccccttcacatttgtgagaatattttccacttagccagctttctgctctgaggcgtgttttgctgcatccttatgtcttatgatttattgtattcaatacctagaagaggcccttacgactaccagattgttgttaatatctttattaccaaaaagccatcattaagcatgcatgaag

SEQ ID NO: 296948 - DNA, 586 bp, Homo Sapiens
tgactctgtttgtttgttgcaaaaccttgagaccgccctcattaagtccactctcgagcctaccctgtgtacaccttttcttggacttcagcaattgctgggtcaacatacacagttttatcacacatattcgagcacacagctcactgccttgcccactggcttatggcagtgatcaagcagacctgcagcttatgacgtcactgcttgaccaagccacccagtcgcttcagtttttccaccaaaattagagaaacttaacaatagcagcttacccaaagactgggtaaacaaattatcctgcagtgcccagattgccagctcacaggcacatctcttccttgaacaggtgttaaccttagaggactagaaccttatccattatagcaacagatgttacacacgtccctaaatttggaatactaagatatgtacatgtatccattgataccagttcctacctaattagcgcacatgctcttcctggagagtccacacgatacatcattaaacatcttttaacttttgcgtttatggggtggcccacaaaaattaaaactgataataatctggcctgtgccagctc

SEQ ID NO: 296949 - DNA, 401 bp, Homo Sapiens
  misc_feature (266)..(266): n is a, c, g, or t
agcatttgagaagaaaatgagtctctggtctcaggttttgtctaatctctcatggctaggatggtttatccccagatgagtaggtcccactgtataaggaaagctcatttttagcaggttgtgaagtctcacgttctatgaagagaacataagagaagaagggagaacaacaacaacaaacaaaaaagaaacaatcctggaaaactgtaataggtcatattactctgaagtccgtacatcagtaggcaggtatgaaagtgtatgtnaataggttgttattttcttctgaagtttaagttatctagcttcagtttgcaggagtttaagaaatcacaacttagttttcagtgattctaaattaggaaaaatgggggtggggagtgagaggaacagaaagaagg

SEQ ID NO: 296950 - DNA, 437 bp, Homo Sapiens
  misc_feature (47)..(228): n is a, c, g, or t
ggagtgcatggacgatcttggctcatgcactctccctcccgggtccnnnnnnnnnnnnnnnnnnnnnnnnnnnnnnnnnnnnnnnnnnnnnnnnnnnnnnnnnnnnnnnnnnnnnnnnnnnnnnnnnnnnnnnnnnnnnnnnnnnnnnnnnnnnnnnnnnnnnnnnnnnnnnnnnnnnnnnnnnnnnnnnnnnnnnnnnnnnnnnnnnnnnnnnnnnnnnnnnnnnnngaaccaccaggcccagccaaccagcatttcttaaggtgaaaatacatggtgttaatttatattttgagtgagacccagtccagctgctataactgcttggacactcggcagaggacagagtactgcaaaagtgtctaagggagacagcattttgccttgggtgctgtagatgtaccagagaggttccaggagggggtgatagacagaat

SEQ ID NO: 296951 - DNA, 644 bp, Homo Sapiens
  misc_feature (554)..(554): n is a, c, g, or t
  misc_feature (618)..(618): n is a, c, g, or t
gtggtaataattatattagacggttcgatcttgggccagtgcacttggggatgtgactatggctagaattccagtcctaactacaaggatgaatgtggctagggggtcttcattcatatgtgtttcatttatatgtgttttccaagtgttctttttagctagatctttgcaggtaaatctttgacataactctcgctcctaatggaaatgataaagaagtcgttctgattgaaatgatgtgggggtgggatgaggggcccactatggtcccttagggcttaaacctacagggtctaaggaacttgttttgaaaaaccctaagggtggtggtccaaccatggcagtgttcagttcactgccctgatacctggttatgagttatttattagcactgagtagaagtaaagctgatgctgtcaggcaagaattattgtcattggatcaagaaaaactatgactcctatttttattttcttttgaagcatcaacactgattcatttttgatttatagctcaatatcactgggaaattgttctggttcatgtagaatgtncaaaacacagctctccatctataaaatcctatcagaactcagtccaggctatttgtaactggtnaccagcgtcactgtgggtctttggca

SEQ ID NO: 296952 - DNA, 586 bp, Homo Sapiens
gattggtggtagtaacaggactctgctgcttcatacctagtgtgaagaaacctggcaggccttccttaggctttaaacattgtgaatcaaagtgccaagtatactctaatggactaccttaagtcatatgccagctctaaatcaatcctgtggcaaggtaactactgtgcactgattgacttggtctgaattgccaatctctgaatcagtctctcatgtagtgagtgggatgggattaacctgcttagcttagccaagtcagagcctaccctaggaagtggagttgggatacccaactccccactccagccccctacaaagggcatagctactttacagtggggagtagtggaaggggtatggggagaccaccacagcgtcttctgcattcttagtgcttcctctcctcaccacctaagggaatttctcatctttgcctttctttgctttaggtagaaaaccaacagctaagttactccttgagcaaaattctaactctctgacgtgcagctgacttccttggcacatacatgtccctactcaaagtccacttttgtcttacagaagttagtactcagaggataca

SEQ ID NO: 296953 - DNA, 426 bp, Homo Sapiens
  misc_feature (212)..(264): n is a, c, g, or t
gggtatttacatttgtgggtttttaagtgtacagtactagaaggaaaagccaaaagtttccatgcattctagggaagcatatggcattgtaattctcacacattgctatgcaagacaatctcctatggaattctgtggctcttacctttggtgtacatacgacgcagagattctgagttattatgtgtgaattgggctccaggttctcagcnnnnnnnnnnnnnnnnnnnnnnnnnnnnnnnnnnnnnnnnnnnnnnnnnnnnnattggcacctaggttctgttcccagaggtttttacttaatttttctgggggtgagaactgagcatggggattttctaactctccccaagtgattctaatgttcagacaagtctgggactctctagtttagcccattgcttaattacttgggtggattaaact

SEQ ID NO: 296954 - DNA, 592 bp, Homo Sapiens
ctacatatgagtaagaacatgcaatatttgtctttctgtgtctggcttttttcacttaacataatgacctccattctatccacgttgctgaaaatgacactatttcatcatttttaatggctgaatagtattccattgtgtatacagacaccacattttctttatctgtgcatcctttgaagaatacttaggatgattccatatcttggctctttgaatagtgctgcaataaacatgggggtccatgtatccctttgatatactgatttcctctcttttggttaaatacccagtagtgggattgctgttttgtgtcactgttctattttcaattttttgaaaaaccttcaaactgttttccataatggctgtactaatttacatccccacccaccaaaatggatgagttccattttccctgcattcttgccggcatttgttatttcttgtcttttttgtaatagccattctaactggagtgagatgataccttattgtggttttggtttgcattttcctaatgatagtggtgttagtttagttcttgatatgcacacattctaccaacgatgtctatcttaagcttactaat

SEQ ID NO: 296955 - DNA, 627 bp, Homo Sapiens
  misc_feature (22)..(22): n is a, c, g, or t
  misc_feature (562)..(562): n is a, c, g, or t
  misc_feature (595)..(595): n is a, c, g, or t
ggggggcccctagaatatatanatagtgtgtttcctctataatgtttttaacaaaaaccattccttatgtaaaccttggaaaataaaagaatgataacaacccttgggttaaaaaaatcttttaaataaacatttctcactgagtctgaatttttcttgtagcggcaaagctggcgtcttaggtagtcatgagtaccatttaccacatttgtcctcagcctgacttggcattaaatcactgaatttccatgtcactttcagaggcttgctgcttcctctctttccttcatgaagagtctagggatggtgcctacgtagatagtataaaataatttccctagatatagattttctgcttcctctttccatcagaaatagaatagaaatagcaggcagcaaatagctatgtagttcattgttgctgctgaaatacgaaagctgtctagtcttttgccccagtcaagaaaagctttctgttacataagcactacaataaatagtacattattctctttcttaaactatggattaaaaactctgttatgcgtaagagttacgtgtntcagaaagctggagagccactaagagcatctgncatccaaactttatatcttatacaaaatacag

SEQ ID NO: 296956 - DNA, 407 bp, Homo Sapiens
ggtgttgtggggttccagatagagacatggattgtcaatcccagagcagctctgggctgctgattgggtttaattccttagggtggtggaggtgtctgcctgccagtagggaagtagggaagagagttcatggagtgtcacagtttgagggatgtgtgaggaggggagccgggaagcacaggagactgagtggttggagccgtccgggagcacagaggttgggagtctattgtcatagcagtcaaagccgggagtcccctgacatatgaggtccccaaggtgtctgctcaagcacccagtgggcagggccctcgtgtgactctgcaggtccatgagtggggctctgcttagcctagacccccaggtctcagttggcttgggacttcttgagagatacatccctacac

SEQ ID NO: 296957 - DNA, 540 bp, Homo Sapiens
acggccggggaagcactcttatgtgttgttctttcagtccatgctccagagtcaccgcgtttttaggtaaacatgacatgacatgtacttgtaatatcagtgaaaggggcttttagtcgtctcagtatcttttttgcattcaggtattatagcgtttccaacaaattgagaaattacttatttggtgtaaaatgacaagagagagctttagaatttaataaaatgtcaaaaatacaatttgatacccttaaaaattattcatagatctggctgctctgtactactggatgggtggaatagggaagcagatcacttttgcatacaaaaactctttcaaacccaaaatattattggtggtacattttaaagtccaattgtggacttaaattagtcaaattgagagttactgagtccattcagatctccagtagggttctgtatctaatgtatctggccaccagtattacatgtcggtcatgactatacctggactttatcattaagttaactttaaagtatatacagtttgcaaaacatgat

SEQ ID NO: 296958 - DNA, 155 bp, Homo Sapiens
aaatagaaagggggaacttccttaacctgaaaaatatctacaagaaatttgtagtaaatatatttagtagtgatacactgaatgctttccttttgaaattagggacaagttagtcccgcttcagtaatttactacaaattataccacaggaaagc

SEQ ID NO: 296959 - DNA, 581 bp, Homo Sapiens
  misc_feature (536)..(536): n is a, c, g, or t
gcttggcttctattctaaatgcaacaggaagccgttgaagggtgttgtacagagaagtaagatcagaattactgtttgaaaaatttactttggctgctgtgtacagaatggttggggataggaaaaagaccaggtaggggactgttgctatggcctgaggaagggtgacagtggccatggagatggacaaaagtgaatggattcatggttcattagattttcttctggaatttacttgaagttgctaggagcatcattttcacaaagactatatccagactttatgggtgtagaagtgtagggaaatagagtataaaaattttgcaattgctagctcccatctcttctcccgtcctagactctgtcctttttggagtggtcatcacagaaccatttgcctttgtatatacagatgggggaagagatggaacaggtgatgctcctacaggctttctgtctttgattcctcccacagagatctaacacattatggggtcctctggatacatcagcagatatttcttggaatcattgtntcataggtatctgactccagctccaatttttgccttttacaccaa

SEQ ID NO: 296960 - DNA, 493 bp, Homo Sapiens
gttggaaaagaaaacaacttctactcaaggcccaattccagacagcagtgaggaacttactggtacagtaggaatgataagaacattggaagacagtaaccatgttactccaggcatagagaaaaatgcaccttaaatttgagaaacacagacttcaagacagtccagagaaaagtgaataggttttatggtgaatgccttcaataaaggaacaagcacaaccctgattgtgaggagataaaataaaatccttaatattcaattatagatgacaaaagaagggctgctggagtacagtgtggtcacggatctgcccaatatattcagcatttaaaaggacatgttcaaaagctgagaggaaggacacatggccaaggatgaatacaaagactggatgcccttgtaatgatcttatcaggaaggctacagcccagaatatgctgttcccgtaactgctaaggagaatgaaaatctcatttcaatcatgttgaaa

SEQ ID NO: 296961 - DNA, 533 bp, Homo Sapiens
ggagggccggcttaaatttccttcaagaactcttcctttgtgttcacagcgctgtctaacttttagtggatcttaactttctacatgggctccttgctgagcttaatcatttctggcttttgattgaaagagacatgcaattcttgcttttccttgaacacttaggggctgttgtagggttattaatttgcccaatttcaatattgttgtctctcaaggaataaggaggcccaaggagagaaggaaagagactggggaacagcctgtgagtaggacagtcagaacacacgacatttattaagttagctgtcttatatgggtgcagtttgtggtgccccaaaacgattacaatagtaacatcaaagaccactgatcacagatcatcattacagatataacaataaatattatgagaattacccaaatgtgacacaaagacatgaagtgggcacatgttcttgggaaaatggtgccaatagacttgcttgatgcaggggcgtcacaaaccttcaatttgtaaaaactacaatatc

SEQ ID NO: 296962 - DNA, 479 bp, Homo Sapiens
gaaaaccatgatggctacaacagttccttaggtttgtctactaagctgggatgggatctccctgctctccatcacgaagcatctgagatgagacagatcatctatttatagagtgaaaataattgttatttattaatattgtttaaagcagaacttgtgacattcattttaaagtggtggcacagaagcaagctggtttccctcctcccatccctccacagaaaacctaaaacaaatatacagcacaagattttcaccagcaacaacctggaactcaaatatgaggacgagacagatcctgaggccacagaaaagtagaaaaactccatgcagatggtgtaagaattggacttccatagtcatgatgcccctccccttgattctgcccggcaataaaagtgcagaaaatcttcccccaactcgtagaaaaatgatactggaaaagtgagactgaggtgggcaaccagctttcccacctt

SEQ ID NO: 296963 - DNA, 409 bp, Homo Sapiens
gtggatgcttttcataaatgtcagcaaagcacaagtatatctgactggtctacagacctgcacagaatatcacggtgtgataagggcaaactaatgtgttacaccaaatatatattacagagacagcatctgtgtggaaagagcagctgtcagttataaaggctcctgtaacaaatgaaagattgcatgccatatctttagaaatatatatgaaccatactaagattgtaggccactacagcatattttgaatagaaaattacaaatgctaataaagtgggatatgttgaagcagtgataaaggagtcctatagttatctgtggataaggttttgtttgaagcctacatttgactatagtctatgcaaccaagccaggtatagctgaatctacataaagagagataaaa

SEQ ID NO: 296964 - DNA, 441 bp, Homo Sapiens
  misc_feature (115)..(349): n is a, c, g, or t
gttatatcgttctaattcctatgcacatcatccagtccatctggtcagacaatgactgcttgccctgataattttcctaatctcctttatatttagagatggagttagttcttannnnnnnnnnnnnnnnnnnnnnnnnnnnnnnnnnnnnnnnnnnnnnnnnnnnnnnnnnnnnnnnnnnnnnnnnnnnnnnnnnnnnnnnnnnnnnnnnnnnnnnnnnnnnnnnnnnnnnnnnnnnnnnnnnnnnnnnnnnnnnnnnnnnnnnnnnnnnnnnnnnnnnnnnnnnnnnnnnnnnnnnnnnnnnnnnnnnnnnnnnnnnnnnnnnnnnnnnnnnnnnnnnnnnnnnnnnagtgtgacactgcagccggccaattttcccaatcttatagaccacattattttatcgaaacaaaataacttctaaaagtcagttttcactaa

SEQ ID NO: 296965 - DNA, 118 bp, Homo Sapiens
aaccaggcaaacgcattcaccaatgcttccacctgataagtaaactcatgggataaagagattacaaacattttgaacttgtaaagatgatagtctggatcttcgaaactttatccct

SEQ ID NO: 296966 - DNA, 505 bp, Homo Sapiens
aatgataaatgagattaacttctataaaattctcagttatatattacatttttaatacttgaaattaagtccatgggttcctactggactgtcaaaatatttatctcagtaatattttgaaaaattgggacaattttgattatcaggttaaatcagatattaagttaaaaggcacatattctgctaagatactatcaatcaagcatattttagaactccaaactaagaaagttgtgtagttttaattactatccacaagatattttaatgctgggccaggatatcctataaaccagagtccatataaaattcagctagtttttgctatcctattgagctctgtgactactttgtaaaaataatccaagatcgaatatagatttgatcttgcaaggaatcagagagtccagtattttagccatttgggtaagcaaatggggcaaaacaattgatgagttccagttatatactataattaatgagtagtcatagcgactaatatgtg

SEQ ID NO: 296967 - DNA, 542 bp, Homo Sapiens
  misc_feature (433)..(458): n is a, c, g, or t
gcaggagtgtgtcctgcaatgtgacatggagtagcttggctgtttgagctggacttcaaagaatgagtagagaagtgataagcaaaggagaccatttcaagtgtgggaatcagcatcaaaaggggcacagaaggcataagtcctgcacagcaagcagctcactcaaagctagagtacaaaataggaacatccactgtctcacagcaatgaaactctcccgaaggaacatcctgacagcaaaacttcagaactgctatttgagtcaccctgagtgctctgacagtaaaccacttacttacaaacttgcaaagaactatgatcagattcctactcccacaaagtgtccgtgaaaagaaacaaatttgaaccccaaaatacagataagttgagctaatagcaccagtgatagtatgcctagctattaaaatacagnnnnnnnnnnnnnnnnnnnnnnnnnngagctggcaacagtccagttacatagaaatgcagtggaaaaagttagtgtttgccaactttaaggggggaactaaatgtgtaaa

SEQ ID NO: 296968 - DNA, 244 bp, Homo Sapiens
gaggagcaaaacagccttgcaaaaattcacctcttactgcccttcttcccagaagtacatagataattaataaaatcagcattgcttactattatccctcatgtactccttgtgaaggacagcattctggcaaaagtaattggtaacgtagaggactgggtcagagaaggctgcaagactcagtattgacaacaagacatgataacaaatggaaacgagaccaatgaacagaagtagaagttac

SEQ ID NO: 296969 - DNA, 231 bp, Homo Sapiens
  misc_feature (218)..(218): n is a, c, g, or t
ccccaactgggcttcaggtttagttcagggacatagtgtctgaagaaatttccatcagcataaatactccttgtttatgagctgcctgaaactgtaaacaccgaatccattcccatcaggaactcacaaaagtttctgttatgctttgaaaataaacctagggatacttaactgacatgtaaagaaaaatccatcagtatccttttctcgagatatanggtttgattttac

SEQ ID NO: 296970 - DNA, 531 bp, Homo Sapiens
  misc_feature (469)..(478): n is a, c, g, or t
gccttgatgaaggaacacatgctggtctccgctcgctttctgtccactagtatgaaatccttgtccctgctcccttgctggtaggtttttagaagttcagtgagcaatgcaaatcgcctgaagggtggaaaattcccttgtcacacagatgcccttatcagcagcaaccagatggagctctgagctggaacgttatcggtgttaaattgctttttctcccaccctgagtagagaggattaaagcattcctttagaaatgggtggcaaatgtacagacttaggaatattaatatttttcaacaatttgcatttataagtaaatacatggaaatataatctccaaaaaagtccatgttcaaaactcagccaaatcagtgcaaaatgttttgttttaaataaaataggataatactctttcatgaattcacttgcaaagagtaagcttgaaactgttttcctctctttctcnnnnnnnnnnaagtgggagacagtatctcactattagggtcaaatgcatattagggtcagttt

SEQ ID NO: 296971 - DNA, 676 bp, Homo Sapiens
  misc_feature (520)..(520): n is a, c, g, or t
cattgatgcataatctgggtaaaaaagagatgtcagaagttgggaaagaactgccagaagagctatgttttaggatttcactccaccttaccctgtgttttcttgtaaagatattctcaaaattaggccaatttcactcttttaaggtcagaggagattaagatatttagaaatcagattgtgggattgattcccattgtgattgctgacttttagtatcagccttttgttctgcatggattctctcatcttgcaaactagcaagactcctgaatttggcaatgatcctgctctgtgaagcattctcaagttagggttcttatcaatgtcagatttcactaagccagtaataaaggaaaggttgagagagcaaaggatgtcactgagttgacacctaacagcacaaaacaacttgtcagctggcaggacaagccagcatgttcagggtggtcacagcctttgagttggaaagatagtcttttaaacattcttacctcaccaaataactttaatagataanatttagttactccctcccacttttgttctattcatttaaagcagtgttttttaaaaatttatgtatatgtgactacatgaaaaatacattactgtgtttcttgatgttttatgacctgtacacaaagtgagaccagcagatgccttcaagagaaat

SEQ ID NO: 296972 - DNA, 801 bp, Homo Sapiens
  misc_feature (271)..(271): n is a, c, g, or t
  misc_feature (672)..(672): n is a, c, g, or t
gaaaaatgttatcagtggtgattacataaagttcaaagactactgttattttccctgttgtattaagaatcgaatgggttggcctgggattctacccactgtttatcatctgggaaatgcattccgcgttctaaatgaccagattgtagaatttaacctttggtaaattcccgacaacttgcactttctgttaacaaagcatggaagtaactaaaggcaatgcaaattagggtacatgctaatgttttctgggagtatatataaatggatnagtcccccatttttttgtttatttaatgactgcagtcagagtcagctataaaacctcaaaaccatagattaaaatgaatttcacaaaaagagcgaaaccacactgtccgagtagccctggtggcaagtgatgaaccagtttgggttatcctcacaggctctcttcaaacttgcaagggactgacaggcttcccctctctgtcttgcctctacctgctgtctgggctctggctggggagctcgaggactgaagtttaaaatacagctggttcagcattcggcagcggagacccagatagccctgcagcacaatgattgctatgaaagaagccttcattatcctgttttgctaaaaataagtttgttttgctgtttttgatagccacgatgttagtgaaattnttttctgtatggaaatatttcacactacacaatggaaggtcactgtccttgcagtctgcatttgtgggagtctaaagtgtttacaattaagtatagcagctcctgtttgctcttcaaaatgggtccaag

SEQ ID NO: 296973 - DNA, 631 bp, Homo Sapiens
gaaataggagtagaaattcaccatctctgttctccagctctttgtcagagaggtttctggttttccaggaaatccccctcttgagatgggtcctgcactgggaaagatctcttcagaactatacccaatggtacctcagctgttgtatatgagaccctaaagctcaagttgaggagaagactagctatgggaaaaaatgtttcaaaggctgttgagcacatcaataaaactattgagcctgccctgattagcaagcacctgaatgttatagaacagaagaggattgacaaattgatgatagagacagttgaccctgacaataggtctaaatttggagtgaacattatactgggaatctcttttgctgtttgtaaggctggagctgccgaaaaggggttctccctgctgtcacagaattgtgaatttgctggcaattctgaaggcatcctgctagttccagctttcactgtgaccagcaatggttctcaatctggcaataagctggcagtataggagttcataatcttccccgtcagcaaacttcagggaagccatgctcgttagagccaaggcttagcacacttgagccgtgtcatcaaagagaaatgtgagaaagctgctgccaatgtgg

SEQ ID NO: 296974 - DNA, 337 bp, Homo Sapiens
  misc_feature (225)..(225): n is a, c, g, or t
agaacaggaagcttactcagtgcccttcccattttccaagtgtcctctcccatccagtttcttcttgcttttggttgctcttgtgccttcagatgattgtttctttatacttttttccagagtttatcatatatctaaacgtttatcaggtagaagctactctgcgtttagcacaagtggaactcattttgtttgttctttatctagggatcattggagacttanggtgctctttgttcagttgggttaaaaatcaaagtggctctccagactcctcagtactgacagttactaaatgcttgtttcacatgccaagaccatataatgctccccctca

SEQ ID NO: 296975 - DNA, 659 bp, Homo Sapiens
gtgaactggttcatcgcaagaggcattcagctctggatagaggacagctctttgctgctgcaacctgatgtagtagcaggggcatttgacaaagcgggttaagatcccatttgggctagatgtcctatccaatgccaaaattctcaggtcttttctcaaacaggggatccatcactttcttggcctcctgcttctctgcaacaacaggggccagggccaccttcttccccttggccttctttccttttggcatcttgggtggctggaggagtgaaacttaacatttatgaagttgaataatctaaaggaatttcttcagggttaacataaagaagccaaataaaaatattaaatttttccacagggttaaaattttacttatgcacaaattttgttttttcataaatatgagtataactgttccaatcttaaaatactcttgaagcataagatgttatttccataatcctggtcctcaaatagatgagtcaggcttgattttattaaaactaccaatacaggctccttatgttatttcagtaaaattgtttcctgtacagagtactccacaggcagttaattgtctgaatccctgtctgccattcaaaaggctttattctagtcatagtggattacattgcacatatttttctccaata

SEQ ID NO: 296976 - DNA, 622 bp, Homo Sapiens
  misc_feature (77)..(77): n is a, c, g, or t
  misc_feature (413)..(441): n is a, c, g, or t
gctgattagatggtgcccacccagattaagggtgggtctagccctttcctagcccactgattcaaatgttaatctcnctttgacaacaccctcacagacacactcagggtcaatactttgtatccttcaaccaagttgacacggagtattaaccataacacatatagtccaattaattatgatagaaataaaaataaaatataattaatctttcagacttttaaaagtgtcagttcagaactaaaactgattatgcctctggaactatgaagattaccttcaaagatcttattgtactctttattgagatttgactaatattttgtgggaaagatagcccacatgggattggtgaaaagtgttttgaaaaagaaatcaaatagcaatataaactcaattcataagtaaggttnnnnnnnnnnnnnnnnnnnnnnnnnnnnnaactctctactaatatgttacttagtcacagaatattagacttagacaggaaaatagtttgcaggagataaattacactgacattttccatagaatgataatacaaaaaaatctgactagaaagtacattgtaataattttatatgaaaagccttctctactacatatgtattgatcatct

SEQ ID NO: 296977 - DNA, 525 bp, Homo Sapiens
  misc_feature (126)..(217): n is a, c, g, or t
  misc_feature (222)..(457): n is a, c, g, or t
tgtaaatctttgtgactttggattaggcaatgtttttaagttataaaaccaaaagcacaagcaataaaagaaaaagataaattagcatcaaaatttaaagacttgtatgctttaaaggacacaagnnnnnnnnnnnnnnnnnnnnnnnnnnnnnnnnnnnnnnnnnnnnnnnnnnnnnnnnnnnnnnnnnnnnnnnnnnnnnnnnnnnnnnnnnnnngtagnnnnnnnnnnnnnnnnnnnnnnnnnnnnnnnnnnnnnnnnnnnnnnnnnnnnnnnnnnnnnnnnnnnnnnnnnnnnnnnnnnnnnnnnnnnnnnnnnnnnnnnnnnnnnnnnnnnnnnnnnnnnnnnnnnnnnnnnnnnnnnnnnnnnnnnnnnnnnnnnnnnnnnnnnnnnnnnnnnnnnnnnnnnnnnnnnnnnnnnnnnnnnnnnnnnnnnnnnnnnnnnnnnnnnnnnnnnnaagaactcccataactcaatagcaaaggaaaataaccaatttacaaagtggtcaagggatgtaaatag

SEQ ID NO: 296978 - DNA, 247 bp, Homo Sapiens
gagcttctcttcagtcatatcttaattttccatttagcctacatatgcatgaagtagagaattgacatcatagctactggcagcctctgtagctgttaagaagagtgtcactaatgagttttatataaacaggttctctctcaattttggattcgggtagtagtctttacaatcttgaaatgtgcatgctgcactaccccaggtataccattgacagtatggggaaaggttctaagtctagtccttt

SEQ ID NO: 296979 - DNA, 691 bp, Homo Sapiens
  misc_feature (659)..(659): n is a, c, g, or t
tcacatttgtcgtctgacaagtaaatgtatcttgactttcctctgagatttttttgtaccgtgtttgatgaaagacatttggcaaattggcagtagtaccctgtacattgcaatttgtagctaacattaggagtccgggcatgaaatgagagggcaggctccaggataaagggggaaaaaagagaactaactagaacatgaatagtcacttgaagaatcaaacacacaatattccttttgtgagaagagatcatgttcaggccatgctgttaagactttgctctactttaagaagctgatggtattctgtccagctgtgtgtccacagaatatatgtcttgttaatttttccttctgagtaggaaatgttgccttttatttttaacttgagctcataaattaggcctccatctctgtcctgctgtctcattagcaaaagggtagtttcttgggttgaccagttgtttgaatttgcagtgatcatctcagttcttatgtgtcttctggtctagcatcacagctctttgagatttttatgtaatgcatatagaatgcaaacaccttttaaaatagcttcttgagctttctaatggcacactgccctgagaatcaataaataatgggtgagttgatttaacaggatgggctgaaagtttgtntttctacttaaaaattcagtaataagcagctt

SEQ ID NO: 296980 - DNA, 630 bp, Homo Sapiens
aaactggttagatatggaatatgtttccactggctgaaaaaaatggtagtagctataagtggcttacctaaaactcagcaggactactttatgacatcaccgtttgcaggtatgctgcctggacccacttaggaatcactctttctccttcctaggacctcccctaaaatttgcaggccctgaagcaatagataggtcaagatatttcggtgttataaatcaagcttaaaagctactaaattttatgcacaacatgcgagtccaccttgaattttcacacttctcagaattccatgcccaaagatggcagccaggggagaaccagcctgcagcacattgccttccttctcttccacccgctccttcagtattctgaagggcttcacaggaacacttgtgtattcttcagcctacatgcctaagtaagtaagtttttccacagccttgcaaatagctgccccttggacaccttttcaaccagggtaggtttgggcaaaagatagataggccttgtgaaagccctggaagctgagcagtttaggcaggaaaatcagggtttcaggtaccttgaacgtggtcgagaagagaatgaagtgagttccaggtaggcataacccactggcccagcag

SEQ ID NO: 296981 - DNA, 422 bp, Homo Sapiens
gaaggttagtgtaatgaagtatgaaaagttattgatgtgatttcagagtccatactacagctaatctttcagaccctgtaatttgttgagttttggtatagtctcaatgaaaaaaatccacaactagttgaaaaaggtattaaaatattctttccttttccaactgtatatctgtatgaggccaaatgtttttcatatacttcaaccaaaacaacctgtcatgacaatttaactatagaaaccgatatgagaatccagatgtcttataaagcagtcattaaacaattatcaaaaatgtaaaacagtgccacgtctttctgtaggttatttttgttttggaaaatataaaatttatgttgacaaataatagatttactcttctttttcaatgaattaacaaatatcttcagaatttctcagtg

SEQ ID NO: 296982 - DNA, 683 bp, Homo Sapiens
  misc_feature (89)..(146): n is a, c, g, or t
  misc_feature (151)..(213): n is a, c, g, or t
gtcttggatattgatttccatttcttctccctttccataccttacagctggataaaagtaagataatggtgactaagaaaaacttgtannnnnnnnnnnnnnnnnnnnnnnnnnnnnnnnnnnnnnnnnnnnnnnnnnnnnnnnnngagannnnnnnnnnnnnnnnnnnnnnnnnnnnnnnnnnnnnnnnnnnnnnnnnnnnnnnnnnnnnnnaaactcctgggctgaagtgatcctcctaccgtggccttctgaatggctagggctacaggcacatgccaccatgctcaactaattctttttagttttttgtaaatatgggggtcttactgtgttgcccagcaagatccccatagttacaactttttagttttgaactcctaggctcaagcagtcctcctcctttggcctcctgaagtgctatgattacaggtgtaagccacaatgcccggccctttattttaagatctgaaatacgagctgtttactggagttcattaatataaaaaactaggccatttttcactttatcattagataatcaatttacattttaattgccaaaatatctgtaattgaaaagctgttgaagaaaaaaagggatcttctgtacctggattttactgtttactgataaaaaattaccatttgaacaacatcttttaaagtcaggttttcttcat

SEQ ID NO: 296983 - DNA, 706 bp, Homo Sapiens
  misc_feature (122)..(152): n is a, c, g, or t
  misc_feature (328)..(364): n is a, c, g, or t
  misc_feature (502)..(502): n is a, c, g, or t
  misc_feature (588)..(588): n is a, c, g, or t
  misc_feature (617)..(617): n is a, c, g, or t
  misc_feature (634)..(634): n is a, c, g, or t
  misc_feature (651)..(651): n is a, c, g, or t
cgggtaagtatttaatttatttgaggcttccagagaataaaaggacaaggaatccatctgccactatagtggaccaataacctgattctttttttaagagaggtggtttttggctaccttgnnnnnnnnnnnnnnnnnnnnnnnnnnnnnnngtagagacagggtctctctgtgtagcccaggcttgtcttgaactcctgggctcaagtaatcctcctgcatcacctcccaaagtattgggattacaggcgtgagtcaccacgcccaaccagcttcagtttttgattcacctccatagttaggggcatttattaagatttaaacaacnnnnnnnnnnnnnnnnnnnnnnnnnnnnnnnnnnnnnccatagtttgacttcaaatatgttcatgtagaatggggacttaatgtttttatttatgagggatttatgctcatatgtggctctgcctactattgttatttagttggatattttaggtagatgcccttacattgtgtnttatctttgaaatataagtaaatatataccatttgaatcttagtcattattttctccaatatatatacatcatttaagaattattntttaggaatctattttaatattctcacgnttctaaaacttgtcttncaattgagcctttccanagtcattttggggacatgtatcatgcagcacaacttactgacatttagcttcctt

SEQ ID NO: 296984 - DNA, 584 bp, Homo Sapiens
  misc_feature (565)..(565): n is a, c, g, or t
gctgatcatgaaattaaactgtagttgtgcacatgtgtattgtttcattaacttgcctgcctattcagccttctgcagtaatgtagcttctcagagcacaggagaaaaatgtatctgagagttattcgagagagagttcaacaatagcccatatttccgaacataaatctagtgagccgcattaaagtttcttcatgtctggatggaatagtgtcacttgcataggtctgagggtttcattatttgcctgccccagatttggactccgtttttcaggtgaaagaatccttggataactgtttcattttcataggaaacctctttggtttcgggatccaaagtaatatgtaggttcaatattttgtaggttttataatcaaatgtctccctaaagagatgacatagggaagaaaagcctaatgtatcatcttaatggattcagtttttattatgcacaaataactgggcttgtaacctaggaatatgattagagcgtgatgctggcttaaaaaataggactggtgaatcacagtttgtgaataataaactactggttggaaatatntcccagaagcagttttttt

SEQ ID NO: 296985 - DNA, 478 bp, Homo Sapiens
  misc_feature (172)..(209): n is a, c, g, or t
aaagataagtgttgttaatttcctgtttgcctgctgcagttttctataagaccagtcattctctactcttttaatgatcctggcttcacgtcagaatcatccggggagattcttaaaaacagagatgcttaggactacctctaacctacttaccagaaactctaagatgctnnnnnnnnnnnnnnnnnnnnnnnnnnnnnnnnnnnnnngactagaaggtgagatgtttaaacatcttcatatccagcctggcaaagaggtattcagcaaggagtggttgggtaaagatcaatccttgccttcaagaactttcagaatgagctgtaagcaacgataatattcagtatgctaagtgatctaaccatcctcagagagtgcattggaatacaagagaagcaagtaatggattctgctaacagtgctagatacctaagtgctgaattttatgagacttttggaccagtttgatttagtattt

SEQ ID NO: 296986 - DNA, 527 bp, Homo Sapiens
gaacacctcgtatgtttataggccagttgttactatctattcatgttctttatttattaggagtattcatccttattgatattctaaaacttgtgtattatagataataattctttgtcatgtatttacattttttttgcactttgccattgctttaatgttgtgtaaattcttcatgcaaaagtttgtcttaatgtaatctagattaaatttttttgtcaaagaaaatttccatttgtcgtttaagtactgtctagtttacctgtattttcttgttcacaatattgctttgggaaatacatgttcccagctggtgactaaataacctccctgctgccctggaaaggcagatggaattggttcatttataatgacagttctcatgtgggaatcttgaaggatagcacttgttgtgaaaattatcagtcttccacatgcagcaatttttggtagactcttttatttatattcctttagaatataaatttatatagaagttttctgggaaaatgcttaagtatataaaa

SEQ ID NO: 296987 - DNA, 561 bp, Homo Sapiens
aaggactttactcattggaattatctttttgtgttgatgttatccaccttttgttactccacctataaaatcggcttatctattgatctgttttcctagtccttataaagtcaaaatgttaattggcataaattatagactttttttagcagagaactttgaggaacctaaatgccaaccattctaaaaatgcagttttcataagaatgaatatttcatggatagttctaaatactaatgaactttaaaatagcttactattgatctgtcaaagtgggtttttatataattttctttttacaaatcacctgacacatttaatataggttaaaaaatgctatcaggctggtttgcaaagaaaatgtattacaaaggctgctaagtgtgttaagagcatactcatttctgttctccaaaatatttcataaggtgctttaagaataggtatgtttttaaaagttaagttcctactatttataggaactgacaatcacctaaaataccaatgattacaaacttccttctggccttctggactgcaattctaaaagtgtaaaaaac

SEQ ID NO: 296988 - DNA, 536 bp, Homo Sapiens
gctgggctggagtgcttttcccagaatcaggggatgggtctgatgaacagactctgatgagtttgcaggtgtccgtttccctttggggaaattgtcaccaaattctgttttgataagattttgagaagactagatagaaccatcccctctcccctccttatgtggtgtaactatttctgattcattaagattcctttacaaattgtttttgtgcttatttatactttttaacacctagcccctcatactgttattctctgaaactattgaaaaagtcaatagacagttgtagcaaacatgcttattttatcttctttattacttgatactaaatttcatttaacattgtattgaattggccagatattggcagcagccttccagtttttgttgttcatgcctcttgtatttcaccaatttaagtgtatcatgcatattggtttatgatggaacttttgaaatatggtaaagaactaccatatacctggtttttattaaaaatggatttaagttttattgaacttctttaagcaaaa

SEQ ID NO: 296989 - DNA, 547 bp, Homo Sapiens
  misc_feature (82)..(82): n is a, c, g, or t
gactttgggggaaggtcccaaggagccgttatctgcaacttctcacacctgaatgttagaacgtacttgggtcaattcctantctttaaaagttcataatttaggtgatttttaagaatttatattatcacaagccatgatcgaaaaactttcacaaaagaacattctgacaccaaatctcttcctgaagttactttctcgtaatgtaaatatgaataaagtaggactgctctcggtaatgggcgatgaagaggagccatatttgttgcatttgttgcatgtataaaaatctagatatgcttaaaacggaacagtattttaaaagtacaggtttcataaaatttagtagagttctctgtatagtctctaatcttagaaaaatgttggaagggtaatttttaagtgtagtggtttgaagaacaaaccagaagcgcacaaacctttgtgtattttagaatatatttgtcttcattctgcggagctcttgtgttgtaaaggtgcagaactacgtaaaaatagtgttgggcagacttacatagtacatctg

SEQ ID NO: 296990 - DNA, 539 bp, Homo Sapiens
  misc_feature (52)..(61): n is a, c, g, or t
tagtttcaagattctaaaagtcttgggggcgggaggccacagagtatatcgnnnnnnnnnngtaatacttttatacctaataagtgggcatggcaatacttaaccacattgattcatccagtcgttatccaggggtatatttttcagtttgtcaagtagctagtttttctgccttcacttttcttaaatgtcctttgatcaaatctcaagggacagcacttccaccatagggcagacattaaaaggaattgaagatgaaacacatccatccatcaataagactgtgctaagcagctttcataatggttgggaaggagatgtttaaactaatggcagtaatatgagatgacaaaataattgctattcccagagtggttctcaggtatatttttactccctcagatctacaatattcacatttgcatttcggtgttactgctacttagttcctctttgttagccctactataatatacaacccaagctgagtgaaatttaaatttggcataacaccaagatcacatctagtattttccagg

SEQ ID NO: 296991 - DNA, 494 bp, Homo Sapiens
ataccagtgggtgtccagtttttgtagagagtttcctgtaaaaattattcttaatggtgataatcaggtaaagctatgttgataaagcgttgtatagcttaatggggggatatatgaaatgatggtcaggtgcagcaccagtgtttacagggatccaagggattcagggccacaagttggtagagcatcctcctttccagtcggggccacagtgggccacgtgtagtggtaaagatacttaatattaggcattattttcaagcattttttgtagttatcaaataccactagcacctagttaatactgtttatgggttttggagaaatgccattttattactcctttttgccacccagggccttggtaaagttaatctttccagcaggaactgtgcttctccatgtaatttatcacccttactctgctgtcctaagcttagaactagtctcacctgttagctgatgtgctctgctgtgtttaactggctaccccc

SEQ ID NO: 296992 - DNA, 403 bp, Homo Sapiens
  misc_feature (282)..(314): n is a, c, g, or t
gtctggtcctggagtgctgctttaaggtctttgaaaataataactggcaggacttaatgttatttccttaaaacattgggattataagttgtagatgacagttatttatataaacactgaaaatgttttttaatataagcagaatcaataaagttggtttttacacaattttttaacttctatacatttttataactagttcatagaccactttcatctgtctcatttgatcatggacagtatgatgtggaaaaaatataggatggtcagaggatcaaaggnnnnnnnnnnnnnnnnnnnnnnnnnnnnnnnnnaagacagtcttttaaaaaggcatctctttatagataaggagttaaaattaagttaaatgtcagatcctggcttacagagcaagtgattt

SEQ ID NO: 296993 - DNA, 509 bp, Homo Sapiens
tatataagggtttttaaggatgttgacacctaataattacatgctaaacgcaaacgattaatgtaatcttttaaaccgggcgtttgagaaaaaattttcaagggtatgtcatgataaccaatcatgaatggatttaaatggagctttttgagcacaaccagcaatgtttgtgctttctaagagtcactgacttgagaggaaagaaaaccagaaggttaatgcagtttggatattaaattcttagcaaaattaataattaaagcaaaattaattaagattttgtaagtcatcctgtcttcacatactcagatcttccaatagtggcttattttgcaagatgccacaatatctacacagaaaattgtggctatttcattattgctatagatttcaaatccaacacaaatatttaagggtgtttaagttatatttttcttgatagagggtatgctttgtgacaaaattagatttttgtccttgaaaggattaatattagcatcagttatgta

SEQ ID NO: 296994 - DNA, 467 bp, Homo Sapiens
  misc_feature (103)..(103): n is a, c, g, or t
tctggaggtacgtgggtgtgcactttgctcttcttctccacttccagacctttcaccctcttccttctcaaaccctaccttggagcatgtggtcactgactangcccctcctcactctgcctctctggcttctacctctgacctcaagtagctcctcctttcttgaactttagctcctggccagttctccctctctccctccagcctaatccttgctgcaaagcaggtccactgtgcactggttaccccttcagcccattgcacctaggaatgtgcttttcctacctgcctgagtctggtaaggtagaatactcattcacataacaagttacacaaagcaggttccttatttacagataggcagcaagggacagcagaagcctaagattgacagtgagccaatcccccaaggctcaggaaggctgcccaaggtgtatggaatctggtctgcaggtgccccacttgca

SEQ ID NO: 296995 - DNA, 586 bp, Homo Sapiens
  misc_feature (113)..(113): n is a, c, g, or t
gtattacaagtggaaaattattgtacttcaaacatggttaatgtaaattttctaatgcataaggtaaaatttcatgtcatctacccatagtgaaggtcttttggtgctattantattaaagcctatttggaaccatttttacatttgatcattaaaaataactcttcttcctgtaatgcctgtgtttttgttttgctttccttttgcaattcattctcataggctagttttagttttaaaattttagtagcatttaaattaactcttttattttaaaaacagatacaataatgtcaaaagtggagaaaacataattataacattatttttcaataatgatcctaggagtataagtaataagacattgcatagcaaaatgaacacatatattagagatattttcaaaataatttaaaagctatgtgtaccacagttacttgtgcaatataaaggcaagttaagtgtcataatcataaaaatatagtaattttttcccagtgacagtatgaaccagaacacatatgtgaacaccttttcatatctgatcagttttattcctgatggcaataaaaccatgtaaatgaaa

SEQ ID NO: 296996 - DNA, 147 bp, Homo Sapiens
  misc_feature (48)..(68): n is a, c, g, or t
attatgaatcaactttctcttagaattattgtctaatttatttctgtnnnnnnnnnnnnnnnnnnnnntgtaagacacaagtaacattatttatgccttaaaattaaaagtttgtaaaaattctggtgagagataaagaaagctgct

SEQ ID NO: 296997 - DNA, 485 bp, Homo Sapiens
  misc_feature (97)..(142): n is a, c, g, or t
  misc_feature (163)..(238): n is a, c, g, or t
gtagtcattttcctaaaggcacttgcattttaagaagggaaaggaaacaggtaagagctaagcatttcatttaactggcagtggaaaacgtaatcannnnnnnnnnnnnnnnnnnnnnnnnnnnnnnnnnnnnnnnnnnnnnatagagacagggtctctctannnnnnnnnnnnnnnnnnnnnnnnnnnnnnnnnnnnnnnnnnnnnnnnnnnnnnnnnnnnnnnnnnnnnnnnnnnngtgtgagccaccattgtccggcagggaaagttcatttttaaggctgactatgtatgtaccaagggcctattattcccctgggatgctggtgttcaaggcattgtctagtctggcataggtgaggcacattcatttgagtggccacctcccatgttgcctactcggctggcacggtggagagcttagctgtcttttgagtctgtgacttgtttagactttactggtttaatcagaaggctctgaattt

SEQ ID NO: 296998 - DNA, 490 bp, Homo Sapiens
gatattctgtaatatagcggctttgttcttaagttttaaagtgtttcttggcatagagagtcagctaccaccagcattcaagccatacccagcattccagcactgctgcctgggtatgtaagaagaagaggggcagtgggtagtgggctcccttggagccgctgttgtggcaagaaaggactttggtcactcacagtcaggaagagtctaggagtgctttgcaggtcagtgaagcctgtcccaggcagtgctcatggctgtggggagctgtgaagcagccgcagctgacaggccagccaggcgtggcgtgagacacaacggagctgctccttttgaggcagagattttggccaaatgtgtatccaagaggcagtgtcataaaaagtgacagggccttcacataaaagctacaacgtctaacaaacagacacatttcatgtgagtttcacagggaaagggctcttggccacgtgccacctccctgccacag

SEQ ID NO: 296999 - DNA, 498 bp, Homo Sapiens
gatctaaaagacagctactgtgcagatctaaaggatctaatgaatgaaaatcagttggttgaagttatagaaagagcaaattttagctccatattgagagacttaactgcaaaagtgttaccagcttactgggaagagctgtgtgtctataaactatagtccacatctgagtgccatagataaagcattcttaaattcagggaagggagagtatgattctctccagggaatcagaaaagattgcaaggaaggagggaaaatataagttaggttttaatcgcagttaagacttggacaccctaaaagtgtggttttagaagaaaatgagaggaagtaggggacattttaggtcagtgaaccacacaggcaagagcaccaaagcaaggagtgtcttcagcttctatgtgaggtgatagggtgtaattcactttacttggagagtggtgatccaatgattcccctgccatttgttttgtaagttaatcaaaataggagccg

SEQ ID NO: 297000 - DNA, 465 bp, Homo Sapiens
ggcttttatttgtattttaaaaaatatcctgagtgataaactggtagatgtaagtgtcttcctcagttctgtgaaccacgctagcaaattaatcaaacccgaagagaggggtcatggcaaccccaacttgaaacctgttggtcagcagctccagagacctgaacttatgactggttggaaggacggggtgctcttgtgggactgagccctcaacttgtggatctgatgctatctctgggtagacagtgttggagctgaattggaggacacctagcttgtgtccactgcagaactgattgcttgcttcctgctggggagaaatccctatatattttggggtccagaagtcttccgtgttgattgtttttgtgtgagagcagaggaaaaatggtttgagagtttttcgggaaacagcccctcttagtatagtggtagaaacactccaaaaataaaatatgctacccc

SEQ ID NO: 297001 - DNA, 476 bp, Homo Sapiens
gcagtggtatcaaccagagtggcaattacggccgggggggcatgttttgagaagaatacaagttaactttaaattacatagaaaatagatacttgttttatcatttctcccgtgtgaaactagtgtctagttgtgttttatatatctgaaatcaaagcacctttgataggtgcatctctctgcattttatatgttagcagagaaggtggcttaagaccaaagctttgttttaagaggaaagtaaattgtttagagagataattctattcctcgccatctttgaaaagatataggtatgaactgcattctttctcggggtatgactttagttcagcctcaatattgcatttgatcctctcaaatgtagcatggctgtagtggacttttgtcaacaacagcaaaagaggcagtataacacatggaccaagagcaggagttctagagattcatggactgtgttcaaattctctaccact

SEQ ID NO: 297002 - DNA, 452 bp, Homo Sapiens
gagagaaggaaggaagtgtgggtagttaaggtgatctaaaagttttaagaaaacctagaaatttatatttgtgatttggaaattatggcatgcaaacgcctgcttctatgaatgtaattctcccgttttgcttcaatattctttctttcctgtttcacctaaagaccgaagaatcattgttaagttgactttcgtcctttagtcctgtggccaggacaacagaagcacaatctaaaatatagtgcattccagccccagtttccccaactacttctatgaatttttcagacaagtaaccactctgtctttgttttctccaacataaaagcaaattaaatactactgactctcactggaaaagaatatgaatatgtgtgagtttttccatgaaaaagctccttggaaaatgtagtaagtgacttcaacctataagactgtttttggtttagata

SEQ ID NO: 297003 - DNA, 500 bp, Homo Sapiens
gtttcaaacaggaggtgcaactacacaccaaaattgaatatctagaaatctggaaagtagctgctgtgcactactgattattttagttatagtattaaagcgaagagagaagctatcatgggtgctatgttgctcaggtgactatttccccttactcttctattcccaatacctgccctcctttttttgtagacaaaaaggtgactacaagattatctttttatattgcaacccagttctttgtactttaactgaaattgggactatcattcattatagttactattacagtgatttatttgtcctgtttctatgttggttggttgctacttgctggtacagtatgatgtagagaccagatggtactgtaggagtaaaccaacctgtgttgaataatttcccagattaattctggccctcgaattatgagtatttggttgtcattacttccttgatacccgtgttaataacaggtctttccattgtggctctatagtgaa

SEQ ID NO: 297004 - DNA, 313 bp, Homo Sapiens
  misc_feature (100)..(111): n is a, c, g, or t
cattgattttctagtagaaattctgggaagggcttttctgtctctcgaaattgattcagtacagttgacagcttcatcacggttacctggtctaaacacnnnnnnnnnnnnaattctccagtgatctaggaaattgtttcatttttaacacaggcttatttctgatggggatgggggcatagaataatatgcctaataagctaaacgttcttaacgtttcatgtcttaaactgtctttttgaacattgagaccacctcaagtgctgtaaaaataagaatgttatattaggggtgtgtgagacgccctagtcta

SEQ ID NO: 297005 - DNA, 319 bp, Homo Sapiens
tgcttaatgttttgatgtatactatgtttgatgtaacccgctttcaagttagactcaaaacagattcacttataagttaccactattatttttcgtcctatcaaagaagaaattcccttttgcttctctgaattgcttgttgcctagttagcacttttaaaaagctggtctaatcgaatatgaaccttcaaaagatatacttgaagggccatctgctgaccccagctcttgtccatgtgagcaacttgtaatggtggctctgatggccatgtatgtggagtgagaaacggcagatggttgtaaagatttaaaatcttca

SEQ ID NO: 297006 - DNA, 231 bp, Homo Sapiens
ataagtaaaaagatcttgatgcaaaataagttaatcagagtgaataagtttgttcatccaactcataggttaggaaaattgtccctaatcgctgaagatcttaagtggtgaaagtctaactggggtgaggagtacagcctttggtcaaaatgcctgatgtcagcacaggacatagagaagtaggcagaaatagtctcaccttgagatgggcaaagtaggggtaagacagtg

SEQ ID NO: 297007 - DNA, 233 bp, Homo Sapiens
tgaatcctgtatttttaactcccagaatgggcagaataataagcattataatccataaacatctcagtacaaatatatagaccaaattatcaagtccaatggaccctcaaaggacaagacacatttgatgtacatcctgtgtttgggacatttccaggggacctacttcagtatggatgaccccaataagaatggagctatcaagtgccttagatgtaggtggcaagggaaat

SEQ ID NO: 297008 - DNA, 262 bp, Homo Sapiens
aaggatagacaagacttgaacatatttacagatggaataagatctgcataaggcaagatggaaaggacttaggacataggtagagagattggcttccagtatggaaagcacagctcatctgtaaaacctagaaagggtaaagatgatataattatggaaacatttatggatagggagatggagtgttgaaggtacttgtgtgtgattgcgtcacttttcactttcatctccgccctcttcatattatttaatattaatattc

SEQ ID NO: 297009 - DNA, 309 bp, Homo Sapiens
gtgctaatttagaatattaatgtctttatctttaatttaacttttcattctgtaaacataactagcttataaacaattttgtttcaaatgcactagcctttttagctaattcaattgtcaataacttttacttcaattaaaagtggcaagtttacactcataataatgtcactttcctccctcccttttaacaatagttgagaggaaattgtgtttcaaacaaaaactgaactcaaactctgtctcaagtcctgagctttgggacctattgagtaatcactaaatgtctgtagtcagccaagtctctta

SEQ ID NO: 297010 - DNA, 215 bp, Homo Sapiens
cttgaaggaaattagaggaaaaatcctattgtaattggcataattcctgttccttgatcaaatgacaagtcggactgtttattccaagagaatacagaatctaccctaaaagactctctttccctctctgtttctgcctctttctcctctttccagttacttactgtttttggatctagtggcagtagcgtttggtggtgtttttggaatgctct

SEQ ID NO: 297011 - DNA, 262 bp, Homo Sapiens
ggatggcagccatcttaccttccatcagaggagcctcaccgtacccaggaagaaagaaggtgaaagaggaatgtgaaacaggtggctgggacccagaaaccctcttaccctgcacctctgtcatacttctcccggggcatagggagagttattctgcttctctttgccttgttttgtaacatggggtagttgttggtgcagccatgttgtgctgagtgaacatatattaagatctttggaacctttaggagactgaaaatag

SEQ ID NO: 297012 - DNA, 258 bp, Homo Sapiens
gagactggggaccagtttgagagcttaggctgccctaggccctgcccagcttctctaaggcaaaaagatttaatatatcagcatgattgtgacacattggaggcataccagttgggaaacactggtttgaactattttcatatctagctatttcctcttgtgaatggggcagatggggacaaaccaatagtaagtgacctgaaatcacttttaatggttttcagaaagcatctggtcacctgagatctatagagaaga

SEQ ID NO: 297013 - DNA, 392 bp, Homo Sapiens
  misc_feature (270)..(289): n is a, c, g, or t
  misc_feature (365)..(365): n is a, c, g, or t
  misc_feature (367)..(367): n is a, c, g, or t
cctgaaacatttttagtagtttcccaaggcatattttttggaactgagttcttttaggcatctctgatgttggtgagatgctttattaactgaatggatgtaggcttccttttacgttgaagttgattacatggagtaagtttttgttttctatttgaaattaaatggaatctgttggagggttatcaaaattgtttgcatcacaaataggtagtttcagtaacaggataggggcactcattaagaaatttcaattcgcacatatttggnnnnnnnnnnnnnnnnnnnngactaatttggttatttgccatttctggggattaaactttaaaaaatggtcttcttttctgtatctgatggtctgngngctattagtgatgcagccaacacga

SEQ ID NO: 297014 - DNA, 549 bp, Homo Sapiens
agactagatcgattctgtgtggtttatcatagtagatacacaaaccagtctttattttttacttaagaaaatatataagtggaagttatcagtaaactggtgattattgtattgaatgcaaatctttttattatttttccagatatattgagttttataaaccattaaaatattattttatgaaatttcccttcctggatgaacagaatattgttttattaagtcttctcttattagtggaatattttttacttctttgtcttttcatttacttgttttttgttataatgaaaactttactagtgtttggtaccattgagataacttattactggaaattttgtttgcttcctgtgggatatatctggaagtggtcatagtccaaccatgtccttttgatgttgttagcatatcagttattctatgtattgatcttttcttctcctgtattcaacacctctttctgaaaggatgtccgatcttcccataatcgctttgaggtagatgatatttttattctatcagtgtatactagacaggatttttgat

SEQ ID NO: 297015 - DNA, 688 bp, Homo Sapiens
gtagattacactggtaaagagcagaaattgttgacgctttagtacctagctgtcttaaagcatttttaaacatttgcacattactaataaaaagtttgaagttaacaagaaatttgacataaaactgagtaagctgtaaatatttcatatagaagatgtctgacacctgataaatgttacttaccaaatagaactgaaagtgagatgatcagaaaaagattgtccttgcctcaagcaagcttctgaagcctaggcaagttagctaggtccttaatatgggattctggcatcctgattttaatgtgctctgaaaacaaagtgtgtgactcatgaaatagaggacactaaaccccaaatttgaaattatgaaaactttaggccaaagaggtaaaataaaaacagctgttgggagtgaaaaatggctgtaggaatttagttacaagtacttcacaaaaacattttcatcacatttacataatatagcattacaatacaaagctggctgctgtcctgaccaagcaagttctcttatcatctaacaaaaataatttagatacatttctttgcatggaattgtcatatttttccatttttggtacaaaacatagaaaaaaacattggcacattatgtagtgataagtcattttttccccatgtacaagttccaagtattctgcattccaatttg

SEQ ID NO: 297016 - DNA, 332 bp, Homo Sapiens
tagttgggttgtagaactaacctggcagatgtgtaagatagattgtagagactcaagaggtaaagtagttagaaaactaagaaatagtaatggagcctggactagggtagtgactagaataagaatcaatcagacagtaaatatttatcgtctcctgtgtatgaggagtcatgctgctaattgctggacataacggcagtgaatgaggaagatacggtgcgtgcactttggttacatgtatacggtctaccttggaagcagatattcagtaaaacaactatagcaaaaataggtgctatgaaagcacctaactgatgtatcacagatgggga

SEQ ID NO: 297017 - DNA, 146 bp, Homo Sapiens
gaagtttgtgttgctattatgataaaaagaactcagcacataatagttgttctatacccttgaatgaaattgaaggttcccagccagctctcagctagtttcctcctggaggagtcagaatgtctgaattgataattatactgaag

SEQ ID NO: 297018 - DNA, 331 bp, Homo Sapiens
  misc_feature (320)..(320): n is a, c, g, or t
ggtttgtgtttatgtagaattttgcagtttgcaaagtcccttctcttacatctcttcatgagggtttcacaacgactctgtaaggtaggggttgtcattattcctgctttcccgataaggatacagaagctcagagagggcagacatttgacctggagtagaactagggcaagaatacaggccactgtgtgccccctcctcccacgctctgtctctctctgaagatgacctggggacagcataatacaaagtggatggaatgggctgagaaaggagaggggttagattttccatttaaccatgaggaggtggtgtgtganctgggtttgga

SEQ ID NO: 297019 - DNA, 592 bp, Homo Sapiens
acaatagcttttgtcattgtttgttgcctgctcataggaagactcttaataatagtcttctcatttaaaaagttttaaaatagttattcaggaaattccttttacacatttctttattcctttattaagggtctactatgcaccagacatcatttttctaggtgattggagatgaaatggtgaaaaggaaaggcaagaatggaatttcctgctagtgggaggtagaagaagagagtattaaaaattttttctaagtcaaataatgtcatatacatgagaacgctaggtggtattatggcattatcagcttggctttccccttaaatgaaataggaagtgccctgtttcacttgaacagtgttatttcttttattaaaaagttacaagaagttaagtattttgaaaataattaatttctattctaaattagccaaatgttatatttgtaaaagtagagaagtttgttccattgcttctaccaagcatctaagtttatgtagttggggcagcctagcagtctgtctaatgagcagaatgtatactttaggcttatataaagtattcagaaatcccccccacacctcctttttgg

SEQ ID NO: 297020 - DNA, 141 bp, Homo Sapiens
ggggcagtgacttaggaagtctgcctacgtggagaaaggctagaaggggaaactctatcaccaagggaactcttcccatagagatgtgcttgattgttttgagatttctctttcctgttcatccttcattccctattaagg

SEQ ID NO: 297021 - DNA, 349 bp, Homo Sapiens
caaaacatctcttccatgtctgcagtaattcacaagttactggaaaggaacatgtagagggttttgatatctaaaccctacccagttttctgtaggatcttgattttattttaatgcaagactgctgaccccatgatcctgtgtgttcttcagagatactcttactgatgatgtataaatgaactttgattcagtaaggtcagttttgtaggtctcaaagtactttggttattgtggtacatcagaatgatagctagtatttactgagatctttctatatgtcgggtaataaaaatcctataaaagtattctttctacagccacaggaggtaggtactatttttatttt

SEQ ID NO: 297022 - DNA, 455 bp, Homo Sapiens
  misc_feature (81)..(91): n is a, c, g, or t
aaagtggttaatgactttccattgaggtctgatctgacttagttttagcataaagtaattacaattcatatttttagaggnnnnnnnnnnngtagtagtagaaacaactatttctaaatctggggattcagtagttcattcaaattaggatctttaagagctgtctaggtcaatgttccttaacgttttctacctgggagtaatctttaatagaacaaaaagaaaatgaaactctatataatttaatgcaaagtcttttacattaatgtaagggtatgaaaataggttggaggaatatatggggaggtaggaaaatgggacttttttcctccatttacttttgatgtttgaatttcaaacatgagtatatttgtgtattattttgcggttaaaaacactgaatattgcataaagatcaaagagggaaatttaagggaattaatgggttatgattg

SEQ ID NO: 297023 - DNA, 322 bp, Homo Sapiens
  misc_feature (117)..(117): n is a, c, g, or t
cttcatggagagggatgacttgtgctcgaccctaaggatagtaaggatttccatagatggttaggaaaacttcaaattggcatacaggaaggcaagaaggagtaagatgtggttgantaataaggagtagactgacctctctgtacagtaaaggctcaaatcctttttattgcaaagaaaggacctgtccttcaccagttcctggaagaaaatctcttgagtccttgggatgtcttacctgttaagagtgcttttgtatgcctgagaccataggccttgctgttacagtttaagctctgggaaacgagattcaggagctaag

SEQ ID NO: 297024 - DNA, 355 bp, Homo Sapiens
ataacgagtcacatttataaacgtcaccacttccatcacaagtttgataatttcttagtatatagtataggtacacacatagtatatgcacacacaacatgtattatcttagaaagaaacccagtaggcataaggaacctcatgtaaattcagaacttattcatacctgtaacaactccaggcaatgcattacatcagcaaagtgacagaacccagatcaagctcctactcatgtatcagggtcacaggcacacaaactagatctcatttgacaatatagcttttctggaaaggaaccataatcttttattttaaacaaaatcatgtttaaacacactaagacaaccagtgagac

SEQ ID NO: 297025 - DNA, 340 bp, Homo Sapiens
cggggccactggagccaccagctggctattggcaactcttgttcttttactttgggtgctattgtgcaaatattttctatatgtgcacatgatcggaaaaatcttgggaaacttggcttagcaaatttaaatcttcagggccttttaagatgggaactcagtaaagtttccttgatagaaatttgcaataagatttactaggaatgcttcaagtattagctctgtgctgtaatttttattaaaaggattgtggtgtctattaggatgtggaagctggattctttggccttgcaaagtgtgttataaaagggaagaactcctcttcttaaaccacaataga

SEQ ID NO: 297026 - DNA, 521 bp, Homo Sapiens
ggtagagaattctatacagaagaaagcagagaaagatagatggggcaagagaccctgtccccaggcatttagccacagtttgaggtgaagcctatgagcccagactgggcagcccctggctctggcaggaatggacatgccattcaaggcaaggcattttgtacccagcttcttcccaggtgtactgtgaagactaatgggccaatacacagaaaggtctgaggacaacatccagcacgtaggaagtgaccacctgtgacataatcattaccaagatgagcactgtgctctttatcatggctttgtgtgacccaaggctagcacctcaagtagaatgctccttaagtctgccagatgaccagtgttctaacccattacttccaagctccctgtctgatgattagctgcataggattgcctttcttggaactcttgctcaaagtcttgctttccttattcccaacaagggcacatgctctctttgctttgatgactaactgggccaaaaataacccctatga

SEQ ID NO: 297027 - DNA, 488 bp, Homo Sapiens
tagactcagccatctcaacatgaggcctcctctgtaatcactgtggacccaaaagcaaatgttgtacagccttgtactaacagttaaatgcactcataattggccggaattagtagctttgcttaactgaaagagggtgagaaagtataattttctcatgttcacagaagggggtatgaataactattcaaagtctttacaacagggagtaaaaatatttccttcaaggaacagtgattaaggttaccagttttcagtgaatagctaatgcctgatataccactgaataaattagggatagtcatggtggcactgtgacttgaatttgaaaacaggcatctgataagacaagtcagatcttcaggggtatttcatttggggagtgtcatgttttataaaacttgaacacctctaagaggagtatgttctctagctcaccctggctcccaccaccctgtgctgtcttatatcaagttgcttcacacatg

SEQ ID NO: 297028 - DNA, 493 bp, Homo Sapiens; identical to SEQ ID NO: 50789

SEQ ID NO: 297029 - DNA, 351 bp, Homo Sapiens
  misc_feature (244)..(295): n is a, c, g, or t
gaaaaataaatcaccatggatatattcctgaaaagagtgataccttctcaaggagagcctcaggaaggtccttcagaagggattccacaggaaggcactgttgtcacaggagatgacaactccaggcatgttactctccctgaagactttccagtgggacaagatgtggaggtggaagacaatgataccgatgatcctgaccctttttttgctaaggtgtgtatttatgtcttggtttttaacnnnnnnnnnnnnnnnnnnnnnnnnnnnnnnnnnnnnnnnnnnnnnnnnnnnngcttatagagtatggatataaagaaaggaaatattttgtacagctgtacaatgtga

SEQ ID NO: 297030 - DNA, 515 bp, Homo Sapiens
  misc_feature (263)..(325): n is a, c, g, or t
gttttaaagttgcaggaggtgaagagaggaggatactactttttgtgttctaccacatattgaatgttcagtttctcaatgacaaagttttgggcacataaaatatagcattgaggtgttttaaatcgtcttgaaaagtaaatattgcattccacatagctgacaaacttatgggcacatatcggttttaatctgtctcaatctagaaagtaaaaataatatctagaatttaggccttagaattatctttcctgcttactcannnnnnnnnnnnnnnnnnnnnnnnnnnnnnnnnnnnnnnnnnnnnnnnnnnnnnnnnnnnnnnacaaaatcaaactaggtttccctctattttaattattgttttctttacttctttctatttgctgaatcacttgtttttatttcctttactgtttaatgtgtagaaaacaaggatagggagagatgaaagaagcttttgggcattatgaggaagccctgttttctccaccctgccttcacttctcaccttc

SEQ ID NO: 297031 - DNA, 475 bp, Homo Sapiens
gctttgaaaaaggttacctgtttggggttgtgggtcactctatttttcaaaaaccttaagccatcttctacagtttccacatttcgtttctgacattggtgcatgaattaaaatgtgtttcctaagcaattttaatagatacttctggacacatttatatcttatggatatatttcattcatatctaatttgacaaagttgtgttagtgacttgtctttatcaagtttttctaaagcattcaactgatttttcatggaaacagcagcttctttttcagttattttatgcatttatgtaaaatctcatttaactacatgatttcaatggctaatgttgttagcataaactagtttgggaacaaacccagctaacttagcaagcataggtcttaactggtggaaataggcatgaaagaacgtgggaatgtaacccaataaccacagatgttcagtatgttatttgcattagtcgctg

SEQ ID NO: 297032 - DNA, 489 bp, Homo Sapiens
  misc_feature (353)..(372): n is a, c, g, or t
gtccctgcaagggacatcatctcatctacattcttatggcttcatagtgttccactggtgtatgtgtaccacatcttcctttatccagtgtatcatctgatgggcatgtagattagattacatgatgtctgctattgtaaatagtgctgcaatgaacatttgtatacatgtatttttaaaatagaattatttatattcctttgggtgtaatggtattgctgggtcaaatggtagttctgcttctaggtctttgaggaatctccacactctcttcctcaatgcttgaaataatttacactcccaccaacagtgtaaaagtgttcccttttctccacaacctcgccagcatctgnnnnnnnnnnnnnnnnnnnnattaatagccattataatttgtgagagatggtatctcattatggttttgatttgtatttatgcagttatcagtgatgttgagcttttcatgtttgttgggcacatgtatgtcctctt

SEQ ID NO: 297033 - DNA, 501 bp, Homo Sapiens
atcatagaagggcttttgggagacactgttagtagaggttttgagcaagtttttctaagagtattctcccactactcgagaagaagctaaataaaatagttcattaacttatctctcgggccaactgcttagggcatactgatccttatactcatttctctttttcttgggcactcaaccagaatatatttttcagcatcccctgcagttggttctggccatgaaaatcatgagacaatggaatgtgagtggacattatgtaataatttgcagatctgtcccataaacacctcccacagatcctctagtcccttatttccaggttggttggtaagtctgccagcctagatccttgaataattgggtagaacagagcctcactgtaggtcaggaacatctgttgttagagaaaggagacaaaccctctgagatgtgagggttgtgtattacatcagctggtattgccctaactgttgcattgcttgtcaagcatttcttcta

SEQ ID NO: 297034 - DNA, 498 bp, Homo Sapiens
tatcttgccaggcagatgaaatcaagaaagggccaacagttttattatagggagggccccatctttcagctgttgtaatgtaatcataaaatgtcctaatgagctgcaacttggcatacagagagcacttcctggcataggctggtggtaatattttcctgtgaattttgtttaggtagccttacggtgttataaggcttaagattttaattcctaaacctaaattattgtatttttctttaaaaaccaaaaataatgagagtttttgtgatttcccctcctcactcctgtgctggaaaggtttcaaggtacatttaaaatataatcacagaaagcagagcacagcattttttttaaagagctattgtgttatatcagaagggtaatatttcctaaaacacacatgcccaattcatgcttcagcatatgtgttataaatgatggtgactatccagatcctgttataggctattcaagttacttcacctaaactttagt

SEQ ID NO: 297035 - DNA, 343 bp, Homo Sapiens
gagcacaaatgagctactccgtatgagcttgatatctttttatcagggagacttctggcagacaactgcctcttgcatgaacttaattcaacaaacatttttcaactacagagctccataaaggatatattaaagatgttctcaagaaagtcaactttgcccttcccatcacatgatgatatcatcagcctggtgtgtggtgaataattaattacactgtgcctgagacacacaatataccttgaggtcacctcttccctcctaatccttcagctgaagcaattaaatattaagacattgcagagctcatagctttgtggtgcccacattgcaggcacactac

SEQ ID NO: 297036 - DNA, 281 bp, Homo Sapiens
  misc_feature (125)..(226): n is a, c, g, or t
cttcggcccttacggccgggggaatatcacaaatacagttggtaagccttaagaacagactaaaccaagctgaggaaagaattttagaggtcaaagactggtcctcttgaattaatccagtcatnnnnnnnnnnnnnnnnnnnnnnnnnnnnnnnnnnnnnnnnnnnnnnnnnnnnnnnnnnnnnnnnnnnnnnnnnnnnnnnnnnnnnnnnnnnnnnnnnnnnnncagtaagcagcttagaaaatgtatttgaggatatagcctgtgaaaatttccccag

SEQ ID NO: 297037 - DNA, 303 bp, Homo Sapiens
gagtgagtttaataagtattatcctcagttcatggcactaccatcattgatgaactaaaagccaagacttcttactctctcatgagccaaattctactaatgaccaaccatctactctccgcattcttttccaccagccagcaagaacctcccactgttgtggtatttcctggtagagatttcgtcttttccctctgaatgttgatagataaaaatagttctctactccttgccaatatcatttttatccactatttaagacacttagatggcttatatgaatgctatattcggatatgagga

SEQ ID NO: 297038 - DNA, 504 bp, Homo Sapiens
cggccggggtagatagagatttacaacttataataaaagtgtctcaattactaatagaactaaatacgtttataagtttcttgccccatggggtaaagataattgcttttcaaaactgagactatcacaactgggcaatgactcgtataatccgcacacaagtcctctggggaacccatgagcagtagttggttgtacatgggtaattttggtattctgtttcccagagcttagtttatgaaaatatctcttttatctgctgtgatgtagtcatcttcctgtctttcaattcatcaaactagggacttgtcaaaatttagatctttctggttttctgttttgcgtagaatatataagttgctgcttttaatactggcataaataacttgtcctttgggaaattaggcataaaacattgcttaatttcaaggcaaaaatgttcggacaattccacagctatcttcacatttatccttgacacaaagaaaaaagaaatacctgtag

SEQ ID NO: 297039 - DNA, 253 bp, Homo Sapiens
tgaataatgctgtgataaacatatgagtgcagttatctttttgatataatgatttcttttcctttgggtagatgcccagttgtggtattgctagattgaatggtagttctattttcagttctccgagaaatctccatactgatttccatagaggttgtactaatttacattctcaccaaaagtgtatgaccttttctctgtactcttgccaacatttgttatttttgtctttttaataagtcattctgactga

SEQ ID NO: 297040 - DNA, 237 bp, Homo Sapiens
ttgtcaattaaaaatgatggtaaatgcatttttagccatggagattcagttatctcctgcagaccttttaggaggctgctgctgaatgtgttctagcaaaacgaggaagtgaatcaagaacggagaaagcatacaactaggaaataggacatccaaacaaagatggaggtgaaatgaatccacaggttgatgggggagggaaatgctaaggtaacaactatgcattaggcctagttg

SEQ ID NO: 297041 - DNA, 244 bp, Homo Sapiens
gaagaatgggatcaagagaggaaaaggcattctgctcaaaggacgtttatagctttgctgtggttatccactaagtgcatcagttaaagaagcgcgttttatcttcttttttgcttctgtttagacttcatgttaaaatggctctaggcttttctattaatagctctagctagttggtctttatgaagacatgctgcactaaatttgttctcatgattagaatcttgtaatcataattacaaga

SEQ ID NO: 297042 - DNA, 256 bp, Homo Sapiens
  misc_feature (235)..(235): n is a, c, g, or t
cggcctctacggccggggggggagtggagggtctgtctcttagggtaatgtcttggcagttgaatacttctgattcgtatatttcgtgtaacacactggagaaaagaacagtagtttaatgtcagccttcattctctcttctaacttgtatgtatagttttctcatcgaaaattcatttttgtaggttagtatgaaggaaatagcgtgtggattttttgctttatattttcttgnttgggccaattaagggttgtc

SEQ ID NO: 297043 - DNA, 390 bp, Homo Sapiens
tacccttatgttacattgcctacagtattcaaaacagtaacatgctgtacaggtttgcagcgtaggagcactaggcactatatagcctcagtgtgtagtaaaccatgccatctaggtttatgtgagtgcacactttaatgtttccacaatgacaaaatcacctatcaatgcatgtctcaaaatgtatcccatcattaagcaacccatgactatttttgttcatgtgctgagttaaataaagttagttataggaatgatatcagtacactgttgcagtgcttatagagattttattttgcctttaagtcagtcaagataaaatggattttgaagtcagtgatttactttaccatggtactacattttctctatgtgaaaataaaatgttaa

SEQ ID NO: 297044 - DNA, 380 bp, Homo Sapiens
  misc_feature (42)..(43): n is a, c, g, or t
  misc_feature (128)..(128): n is a, c, g, or t
  misc_feature (162)..(162): n is a, c, g, or t
  misc_feature (164)..(164): n is a, c, g, or t
  misc_feature (172)..(172): n is a, c, g, or t
  misc_feature (219)..(219): n is a, c, g, or t
  misc_feature (270)..(270): n is a, c, g, or t
  misc_feature (283)..(283): n is a, c, g, or t
  misc_feature (287)..(287): n is a, c, g, or t
  misc_feature (333)..(333): n is a, c, g, or t
  misc_feature (337)..(337): n is a, c, g, or t
  misc_feature (340)..(340): n is a, c, g, or t
cacagatagtctggaactccgcttaagaggcgctgacatcanntcttcttccttcaaagtggcctgatactgtcactttatatttctgtaggaaaatgtgttccaaaggactgatgtgcattagtacncccattgatatcttggaaatgatttaaggtcaanangctagaanaggtgtatattaacacatttactatcatgaggtggattcacttgaanaaagaagccccgagggattcctgcaagggtaggtgggattttaacaggcantggaatgatgaanggcntttcatgtcacgagggtggtgtgctctggaggaaagaccctctaantgangantaaggggcacaggtagctctgcatgcttatttttgcaacg

SEQ ID NO: 297045 - DNA, 281 bp, Homo Sapiens
aggattatgtcggctgtctaccccgtgggatgcagacagagaccacgaagttacagagccctctccatcttcactcccccgttcagggctcctggctgagccccgactgtgtgtgaagtcacgccctctgaagaggagcattcgcatccacagctgaccccctatttttaatgggacaaatggattccttgaatgagccctttctaccatccaagtgtgggccaagacttccgcccaggcctcctgattcccacaaacacagcaagattaagattaggtca

SEQ ID NO: 297046 - DNA, 423 bp, Homo Sapiens
tgctggcccaggccttaagaagaccagttctgtcctcactctgccctcaccctgtcattaagtttctgtgtgcctttgggtaagtcacctccccttttgtgcttggtgtaaaattgtagatgtgatgagctttaaaggctcttttcagcactgcagagctgcatgtaggcttcaatattacagtgatgaattgccctctgttatacttctagttcagaagaacttagggggtagaagccgctgctcttggttgcctatgagagtagttaatgcacacagtgaaaacaaaacccaattatgaagttcagttgaatgcattttcatttagtcctattaatacagttagtaattcttcccagtgttaaaatctcaagcttcctcttggtctggaccctaaggtcattgagtttgagagaaagcaaa

SEQ ID NO: 297047 - DNA, 252 bp, Homo Sapiens
taaagtgggcctctgtcacattcttccctatctttcataagtagctaccctcacctcttctagttgttgtccctggtacttatctccatattttcaaagtttaggctcttgtcactatttcttattttatcagttttagatcttacttattgatctctggccatggtagaagaggatgtagttctcacatagagcaaaatgactcatatcttctaaccgaaaggacctaccaaatgttctgtacaatgaatg

SEQ ID NO: 297048 - DNA, 669 bp, Homo Sapiens
  misc_feature (82)..(82): n is a, c, g, or t
  misc_feature (571)..(571): n is a, c, g, or t
  misc_feature (589)..(589): n is a, c, g, or t
  misc_feature (606)..(606): n is a, c, g, or t
ttcttaaaggagagtcaagttacagtatcatgtagtggacagtcattgccgtggcattgcagtaaataaaatgctcaactcncgatgcagttccctgtaaagcaagtctttgaggaacccagaagtgggtgggaggacaggtatctaggtttgttacttactctttgtctgtcctaatacagagaagaaaaaatctaacataacctgaaggaaacaggggccacatacatacttttcaggcagttctccatgaaaagtttcttgcaaccaagcttatccaaagatgcagcagaaaatcttaacttgcattttctgtatatataagaacttgagatgtatatattttgttactgattaaaagcaggtccagttgttttgatcatcagtttgatgataatttgagaaggtagacttaacagctttttctgaaaagagagaaatctaactcaaatacttaccaaatagatggccagctcacctctgtcaagaggcaggcagaagaaataatgtataattctgtggaggtttcattcttaaaatcccatctgacctcttgtgctgagaaataatntctgcccattttattctnaaaatcaagtctgtatntaatactaaacactgtgttgcagggctggcagaatgagtttatcagtcgtatttgtgttaaac

SEQ ID NO: 297049 - DNA, 590 bp, Homo Sapiens
  misc_feature (442)..(442): n is a, c, g, or t
cggcccggggtattcactcctgggcagtttgttgaagattaggtggtcagctcacaatgaatcataagctgcttttgtcccttgctgtctatgcttagaagctaaaaggttaagcagcgatgtcagcgctatcagggagctgtggagactggaattgaagttcagaacctttcatgggagacagctcagagatgccctacccatagaagagaaatctggcagtctggccacagcagctttgctgacctgcagtgggatccgaccagttggaacttcccagcggctttgtttacactgtgagctgtggagcataaaactgcctactcaagcctcagcaatggtggacgcccctccccacaccaagctcaaatgtcctgggtagatctcagactgctgctgtgctggcagtgagaattcaagccagtggatcttagtttcctgngctccgtggggttgggacctgccgagccagaccacttggctccctggcttcagcacccctttgcaggggagtgaacggttctgtctcactggcgatccaggtgccactagggtatggaaaaaaagaactccagcagctagttcactca

SEQ ID NO: 297050 - DNA, 624 bp, Homo Sapiens
  misc_feature (449)..(449): n is a, c, g, or t
  misc_feature (594)..(594): n is a, c, g, or t
cactatagtcttgggtattttataaaatacagaagtatctgtttttctatagggtaaataaagtacaaaagataactgaaaaacagttgtgaagaccttttgctgccaaaccttcaaataatacaaagtatttcctttatcaccatccacttccctcttattttttattttagttagttctctttatacctagtaattgacatttataataacataagatctgactaaaatgtatgctactatataattttaataccatatgcttattaagtattagagcagttcagttatgaagctggtgttttagcaattccaactgatgtttaaacaggagaacgttttttaaacaggaattatgttccacactgtatgctacttgtattctctaaacataaaggagttacttggtagtaatgacactcctgccactgatgataacaccatatatntgcatagagcgttctagtttacaaatattgacttgcccagtgttgctcacaggtcagactctttagacacagatctgattctaaggctacaaggttatagctcatttaaggttttttttgctattgcccactgaactgtgctgtncttgccggaaatcatcatttccttcacaga

SEQ ID NO: 297051 - DNA, 526 bp, Homo Sapiens
tattgtaaggtttttctgccttcctaattcttattactactattttactgccactctccctccatttgtgttactctgtataaccaacacctaagtgcgaaagtcctgggcttcagtctgtaccttctctatatggtatagatggatgcaggtgagatttcctgccaactcccaaatgtgtagctccagcccaggccacttccgtgagccccagatctgtgtgtgtgattgcaaactcaacattctccgccactgtgtactatttcaaactttaaatgtttaaatccaaactcattattttgtaaccctccctcctacctataagccttcccccgacaacaaaataacatatttggtctctttcacgtccttatcatgtgaaggacgctctcatccacataactttgcaagctgggagttataccgtaatctcttgctttccctctgtattcagtacattttatcagtttagattcttaaatctctgtccttaggcccagcatgatctagccctggcctcactcac

SEQ ID NO: 297052 - DNA, 565 bp, Homo Sapiens
  misc_feature (161)..(489): n is a, c, g, or t
cctaaatttaattttcttttttatattgttctataacatatactattttatactactgtatgattttgctcagtacttgattttcaggtctagatggatgtatatttctaaaatttggaaattagagtaatgctttccttagaaagacagtcacttatacnnnnnnnnnnnnnnnnnnnnnnnnnnnnnnnnnnnnnnnnnnnnnnnnnnnnnnnnnnnnnnnnnnnnnnnnnnnnnnnnnnnnnnnnnnnnnnnnnnnnnnnnnnnnnnnnnnnnnnnnnnnnnnnnnnnnnnnnnnnnnnnnnnnnnnnnnnnnnnnnnnnnnnnnnnnnnnnnnnnnnnnnnnnnnnnnnnnnnnnnnnnnnnnnnnnnnnnnnnnnnnnnnnnnnnnnnnnnnnnnnnnnnnnnnnnnnnnnnnnnnnnnnnnnnnnnnnnnnnnnnnnnnnnnnnnnnnnnnnnnnnnnnnnnnnnnnnnnnnnnnnnnnnnnnacatatatcgtaaatgttctgcatgtgagtacatcacatgtggacttatgttgaagatctcagtctttttctgtgt

SEQ ID NO: 297053 - DNA, 124 bp, Homo Sapiens
agtcacagagtcatgaagcaatctcccatatttaaggacctgtagttagacattgctgggtgggtagtcaagaacaaataaggcaagaaaggtctacttcatgaaagactttctttgttccttt

SEQ ID NO: 297054 - DNA, 633 bp, Homo Sapiens
  misc_feature (532)..(532): n is a, c, g, or t
  misc_feature (602)..(602): n is a, c, g, or t
  misc_feature (605)..(605): n is a, c, g, or t
gggtcgtgctccttagtgttgacagatcacctatggttctccaaaatgaacattctagtacaggaggtctagggaggaacctgagagtatactaatgcctaggaactttctctggagtggcaagagcagtgggaagaattatgtcaatagctacagaaataagggagtaagaacaagtcatctctctagtgaattcttcttcactttactgagataaacatacatgttaatgagcttgagttttaccaaaagtataattcttctggttcttctaagaaaatggcactccctggaaacaaggaagaaccaaatttattcgcctttgtagcagttgggaaagttagtgctaggaagtcttcttgatttatagtaggctttaatctggatattgctggtaaaagtttattctaaaacctgaactctggataagtaatacaaaaagcttctcaaccttccaagcaaaattgagagctttcaggttatgtgagtaatttggtctcttgggtgcttaattcattccttgaagctcatntttgtgatctcttccaagattgcatttgcttggaggtagggagttagacaagatggtatgaggtccctanatnttgactttccaagcaaaattggacagtg

SEQ ID NO: 297055 - DNA, 390 bp, Homo Sapiens
aaaatttctagtttgatggcaagtacttaaatttcagtttttagaagttaattttaatgtctcattttaatgtaagtagcatatacccctgaccccaaccacccaagtttacatccctaaacccattcattcacctaatggggctctatacgataaattctatgggagcataacttgtctgaccttacctcaaatacaagaacatttagagctgctaggtacttaagcctcatctaatctaattttcacattttgttctagagaaattgaaacccagaggtgtgacttactctgagtcacatagctggctggtgatggatgttctttacacctaacaacctggcggcttatttctttctacatagtctccttttctcttccgaaaatgtg

SEQ ID NO: 297056 - DNA, 329 bp, Homo Sapiens
atggtattggtagaaagaataaagaaataagcccatgtataaaaaggaatttaatacacaatgaaaataacgatgcagatggattaaacaacacaaatgaatttaaataacaaatcgtaagaaaattcagatacgaccttaaagcaggccttcttaaacttagccaaaagaagtgaaagccataaataaaagattaatttgagtttaccaaaacaaaaacttctagacaaataccgtaaagttaaaacacaagctatgtgctagataaaaaatatttcatatatgtgcaaaacaaactataggcaaagggttaatattttcgttatatt

SEQ ID NO: 297057 - DNA, 336 bp, Homo Sapiens
ttattgaaaacaaaagtacactccacaggttgggagcagcccgagcataggggcccgagagcccattacagaattttctggggtttaaatactctttagaggtttcccattggttacttggtgtacaccctacgtaaatgaagcagtaggcctgcgatcagggtgattggttgcagaaggtggccagtcagaggctgaagtgaagttacaaaattatactcctatgcaaatgaagacttggcttgcaaccaatctgattggttgcaggaggggaccaatcagaggtactttcaatttttcatctgccgtgccaagaagcaggggttggtgcaaagg

SEQ ID NO: 297058 - DNA, 135 bp, Homo Sapiens
tccagaaagaaaacttcaaataaatgcactaacaatgcattttgcaagagcaaaccaaacccgaaattagtagaagaaaagaaataataataaagataagagcaggagtaaatgaaatagaaatgaagacagtat

SEQ ID NO: 297059 - DNA, 559 bp, Homo Sapiens
  misc_feature (128)..(199): n is a, c, g, or t
aggtcgtcttttgatttatctttattaaagggatgactgttctctgaatgagatagttctctcttaggtgttttcccttcctggttttatttacatgttcaagtagaaagggattacagccatttatnnnnnnnnnnnnnnnnnnnnnnnnnnnnnnnnnnnnnnnnnnnnnnnnnnnnnnnnnnnnnnnnnnnnnnnnaccgtgcctgggcaaccagaactttttataaacttgtgtgtgtatgtgtaaacataaatatacatacatacttttactgttggactgtattaaaacaggagttttaaagaggtggttaagatagacagcagactttgcttctgaaggtgatagtgggatagcagataatgtttcttgaactgtcacttggaaccaagtactgtgttaagaaagtactaggtttgttatctctaatcttcactccaaccctgtgaggtaggactgttatattaagtttatattaacttttttgttaccactgttactttgttagcaaggtttaatattgatatcctttgatgtactaagagcacctactga

SEQ ID NO: 297060 - DNA, 489 bp, Homo Sapiens
  misc_feature (101)..(101): n is a, c, g, or t
aaaagaggtggaagcagggaggaggccatgaaactattacaaaagcccatgtgataaaacatagtggtgtggactaaaaggcttacatttgaagggaaganaaacaggcaggttcatgacataatttggagggagaaacaacagtactctaggcttgaatgttgatggtaggaacaagaggaatcaagaccatagttgctcacctgagctatcatgagcatggaggccatagacagagagagaattgaatgttttatttccaagttgaaagtagttacagacaggattgagaatttggctttatatagcctaaatttgaatatttgagaaacatacaagtaatagtcatgtagtcatttgcatatatgcagttatttgcatatgcagtcacgctgaacatatatatttgacatttgtcagcaaatagaaaggatataaagctgtgagaatgtatgagagcacctagaagtgaggactgagactgaggag

SEQ ID NO: 297061 - DNA, 492 bp, Homo Sapiens
aaattaggtacaaattatgagtgtaaggaatttggtttcctgggctcctgtctttccagcttttttgttccccaagctaattgatttggctttatttatgagcctgttacagtaaagcgtgtgttgggaaatatattgaggtatagagctattctttgtaggtaccctggtgagaccgatacaaatatgcccctccccataatggaatactaatttttatttgatcactcatttatagcagttgcttaaatgtatgtatttatatgaaggtattttaatttttaagagcaaaaaagttctaataagttgccagatttctaataaatgcaggtttatttggtgaaaagataaggaaaatgagttatgattctgtagtttttttaaaatgagttcagcataattgtttttcaggtttttttagttactggggttattctgcataagaaagcccaatgctttctgatagtaggagataatttttctctcttttga

SEQ ID NO: 297062 - DNA, 584 bp, Homo Sapiens
  misc_feature (404)..(404): n is a, c, g, or t
caggaatggctgaagttgaagaaaaagtgcacacagggtgggctcaagagtggacttaatgagagctgtttcaaggttctgcaataaatagagtagggggagtcactaataatattgataggctgaacggaaaaggtctccagggccaatattaaggctctaacttcagctctctgaatgttagtaagtccagaacgagtgagggaattatgtggtctccaccaaacagccacttttccatttttaccagagctgtcagtaaaaggtgttaaagctttaggtatgggggagtgaactacttttgtaggcacaactacaggagtacgagataagaactgaattagtttgtcagcagaaagggcatgctctatatggcctgtataatcagagagtgttatctgaanaatctaaagataggggcattattgcttaaaattgctttttacttgaagtaattcttatgacatcagggtcataacctagcaactgattgcatcatctgtggcctgtatagatgagtttactacctagctggatatagggagatagtgttttagtcccggtatgtgagcaaaaatctcatt

SEQ ID NO: 297063 - DNA, 503 bp, Homo Sapiens
tatctaaaattctttcatcataggaataaacaacacatatagaaagctccaaagctgttcccaaaacctgtattatttattttatagtgaccaacttgccccaaggcaattaactctgaattgctgttctaatgtgacatatctgtgtacatatgtacatagtactggtaaccagtggctgcattttattccttgctgtggactgaggtattggcttcttgaatcttgtatatgtcataagaatattatacagagagtgttatagtgaaggatgtaagctggataatttaaaacagaccttatttcatacaagtgtaattattacatcattttaggtaaatggcaaacaggattgcatgagagtgatggcatcatcatttcaattgaatctgaagtgattctaggaaattgattccactgttggattctaggaaattgagtccactgttttcctttgcgtttaatttcctttgtgtttaatttgaccacagaaacttttttga

SEQ ID NO: 297064 - DNA, 324 bp, Homo Sapiens
  misc_feature (191)..(234): n is a, c, g, or t
ttccttcctcattgatttactagaattttagcactttttctatcagtttatctgagctatgtatttattaaggattttaatacattgctgtaattactaaaaacatcttttcccattgattatttgcttttaaattccatacatgatttagaaaaaaacatataatgtattttattttatgtgcttcctgnnnnnnnnnnnnnnnnnnnnnnnnnnnnnnnnnnnnnnnnnnnntgtagtcaaataaatttactttttctttgtgttttcttccactatttctatgcttagagaataatttccatttaggagatagttattcta

SEQ ID NO: 297065 - DNA, 235 bp, Homo Sapiens
gccaatttcatggctaattatctttgttgacagtaaataagttggtgaaagtgctaaattttatgaaaatgtctccagagtagattcgtacattgctcacacatcatctgcaatgccaggtgacctgtaaagggggaatgtggaacttaacagtgggagagtggaattaattatcaaaactaatgtggaaggagtttgaaattttgattcccactattatttgttgttatgtgga

SEQ ID NO: 297066 - DNA, 299 bp, Homo Sapiens
  misc_feature (96)..(208): n is a, c, g, or t
tcaatgttgcctcaaacttctgggctaaagtgatcctcccacctcagccccccaggtagctggaaccacaggtatgtgccagtatgcccagctaannnnnnnnnnnnnnnnnnnnnnnnnnnnnnnnnnnnnnnnnnnnnnnnnnnnnnnnnnnnnnnnnnnnnnnnnnnnnnnnnnnnnnnnnnnnnnnnnnnnnnnnnnnnnnnnntgagccaccgtgccccaccctggactcctttttaatgtcgaaacacttgcattgccacatgacagcagtggtgtttctaatattattggtt

SEQ ID NO: 297067 - DNA, 608 bp, Homo Sapiens
gcgagggttgttttataaaccttgtgccatttgtcacattcctggtcttaccagtttcttaagggagaggtgaaagaaacccataagcaccctcggagggtctgctttgcattttcctgcacagtgaagaatagacttttcatatgtttgaacagaaaaataaacacaaactagaaaaacactgccctttccagtcaaccaagtatacttacctttaggaggcagtgaaagtggtgcccttaaatacagaattatttattcaaatattaagaattaataaataaagggctctaatataaactttgtgtaagtttttctgtgtatttcagtgcaaaaaaatatgtagagcataaaatgaaatctacctgtcaagcatgtgatccagaatcttggttttattactattctggaaagccccggtccttatcatttggtttagcttatttaatcttttaaattggaaatagtgtacaaaattgttcttattgtgttcattttcttttggcacaagatcttaggactttaagtcttacagattatagtcactgtaggattcacaaaagaactttcttataactttctttggattcttcatactcatttaaaat

SEQ ID NO: 297068 - DNA, 378 bp, Homo Sapiens
attggggccgaacattatgttagcgtaactaactgaaaagattttcgaagggaatatgtagcacatgaaaatatatgtcatattaaaaaagataggtgggcattgatgtggtgaatccttgctcctcctaatggcgcgcttttcttccatgattctacctactgtaggcacctgctcccctttcaccctttatgcagggctggggtcaggaagggctggctggatgtctgtgctgatgatgtgcagcaactgctgtggtgctcttcattgcttccctagctctaaaaccaagtcttcttaggagtcagaagcaaggaacagcaggaatggtggaggcaggatctgggagcagcttctctaaggccagctataggcaag

SEQ ID NO: 297069 - DNA, 477 bp, Homo Sapiens
gacacaaaggattttgttgatggtccacatggttgctgattcccagaaaaaaatgagcagtgaatgttataaaggcccataagttatgggatgtgagtaggaagccgaaaacttaataggaaaaccataggaaagaacccatcatgagatacatggatgatgtttcagattctcaggagattaacaaagtatctagaggtatttatccaatatgatgtttcttgggcataggaaaagctttttaaaccatcgaccagcctccagaaaaagatacatgataaggtaaagaaagttagtcaaaaagaaaaagaatctgtgactccattaaggaacaagagctactttgtgtaaaactgatgtgtattttcctcagtaccgtgccctgagtgggtaggagagggagttattataacctcattcctgcttccaccagagcacctgcactaaaaactgttttatcttttggggttctgggta

SEQ ID NO: 297070 - DNA, 198 bp, Homo Sapiens
  misc_feature (34)..(34): n is a, c, g, or t
  misc_feature (122)..(122): n is a, c, g, or t
gtggatgcttaatggcatagtatttgtatttgcntataacctatgcacatcctttggtatactttaaataatatctagattacttataatacctaacccaaattaaatgctttgtaaatagntgttctactctatttttcattattaatgacaagaaaataacctgtacatgttcagtacagatgaaatattttttca

SEQ ID NO: 297071 - DNA, 168 bp, Homo Sapiens
ggtcatgtcaacgcacataaatgaagttctgtgaaacccccaaatacacatggagaaattttagatacaggcatatagaaagcaggtccaaaacctttatcaaaacctacatgaaagtggtaagaacaagtggtaagaatacaagtcatctcccactggctgggagtc

SEQ ID NO: 297072 - DNA, 440 bp, Homo Sapiens
ggtgctttgagcatccttattttcagatggtttgcccacttcatgcagttaacggctgttggtgttgggcttcaaatccaggtctttcggacatcaaatcccagcctcttaacaactcaccaagcagtgattactactccccaacataggggcagtatgtacaagtcatgttgaactaatacagtttctttctttgataggaatactaattttgttgaacaagaaaatatgtactggataagagtaaggcatttgacaaggcgtcctgtgaaatctgtgaagataaagtagaggcttgtggggctggtacaattaaatggagtcacaaatggttgaacagctgtgttcgaggtactaattaacagagtcctgccctccaagagagaggctggtccatggctctggtctgttcatttttatcaggtatttaaaacctaaaa

SEQ ID NO: 297073 - DNA, 340 bp, Homo Sapiens
atgcttccaaatgtctagcattcatgcttttgaacgaactcagttacattggtttttccatacttttcatacagagattgaaggtatagtgctttcctgtgtgctggaaataatccatcttttaaccttaaaaaagtggttgtccctatatgagaaagaatatagtgcgtggagttgaatctattttctccctttccccttgcttgtcaatcaccccactgggttctaaggggatctagtctttgggagagatgctgctctgtgtatcagaaaatcagactatgttttcagggtgagaaaaaagtttcattcatttatctccagtcttgtcagtattcta

SEQ ID NO: 297074 - DNA, 418 bp, Homo Sapiens
acacacatttagtccatgataactttaattcttcctaagatgttctaaatttgttatgtcccatcctcagatccatccaatcctctccattctgtagggtctccaaggttgattttgagtcagagtgtcagtctccagcttgttaaccttcaggttttccattccactgagtttgctaagttcaatcattacatttttcagttttacgattcccttttgttcttcatatatgctgcttattttttataatatcttgtacctttattataaactcaacatcctttttcatttcttcaactgtatgaagcaaacattttagattctgtatctgatatttccaaatcattggtgttttgtggatctaattctgtagtttatgtgttttgctgccactgttaccaggaatggcttgtttact

SEQ ID NO: 297075 - DNA, 447 bp, Homo Sapiens
taaagaaaatgacctagctgtttgaaaaattctgtagcatctctgtgttagtttggagattactcatctttctgtttgcattttgtgttcctttgccctcacttttccttaccaaacatgccttcagtcttgcctttctgccaactcaggtgaccctctacccaccattattttttagcacctgtatttgattgtggttttctgtgtcagaagcattcgtggagactgtgacaatgtatctctagaagagatagccagtaagccagaaaatagattgtttggcattcctcagcctttggtttataattgttagacagaagtgtcctgcccagtatatatttgcatgctggttggcattgaagtaaatgttctcctctgggagtaatattagcaggtggccactaatgtttttcccagattagtaatcagacattttacctgaactct

SEQ ID NO: 297076 - DNA, 572 bp, Homo Sapiens
  misc_feature (122)..(137): n is a, c, g, or t
  misc_feature (154)..(192): n is a, c, g, or t
  misc_feature (208)..(402): n is a, c, g, or t
cgggattacttaactgggcaggtctcaaaactgttactaatcacctctgtccagatatagattagaccttacaaaatcaatgttttctggatgtttttctgtctatagctactctttgctcnnnnnnnnnnnnnnnnagtcagggtcttgtttnnnnnnnnnnnnnnnnnnnnnnnnnnnnnnnnnnnnnnnctgttaggctcagggnnnnnnnnnnnnnnnnnnnnnnnnnnnnnnnnnnnnnnnnnnnnnnnnnnnnnnnnnnnnnnnnnnnnnnnnnnnnnnnnnnnnnnnnnnnnnnnnnnnnnnnnnnnnnnnnnnnnnnnnnnnnnnnnnnnnnnnnnnnnnnnnnnnnnnnnnnnnnnnnnnnnnnnnnnnnnnnnnnnnnnnnnnnnnnnnnnnccaattctttgcttatttaaatgacagaattagacattgcccagaagttggaccaaattggattcccactcagtaaatttaagtggtagagcttcttgtcatactgtcatacttgtcatactgtattttatattaataatatatatatattttccattccctttgttgct

SEQ ID NO: 297077 - DNA, 696 bp, Homo Sapiens
  misc_feature (549)..(550): n is a, c, g, or t
gggagttgtgtgaggatgaagccagaaaatcttaaaagcgcctggcacttaagtaagaatacatgttggtttgactttccctctggtgaatctctatgacatcttaattaaattttgtaacagaaaaatggatgatgtgaacaggcagatcagcttgccatcctctaattaggtttgaacccctcctttccttgtggttgttcctctgaagccgagtcacgtccctgagattcctccacagaggttattgttttgctggagagaacgattaggtttctctattccaggaggacttgcatctctccttcctcctcgtatcaaattgtgccttgccagctgctgccgctgccatttgcatgcgtgtttgtttccctgggtgtttctgaaccattatctagtaatttttataaatgctttataagtacttgcaggcatttccggcggcttccttccctcccccatatgcttctctgtcatctgaataaaaccttcgcacccttaatgaagctggaagaataggcagtttatctcctgtgtagtcttccctgnngtgcggttttgcttttcaaataagttcctcagtacatctgcctagaactctgatgaagggcagttttcctattttgttctttatactcatagggagattctatttctcattgtgtcagaactgtgggttattggaaattttaaaaa

SEQ ID NO: 297078 - DNA, 555 bp, Homo Sapiens
ggtgttgaactttaagaaaaatgtcttcagcgtagacaagaatcctagacaattagataacatgagtaataaactggaaaagattatgtctgtgataaagaagacatatttgtatatctccccacaagaaaaaagaaggacaatggaattccaggaaaaaatagttctctgctcggtggaatgtaagaaaggagaattcatctaacccagcaagagtctcctaggagtggcacagtggccataggaggaaactataactatgctgtactatgctaaaactataactgtacagaggaaatagagttttagtagcttttccgactcttcagtggttaatctttacattgtcataatgaaaactttttactgattttcaagttttagaatcaccatagcaaaatgcaacaattatgtctactgaactaaatgtaaatgttatcaatatttacaaatgctaaagtcaacgtttaatataagttgggaggtagaaggaaatcatagaaatagtagtgtccttatcaacagattatacaagagaaactgttgggattgtgg

SEQ ID NO: 297079 - DNA, 131 bp, Homo Sapiens
cgggattgcatttttaaaaaagattattccccagcggaaaacattgaaacctccagctaataggaacagcattaacagctgaatgggagtctcctgggtggcctggtgggtaggggtgtgaagtctgctgt

SEQ ID NO: 297080 - DNA, 603 bp, Homo Sapiens
  misc_feature (385)..(431): n is a, c, g, or t
tacatcattgagaataaaacaatccagatggttctgagactgaatctgagctcctgggtaacacagcagggtggatctggactagacttcctgccctggatcagcaagattggtctcataggtgtgcactgaaggcagcccgagaaggtgtgatttgatgggcacctagaagacccatctatccccaaaagacatgactcagtgaggctctagaccctttctgccacagcagcttcatgtgggctttgtagatcagcacagctcttagacccagctgtgcacggcgcctgacttgggccatatatattagagaaggggtcaacaaactacagactttgggccaaatctaacctccccatccagacctgtttctgtatagcctatnnnnnnnnnnnnnnnnnnnnnnnnnnnnnnnnnnnnnnnnnnnnnnntctgtaattgttgtgggtacatagtaggtgtatatatctatggggtacatgggacgtcttgatacaggcatgcgatgtgaaataagcacatcatgtaacatggggtatccatccccctcagcatttatccttagtgttacaacaatccaattatactcttttatttttacat

SEQ ID NO: 297081 - DNA, 346 bp, Homo Sapiens
caacatctgacttttaaggaacttgtatttatgaatattaaactgaattctagaggaatgaaactgctataacccaagattcttaacaaaaggaaaaaaactaaatgatttagaagctagcttccatgtagaaaatccaaatgcagtagctcaaaacaaatgataagctaaggacccctcattaaaaaataccaatttcctaagactcatgtcaataagctttgaaaagtcattctcttttcccctcttaaggctgaaccgggggccacaagagctcaactttattctctatggaaagatgcctggtctttactttctggctcccgcttatttactggatatggat

SEQ ID NO: 297082 - DNA, 622 bp, Homo Sapiens
  misc_feature (541)..(541): n is a, c, g, or t
cgggagtccatttaatttcagcttaaccttttaaatgatctgtaaaatttctttgatagtttaggaatgttgtggggagggttcattaataaaagttcagcaattttttaactgaaatagtttatctcttttacctagtcacaaaaaaggtatgtaaacaaggccattatatgtgtttattgctctttatttccctatctagattttctaagtatcttagctttcttaatataagtttaacttggtacttactgaaaatgcctttttacccctgttaacggtattttgagcttttgaaaagaacttggttgacactgcttttattgtggataaaggagagatggtcagtaattaatggcttgaagtattattggagtggtttatcatttctgaaactaatcgtgtcagaattgactttgaaaagcattgctttttacagaaatatattaactttttaggagtaatttctagtttggattgtaatatgaaataatttaaagggcttcgctcatatataggaaaatcgcatatggtcctagtnattaattcttattgcttactgatttttttgagttaagagttgttatatgctagaatatgaggacgtgaatatcaataagag

SEQ ID NO: 297083 - DNA, 598 bp, Homo Sapiens
  misc_feature (481)..(481): n is a, c, g, or t
  misc_feature (536)..(536): n is a, c, g, or t
agctgtttctgggggaattacaaggtctgttgattgtgatgatgatgaaagagagtaacttctgctgaatgctttaagttcagctctaacgtcttactcgccggatgtatttgactgcatctctcatcttcatgatgttggatgctgcacaggaatgcaggtgattagaaacaaaacactgaaatctgtagatctctgcagctgggaatggaagtctcccatgtcaaaagtcaacgaaatgtcagtctaagagctttttcttcttgtccctgaatccagtacttacttcttagtaagatatttcaattcaaattgtcccacactggagtatttggtgtaagcctgtctcgtgcttattcaaattgaggtttcgttttgtcccaactaaagctgaatttgttggcatgcggtatgacttgctggactgtgtaatcgctgaattatgatagatgtcctgtactctcatagaagttggtgtgtntaccagttttaccaactgattctgggtagtgtagacaggctttgtttgagtagcnaaatatgtgtaacagcttatagtaagttttgctgccttcatctttctagatcgatacctatg

SEQ ID NO: 297084 - DNA, 240 bp, Homo Sapiens
  misc_feature (26)..(26): n is a, c, g, or t
  misc_feature (176)..(176): n is a, c, g, or t
aggaatgtacgatacttcatgcatgnggaagcatcttcccacctctccaagcttagctacagaaacaaaggctccaaattccaacacatgaaaaaagaattaatccagcttttttgtatgtgcctcataccatttttcagtctaaaagtctgctgctccccccaatggctaggatntgcaggaatgtcatagccttcttctcaacttacaccatgggttacaaattatgatcactgcttc

SEQ ID NO: 297085 - DNA, 555 bp, Homo Sapiens
  misc_feature (415)..(435): n is a, c, g, or t
  misc_feature (522)..(522): n is a, c, g, or t
ggaaaagcctagttggaatttctgagtctgggccatccttaagctgctgtctactgcctgaatgggaagtaatgtcgaattggaaaattagctcaccatttttgttctagctttgcagacatttattcctctgatgataggctgagaaatgcctaggccggcttagagggcacacagcatgacagaagtactccttcaaagcagctgtgtcaagaaggaagagctggaaaagtggatttgctggggaattagatgcatttagttttccacttacgcacaactgccttctccagtatatcataccaaggttttttaggcctttgtggcttaccctgcaggaacatactgtgtcctgttgttctggactgtagcatcttcaccaccatcctcttggcaatggttttttgtttggggnnnnnnnnnnnnnnnnnnnnnggacaaagtataataatattgagggacctttctagggagcctttggtcctttgtccccattttccaaagggagggaactttcctctntaaagagacagtgggaacttttagccaggtttt

SEQ ID NO: 297086 - DNA, 566 bp, Homo Sapiens
  misc_feature (210)..(261): n is a, c, g, or t
  misc_feature (543)..(543): n is a, c, g, or t
gtcccttctctttcgcctgtaacagacatttccatttggttgtactgtttgttgcctctgtgttcctctctcactgtttacttgttgcctgctattctgaagacactctccacctgggcctggtttgtctcattgtctgtatagttcatgctgtttgcctcccacgagcatgtgatcctgctcttggttacctttagagcagtgagttcnnnnnnnnnnnnnnnnnnnnnnnnnnnnnnnnnnnnnnnnnnnnnnnnnnnntgaagcagagactttaagggtgggtgcagcaatgtggtctaacaagccctgcaagtgatctggaggcccaagttagagaacagctgctttagaggaagacctgtcacagtcccacctattcccatctgttcccatcctatagcagctcagacgccctcggtgtcatagatcttttccgatcatgccctacataccactgatgtcccctttcccctgtagccacaaaatgcatagtgactccacactccttttggcaattagtcacatactgccttgtccctnacagatgaatatagtgatcattc

SEQ ID NO: 297087 - DNA, 600 bp, Homo Sapiens
  misc_feature (338)..(338): n is a, c, g, or t
gtgtgagcaaaaacaacattaaaaaggttatgttacataatatgtaggttttggtttcttagtgcaagacttatatttctcttaaatgttgtatagaggatttcagttttcactcactagctactttactaaaatgtagccccaaaatgacgggccagcctcagcgtatctgccatatgtatttcaaagattacagtcagaatgagttaatgaaaatggcaggttccttttcaaagtttatttgactcacagccatattgctaagtttgggtatagtgaagttaacaacaatcacttaaattaatatcttacagcaagatatactgatactggtttanaatgaaaaagactgtaaattcaatgtaaatattacctaactttatgtaccaagttaggagagtggaagaggggaatttttcaaaaaataagctgtatttgaacaaagcatgaaatttgttgttttaaaatttaagaataattgaatttaccatctaattggcatccgtactgtgcattgatagtaatatccaaatcatcttattcttccatagaggaagcgctcatataaatcacattgctgagaactatataaaactacat

SEQ ID NO: 297088 - DNA, 344 bp, Homo Sapiens
  misc_feature (131)..(197): n is a, c, g, or t
caggggtgttaagactagaaatgggaaaacaggatataaaatatttgacacatctggaaaagtctcatattgtttgttgtctggggtgtgtgttttgtgtgactcagaagtagataagacgagtagtcctnnnnnnnnnnnnnnnnnnnnnnnnnnnnnnnnnnnnnnnnnnnnnnnnnnnnnnnnnnnnnnnnnnnttttgtttaataaccgttttcttatatattggctctcagggcccttcatagacatcttgccctggtccgtttactcaggcttctgtcctgacagtccctcacaccttctatgcccggtgacctctcagtgttcactgaatacatcct

SEQ ID NO: 297089 - DNA, 160 bp, Homo Sapiens
  misc_feature (43)..(51): n is a, c, g, or t
taataacccacacacacaaagagtgttgaggacttgtagcttnnnnnnnnntaggttttaaaaactgactttctgtatttatgatagatatgaccatttttggtgttgagtagattgttgcattggaaatgaactgaagcagtatggtagatttaaaagg

SEQ ID NO: 297090 - DNA, 270 bp, Homo Sapiens
gatttgattctaaaatggatgccaaaaacctcaaaattaaaggacagatttgagatttgctcccattcttaccactctgatggttataccttctgttcctgttctgatcctggacaagccaccaagggaagtagcatcattgtctggggaaatatccagggttcattgtctcatgccaagaagattaaggacatggacatacatgggtgggttaaggaggggaaagtttaataggcagaataaaggagagaggagagcagctctctcttg

SEQ ID NO: 297091 - DNA, 400 bp, Homo Sapiens
  misc_feature (232)..(250): n is a, c, g, or t
  misc_feature (253)..(277): n is a, c, g, or t
tcagccccaaatctcctgcctataattactttaactggggtctctaaggttcccacttcagggctaaaatgtattggggaaatatggcctactggggaggtctcacaggaggcagtgccctgggaaatgccaagtccagactcagtgccaagcagtaaccatctgcactcggggacagcgaggagctgaccgtggcctctgatgaccagcaggtattagatggaagtgaatnnnnnnnnnnnnnnnnnnntannnnnnnnnnnnnnnnnnnnnnnnntcgaacacatatgattgccagtatggagaatgaaagattaataatgctttctggagagtttgatgcaaaagtgggggaaacggagaaaaggcgctaaggctaaatccatctgcatttgctata

SEQ ID NO: 297092 - DNA, 357 bp, Homo Sapiens
tttccatgctgctatcttacaccactttatatacatcataattatgaagatacacccccaagggttttgttctgaaattattcaacccccaactccaaatgccctagcagtatgtaagtattggcaccaatgtttccttcctaatgttattattttgattgatatatccagtaaatatagagatgagtgtgaatatgtgtatgcaccttgggaatggaagtttgtagttggaacttagcagcagaacgctggggatgaggagctgaaaatctgatatatattttgtggccctggctgcaaataaatcctgaggcctacactaataaagtggctcatttgaagtcagtgattttgaca

SEQ ID NO: 297093 - DNA, 515 bp, Homo Sapiens
  misc_feature (74)..(74): n is a, c, g, or t
gttagagaaccttgttttgtcatattaccggaactacttttctggttccttttcatctaggaagactatttcantggaatggtctccaaatcaagagctgctgtttaaattatcttgtcttgtggggcaatcccttgatgtggtgttctcctctttcccctaggaatggggcttcctgagagctggactgcagtgattgttattgttcttctgggtctagtggggctggtagtggggctaccaggatctgggctggtactagggaatgtctgcaaagagtcctttgatgtgatccaacttcaggtctctcagccatggatacaagcacctgttctggtgaaggtggcagggaagtgaagtatactctgtgagtccttggttgtagaaagatttagtctgctagctttctcagatactggttatgctagcagtgaagttgtcatgtggacacactcaggacctctggttagccaggatgctgcaggtggtggaattaattgttgtcttctccttcc

SEQ ID NO: 297094 - DNA, 655 bp, Homo Sapiens
  misc_feature (64)..(64): n is a, c, g, or t
caaggtttactatgaccccctaaaatgataaaatatctatttccaagggttgttatggccacantcaggaattctttgttaagtgaggtccattgaaagctcagtcctctggtaatttttatatttgtccttaactctcaccctcttccctcatccatgtcaatattttcatttctcttctaggaataacattttttttctacttactaatgcagaataatgtacctttctcatggtcatatttctaattaaagctctaggccactttgcagatccaaacacctaaaagactcaattgaataaaacaagagcaattctatttttctttagttgctaacattactttcatgaaagaagactgacttagttagctaggactgctataacaaattaccagagactggatggattaagcaacagatacttatttctcacagttgtagatgataaaaagtccaaaatcaaaatgccaggagacttggctctttgtgagagactctttctggtttgtagaagaccgcctccttgttatatcttcacatggcatagaaagagagctctgctctcttatttgtcatataaagtttccaccttcatgacctgtttaaacctaattacataccaaaagccttttctaataacattacatggtggg

SEQ ID NO: 297095 - DNA, 134 bp, Homo Sapiens
ctttacatggtgataaacagagaaagtacttgggaacatcagagcacagttcccagaatccctggcctgttgctcattgtcctgtttctaggacatccgtcaccactaaccatagcattaacctactgactttc

SEQ ID NO: 297096 - DNA, 471 bp, Homo Sapiens
acggggtcatgatataatttaagatcaattcccctactctcccaataatcacatattcttattactttcaattgaacttgagtcactattaagcgggtttaccaaagtgccacaaagttgatttttaacgtttgtaaaggtttgaatgtttatagaagtgcatcatgaaattttgtgtaaatccagatgaactgtcattatagtactataaattagagatagtccataaagttgggttgaaggagattgaaaatatttcctttgattaaaagaaaataattagctaacttgggcttgcttgtgattgaagagggagattagatagtcctctgtccccccaaaaaagaaactagcagagaaagacataaaaagctctttggtgtctgttcatgtgctgtacattttttccgttttaatgtcttgtgtagataattcaaagtttgaactatttctttcttggaataagtaata

SEQ ID NO: 297097 - DNA, 572 bp, Homo Sapiens
acgtggggtgagaagcatctttgagtgtgatgacagaaaatattttggaattctgtgtaacagcattatactaaattatcttgcagtggtatccaggatgtacttaccaactagaagtccgtggcccttaaaatacggttttaataatatctttcagacccttattctcgacctttctttgccttggcaatattcaaaaaataggttttaatagatttacttaacggctgttactaataaagaattctggggtaatttatagcagttgttttgtaataaactcaaagtgcacataacaaatttttaaaaatattctctctctattctaaaaggagatgagcatacagaggcagctcctgtctgtagtggaaggagtttaagcattgttcttctgactcagcttcttctgtcgtgttcataattcttcatgttcatatgtagtaatgatctgttgtcctcttgccacatagtttgctaagagcaaaattctgtgatgggactctgcttcagaatctcacaattctccaaaatatttttgtgctacctggaaaattaagctcattaatgaaatg

SEQ ID NO: 297098 - DNA, 368 bp, Homo Sapiens
taatacacattcttcagagtgataaaatggcaaggaagaacaggtagacaatgaatttgatatttaaagaatgatgcactatgcacagtatacgcagttcactcaggcaataatctgtacttaaaatgatggtccttaagatagcagttataatccaagagttgtttcagagaataattacagatcattctctgagaacactgtcctagtaggactagttatagttcataggcacttgggtataaacaggaaagccaagataaataaagatggtagtgcatttacactgaaatttctccgtacaattttggttaccgcttcacttaagaaattcgtaagggtcagttacagtgcctcacacctgtagt

SEQ ID NO: 297099 - DNA, 448 bp, Homo Sapiens
catttctaacagtggcatattttatttctctttcatgatatattgcattagcgtgaacttctaaaactgtaggtttttcttcaattggttaaaggagttaaaagttgtggtgagagaactttgccctttttctacaacaagagtagttaaaaacaaatgcctaccagggccacactgtagcataaatatgtgaacagggatgactgtaagaacacagaaaatggcagagcaagagaaattgagaatgtattgtgttaaaacaccatgccaaacaaacacaacataagtttgcatatgcaagcttgatgcaggtaaaggactgatggaggtgatcccagttgagaaagggtatagtactcctgaagagattgctcattataaccacagcagtgggagaaatatcactgtgctgtaagagctgctaaattatttggtatcaatgggtatt

SEQ ID NO: 297100 - DNA, 409 bp, Homo Sapiens
aggacaagaaaatgaaaaatcagtaaatttgaaccccagctccaaacaagtctctgatgattgttttctctcctcagaggtcctgctaagagaaggacttgggttgtgcctgacctcccagcaggcagcctgccaaggggcagtgttctctggaaacctcaacaatgctggtcttgtgttttcttctatttaattcagttggagggaaacataaaatcctatgaggaactctcattaagggcgagggtgggggtgagcatggatattttgatgccactggcatcctctcagatgtgaatataagttcacaaattttgagttagaatttggatgtaaatctatatccaaaacagtggaatagacaattttttatgataagatgttccattttttttgtaatgtggcagaa

SEQ ID NO: 297101 - DNA, 418 bp, Homo Sapiens
  misc_feature (42)..(42): n is a, c, g, or t
gttggattaatgatacgctgttttaatttatttttctaaagntttcttcctttctctctactgaatctttatattcagtagaagaccctggaaatgaatttttctgcctagtattcgcatctcatggataatagagaaatactattttatttatcctcttcatatctaagtcaccatctgaagtgctttcgggggcagaatagaaataaggaaaccctactggctctgcaatcagaggggtggtggggactgagccaagggaaaaggagagggagtaggctctcctagagccagcagctgctgctcagttacagccgccctttgccacatgagatgcagaccaacaattgctaggtcttccagttttcccacagacactggcaatcctgattattaggtaagatttcctgatttttca

SEQ ID NO: 297102 - DNA, 211 bp, Homo Sapiens
ggaataatagagagttgaaaaatgaagtgacacccaataacaggacgggtaagaaaagaagtaagtaggtaagggagagatagatactctcccttacaaaagtctggggaataaggaaaaaagaaaactggccatatcgcatctaaatgtaagaaattaagggtcattgttaatagaattctgcaggagtgtacttctctccaacttgtca

SEQ ID NO: 297103 - DNA, 409 bp, Homo Sapiens
  misc_feature (198)..(198): n is a, c, g, or t
gtcattaaaactggtaagataactaggatattctgattatacagtattactacttcccatcccattttctgaccttttctcaatcactgtaaatttttattttctatttcctattgataattaaatatgtacataatatagacactgttgtatagaactaaatgaattgggttgctatgcttgagtgggtagtgaaanggaaatatttgatgaatactgagagttcctaaaatgctagagcaaatttccgagggaaaggggggcatcgtgtgtcttgggaaggttgcagcaggttgtttcttcaactccctaagaaatcattgggaaggactcaactgcaaactcgggatcagatacaaaatgggtctttccttcccctctcccccaaaaaataggagcactaaatttt

SEQ ID NO: 297104 - DNA, 278 bp, Homo Sapiens
gagatggaaaactttcaaagtaaaaaagcttcctcttacgtttaaaatactattgagttacacatgatttctaaggaatacttggtcgttctagttataaccatggctcacttttgttatcatgtgtcaagtaactgactcgtatattttcctggcagatgttttctgtggaaaggcaggaaaagagaggtgaaggaagaaggcatcccttaatatcgtgcaataaacccactaggggtcactactttcagtaggactgtggagaagaaaatgtcaga

SEQ ID NO: 297105 - DNA, 553 bp, Homo Sapiens
ggaagggagagggtaccggtccttggtgtaatcacgttttactctgctgggaaggcgtgttcatcttcccaccgaaacgcgccatagactggatcaggcgttttttgctcatcatcgtttcgaaaaacgtttactgaaggaaagaaaggaagaaggcaggaggagcgataaagagatagcaagagaaagaggatggaaagtgggggaaatgaatagatttctaaaggttgggaaagccttttagcagggagatgttttcctggaggtcttggaactctcttggtctcacagcctctgtaaaccgagggctgcacacctgtctctagtccccagctgatttccagaggcccttccagctcctgtgttgattcttctgcctcgactcacttctagcagacaagtaccatccagctgaccctggtaggcacgtggccacataatacggattgcacgagggtgtgtttcgtttttactaaattcttatgctacttctgagtgtttctgatttaaatataagcattggttctgctacttaataattatgcactcctgg

SEQ ID NO: 297106 - DNA, 273 bp, Homo Sapiens
ctattgttgtttattgatttagttaagatgtaggaaacaagaatttttttgttaaatcagggtttaggcctctttccctgcctcttatttacattaaggtaattttggaattcaacatgcatatgcacttttctaatagatgaccaagggttaaaaatgggaatatactcaaattttttacttagggtaaatatgtgcttgcgtgctattataatatctaacaatcccttatagtagaacttctgtgtaagtatgtttaatattaatgctaat

SEQ ID NO: 297107 - DNA, 204 bp, Homo Sapiens
  misc_feature (17)..(17): n is a, c, g, or t
  misc_feature (25)..(25): n is a, c, g, or t
ggcaggaggatcggttnagccctgnagttctgggccatagtgcgctatacccatcaggttctgcaccaagtttggcatccatgtggtgacctcctgggagtggggaccaccaggtggcctaaggaggggtgaactgtcccaggtcagaaacagagcaggtcaaaactcacatgctgaaaagtagtaggatcacacctgtgaata

SEQ ID NO: 297108 - DNA, 411 bp, Homo Sapiens
  misc_feature (299)..(299): n is a, c, g, or t
gtgttgtgtgggtgcctgtaatttaaactgatgctacagaaaggaagtattatttttacaaacaaaacatagtggcttagtcattttccatttctagatgatgaatgtgtcatacatctgtatcatgtttttctcaaagtgaatggcatactatacttaaagtgaagcagcctttactgtggagttgccaaggtaactgaccagcaagtatgcagttcagcagattgctgaaaggcaattgagtacacatgaataaagaaatgtgcttgtcatcttcaaacccaggagggccatggtanattgtgtcttggctctgtagaacgcagaaatgtttttcataaaagcagaaactgagatgttctatgcaagttcttgaagtgagatgatatggagtggcaggtaccctttctt

SEQ ID NO: 297109 - DNA, 434 bp, Homo Sapiens
ggaatgaaaggcaagttccttatgatgagctatcagaccccatattgtccatgctcttcttccttcctgatctcatcttccactgctcacctctttgtaactcttctccagcctccattttgattcctgaacacactcaacatgctcctgccctgaagactttgcactagaaacttttgcccagaaggttttccccaagtgtctggatggctaaattccatgcaatcttcatatgtttgttcaatgatttattttcagaaagtcctactctaacagcctaattaaaattgcaaccgttccccacacatacatatcacatgaagtccctcaccctcccttaatacattttcatagaacttacacatacttacattacataatttaataatttattgtgtctattctttattgtttttattcttcctagatgtaca

SEQ ID NO: 297110 - DNA, 260 bp, Homo Sapiens
catggtgagcttagcagttttctcattagatgtgtttttttgggttggggaatagcaatttattttattgattttagactttatcaagctaattagctcccctttagataagtacatgttgcacatgtgcacctacttgtaatctcagatattatgcacacaagtgtgaaggtttttcagggagcagagcatctgggacaggctgattctgagctaaacagggctcctttaaggcaatatggactgttgccttctataaa

SEQ ID NO: 297111 - DNA, 467 bp, Homo Sapiens
  misc_feature (244)..(411): n is a, c, g, or t
  misc_feature (450)..(450): n is a, c, g, or t
gtgtgccatctggggcaggccgaggaccggccctggctgccctcactgatggctggagccccgatgctagctacaatggctggcttgagtggacttctgtcacagaggcaaatgcccacagggcacctcttggggcaggcagggagcttgtatgtgccatctggggccaaagctccacgattgagtcataagttaagggtagatggagattttccgccttgagcagaaacgtggaggaaacacnnnnnnnnnnnnnnnnnnnnnnnnnnnnnnnnnnnnnnnnnnnnnnnnnnnnnnnnnnnnnnnnnnnnnnnnnnnnnnnnnnnnnnnnnnnnnnnnnnnnnnnnnnnnnnnnnnnnnnnnnnnnnnnnnnnnnnnnnnnnnnnnnnnnnnnnnnnnnnnnnnnnnnnnacggctggagccccgatgctagctacaatggctggcttnagtggacttctgtcagg

SEQ ID NO: 297112 - DNA, 340 bp, Homo Sapiens
tcaaacagaaataaattgaaaaataagtttacagatgtaaatacagaaccctgttggaaaacaggatttgaaatatagtatagttcaccaaaataatgggtaggagagaactgtcagtttaattctataaaaattttaattatacaatagttgaaagaaattgttatttagctgagataggaaattactgctttgtccttagggaacctgctttattgcagagagatgagaggtgtcatagctgagtggaaagagctttggctctggagtctgacaaactaaggtttgtagcttacctctatcacttatgagtttgtatgactgtgggcgaaatatttag

SEQ ID NO: 297113 - DNA, 743 bp, Homo Sapiens
  misc_feature (13)..(13): n is a, c, g, or t
  misc_feature (136)..(337): n is a, c, g, or t
  misc_feature (355)..(370): n is a, c, g, or t
gatttcctcacangtgtgcatacactttacatactttttcttgatgcaaaaccccaggaaatatatcattctatgtacttttgaactacactaagatgcatagtaaatcttctattaaaaaacttttcttaaggannnnnnnnnnnnnnnnnnnnnnnnnnnnnnnnnnnnnnnnnnnnnnnnnnnnnnnnnnnnnnnnnnnnnnnnnnnnnnnnnnnnnnnnnnnnnnnnnnnnnnnnnnnnnnnnnnnnnnnnnnnnnnnnnnnnnnnnnnnnnnnnnnnnnnnnnnnnnnnnnnnnnnnnnnnnnnnnnnnnnnnnnnnnnnnnnnnnnnnnnngtttagctaagagaaccnnnnnnnnnnnnnnnnaattaggaaaacagtctgcctttttacatttgagagccatagcaaagtcagatttatttcttggtttagttcagtttcctgtggtttgagttcagtaaactttattaggtattgtgttttggacactatgacagacactgcaggtagagatctgtagaacacaatctgtacctttaaggaattcatagtctgcttaagtgacagagaaagattaaacacaaagcttgaatgcggaattcccagctttatgattagaggtatgtccagatcacaagagctgtacagaggagttgctttgcaaacaagccaggtagataagacataatgaacaggcttctgggaatggtatagctgtgtgggtcctaaacatgat

SEQ ID NO: 297114 - DNA, 646 bp, Homo Sapiens
  misc_feature (606)..(606): n is a, c, g, or t
tctgtattgtttattatcttgtagcatccctaacaaggtttgagaagcagcccataataaaacacataggtattctgcagtgaaacgtgtatattcacaccaaatggcataagtaatgatgactgtcaatagcctcacattaagattgctcaggttttgctacataataggttctgtaagtactgtgggttttcaggtgtgttttggatttcagttttgtggataagatattgtgtgcctttatttagccagaggctataattttggcagcttcggctctgacatatatccaagtcctggaaagaaagcagatggttgccttagccacacaaataattgtcataaaactcttgcactaaaatttgtgcagggaattctctagaagtggcccttggcccatgattcagagtttattgatttacttgcacactgttctaataatcttggttacctgatttctcagaatacaacagatgagaaacaacatattggaagaaaggaaaggctcttagatggaggcaggctgccactgattatagcacaaatcaccatgagagaggaggtagatcctctggtatggttaggtactgtttgataattgatgtntattatgatgactgagtcatgacttatgttcacgtgtgtc

SEQ ID NO: 297115 - DNA, 639 bp, Homo Sapiens
  misc_feature (264)..(579): n is a, c, g, or t
aaccaaagaagtacactaaaaagtacactaaaaaacagaaaacatgttgaaggaaattagagatctaaataaattgaaagacgtcctgtgttcatggcttggaagacttaatattgttaagatgacagtgctacccagatttatctacaggtttaatgcaatcactatcacagttcaactgcctttttcccggaaatggacaacctgatcttataattcatatggaattgcagagccatatttgccacaacagtcttgaaaaannnnnnnnnnnnnnnnnnnnnnnnnnnnnnnnnnnnnnnnnnnnnnnnnnnnnnnnnnnnnnnnnnnnnnnnnnnnnnnnnnnnnnnnnnnnnnnnnnnnnnnnnnnnnnnnnnnnnnnnnnnnnnnnnnnnnnnnnnnnnnnnnnnnnnnnnnnnnnnnnnnnnnnnnnnnnnnnnnnnnnnnnnnnnnnnnnnnnnnnnnnnnnnnnnnnnnnnnnnnnnnnnnnnnnnnnnnnnnnnnnnnnnnnnnnnnnnnnnnnnnnnnnnnnnnnnnnnnnnnnnnnnnnnnnnnnnnnnnnnnnnnnnnnnnnnnnnnctgttaagttcttcgaaggaaacataggtgaaaatctgtatgaccttggattaaatggtg

SEQ ID NO: 297116 - DNA, 576 bp, Homo Sapiens
gtaagcattattaatacatctttacaaaacctgagcaatacaatattttctttatatgttatatgcccttgtttgctaaaagctaatatttttgcatttactttaaagggctgtactaaacccacagctctaagttcttccctaaaagaagcattgcagctaacccttgaactcacagttttaaaatacagtatttctcttctccacatctccatgccttcgcatcaatgcttgtttttcctggtgaacactatagataatctcctgtttgaaatgtgggacagggtgtttcatggcagtggagctaagtttctcctctttatagtgaactggtgacccaaatgtccctgtcatttatagtgaactgatgacccaaatgactccctgtcagtagagtcccatgtggcccatgcttcacacaagcagaaatgaacgcactgtttttaaggctagattatcagttctagaatgattacttcaaagatgggagctacctcctcagatattcacactatgaaatggaggtgcttgatgtgtttcacactggcttgtttgacagtcttctatcttactgtt

SEQ ID NO: 297117 - DNA, 534 bp, Homo Sapiens
  misc_feature (435)..(435): n is a, c, g, or t
  misc_feature (516)..(516): n is a, c, g, or t
aaagattgatagaactgagagatgaaataggcaattcaatatttagaagagttggagattttaatactcttctctcaacagttgataggataagtaaacagaaaacaggatacagaagacaggaataaagcaatcagccaactcaatctaattgacatctgcagaatacccaacaacagtagaaaacacattattctaaagtgcattggtaacattagccagggtgaatagtatactggcccacaaaaatgaaatgttttaataaatatggaagaattgaaattatatggtatgttttgcaactacaaaggaattaaaaatcatggagagaaataaggaagaaataagtaaaatccccaaatatgtgcaaatgaatactatttctgagtaacccatgggtgaaaaaagaattcactgggcaaaatagaaaatatntttaactggagtgaaaatgaacacaaaatgtaagaaaatatttggtatgtagctctcaggcagtgctaagaaagaaatgtntggctttaaatgcttatg

SEQ ID NO: 297118 - DNA, 538 bp, Homo Sapiens
  misc_feature (466)..(478): n is a, c, g, or t
atcatttcactcctcaaatttgtaattaaaaaaaggaaattctcaagcagttttattcaattagaactttgcaaatatcaaattgtccgtatccttctggattcttgtctgaacattgcttatctgcgtacatatcacagtgttttcacatagggattgctgtatgttgaagtagttgaggtgtaatagccatataatctaatgtgatccatctgaataggcaaacccttgcacacctgtgtacctgttgaacattttcatcatttgcagttttttcttaacataagcactgttctgaatacttgtgaacaagtcacttgggagtttgttcatgggcgtgtatcttccaaagaggagtcttcacgttcagctgggtaacacactatcagctgtagccctttcattttaaaaacatttccagtgctgcaaattactatggtgattgggaattacaacttggaaatannnnnnnnnnnnnaaaagatagtacattcatatgaatcaaaataaaatacataaaaaggtactatgaaaagtc

SEQ ID NO: 297119 - DNA, 435 bp, Homo Sapiens
gaaaaatggggttatgctcagaaattttttcagataatgctaaagcactgggcttgtaactgttgttgacctgctgataatacatttagaatttgcttcgggggtattaaaaaattggacttctttttctttgttacaacatgtcagcattgtttttcttttattgtctttttataacatgttttcactggggacttttaaagaaaaaagtatattatgagtcagttttgtacatattgggtttttttaatgccgtgttgtttcaaataaatatagattggtgatatctcaattttcagtgctaataaatttcctttgctctccttggctcaggaaattggctaatttaactgctaacctatatagaagtatttatatgaaaaatgacatcctgtagtatctgaaaaaagcagagcacacattgttaaactagtc

SEQ ID NO: 297120 - DNA, 506 bp, Homo Sapiens
ttctggattagtcccttgttctggtgcatggtttgcaaatattttggtcccattgttcaggaggcctgttcactctgttacttattttgcagtgcaaaagtttttaatttaatcaagtcccatttgtctatttttggttttgtagcatttgcttttgaggtcttagtcatgaattctttgccaaggccaatgtctggcaaagtttttggttaggttttcttctagtatttttatattttcaggtcttacatttcagtatttaatcaacattaatttttgtatatggtgagagataggggtccagtttcattctgcatatggcaatccacattttcccagcaccatttattgaatagcatgttcctttcccaatatatgcttttgtcaatcttgttgaagaccagttggctgtaggtaattggctttatttccaaattctctatactgttacattgatctatgtgtctgtttttatactagtaccatcctgtttcggttactcttgc

SEQ ID NO: 297121 - DNA, 449 bp, Homo Sapiens
cccaccgcgcgctggccgcaagcctattttaatttgtaacaattctgcttgatgacaggaagacgtcaaaaaggagaaatcaggctaactggggctccttgtccacttggggggcatgtctcagtgtcttacctggggccttgtacacaccctctcttaccgggagtaaagtgaggtttagaaagattacctttgtcctgggtcattcttccttaaatcacagctaggatgcaaacccagacctctctgatgtcagtttgcaagctctttcaggtaccgtcagccacatgccaggccttcagtggggtgatgtttttttgttgtttttagaaaatactgctattcactcatgggaaatagggacgagggcttagatttcagctgctttgcattagacaatgatttctcttattataagcagagctctctattaaccaaaaacacttggc

SEQ ID NO: 297122 - DNA, 663 bp, Homo Sapiens
tggaatgcaattttggtgataagaggtaaaatatagggtgcatcactgaataattacaatttaattgcttgaaaaatattcggcataaaggatgagcctcaaatactgtattctgatagaagaaaatattctattttgaccaactcaatgcactcaaatcatgaatgcccatggggattatgcatcataatacattgaagagaacaattctgtaggaacaagtccaaaaagctagctgacgactgtgattaggtcaaaaataactgtaagatttcaaagtactaattaaagccccatataaaaaagtaatataacattgggatgaaaagttccttccttcctttgaaaaagctggcagttttgactgtacgtaatgttgagtggcttttgagctacaagtaatttataagtaacttatgaacactttcctagcctaacagcatgttctcatcaaatagtttcttaaaaaggaaaagaaaatgatttggtgttaatatgttaagaacaaacaggaaaaacaatagtagtaccaactgtctgcctcccttgagcctatacggttagtcccaaggtcagagtctcagcatcttattctactttagaatggacgtgacaaacattagacatcaaagtcataaaccttcttggaccaggacatagtta

SEQ ID NO: 297123 - DNA, 565 bp, Homo Sapiens
  misc_feature (430)..(430): n is a, c, g, or t
gtaaatacaggttctctagtggtcagagaatgtctgcctaggaaggtttaatgaaaccatgtaccattgttggtttaatgaaatgctttccaaggatattgatattccagctctttgtgaaatgagtcaaaatgactaccgtttgtagcttgggaagggttcttgctgagctcaaaggtggcttaacctcatcctctgctcattgagggaaagggatgtgggaaatgtttttatttcatagccagaaggaatctgtaggagagtactcatgctgcttcccatcttggcaaaaaccagcctgtgtaccccataatatgtcaattacctaacattacacatatacgtgaaaactcccaattgcccccagaagctagtatcttgggactctctattaaaactcttaactatcagaaagatcctagattcctgngtcagatgtggtgctttctgtgcaagtccttttaccaccctgaactcaacacctcatttcataaggaagcatggcatggtcatactccccaaagctatggtacctgagctcatttagaaagcattaagttgtcac

SEQ ID NO: 297124 - DNA, 398 bp, Homo Sapiens
  misc_feature (329)..(329): n is a, c, g, or t
ttgcccctgatcagctggaatagcatgaattgggatccaagcccatcaggctcctatatcctgagacagagagagtgctttgaatgtgtgcacagtgaaaaaccatggaaagccatagcaaggttactgggagagtagatgctaagctccctggtactggcagtgaggagaggacacaggttcacagtgcctgtgtctagctcctcctgttggcatggctggtcacatctgggtgtacttcaaaaaaccttgtcagtctgatgaaaaactgcaatggcaaagccctagggaaagagaatacaactgccctatctccaatacctcttgtntatactcctccctttcattctatgcctttgaaaactacaaagacagcattatctagaggttctactcta

SEQ ID NO: 297125 - DNA, 680 bp, Homo Sapiens
  misc_feature (636)..(636): n is a, c, g, or t
gaagaaaatatattcattgcaagtatatgtgaaagaggaacatgtgtttttctagcaccttcacctatttttcatttatagactttagagttgcacaggagttacaattagatgctcttaatgactgtaaactattaagatacatgtccacacaagcagagcagtaggtctctcaataggttgtctcagtagtcttattctaccaaagttgttgcattctctagttgaattgtatgtactttgggacccaaatagcttgcttataactgaagttatagtggaatgtcaatgggttatagtttgattttaaaataaagatcaattggaggatagcctacaaggtgctgcatgagctggcttcactgtacctctcctgcctccatcatctaccacattcctaccagatcttgcttgtctaggtgaacatccagttcttctcaattactatgctatattttgcctcagggatttgcacatgctgtttatttctttgcttagttaacatagctttttttcatgcttatttaactcatatgctttgaaatgttagctcctgtgtcaaaacctctgagaagccaacactgattagggtcaagttcccgctttgggttcccataacagctttcttgcatagtnttgatcatggtcatattttttttcattaatgctagtctcttcac

SEQ ID NO: 297126 - DNA, 565 bp, Homo Sapiens
  misc_feature (473)..(473): n is a, c, g, or t
  misc_feature (526)..(526): n is a, c, g, or t
cgggaaccaaattatatatcctaacatgtttagtgacagctaccttagcatggaagtccactaaggcattgtcttgatatttaggttcagttttacaagtgagcttcaattttaataatagcaacttgtgagggcagcaaaatagcagaaggaagttcatttgcctggggctcattttcggtggtggacccacttgaaatgaggacccctctttgcttctaatacatgccaaaatcatggactacccccaaaggcttatctactgtctgtataaatgttgtctgatttgccctgagatatttgacaggcctgagtgagagcatgtacctctgctggttgggctgacttcaactggggaagagctcccttttctgttaattcattctgggtagtccaggcatgccctccttggtattttacttccgcatttttagcataaaatccatcagcaaaatgtattatctcaaggtgtntaatggggcatcttataaatcagttgaggagtcaatagctgtgatatgagatntacatagttgtggtcctcacctttgtccagtaagggtag

SEQ ID NO: 297127 - DNA, 433 bp, Homo Sapiens
caagttttgatagtgaaccactattcctttttacctacaatgttttggagcagaaatcactatatatcaaaacagtaacatggggttggagtttacactgattccttagctactctttgaaggctgtggagtaacccaaggcagacgtaagagacatgttccaactgagaactccaaataagggtgagtcagttttgcttttcagaagtacgtgtttcttctgagatgctgaacttcttaggtgaagtattacctatttctaggtttaatctcctttgactttttttatagaaaatgttgacagaaactctattaagagactttgaaaatgcagcatcattctacagaaaaatagagacctagggtagttaaacaatctgctccaaactttataaaattttagcaggaagaagctagatcacttccagacaca

SEQ ID NO: 297128 - DNA, 572 bp, Homo Sapiens
atatgaggggtacatgagagtcagtgaacgatgacttgatttttacatgacatttgaattctgtcactatctgattcttgacctaaaggtttctttgctagatctgatatttattatagtataatatgataatttggagctcctgttgcatctcactgccccaaaaatgttggaatgccatatgatacagggaaaagattggagttcatcaccgtggaattttgatctgtcttaatgacacaacttaattttcatgatgatagatctctgaatgattaatccagaatgatttggtacagtgactggaagaaattgtttttctgggaatttgcttcccataatgacctgatatacaggtgaccttagtataattgaaattaattataattttaattagaacatgctctgtttaaaagattataattgcgcagcattttaaaaaatatacataattatgaggatgagagaattacaaacttgaacagttcttttgttttctctccttttacttgaaaagctttcagaaagcttttgaaagatgacacagttttcatagcaacagtatgcaaatt

SEQ ID NO: 297129 - DNA, 590 bp, Homo Sapiens
catagtacggggacagaactggctaaaacctgggcctgataccaatggtgactttaaagacttaaagctttaataatgcttagaacaacgggagggaattttagtgacaaaatgtggagaaaggggaaatggagaataataaaatctcagattacaaattctatttttatatggattaatctgttaaaacaaatgttctgagaattgaaggcttctgtttatgttgcaagtagatggcttgtgcaagtgttgtgttctgagtatgttttattcgataagctttacctttgtaatcatatactatactcacttttgtttagcccttcccctccccaaacaaaaggcaattatatgattcccagcctcttttcagcataatccagaataagtgaaatctgagttaatgggattaattaattaggtgggaagtttgaagacaattatttacattttatgaaatttctgctcctgtgtgcttatttcttggaagctgatttcttttagaagttttcatagtagagtcttcataagaacaaaagaatatagttgtaacagcttaaaaaccaatggaattgtaatgtgttttaaag

SEQ ID NO: 297130 - DNA, 492 bp, Homo Sapiens
aaattttaattaatttatggtttgaaatatgaaatttttatgcattgccacccaaaattaagccttgataacaacaaagtatggctatttcacttatttaaaagaattcaaaagaaatacttgttttattcagctttgcaatgaagaaatctaacaggaattactgtgaatcataatgtagtggctcaaatatccatgatgtttaacaatgaaaacaggaaaataaagaatgagaaatgtatcccaagatttactgtaaatgtcagaaaccttgaatgcaagaaaactcataaaataatttttcaagctaaattcttacagcatattatttatatgtcaactgttaatactgctgtcatcattcattctcaaaatgcttgataaattttagtggaagtataaatatgcttctccaattcaagatagattttattcttgctatttcaattagattgccaatcttttcctcctactccatatctcccacttcca

SEQ ID NO: 297131 - DNA, 558 bp, Homo Sapiens
  misc_feature (101)..(101): n is a, c, g, or t
gcacatcttaatcctctggtaaaactaaatgtggtgatagcgatttaggcagattttagcttggaaatttgaagcccttaaagagatgggaagtatggganaaaacctgctactctttaattatatggataaaataaaaatgtttcctttccctttccttcagttaaataatgacaggtaggcgtgtcattcagctcaccttcattttctcactattaaaagggtcttcgatgtctgtgaatttgtattaattttaaaattaaatgtgcacaatagtggattaaaaaataattttacttcatagcaacctttatttccctagcagtactcttgcagtaaaattgtgtccaagctcctagccagtcttagtgatgttagagatgcttcaaaatgtcttctttgaaaaacacctttcctactccccgccaaaataaatcacctccttatctaaaagaactataaaagaagcatttctaggttcagcagacttaaattgacatttaccattaagaagacaacctaatcagacgttgctgaagtattgtttttcaatgatga

SEQ ID NO: 297132 - DNA, 339 bp, Homo Sapiens
gagagcacaggtttttattaataggaggtttattacttggctcaagtaaggaggacactgggagcattcttcaaagcagtctctcccctagggaaagtgatgggagggttttatggagtgatggagaggggagagggtgcatcatcacatgtagaagaggggtctcagtggtgcgtgtaatgagtcatcatgccggtgcataggtcgcacatcatggtgatgaaactctagctcctcaggggtggagacttcatcacagtaatgaggaaaggtcacttgctttcatctgtaagttgctgggatctgtcaggagctggttgaaaccaccaagacgacctc

SEQ ID NO: 297133 - DNA, 468 bp, Homo Sapiens
gtcttcttggcaccttcattgaaaatcagttgtaaatgtttggatctatttatcgattgcctgttctgctccattggtctatgtgtcgggtttttatgccaatactatgatgtttcggttgttaaaactttgtagtgtattttgaagtcatgtagtgtgattccttcagctttatcctgttgcctcaaaattgctctggctattcagggtcttctgcggctctacacaaatataaggattttttttccatttctgtggagaatgtcattggtatcttgatagggattgcattgaatctgtagattgctttggacagtgtgggcattttaacaatattaattcttccaatccatgaacacaggatatgttttcatttctttgtgtccttttcaatttctttcatcaatgttttatagttttcattgtggagatcttttacctccttggttgaatttattctgaggtttt

SEQ ID NO: 297134 - DNA, 337 bp, Homo Sapiens
gagggattggatttattctatatagtaggatgaccttgtggtccagtttcccagggtgcttcgtcccaatgtgactattactagtgcccccttttcctctcaagtgtccctgcttggatgataaattacatggtcttgcaatcctcaaggccatatggcacccctgaaggtttcacagtgggccatggtcaagctggtcttaggaaggtcagtgtccacagtgcctgctggagtctaggggcaggagatgagatgtctcctggtctaggcacttcaggccttagctggaggagctgtagtgacttctgaaaggaggagatggttacaaaagagatta

SEQ ID NO: 297135 - DNA, 530 bp, Homo Sapiens
  misc_feature (282)..(282): n is a, c, g, or t
  misc_feature (375)..(375): n is a, c, g, or t
  misc_feature (407)..(407): n is a, c, g, or t
  misc_feature (440)..(485): n is a, c, g, or t
gagatgaaacaagattggctgttgctaattattaaagcttgataataggtacatgggaatttattgttttctgaactctcgtgtgtgcttgagatttttcataaaaaggtttttaataatgtcagagaaaatcattttttctccctgaagtcaactgatgaagaataagtcaatcttatcttgatcttactggatcagcacactgtctcacaagatgacagtagcttccaattgcatggttagcatgtttacttgtatgttttattttaataattctagcanattcttcagtactgatcattgaatgtaatagaagtttggaagaatggatgggagggaggaaaaaacaaagggggcagttaggaaaggagaaanaaaaccccttagggagcttcttaatagttcanagtacaatagtaaagacatttgattaggtctannnnnnnnnnnnnnnnnnnnnnnnnnnnnnnnnnnnnnnnnnnnnntgagaaatggcataatggcacaactgcacaaattgtattacatta

SEQ ID NO: 297136 - DNA, 621 bp, Homo Sapiens
agaaatgaaatcactttcaatgaaagaaagatgcctcattatagtcaccaacagcagttattgacagctacacttcctattaacaaggagcatttaactaagagtttggctgttggatctttggacttgatctaatttgctagcattaattagtttcttttgagcacagacacttggtgctcacagctatagatttgcagggctaattaggatagaaaattgaacagaattgggtaaggcattaaccttcaaccattaccagctgggacactgataaagcccacagagtccaaatgttacctattgatgtgaggagtaccctaatgaatatcaatttcagccaggttgctatattcttactagttctgtcttcattttaattttttaaccagcttacatgataccctctttatctatacaccattggtttttacttaatgtacactgaattagtctgagttgcatatttcacctaatgtttaaatacagttaaaatttgtcttaagcagtagataacatttagaatgtttcatcattatatacccttatacttctaaaatttaattttaatctggaattacatgattctaattctacagtgaatttgtataagttccagta

SEQ ID NO: 297137 - DNA, 564 bp, Homo Sapiens
  misc_feature (500)..(500): n is a, c, g, or t
  misc_feature (503)..(503): n is a, c, g, or t
  misc_feature (505)..(505): n is a, c, g, or t
cagctcatgtgaggtgaggagggagaggaccccagagggcaagaattcattcagtgaagagataccctgacctgtccccagggcctaagggcagaagcaggtgagtcagaggaagtggcagattccggacctgccaccctggagacagatcagggtcctcttgctgagagtgagcaccacttggctgatgaggccacatccaaagccccgtgtgtttcagtggacagtgtaatgtggctgattacactagaggagagggagaatgtggaaggtgagccctacagcctagggagtgggggcagctccctgcagggcaaatgagggtgaggtccaggtagaagcagccactatccatagccagggagcctccatcccccaccacagcaccaacccttccctctccatcggctctttacagatgtcggctgatccccaccagtgcccctttcccccaggtctctggggatctggcgatttctcctctatcctgatttaggtanagnanaatcctttttctttggaacttagagactggcaaggtagtaggcacacagtctctgggcc

SEQ ID NO: 297138 - DNA, 249 bp, Homo Sapiens
  misc_feature (67)..(67): n is a, c, g, or t
  misc_feature (237)..(237): n is a, c, g, or t
tttctttgggacccatctaccctgaccacatcatgatgttcatctgcagctgttgcaaggtgttcanattgtataaacataaatgtcacaaaaactttaaaacaagtgcaattctcaaaaggttaggtggactaaagcattctgtaaagcaactgctaataatgagcttacagtgcatttcaatttgaaaaatatagtaacaagcctgtcaaatatctgcaggaactatggaataanactactgatgca

SEQ ID NO: 297139 - DNA, 473 bp, Homo Sapiens
  misc_feature (246)..(246): n is a, c, g, or t
  misc_feature (407)..(407): n is a, c, g, or t
  misc_feature (426)..(426): n is a, c, g, or t
acactctgctatctttatttccttctctcctctttgaagaacagctcaggtagaaataacagattcggtaatcttctgtgtcaaaatatgcataaaatggttgaggtgattgtgggagtgagaaaagagaaggattgaagttcaaatcttaaatggcacagacaaggggtttacagggaggaaggtcagaagagatataaatgaagagtcagattagtattcaggaaagtacgtggaactgaagtngggagatctgttcttccagtctcactttctccattcatggtttgtgcaccttccctgctatacagactggacttgaacactaagtcttcaatagctgagattctccatcttaatctacttggaggcaagagcaggtgaatcaagatagtgtaatgtctcanaaacaggaatttcaagaanaaacaatgtcagatgttacagaaataaaggaggatgagagctgggaa

SEQ ID NO: 297140 - DNA, 305 bp, Homo Sapiens
  misc_feature (116)..(116): n is a, c, g, or t
  misc_feature (198)..(198): n is a, c, g, or t
  misc_feature (229)..(229): n is a, c, g, or t
  misc_feature (238)..(238): n is a, c, g, or t
  misc_feature (246)..(246): n is a, c, g, or t
aaaaacttctgtcttaaggcttctgtggctcatacagagcagctaccttgctcagtggataagccccaacccccttgttgtttcacagtagttccccagcctgtcaggcccagaantttcttccttctggtgggaggctgatgctttctgtcctccctgcacggccacagacacattccctgcccgccgccgcctctnacagcagggactgtccagtctggcatggaanactgcggcnctcggtancatggcacacaggaaaatccgccactttttccctcgggaccctctgccatgccacgtgt

SEQ ID NO: 297141 - DNA, 364 bp, Homo Sapiens
  misc_feature (162)..(162): n is a, c, g, or t
  misc_feature (326)..(326): n is a, c, g, or t
gcccccagtctgtgttacgttcttactggttaaaggaaattttgatacactttgaatattaagcctttgttatacttgtaaatattctttatggactcatctttttgttctcttgtctcttaactcttactttggtttatttttttaattataatggttttnaatgaacattatcacagctttaacagtcttctatgttcttttcttaatcacttatccctatatgttgtataatccatcatttccccaatgatatgaattggcaactttgttaaatgaaaaattccattttatatggaatctttttaggatattgttttgttganctgtatcttgattcctgtgtatcatcacactatatagt

SEQ ID NO: 297142 - DNA, 389 bp, Homo Sapiens
  misc_feature (177)..(177): n is a, c, g, or t
  misc_feature (206)..(206): n is a, c, g, or t
  misc_feature (265)..(265): n is a, c, g, or t
  misc_feature (316)..(316): n is a, c, g, or t
  misc_feature (351)..(351): n is a, c, g, or t
cattgcaagtaacagaattttagagaatgatttatagatttaaaaacaaaaattttaattttcagtgttaaaattaaaattctttctgagaaaagttaatctccctggagagatattaaagcagcaatttctaaaaatccatatgttgctgtcttatcaatattaaacatatttcanacttttaaaattaatattgttcatatatnaggcgatctgacatttattcaacatagaaaatattgctggaatcctagttgtgtttaanatgattaggtttcaaatgagtcatttgtctaaaaataatttaagtactttntgtttaaaataatccattaaagaatagaataattnagcagtaatcctaaaaagaatgcctatcttactatttt

SEQ ID NO: 297143 - DNA, 291 bp, Homo Sapiens
  misc_feature (148)..(148): n is a, c, g, or t
  misc_feature (162)..(162): n is a, c, g, or t
  misc_feature (181)..(181): n is a, c, g, or t
  misc_feature (186)..(186): n is a, c, g, or t
  misc_feature (202)..(202): n is a, c, g, or t
  misc_feature (218)..(218): n is a, c, g, or t
  misc_feature (247)..(247): n is a, c, g, or t
  misc_feature (267)..(267): n is a, c, g, or t
gacttctctgactctcatagccgtgagttccaaatggcaagaaaatgcatcttttctatatatgtatcacgataggctatagcatgtttatgactctggtttctttctcttcaggtggttttataccattactgttaatgttattttnacttggcatgtatnacattgccatatagagtanagtanaaagttgcaaatcttnatagtttacagagttnaacactaaacatatccaaagtccatttanagttttgggtgttgtatttngccatttttgtgatgtgtggcctt

SEQ ID NO: 297144 - DNA, 234 bp, Homo Sapiens
tatgtcctcacagggatcctcacagggataggatgcggtctgcagcagcattggatgggccggcatggtaactgtttttcacatggggatgcgctgccttcactcacgcatgccaaggttttcaggtagaactgcagatcctggcttctcatgaaaaaatcagaggaccaggcgatttggggctttgcacatgtgacacctggctagactgtgtagggttagaggggccctttt

SEQ ID NO: 297145 - DNA, 288 bp, Homo Sapiens
  misc_feature (250)..(250): n is a, c, g, or t
ataatcttactataaccgcaaatccctacaacacagtataaagtttccctgtagttcacccatgaaaattatttgacttaaaaacaaccatagtagtaagccaattgcaattcaaaatgcaacatccttgccataaaagatgtaacttaagtgactgtgattctttgtctacctttcaggatcccatcaaatgggatttagttgctagaaagatgcttgacagtctgaaggcacaggtgataagattttnttctctgtgaatatttttagactaataggttatgtttt

SEQ ID NO: 297146 - DNA, 184 bp, Homo Sapiens
actgctaggcgcttctccatttctactggcaggctcaggaggtatggttatgacatggcaatgaccgtgtaacttgaagcaggaatactgaaagaactgaaaactggtgatccttaaagggagtatttctccagcttcaggtaaaaagtaatggagtgcgaagattatgcatagaaggtgatgc

SEQ ID NO: 297147 - DNA, 701 bp, Homo Sapiens
  misc_feature (331)..(343): n is a, c, g, or t
cagaaaaatgttattaagcacaagacactattcgtggagttaaataaaaggcatgttacttctatttaatgctcttctctgtttgttctcattattaatttaattctttgtaacatatagggtttataaataaaaatttcttttttttgaactttgaaaggtatattcatgtgactctttgtttcatacttctggtagtctatagtacacaagattagattggttcagtaggtgatggtgataggattgacacatgtggcttagctatctatgaaaataaagtgtttaggaaaattgcatgtggcgaatcactataaagtgttaaaatgannnnnnnnnnnnnaaagctagcattttatcttcaatatttcaaatgtgaaaagtgctgtctagaaaatgtcattcctttgaataaacatcattaaacaaacttgtttgttgattcatatagatttgtattaaatatagtccatcaattctaggcacaaaaggccatgttatagctattagcatgatcaatacatgtcaaaaggaaatgttagcaattaagcaataatgaaaaagtcaagaaaataaaaatctaggtgaagaaagactacactggaatatctgcatggcagtagcagtctttcttagggtagctaaacttaaatggctaccattggagaattatagttaggtctctccacagcactcatgtc

SEQ ID NO: 297148 - DNA, 295 bp, Homo Sapiens
  misc_feature (16)..(16): n is a, c, g, or t
gaggacgtgagcatgngtgggggacattccagacacagataagagtccttttaactgtagtaccagatgaaggcaggggagttgtgtgttgaaaaagtaaaatggtttcagactgtagagaaaactttaaaaactacattaaagagtttgaactttgttctgagaatggtggagcataatttaaaggtttcgaagagagaagtatcaaagtacagaagggatttgaatagggaagagatagtagaggacaggaaatggactaagtttgacctaggatgccagcaataggaatggg

SEQ ID NO: 297149 - DNA, 662 bp, Homo Sapiens
  misc_feature (638)..(638): n is a, c, g, or t
ttctgcaataactttctccccttttcccatcaagcacttagggaataaaatcagttcaccaaatattaggatatagaggcaattaagatcaccatcaacaaatgcttcagtgccaatagacatcaaaatggccaaacattgcctgtgatttggcctaaaaatgtaagagtagaagttattatcaaaaggaagaagggcaaggggaaacattcaggaaagaagggaaaactgagcaaatgagaaggagataggagaggcataaatgaggagggaaagattgttgctctgatagagggacccctacagtgccagctacaactctatcagaaccccaggggtaccagttgtttacccaggattaaagcaggtatcctgggtaaagcagaaaaacagatattgaataggaggaagaaagagttgggatattaccaactaggtaataactttatgcaatcacttggaacatgcggagggatgttccatgtgttccacacaaatctattaaggaaaacaagttctcctgaaatgtgttcatttctctcgaggttttgctgctttgggtgctcgagcccacctaaaagtcagtaatagacattaatctcatcatcttctaagcccaacattctagtgacagaaanaaagctagttcattattttagctt

SEQ ID NO: 297150 - DNA, 594 bp, Homo Sapiens
atgtaatattgtaattaatttatatatataattacaaacagtatataaaaactgttcacacatagaagtctaatctactttaaagtttattcaagcaagcctagggaagggttgaatttaagtttaatatgatgctggagcagagggactgtgactacgagaacatattaaatgggcatgatgtccctcattcatagataagtatctacattatttaacagggacaacaggattgtcccttcttgagaaagacaacaaaggaaactcccatcactatgcagcttggagtgttggtgagagcctccccaaaatccatgagtgtgagcttattttgagaggcattctcattaccttgttatattggacattccctctagtgagatcatctacaggaggttttatagaaaagaaatacatttctaaatgacattattaggaacatgcacagctatccacagacacgtcttacttactagaactagtaagttctataccttacttacgcttataccctactaactttgtaaaaagctattgtagttgttatcttaaaagaaatgagtatatatgttctttagaagtctttaattaaat

SEQ ID NO: 297151 - DNA, 717 bp, Homo Sapiens
  misc_feature (272)..(338): n is a, c, g, or t
  misc_feature (661)..(661): n is a, c, g, or t
  misc_feature (663)..(663): n is a, c, g, or t
  misc_feature (691)..(691): n is a, c, g, or t
agaaccaggttggggactggataaggatttttccattaaaaacgcatgctgaaaatgtgcttttataaaatatgctcttaaaaagggggaaaacctaaaatatgaatggagtgaattataatcatcaaggtatcaaaccaagcgcaggacctgagatgtaagctgtagcatttcctagccatgcagtgtgcatcagctgcttaatctctctaaggcctctttttgcttacctgtgaaatagggatgatattagtgggctgacattttagcannnnnnnnnnnnnnnnnnnnnnnnnnnnnnnnnnnnnnnnnnnnnnnnnnnnnnnnnnnnnnnnnnntctttagacattaagttgtcaccacctgtcttatatttagggagggatttgattaaaccatctgagaagtgcctaagtgctttggagactaaaaacaaacaaacacactaaccgagccgctatttaacatgttttgtttgtgactgtgtgtctggtttctactctttggctaaggagggtacccaaataaccgctgggggagcttcaaatgttagagatatgttgtgcccgataaactgaaaaaactattgctttgtgaattccccctggtgaagcccagctggtcacatgctggaaaaatttcaggaagcttggcaagtgtntntgcagcttgtttctgacagaatacctgnatacttcttagagctagctcaaggaa

SEQ ID NO: 297152 - DNA, 674 bp, Homo Sapiens
gtctaagaattcctgttagttttatgctttgatagaagatgataatgcaaaagtaccagttattaaggaaagtaaagagtccatgggggctgaggggtatctcatgggagaatgccatccctgctgtcatctcagctctcaaagaaactatctggaactcaagcagggcctttatccattcctcttaacagttattcctgcaagcagtcttaaggattataacattcagtagaaatcgttctctgtatgaaggcaactttataggctagctgtttacttacttctgaaaagctttttctaaccatgttattcatgaatttgtccaaattcatttctatttcttcccagtagtatttttggaggtaaaatactgagtttaagactcattatgcttgtgggtaaaggtttcacaaaactctttccccttttacatgagaaattggccttgggttaagatgcttctagctcagttctctagaaatctaatggaggtagagtgtcagttgtgttaccaagcaacactgctatgataaaatgatgatgtgataaaatgacatttgattggtaagctgagtcattacttggaggactacgaatgaactacaaatacttgatgagaagccatcactttgggcttctccgaatgagagaattcttataactgggcatgtcct

SEQ ID NO: 297153 - DNA, 641 bp, Homo Sapiens
  misc_feature (585)..(585): n is a, c, g, or t
caaaggaacaccattatgaatagatgatgctaacattggtgtatccaccactcagcttcagaaatcaaactttactgatatccttgaatccccatatgtgtccttccctgaatgcattcctttgtcccccagaagtacagactatccaggattcagtgtttatcattcccatgtctttccttatgggttttctaaatttagaatatccccagagacagtttaaaatttttaagccaatgcagccataacacagtatgtgtattattttggaacttttattgacttggttcatccacccctccaggtgccattggtcacccaaccccctccaaagcagaggggcagttctctctagtactttattagctgccttgatgtcttgtttccagtcccttcagaaattatggtggagatacacacatacacattaatggaataaacactcttccctcctctcccttggggctccttcccccaaagaggtccattgtccacaagtactcatttgtgggactcaatatgttcccagccacaacagagcattacattagaataggagctaacatgtgggaatcagcatatgtntagaactacatcttacacactgaaaaatgcactggaagagcagccattattgacag

SEQ ID NO: 297154 - DNA, 622 bp, Homo Sapiens
  misc_feature (612)..(612): n is a, c, g, or t
ggggaccccggccatgggccgtgcctggccagccacggtcctgccagtgcctcttcccagccctccaataagccttcacctgttgccctgcccagcaggtgccctggagggtttgtctgagggcctctgacctggcaagttcagggcccggtgggagcagggctgtggccagagcccgaggcctcacctgcagcttcaagtgggaagtagccgagcccgctggtgtcggggaagccacagggcacgcggaggccctgctggatgatgtctggcttcagccctggctcatggttctgggcacctgtgttcttcctaactaggatgtccgggttgagcgccatcctgcgcttcattttgtcccatgggagttggccccgtgggatttccaggctgtgctcctgcggccctgccattggccgctggaatagggtcagtcaggcagttagggaaagtgcatggactttttcattctcctgaggctgtttatttttttactgggcccatgaagcaactttgacataattattcaggacatatcctaaacgccgtcatatcctggattttccaggtaaccaattgctaaactcacaggcatctttcccaatgtatttntaagaatgat

SEQ ID NO: 297155 - DNA, 657 bp, Homo Sapiens
  misc_feature (508)..(508): n is a, c, g, or t
gatatactattttaggatacaagttttttcttttcccgtcataactttaaacatgccataccattgtctcttatcctgtaaggtttccactgaaaagtctgctgccagatatattggagctatatatgttgtttcttttctcttgctgcttttaagatcctttctttattagtgacttttgggaatttgattattaaatgctttgagggagtctaatttgggttaaaactgcttggtgttctctaatctttttgcacttgaatactgatattttttctaggtttggtatgttctctgatattatccctttgaataaactttctacccctatgtctttctctacctcctgtttgcctcctgtttaccttcctccctcttactccatccatgcctctacctcctctttaaggccaataactcttagatttgcccttttgaggctatttttttagatctcataggcatgcttcattctgttttactctttttttctttctctgactgtatnttcaaatagcccgtcttcaggctcactaatactttcttctgcttgatcaattctgttggcaggaggctcttatgcattcttcagtttgtcagttgaatttcaactccagaattccgcttgattctttttaacttttttcagtctgttca

SEQ ID NO: 297156 - DNA, 564 bp, Homo Sapiens
  misc_feature (442)..(442): n is a, c, g, or t
  misc_feature (451)..(451): n is a, c, g, or t
ggggactacttgtattgggagaactttgttaaacttaaagaattaactcttattgcggaagacttaagtccttgaaaggaaaggcttttctttggtgaacaaaggccatgtgccaggtcactgtgagcataaatgggactattgagagaagaatctaacctttctgtgtggaagctgggagaatgggaaatgtgggtgggctttgaaacaaccaggtaacctttgtctgctggatttgcctggaatattggttctaagggcttttccctaagaagattattgcaacaaacacattaagtgcctccccagcttattctaacagttgaaagcagcactgggcaagaggagctgacttcagtcataagcttatttaggatttgagattaaaacctacccgttggattgctcctgcaaataacctttcagaatcccaatatgcatnttataagtntcatttctcttgctgttcaaagctgacataagctggcttgttttcttattcaattttcagtcctttcttggacctcatgctgtcttttgggctgtattcttatagatggttat

SEQ ID NO: 297157 - DNA, 555 bp, Homo Sapiens
  misc_feature (255)..(263): n is a, c, g, or t
gtgcagctgagaaattgtagtttggttcttgatgtgtttttattacatttggagttgttttgttttttagtaccttcgaaatttcaaagttattttatcttcggggtaatgattttaaaaagcctgggggcaaataagttggttatttgctttcaagtttttaaaagtagtctttattgatagagtaaggagaactactttctaacaaaacacgtgcatagttatgacagtgatgctttaaaggaataaaattcnnnnnnnnnaaagagtgatattccttttcaaaagaatactaactctcagaatgttcactttaaacgaatatgccagaacatagacagctaaatgaatgttactctgcatagtgatcatgctggaaggttatttcctaatgccagcaatctaccattgcccaaaacctgctgagtttactcttttagaattgcattcaaagttaatttgtcacacacactaaactttatgattatacattgttttaaaaaatatagtattaggaagcttgattatttttagttaccattacttggcaccaaa

SEQ ID NO: 297158 - DNA, 595 bp, Homo Sapiens
  misc_feature (448)..(448): n is a, c, g, or t
gagtataaggatgggatacttgggagctatattgtgcatcagggtgtcacagctgctactatgagttactccttttcatgtcttttaaggtactttctacccatcggaattgctaaattatctttcagttagttacagcgcttaatttaaaacctgtactgttttcatcctgaatttagaacataagatttagcctttgaagtatagtttcagactttactaattcgtttaatataatccttattaacatgacaaaatgaaagccctgttgggacttagtctaaacagtagtctttgatctgaaagtgtctcatattttgtgatctattagaaacataaacctttgcttatgcagaaggtctttcttagaacaatcctgtaatcttagggttcatgtgtgactagcattatcctctctttgatgttgggtaatagaggctgaactttncttgtgtatatatagttagttttgaggccataaatctaggacttctcaaaagattagaacatttatccagtaaactgactccattgaggacttcatttctggaaataccacattgcttctgctctcaataactctatcatttactcg

SEQ ID NO: 297159 - DNA, 547 bp, Homo Sapiens
atgctatatttttcctgagagggactgtctggttctaagtgatagtcgcgatagtgctggggattctgacatcctcggtttgtacaggaatgaaaataattttgtctgtgttggtaatgtatttccctaaatctttatgaaaacatggaggaaaagttctcattataggcttcgtataaggagattataatcaagatggcctttcccctgtcttttacatcctatgccttgggtgccaccatgagggaaaaataatccttattcttctgacaccatttctgtttttactggaattctgtcataatattcatcatttatggcagtgggtcttaaatgcttttgttatgtggacaaaattttatgaaatttctatgcactttctccctgaaattcatatatattctccatttctacataattctaagtagttgatggatctcctggtaaatattaagataattaatgcagttttattagtgataattttattggcaatttcattaagagcaaattatatttcaaatttctaatagttatggcaatcttt

SEQ ID NO: 297160 - DNA, 449 bp, Homo Sapiens
gtatttttataggttacttaattattagtaaatccatacagaatattaacgtagttattaccatttaaagtttgatttttatgttacgggataaggcgttaaacttggtaatttttatttgactttgtgatcatgtaacataggatttagtattttgggcatgatttatttattctgatacagtttctttaccaaaactggttgatactacagtagtcagacattccttaagaatataaataggagaccattaagctgaaattgttctgtgacacttaaaatcttaattccttagattttgaaatttgactacagacttcaaactactttgagtatttaatcttaaaaagtactttaaaagtcagcgagctacacattcttatatcttgatagttattaataaaatgataatattagaaaggtagagatcaaatgctttattcattttg

SEQ ID NO: 297161 - DNA, 523 bp, Homo Sapiens
tttaaactgattctaaaattgttattttaaaatagtaaaaataactttaatacagattttggtacaactaggttctcccaagagtgaggtcttctaacatctaataagctcattgatttactactattaggtgaatgcatatactaaataagttccagctaagtcaggtactacttccaattcagtgttcttctttgaccatgcattaatgcattatcagtaaaatgtagtgatctcaagcagccagaagtcttcattgtcattagcacaggcatttggatgcttcaggcttattgaaatttatctttttatggagacctttaaagaacattctcatacaccacttattcttaatatcttttaaactttaaggattctctattgtctggaatgtggaaagtagacctgggaaggtcatttgtaccttgctgacaaatttatatttctggatttctttctacattattccagcaattcaccttacacccttaccaaagaccactattgaaaaaatcatttgctt

SEQ ID NO: 297162 - DNA, 441 bp, Homo Sapiens
agagaggttctgaatgactggcatgcctaaatatatataatgacagctagattttggaagtgcttcaataaaggtacaatgtatttattaggactaagaggtgataaagttggctgtgtgtggaaggggtacacttcacagaagaggtgggattttcaccagaactttcaacaggtaggaggcacttttcagggaaaagtgttcgaataagtaaagacatggagaagagagaatataagacatatttggagaatggctgaccattagtgacttgagtctaaaaagaataggccaagaaggtttggaaagtgattaggggccagattgtggagagcttttaaaaccatgtttaggaatctggattttctgtgaactttattattttgtattctctttggaacggtgccttagataaatgcattattttaagggtcacccact

SEQ ID NO: 297163 - DNA, 563 bp, Homo Sapiens
  misc_feature (305)..(448): n is a, c, g, or t
tttttaaagtatttgctgtcaatccttttttatttgaagtgagggatataaataagtaagttaaaaataaaattctgctgagcggatggcaagctgtttctggtaccataaaaatcttacctaagatttcttgtccctggctaagcatccagaagtgacccagagtgacctatggaagacttatggaagtcatttttggacttctgttaaatcacaaccttggtatatcagttgggcaggtagtattaggcagaaatatgtggtgaaaagaacaggaggtaagaatgcctatatatctactcttnnnnnnnnnnnnnnnnnnnnnnnnnnnnnnnnnnnnnnnnnnnnnnnnnnnnnnnnnnnnnnnnnnnnnnnnnnnnnnnnnnnnnnnnnnnnnnnnnnnnnnnnnnnnnnnnnnnnnnnnnnnnnnnnnnnnnnnnnnnnnnnntggaggccttataagctgggcaggcatatgatgttatcatttttattgtcctcattatctccccgttaggtgatacatgatcaatatcaaggtgggatttatcccacgtcacctt

SEQ ID NO: 297164 - DNA, 499 bp, Homo Sapiens
  misc_feature (101)..(101): n is a, c, g, or t
ataactggtaattggtactacctaatagttaattaatttaacctaattaaataccgtacatttcaacaaaacatgtaactccttcagaggtgcagttttancaattgaaattaaatatttcaatatgcctgaagtttcaaatattatgccatgatgcatgcaaaaatgattaaattcttctcactaaaagtgctttctgttttatacgtttcaaggtaaataccattttaggttgtagcatcttatgatttctaaggtaatgttgattttatctttgatgcagaaagcaactgtcactgggaattgactaagctttttgttgtcaaaggttactactatttttacaccaccctggtatgccagtaaatgtttctcacttcattatcacgccgaggcctttataatattgctaatacaggatgaaaatatttattcacatttggtttggatgtttgcgagcatgaatgattgtggggaatcaaatgtagttgttaaaaaa

SEQ ID NO: 297165 - DNA, 303 bp, Homo Sapiens
  misc_feature (214)..(241): n is a, c, g, or t
ttttatcatgaatattttcctacatttatgcaaagtatttgtaaatatcatttggaatggtgtataatatgtcatcataggatgacatcatggtttagttaaccattttcttttgttggatatttgagggtctttccaaatttggccattgtaatttcacaatgtctttttcattacctaactgaaaatatttgctttggtgaaagcagaggannnnnnnnnnnnnnnnnnnnnnnnnnnnaaggagtccttttaatagctacatttcattgactaagtggaacttcaagagacaggtagaag

SEQ ID NO: 297166 - DNA, 296 bp, Homo Sapiens
gatgtcttgaagagagaataggatatacaagtctgaaattcagagactttcaaaccggaaattgtaaatatgggtgttctcagtttatagagggtatttaaaaccgtggtacgggttaaggttatctaaggagtgagcaaagaacagatctgaggattgagtcctggggcattcccagtgttttaagttccgagacatgggaaagaactcgctcagtacagtgaggagtagcagttgggaacagaggagaggagcatcttagtctgacttggccttgccccattatgcgttatctt

SEQ ID NO: 297167 - DNA, 356 bp, Homo Sapiens
  misc_feature (168)..(197): n is a, c, g, or t
ttgttttttttccattttacttgtttgccaatcctattatttatgcaaaaactacagggctttttttaagttggtattcccactaatcatagtagcattatattcttacttgagttttcattgcactgttctcataaggaacttgagaatcttgtcatatgtttagannnnnnnnnnnnnnnnnnnnnnnnnnnnnngactgacaaattaaaactgcatgtattctaagtatatatgtgatgatttgatatacatatgtaatgtgcagtgattagcacaatcaaattcacacattcactagcagccatgctgcacagtagacctccaggacttgttttataactgaaaagttttta

SEQ ID NO: 297168 - DNA, 430 bp, Homo Sapiens
cggccgggtgaatacagggttttctctgcacagatatgtccatttaagtaacagatgccaatgcagctaaatagaatcactcaaaaacaactccaaaatgagccagggagagtggagggaaggaaaaggaggaatgcatccaaacatagccctacgttccatgaacactcagtaacatcatcaaaacgtgatgcaattaaattttaccaggtttactgctgtcctgatgctttccaattttttttgacaacagttttgccttttcaaattcaaatggtataattggggcttggtagttgatgtttatcttaattgaaacagattctcttcatccttttgctctgagactcccactttgaggctgaaaggtcattttaaatctgcagagcactcgagaagccacataatgaattcaaacaaattcatgcct

SEQ ID NO: 297169 - DNA, 352 bp, Homo Sapiens
  misc_feature (13)..(13): n is a, c, g, or t
cactcattttccntttctgactgaattaagggagattatatgaattgtttataaaataggtctctggtacacatttgttgttcactttaatgattttttcactaaccccacctgttatttttagactgactcttatcataagttttgcctttataaattctgagttaaataaaatgaccaattgtagtcatgaccaggcatgaagattccatccctgaggggtaaagcagtagactactgccagctccacttcagttcaggccacatcaccctcagtcctgaaggagaccccttcttagcctccagttgttgcactgcaactctgcctcgaattgggctatgcccgagtatc

SEQ ID NO: 297170 - DNA, 423 bp, Homo Sapiens
ggttctcatactaaagactaagagctgtttctcttgggccactgtttccccaaaaaaagaggagtgtgcagtgtgtgtgtgttgttctctgagctctgggctgagatcagttctttgcaggtgtctttagctccagcaagctgatcccatgtggtctacttgtattgggcttgtcacaattacatgactttcccctgagcaaagttatccagtaaattgctgtaattcccaaagacttcatgggaggaaggcagctgtaaagctcagtcgttggcaagccttgcagcgttagaaatttgaagctcactgtagtatttttgttttgtgtgatctttgtcctactgatcgccatgtgactcactttctgcacttccttctcttttgcatgttttctcctcatctggacttctgaggacagctggg

SEQ ID NO: 297171 - DNA, 444 bp, Homo Sapiens
tggctgataaagtattaatgctataggaattggaatccttgaagtcttacggccacgccctcatcagtttgacataagattctactaaactggtttcaacattagaataaggaaaggaaaattcctactttgtaaaaatcatattattctgatttcatcaccaacctcacagttttccaggcatatgtagaagaagtaattataatgccaaagtatggaatatagccggtttcataaccggaatgaattatggctaattctcctgcagtaaataatttgtttttcaaatctgtattccccagacagctgagccaggccttgcttctcaagtgttttatttaaataggcagtatgtcagtggagttttaccacagagtttctgagcgcagagagcctttccctaggagtggggtgcagggaactggagggcaatggttcttatga

SEQ ID NO: 297172 - DNA, 401 bp, Homo Sapiens
gagctgtttctctgctttgtctaatctcctgtcaggacatcatttattacccacaatattcacttgagaaaacaactttgagaaaccagcaaagaaaaagccaaaggatgaagatgaagtccttctatagttcaaatcgctcatgtctgtgatcttcaaaatgtgacattggacaatcaatttaaatgctcttttttaaaagatagactgttgtattgattattatttcatgctatctaaaagtttccaaaatattttgtcttgttgtaaagagagaaccagattaaaacaatcacgtgtcagtttgttttctaaatattcatatattctcctccctttctgaatgacagagccgttgaccaacagctgtttctattatgtagtttgggatatgcttcttt

SEQ ID NO: 297173 - DNA, 351 bp, Homo Sapiens
ctcaaagctggtggaccattgtgaacttagtttttctgggcgtgaacaagaggagtcagtggccatgctcagagtcaactgagggagactcacacaaacctctctctgttgaggaatgcagcacttgcctaaggcggaatcactgaaagaaatcttgagattctatagggtatgctcatgaaaatctttaatgaaggcaaaggacacaggactgcaggagaaatatctgtctctgatacagtaaaaacagttgactgagacttccaaacatagctcccagggtgctgtcccagtcaacaggacatccttcatcttcagataatgaaccaccaagaaatgtgagagatgccc

SEQ ID NO: 297174 - DNA, 533 bp, Homo Sapiens
  misc_feature (494)..(494): n is a, c, g, or t
gtcacccttcctgtttcaggaataagccaactggccccagccttagatcagatggtgacatctcaggaggctgttcacaactgagcaagagctatccccagctaaaaagaatgtgcaaattatttctaatttggcttttaggcttggtttatgaaacccatatgttagaaataagcccagagttgggaccttttgtcaatttaccttcaagtagattattgtcagcagcctcatgcagaaatagattagattattccaattcaagtatgcctttcatctcatcagttagatttgagcgctgtgaggttttgatggtcagtattaccattcaaggtcatatcagggaaaaagaatgttctaaaatgttctttttttagacctagatgaccttaaattatctaaacctgtgctcaaacctctagcagatagtcaatctaggctatgattagatggcttcctgccttcaggggagcctattctgtgttggggaaggntgttagtgttcttctttatagagagcgaatctttgtatg

SEQ ID NO: 297175 - DNA, 446 bp, Homo Sapiens
  misc_feature (211)..(359): n is a, c, g, or t
tagaggttgactgtgagatgatgggatttgtgtggacctcccagaagaaatgctctttgggtaatgcccaagactaatgcagattcagctgacatttatgaaatgaacctgtcccatcaaattcttatctacaatgagcagcaggaagctgcgtttcccgctggtggtggcaccaacgcttttttcttaagaagctagaggttagccaagnnnnnnnnnnnnnnnnnnnnnnnnnnnnnnnnnnnnnnnnnnnnnnnnnnnnnnnnnnnnnnnnnnnnnnnnnnnnnnnnnnnnnnnnnnnnnnnnnnnnnnnnnnnnnnnnnnnnnnnnnnnnnnnnnnnnnnnnnnnnnnnnnnnnnaggagctagagaaacaagggaaagagagatctaagtattactgattttcaagctcatttcaaaaatgaaggtgataattgccaagtt

SEQ ID NO: 297176 - DNA, 606 bp, Homo Sapiens
ggacaatggttcggtatgaccaagataaagcttggtaggactaattcctgctgaccaaagaattaagagagcaccaggacctgagatgagtcagtctaattcaatcctgacatgatcccagaaactaatgtcacaacatttctgatccttagctaatgggggcattgttaacaacatcagctgctctgttgtggttgttactgactggcacaaagtggatggattcgttttcctttgctgggcacctcaaaacataactactagttgcagaacattgttaagaaaatacttgtaagatagttttacaagtggatttgcatatagtatttgttaccaaaaagcgatggtactgtaaattttgttttttcaaatttatattggcaattgtagtctctgagaacacttaaataaatgaaagcaggacttttaccattatgctttcaagattgagaaccctgagttcaaaagctgatactctaaaaacacctagattgaatgaacacttttcaaaaaccaataggagtaataaatacaaccttaaaatttgtcaactgacttttcttcgaatgaaattgttgttagaaaaatataagcatttgtataatt

SEQ ID NO: 297177 - DNA, 763 bp, Homo Sapiens
  misc_feature (709)..(709): n is a, c, g, or t
  misc_feature (736)..(736): n is a, c, g, or t
ggggattttgttctgatgtttccatgtgctaatatgttagctgctaaaatgccggtttttttaacccggtaaaacttgattaacctggtatgtaaattattctaaatatataattgattttttttaatgattaagtcaattcaggcctttatctaggcaaagaatgaaggctagctagagcattagctggtgacagatctcaaaagttgtttcctgaagtactctttcctacgttttaaagacattatgtattttttaaaatcattctctgtacttgaagcttccattaatgtatgggagtatgtgaatattgtattgtatgggagtggtagatgtgtagatggttttggtgtgttatttggttgtaaaaaccagacaaaaacatacgaaagagttgtctctgaaaaaccagacaaaaacatacgaaagagttgtctctgggctctttaatttttgaacaattttactggaaagaaatttttcacatgttacttaatgacctatttggcagacttgccttcagatatagcagaactataaaacacaaagtaaaatttaattgtatccttaggaaaatctcattttagactaaataaagatttatcatggaatattggtatgaatattcagacttccaattattttcacaaatataataaaaataatatgacccttatggtttatcattatatataaccttgtctaaatnttcctccattgtatagatctaagagtnacatgcaggaagataaacacagaattc

SEQ ID NO: 297178 - DNA, 659 bp, Homo Sapiens
  misc_feature (569)..(569): n is a, c, g, or t
gaaataaagacacttttaaagattattagtaaagtaaaaatgttttcaaaatttagacagttggtctaaattaggtcacatattagatttgataaatgccttaatgtcataaactacttctttaatttgataattgttcaaattacttgccttggagccactaaattccagataaggcaggggacatgtggagttagctatgccccctaactatgctggaaagactcagaccttatctgtacttctgtctggtgtcctaggctccacatctggtacataaataaaatcacttacttgccagagtttttaccaacatagaagttgctaagagttaatactgaaacatatataattgagactactagcaaaatagttttacatgcaaggtgtgtaaggaaagtaaaatgtgttttagtacaagattttaaaaaggcatgggaatatggaatttttgtgtgtgcctagtttagaaagttagtctagaactaaacagttgagcaagatgtggaaggtttgtgagaagttaatcttgtaaaaaaattctgtatgtgaacctattgactaaagtntaaggaatattattcaatttttaaataaattgaacatcaaaataaaagcacaacagggttttcttagaatattgatctactctttctctc

SEQ ID NO: 297179 - DNA, 642 bp, Homo Sapiens
  misc_feature (548)..(548): n is a, c, g, or t
  misc_feature (581)..(581): n is a, c, g, or t
  misc_feature (623)..(623): n is a, c, g, or t
ggagggtttggggaagggtattaagggaggcaggcgcaaggagaacagggtatgcaggaaaggcaggtgcaggttggcctaactcgaactaggatgaagcatagagtatagtggccaaccggtggttcaagaaggaggggtattaagactgtgatgggcatgggagctctggacacttactagtggggaccttagagatggtagtgttcctctctgagtaaactgatgatgacaatatctcctttccaaggaggttgtgaatattaaccaaaagcatatcattaaagcccctaacacggtgactctgacatggttgacaattggaaatgtgtattgtgagaaacagctggagggtttgggaacaaaaatgatgtgatgaaagctacacttttcctctgagatttcatgacaaaccatttagaattctggattgacagctaatgaaatagagaaagcatttgcttataaccatacctgagaatagtggctaaacaaaactccttctcctgcagtgtgtacctgctctttctgcagagcacatggatatntgccatagttgcagaggtggtgacatggttgtntaacttcccatggctgaagcacaatcatgttccttaacattncccctgtcagtttgtgctt

SEQ ID NO: 297180 - DNA, 785 bp, Homo Sapiens
  misc_feature (334)..(346): n is a, c, g, or t
  misc_feature (548)..(548): n is a, c, g, or t
  misc_feature (737)..(737): n is a, c, g, or t
gattgtgttaaattttaatggatgtgtaaaagcacatcaaattgattttccttagcttttatcttgctgttgggtattagtctatttcctgttttttgttattatatattacataatacttctgtaagcatattcccaaatacagccattctcttctgttgatttatttccttagataagtttccaggaatgggatcattggattgatgaatatgaatcgttttattgttttggacatatattgcctggtgccttccaccagcagtatatggagattgccaatttcaacactgagataagaggcagaattgatacccttactagcaatgagaannnnnnnnnnnnnaattcttgccgatttacttaagagtaaaaatgatacctcaaggccattttattttttgcatattttgattattctttaaaataggttgctggctaatttatttcctactctcttttctgctttctttctcctctagtttttattattcaattagtaacatttcttgagtgtttactttgcaccagatcctgtgcttcatgtnttgaatacaaatgtgaagtgaaagatacaggattttatgtctggtaggggagatatttgagcaaatagacttcagctttatgtgataaggactttgataggtgtccacatataataagaacatagagacatggaggagaagaacatcaaacttcttggctgtcaagatattttgaaacatatatagatnctatctgtacatatgtatttatgagtatacttaacaggaagttgcata

SEQ ID NO: 297181 - DNA, 657 bp, Homo Sapiens
  misc_feature (450)..(462): n is a, c, g, or t
  misc_feature (571)..(571): n is a, c, g, or t
gtttgcagattatgagaccaaatgttccagaatatggagaacaaagaagagaattaaaaacttctataactagcccatgtcattagaaagtttttcatcaatcacaaaatagctccatctttctggcattttttttcttactgttcattatcttcagttctataccaaagaatatgtagtaagagagattgggaactttcatcccaggtctggaatcctttaagcttgcttgcgttttttttaaatttatatgtcattttcttttgttgaattgcccattggcctttgtgtaggatgcaattttaaatctattatctgtgtctgagactggatgctgataagcttgtgccaggtgctgtaatggtgtttcttcctggccacagtatttcagaggtattcagtagctttaatgagacaggtcatttggtccaggcgttaaataataatgcnnnnnnnnnnnnngtcaacaacttctctcttttctacaaatccaatctttttactattacacatacttaattgcagttggtttttttccagttgctacagttcatttgaattctcaaatatntatctaccacaaggcagccatatatgctttgaagaccaggccatgactagaattacattctttatacctaggtaattgaggttgcc

SEQ ID NO: 297182 - DNA, 379 bp, Homo Sapiens
cgggcaaaatcagaagtgtggggtcagtatttttcaactctttgcaaagctacaatgaagatattatactctgttcactgttttaaaatctaacagaccaaacttttcataattcacggaggacatttgtataaaattagcatccttcttccaaagtgctagtgttcaactcaaggcagaattagttttaaactagccttgcgttgctcccttatatatcaaagatatgtcttagataagtaatgcaaaacactaagattgttttcagaacttcagttttgtctagagtagataagtagctgttgttttggcttcatccaacagatgacatgtcttacaaaatctcagagtatagtttagcaccagctaccttgaaaaa

SEQ ID NO: 297183 - DNA, 710 bp, Homo Sapiens
gattatccattagttatcattttaagcaccctaccaagatttagttctttctttctggcaactaacgttttgggggttggaggcatcccatttagaggatggtgtgtgcacaaatagattagcctgaaacctgcgtccaaagggaaacagtggcactctgccctaaaataaaggccagaacgttgtcctaaatgaatcctttgccttactttaggaccttccttccctctcaaattcaggcataatgtaatatagttgaaagggggaaaacagtacttgctttctctcaggtattggaggaaaagaagtaaatgcgtagatgaaattttaaatgtatcattttatctgtttgtatatggagaagggagggataggaattccatatttcaagagagcaaatataatttcatagaaatatatagctaaagattccaaagtgcttttacagagaactgttgaataatatattcctaaagggcagcaatatgccatgtttatggtgaagacagaaaaccaatgaatcagttgtggatctcaggtgggagaggaaacctcaggctcccaactctgacttctctactctcaccaggccatgttaacactgtaaaaccaaactctttgctaagaacaatacagggcagtagtttagtctgctgatgaaaccttgtgcttccacgaatatgagctatatataatttgtgctttctgga

SEQ ID NO: 297184 - DNA, 620 bp, Homo Sapiens
aaggatagggtagctctttcattaacgtacccttcccagtaactgtgatgcagacattcaaagcaaatttctagtacaagatataatccgatactcttgcagccagttttctagttccatagtaaagtgactcagagccataaccaaaccttcctaattttagattgtttggcttacctttcacatccacttatttaggtttaatataaaatttaataaggcaatcctaacttgaaagttgaaatggaccttagagatcatctcaactggtgttcgaaacctggtggatgaggaggtggtgtctcttgtggtccgcccagcccacatagtcgggggggacccaatccagaatagactcctggcttacattttggaggcaatgctttctccttagtcaagagccttttggagctcctttacaaaagcagttagcccttgcgttctctcgttcatttgtttccagcatttactctgtaggctttaagttactaagcagtcacttcacagtttgtaattgtgtctgatttgattcttatttctagtcatgagcaatatggcccttcagttttgaaagatttattctaaattggccatggaagaattctggttttgtcactctc

SEQ ID NO: 297185 - DNA, 762 bp, Homo Sapiens
  misc_feature (522)..(557): n is a, c, g, or t
  misc_feature (672)..(672): n is a, c, g, or t
  misc_feature (709)..(709): n is a, c, g, or t
gtacaacttgaagatggaaccattccatttcatgactctcaaaaagtacacgtttttccataccagcagtttgttgaaggaactggacaattctgctttgagggtgactcgctagtcaccaaacctggtggctttttcatagtgtgggggcttctccaccttcttgtgtgctttaagacaactttccaagactctctgctctcatcatttaatactctccctcttctctgcttcctttaatttctcttgcatgtctttgatttttacttgtatatagacaattaccagattggccctacctcttaaattattccccaatacccaaggtaactgctgcctcccacccctcttctactgatctttgtatttgacaccagtgaatggtccccttataaatcattggtctccatggcacttttgtgtctaaataccttgtctgcattcacagacacctcagcttccttcattccctaactcttcttcctcttgcctgtgtttaagcaggcttctctagtttggagnnnnnnnnnnnnnnnnnnnnnnnnnnnnnnnnnnnnatctgaacctttgcacttgtgatttttatcttaccacttgtttgactattacatcagtgtggttgacccttgaagccatatccctaactctgccatctctagaattcagacccanatgttcagcttctaagtgtcttcatatggagatcatntccgtggtttccaatgcattctgttgaagaaaaaatccctatcttttttccac

SEQ ID NO: 297186 - DNA, 757 bp, Homo Sapiens
  misc_feature (381)..(705): n is a, c, g, or t
gtagggacctagaacaattctgcattgtaaattatgttccattaaattctgatagccaccacctgtcagcatatccaaaactccccatggggacagtggcactgtctgccattcagaatgactgtgtaaagcctcttttcagaagtgccgtgactgagagagggcagtatctttgggaaaagggagcaggagcttccagatgggcatcagggatactccagtcttgtctatgggggttctctgcaggagctgttagcttcagggctcctgaacaggagtcttctgaagttttctgtctccctagggtacttgggttggtggttgcccttcctttctctgtctccttggttttgtttactatataagattttatcttcatgnnnnnnnnnnnnnnnnnnnnnnnnnnnnnnnnnnnnnnnnnnnnnnnnnnnnnnnnnnnnnnnnnnnnnnnnnnnnnnnnnnnnnnnnnnnnnnnnnnnnnnnnnnnnnnnnnnnnnnnnnnnnnnnnnnnnnnnnnnnnnnnnnnnnnnnnnnnnnnnnnnnnnnnnnnnnnnnnnnnnnnnnnnnnnnnnnnnnnnnnnnnnnnnnnnnnnnnnnnnnnnnnnnnnnnnnnnnnnnnnnnnnnnnnnnnnnnnnnnnnnnnnnnnnnnnnnnnnnnnnnnnnnnnnnnnnnnnnnnnnnnnnnnnnnnnnnnnnnnnnnnnnngtctagacttgagagtgatggttctggcattcccccaggttgatatgcatga

SEQ ID NO: 297187 - DNA, 571 bp, Homo Sapiens
gtagaaaaaatgaagaaataggttttagcaattcaattgcttggaaactcacttctaagattcaagattctttttgattttgctagatgtatggtaggttctaaatattcaaactttgggatcatttattttagaatccaatcaatattcatgtgcagttacaaaattcaatgcccaagtttctcattatttcggttcttccaaattagacatttttgttcatatggtaaagcaataaattttaaatctgtatttgcattaaagtcattgcagaacagaataaaggaagcaatttttgaaataggtataactgaagtttgtgtcacataatgcttttaaagtaaagagctagatatttgtctgaagaaatgacgtctcttgattctccagtgctttttggatgtttttgtgcaggaaattactaaagtgccccttacaatagcaaatgcctcctactctgtattaataggtgattcattagacagatactgaatgcctactatgttccaagtacttctttggatgctggaactactgcagtacataagacacttattataatccttcatat

SEQ ID NO: 297188 - DNA, 556 bp, Homo Sapiens
gctgttttagtaggttacaaagcatagtaaaatgtcatatttaacttaggatagatgagaaccaatgtgtaaatattgcagtgtgacctatttcaccttagtgtacgtaatatatttgaaaagaatagccatgtgacttctacactagcattgtgggaattgaaatgaagactagagagagaagatgtaaatggattttttacctcagggaaattttaaaacaggttccatgtccttttatcagcttccttgaaacattgtgaactttgttctttggcatatggtctctgagagtgagaaaattatggccaatctccagctaatttatgttcttaaatcataactgaaacccatgattgggcctacgtgttgataagataaaagaatatcatctaattatgtgattctggcatttttttggtgactgactttggcacaggaaaactaaatttgacttcaaatactcagaaataagtttatattacaaacatgtaatatatgcaaatgaattttaataattttgcataacttggtttgtatttttgtttcatatttt

SEQ ID NO: 297189 - DNA, 549 bp, Homo Sapiens
gcctataagcaattggacaaaatcagaattttaagacttaatttcacaggctaaaagaacaaactcatgggtaaatataatacaggcatacctaagagatattgcaagttcaggtccataccaccataataaggcaaatatcataataaagcaagtcacgtgaatcttttggtttcgcagtgcatataaaagttgcgtttacactatactgtaggttgttaagtgtgcaatagcattatgtctaaaaatgtacttaatttaaaaaaattttattgcaaaaagatcctaaagatcatctgagccttcagcaagtcataatctttttgctggcgaaggtcttgcctcagtgttgatggctaccgactaatctgggtggtggttgctgaaagttggggtggctgcggcaatttcttaaaataaggcaatgaagtttgccacattaattggctctttcacaaaggatttctctgtaccatacaatgccgtttgatagcattttacccacagtagaacttctttcaaaattggagttaatcctctcaaaccctg

SEQ ID NO: 297190 - DNA, 580 bp, Homo Sapiens
  misc_feature (49)..(63): n is a, c, g, or t
tatatccagtatatttgtacaaacagtccatgaacaaacaccttagaannnnnnnnnnnnnnnggtcttttcagttaaagctgatacattcctgtgggtcaactatgcaactaactcagattttgaggtgaataacaaatctctttatctatagatgataagtttaaattgtgatgcaaataaatttttccttcaaatggtgtgaatgttgaatctaattcagtcctgctaattttgtttaaaaagcatttgaagcagatggaactggaaagcctacttctgtaaattccatttactcattcatgcattgctttcattcaagaaatgtttattagtgtctaccatatactttgctagttactggggttatgaggggatatggcaataaacaagaaagacaatgtctattgcctgaagaagtaataccaaaagaagaaaaaactatttgctgtattgttggtaatagaaaaatattaatttaacttttaaaaacaattgaaacaatgattaattatagtaaatctatttgaataacttatgtaggcatgaaaatacttatgaatattatatatgaatatgg

SEQ ID NO: 297191 - DNA, 525 bp, Homo Sapiens
taaatatggcaagttagttaattaaagcctattccgtttggctctcagatactattaggctaaaaatttgcttagctcttagtccccactccacaaagcactgtcaccctcaccaccacagtctggcatctagcagcatttcctctgagcgttagagtgcaggacctggacctattgatttggggcagagacagacacagttctttctcagaggtacatttgtattatcccagcttatgaaaccccaaagcagtttattaaattctgtagtgataaatgtaagtgttacaaggatactctccatagaaagggaaatagaaccagggagtttcttaagattcagtcagaataaggccaattagctgggtcactcaaatatttgagagcactgagctaagcatatatttcaatagcaaaggtaaatttgtcattacagtcttttccatgtgaacttgtcattgtcatttttgcctgggcatctcctcttcacattggaaagagtgaggcttgtccattgtcagatag

SEQ ID NO: 297192 - DNA, 548 bp, Homo Sapiens
  misc_feature (379)..(387): n is a, c, g, or t
tcaggtggatatatgactattaggggaaaagaggcttttgagacagcttattacctccttcccctttttgaactaagtacattgtctcagtcccagtatgaatttgtcccatttggggtatttttaaaataaaagatggctaacatggaatctggggcatagccttggcctttaattatggttgtaagcccaaataatggcagagaaacacagggctgtttttacaacagaaaactcaatataagttttatataagaatcctataaaatttgaaccagagctcctatttagttgttataatgtctcctaaagatcttaaatgcttctaaaagctaattattattccagagcaactttttccttttcccccttataaagnnnnnnnnnaaatccaaaatcttagatttctgtgccacagcaaaataaaatgatcaacaattaaagatctgtacttaaaatagtacaccatttttagtggagggagggtgcatgcctatatgatggtaagattcttttgaactctaaggacaattcctcatggaaaaaat

SEQ ID NO: 297193 - DNA, 300 bp, Homo Sapiens
gcagtcctcccttatctgtggttgtgctttccgttgtttcagttaccctcagtcaaccacagtcctaaaatattaaatgggaaattccagaaacaaacagtttataagttttaaattgcacactgttctgagtagcatgataaaatcttgccctgttctgctcgggtatgtgaatcatccccttgtccagcatatccctactacttccccattagagcaatgcttgtgttgaggtaactgttattttacttaatattggccctaatgcacaagagtagtgatgctggcatattgttataa

SEQ ID NO: 297194 - DNA, 165 bp, Homo Sapiens
tgaccacagtccatcacacctggcttctcactttcttgatagtgaactgtgatgcacaaaagtttttgattttgataaattccaatttatcctctatctttctggttgtgctttttgtcttatgtctaagaatctattgcaaaatctagggtcatgtctagatat

SEQ ID NO: 297195 - DNA, 565 bp, Homo Sapiens
gttccatgaaaatgttgcattgaagtgatcccggttagtgctaaagacagactgcttagatctaaagtctcatgagaagaaagaaagaacttaaaatcattttaaattcaccaatatgacgatacaggatctctcataaaatgctgaaaggttgtttttgctgccagacttttagcacttccgttttacgttcaaatgttgtaaaggttgattactcattagttaaaatgtttggtgcaaaatgtactttaaaaatattttcagtgttttttggaaattgtagacatttgattttgaaaagtaggccagaaatttggaagactacaagccatatgatggctgatatttcccatggaaaatataatatgcagctgtgctctgctgcatggtagaacaggagattaaaatatgagaaattataataccgtttgatgatgatattaatgtcactgaatcaaataaagtatgtgatatatcataagttaatagaacaacacttaattattgattagagcctacatcacattttaaattatcggcatgtttggtcttgcaaagggtcaag

SEQ ID NO: 297196 - DNA, 222 bp, Homo Sapiens
aaagtatttaatatttatattttcctacttatctaatcatttccttaagatttagtgagtatacatacttaaaatttggttttcattgccatatagccttcaggaaggttgcatactttacattttgtagtttgagaatttcatttatatacttgtcaattgtcagttttcttaatccttgccagtttaatgaatgggaaaaatttaaatgatgtctcattg

SEQ ID NO: 297197 - DNA, 183 bp, Homo Sapiens
ctccagtgactggaaaaacgggagttttcagtcaaggcttgacatttagagaaaacaaggactttctgcctttataaatggaaatcaactgtgtatgaactataactctgcagaggttatgaattcatcctttacaaacaataatgaacttttagtcctgtaataaatgaaatgttattaggc

SEQ ID NO: 297198 - DNA, 387 bp, Homo Sapiens
aaataaacaaatatactgtggtccatccaacctggatgagagaaatctagcaataagtaagcacagttgccacactaactgtcaacactgccgtaaatggtatctgttcaaagtgcgcagataggtgttggtacaagaaccgggatttcactcctgactctttattgactgatgactgcagagcaaaattgtgtatctgcttttcaatttcatcttctaataattcatctttctttatgaaatttacaaactcggggttcatgatgctttggagattttttaaagccgtgtttcaccaaagacagagacatgctaccctaggaaggaacccaagtccctgaacgaccttgaggacagaccaaagcccaggagtgcccaccaggaact

SEQ ID NO: 297199 - DNA, 125 bp, Homo Sapiens
tggataactcacttttcatctattgaataagaaaaagtgtttaaacttaataaaataaaaaattgtgcaccaattactacagatccttgaaacagtaagccttggattttagtcaagtaatccag

SEQ ID NO: 297200 - DNA, 362 bp, Homo Sapiens
gctaatgaaggatgaaataatgagccacttccctgctgctgccctcctgctgccaagtgctgctgtgacaggcaagggcactgcctggggaagtcagctcggtgagtctgtgtgagcgttcgttcactgggagggaggacaggatggccttgagcagggccgtcccaaccctctcaccccaccaggcacagcccccgggccagttcagcctcctcttacactcaaaggcacagaagttccagccaccctcccacaccttgtgaccaagggaagttccctttcttatctcagactcccagagcacgttatttggagagtaggagaaggggagggagcgagggcttgcctaaagctgtgacagg

SEQ ID NO: 297201 - DNA, 353 bp, Homo Sapiens
acaggaagtgaaaggtttccttaaaaacataatgagccttttttctacttgtaagcgaattgctactgcttcctagataatcttaaacttgctatttctttgttcttgctactgcctgtgctgagttggcagttcttaaagaactttaaagagctcagaggcaagaaacagaaattcatttccaactttaatcttccatttcagttatcctctttcttacgatgttgaagagtgatcatggctatttttccaaagagagtatcttgtacattcaatttgcctgatggaaagactatctcaaagtggaaaatagtaccatcgagctggatgtgtttaggatctaaggtttacaa

SEQ ID NO: 297202 - DNA, 417 bp, Homo Sapiens
tcacttaggaaacgtgccatttacatgcctcctaaatttagtacacgaaatagagctgctaggtcaagaatgtgtctcagtgtgtgttatattaatttttccaagttatcctctttatcaatttttactttttgtactatagaaaagtcaaaattattgtattaaaaaatctgtaacaaggctattgataaataacttcttttagggatagaaaactcaggaagttcaagatttctggattaatgattgacaatgttcttagtggtccctctttgatttatttcaattgtaagtaattcttggtgatattctaacataaattctgacaggtgaagagaataaataaattaagtatctctaggagaatcaatagaataagattatcttggttaaatagctaagaaagtatgctaaata

SEQ ID NO: 297203 - DNA, 416 bp, Homo Sapiens
gaagggaggttgtaagggccctcccctgtctgactttctgattcttaagcctttgggaacaatccgactaatggtatgttgatggaaacatgcccagtgcagcttcctactcatgttacagatttacaggaagggaaagaacttccagatgatttatcaacatttatttaacctccaacatatgtttagaaccctaagcatcagatactgaggatacaagagaaatgaatgtttaaacccctaaccgagaaaagtacaatctgtgtatgccacttggaaaaatgaaggctgtggcctaagctgatgtaaagaaaagaacatatgtttcctatgagtaacagaattcacttaaatataagactgtgaatcctaacagaattgcctattcttatataagtgtatataacagtatagta

SEQ ID NO: 297204 - DNA, 475 bp, Homo Sapiens
gtgattgttagaatatcaggacaatggagttcttaagtttcctcatgaaaaaagtaacaaatggaaagttaaggactgcatatctggggactatacatgtcaaggggatgggagctattagagaaatcagagcaaaaggagtcagcatatcagagagatggccaggatgctatagtgtatcatcaaagccaacacaagaggcttttaaggagtgatgaataagagaatgagattgggagaagagatatttccttcgatatgtcagattataatgacttatttagtttaaatagttatttttctatagttttttcttgaaacaatctacactatataccagacacctgtattccttaagcaactgttctgtttattcatggtattttggtctctgtctcccttataagggacatctgcattcctactgggcatgcaactgtctggtgtcctatctattgttcttcttccacttgta

SEQ ID NO: 297205 - DNA, 722 bp, Homo Sapiens
  misc_feature (41)..(41): n is a, c, g, or t
  misc_feature (149)..(213): n is a, c, g, or t
cgggagaattagcacaaaagattacgtgcattctttcgtgngtcctctgtaatctaccaccaaattactttcccagagttggagtgcataggctttggagacagacacatctgggttgcagccttgattctgctgttcaatgaaatgannnnnnnnnnnnnnnnnnnnnnnnnnnnnnnnnnnnnnnnnnnnnnnnnnnnnnnnnnnnnnnnngctggctgcaaggcgattctagggagtcctggcaggaagcaatggtgccctcaatggccaatttaaggcgattgtgacaaagtcactgttgtgaaggttggtgcaaggtatagggagaccacaagggctggggtagtggccaggactggtacagcaggcacagtcccaccctaggcctgaaggggcagaggggcagttaccagacctgggttcagagagggctgggtggacagagccgccagacaggagctgtgacagcaaccctaccccaggaagaaaccctgacctcactcccctccctccttcccctccactgctcctacccaaggggaagcctgttgatgcagcccacgcaggggagagagggtggagacggggtctgcagggcaggcttgagagctccagcacagcgttgtctagaatcaagatgctaggacttagtagtaagtgtcaccttagtgttgtcttgatggttacagctgggttgacttatcctcattcctgatgcc

SEQ ID NO: 297206 - DNA, 570 bp, Homo Sapiens
  misc_feature (70)..(146): n is a, c, g, or t
ggttcacatccatgggagtgtggttgcctcttcctttcttttcactcccttcctcacttctcttttctannnnnnnnnnnnnnnnnnnnnnnnnnnnnnnnnnnnnnnnnnnnnnnnnnnnnnnnnnnnnnnnnnnnnnnnnnnnnttctttcatagtggagatggcttagctgctaggaggtgattttagccttccaggcaattgcaactgctttaaaaaacatctgtcaacatcttcctgggtataggatattctcagtgggtggggatcatgctaatgacttaagcctaggccctaagagataatcccagcacactggggatcaggcgtggctttttcatttttctgagtttgcattttagtaattttactgactggcttaataaagcaatatgctcattttctctttaaatttgtcatctgtaagataatatgagcccagaactagatatgcctggtagtataagctatggtctttagaagctcttgaataagaaaataaggaggcagtggaatcttatactgacccaccggggtggggtttaaaaatgttaatgggcatagaatc

SEQ ID NO: 297207 - DNA, 700 bp, Homo Sapiens
  misc_feature (607)..(607): n is a, c, g, or t
  misc_feature (633)..(633): n is a, c, g, or t
gagaagggatagaacacatcacaggaggaggtgtctagtgggggctcttgtcccaaggaacagagagacccacttgttcaaatgtaggacaagctggacaaattaaccaggctttggaaagagcaggaactgaggcagttgaagggtctgagcttcactctttccatggtgtcaccacttccctattccatttcattttctcacacttattctgtctctccccaccttcccaccatgtcgtttctgctcttttttgtcttatacagagttcagaataccccacctgggccccgagtccacatgaccttcactgtccagcaatcagcaccaacttcaagtcccttgtgttattctgatggtctcaacaaagggaccggattagcccaactcaacttttcctgctagatcagaggcagttggtggatgggctccacttgagtcagatgctgcccagggtctagctagccacgtgggtcaggtggacaggcctccggccttctcctatatgtcagtaggtttactgttcttacacatccttctttattttctctttcacctgaactacgtagctgctgatttaggcaccaccacttctagccttccttanacttcatgcaaagagatgtgccatanatacatttgccaattgattcttgagttcttgcgctgtggaaaacattgggctaattgctgtggggtc

SEQ ID NO: 297208 - DNA, 743 bp, Homo Sapiens
  misc_feature (396)..(462): n is a, c, g, or t
  misc_feature (678)..(678): n is a, c, g, or t
gaggactggatgtaggtttctgcctctctttttggccctggcattgctggccccaaccacattcctgtattggcccgggaagaacagcctttgaaattcaacatctgcttctgggtagttggttgaacaagcccacctgaccaagagagggaagcacgctaactgttttcagtttggacactcttgggggctttttagtaattgcatgtgtttctgagcaagtgagtgtcttttgtgggtaccagacaacaggattgctcctctcaactagggacagtctgaagaattttggtgtgcaaattcatcaagctcaccccatggaaagaggaagctccgctgtttcagtttggacactcttggggtttgttggttgctgcagcacttggattgtatttnnnnnnnnnnnnnnnnnnnnnnnnnnnnnnnnnnnnnnnnnnnnnnnnnnnnnnnnnnnnnnnnnnncaatactgtttagcctcatatctttgaatctggataagtttggcctctccatgtgcctcgttttgctgctgaatggcaaagcagggtggagttttgtgtattcaggcttttatgctgttgttcaaagcaaggtcaggcttgattagtacatgatgttcttctgtggttttttctggctccagtcatccttggagtgtggagagatttagcctttanaaatccaaatgccacagaaactgctataccaaaactttggttcacaaccttcattggattgccta

SEQ ID NO: 297209 - DNA, 735 bp, Homo Sapiens
  misc_feature (453)..(503): n is a, c, g, or t
  misc_feature (665)..(665): n is a, c, g, or t
  misc_feature (682)..(682): n is a, c, g, or t
  misc_feature (690)..(690): n is a, c, g, or t
gcctgataaattgttcattcccaaatcccattaattttattgcaaagtcatatttatacaatatatgaatgtgcctctttacaagtatttgtatttgtctgttctcagactgctaatgaagacatacccgagacttgagtaatttataaaggaaagaggtttaattgactcacagtttcacatggctgtggaggcctcacaatcatgggggaagccaaaggaggagcaaagtcacgtcttacatggtggcaagagagtgtgttcaggggaactcccctttataaagccatcagatcttgtgagacttattcactatcacgagaacagcatgggaaaaactcgcccccatgattcaattacctcccactgggtccctcccacgacacacagagattatgggagctacaattcaagatgagatttgcgtggggacacagccaaactatatcagtnnnnnnnnnnnnnnnnnnnnnnnnnnnnnnnnnnnnnnnnnnnnnnnnnnncgtctttctgtctctaatgttatttcccacctttcctttccaaggtgctctgtcttcaccgtggcttcagagcttcccctgtcctttctgtacctttttccctgttcctgcaactgctcaaagggtctagaatcctgctgtagtttcattcttatgacttangactttcttccttattnaaatgcanactctccctggagcaatgccacaaggaatcacatgaagaagcatc

SEQ ID NO: 297210 - DNA, 533 bp, Homo Sapiens
gaaatgcagctcttctttctaaccttgaaaaggtctatctttttgcttggctcgggtaatatcttttttcttcaaccttttcttcagctactgtaacttttttctccagttgtaactgccgttgtggcctgatgctgaaacgtttaccttgaaggtctagagaaacaatgttaccttcagtgtaacttgattctgtattgttgggttttcttgatgtgtttgagttgttccatgtaaccaggaaacttcccatgctgtcactaaaagccatgagtttccctgctcaaggtactagttttcttgtttacatccctctataatatgagtacattcataaccctggacacactcttcctgtgtctgattaaattcaagtaccaggttaactttcagtttatctaaaaaacctacaggaggttttttctttacttttaggtaactgacctagaaaacaaagactctgtgtgtactaagataatttcttatgtttcatgttatctttattgaatttttggttacttaggaaaactaat

SEQ ID NO: 297211 - DNA, 746 bp, Homo Sapiens
cggggccgggcaccaagaaggaacataagatgatggtaaggtttagatacaccaaatttgagctgcctttgggatattgaggtaaaaatgttcagtaagcaattagatagccagaggtcgagctttgaagagagactgggaattgacagctaaagcataaaaaaaggatgagattgagagaactccttgaagaaagaaagaaggccaaagggaggacagctttgtgacaaaccagatttttggtagagaaaggtttattgtctttgtcagatttcatgtgaaggctagttactcattccaaatttaactgtaccacgttgaaacggtgtgactcgtagtggctctgtttttagattaaagtgggagtctgttcagcagtgctttatgattttaaggcctccctgcacaaattaatactgcctaagatgtcaccgcagcctaaaggaagacttgtggaaggctctcagctgtgtacaggggaacaaaatgtctccatcagatagagtggatttggtccgcatctgtctcccctctactggcagaccatttttctgtggaaaactgaaattttcctcctgaaggagatgatagaagctctgactgggactccagctgtagaaaaggatgcctaattaccatgacacgtacctcctgatgggagttcactggaggtgatggtttagagctgctgcatgtggttaacaatttgtgccatgctcattttgcacaattgtacgtgtcttggt

SEQ ID NO: 297212 - DNA, 597 bp, Homo Sapiens
gttccaaacaagaaagctgcactgggtatacgtatatgggtgtttatgtgatttagatgactggcatatttttaaaaactgtccaaaggagtttgaagtcataattttaatgtagcaggaaaagataaagtcattctcccatatttccttaatgttcagatgctatgtgttgtatgacatgatgtatataatgtaagttactaaaactttttttggaagagaaaaagctagagtagcagatatgcacactaaaaggcaaaaatctggttttacaagttttataataaaaaaggtggcaagatgaacgtttttttaacttagaactaaatttaagcttaacttttacagcaatctttagaaaattttgctatatggtctttcttgaagattatttgtaattttgtatagttgatttagaaattcccatcaaattttaaaattcagagttctagataaaaccatcaattatctgaaatcctttctcagtcaagactgcccatgaagccaagtgccttatttgatcctataagcttcactgaaaatcagcagagtctttattaatttataaatgatgggcatgattaactggtctcaagt

SEQ ID NO: 297213 - DNA, 644 bp, Homo Sapiens
  misc_feature (548)..(548): n is a, c, g, or t
gaacaatggcaatatcaataaaataacctatggaaatgacattgcagttgctgacttcacattctatctctatcgttgccttctccaccttcatatctgatgtagtgaaacaatatatgccttggcttcgatgtctctgtgagttgtgtttttgtcccactcaacaatttaagcctattgttgacatatagtaaaaccgtgattgtattagaaaacctgtagaacaggtccatgccaaggattaaggaatttcaggattaaaattctgagacaaagatccctaagtcctcatgtctttgataaatcatccctggatgttgacagtgacatttgctcatcagccaccagtgcctttggcaaggaattgcctgcaggtggcggatcaggtgacgcatcatcgcggcactcttgtgggctcccgagacagccatgtaaagagagcctaaggataacatgccaggcgtgtgcagcctgtttgggacacttttgtgatgggagtgggtctgatccagataaaaccactgcctcttcctcagggcgtgtgctanggaatcttttgatgtcaggccagctgaacttgttggagccgagccaccttccccatgctgagtggtgtgaaatcagctccaccttcacaaggggct

SEQ ID NO: 297214 - DNA, 285 bp, Homo Sapiens
ctcctttaatctgaatatggtagtgaaaggcaagatcccatgtctcagaaagttgatattgagggatattgactataagaaacgaacaacttagtacaggtgaataagcagcaaaacagcttggagtcaattcctgactattcagtggcattatccaggtagatttctggagacaagtgactgtcctccatacctttctttgtgcccttgtgacctgccacgaccatctgccagtagtattatggacagagaaaagcggatgttcaccaggtgaaaggttgtgtg

SEQ ID NO: 297215 - DNA, 552 bp, Homo Sapiens
aagtctacagagagatagaaccttaacattgcccagtttgataaaagtgaaagtttgctcacctatacaaatgttattttacacaattattttacgtggattggggttttaaaagattcatttcctagcagtttctgaatatttctgtaagatcttgcataaagtttagagtcaaatggcagatattttggaaagccatttagtatgaggggaagagtacacattttaaatctttggtataatctaaacgatgtcatttcagacattcaaaactcataataataaatttcaggaaatcaagctcctaaacattaatagccaagataccaaataaattatcatattaaaatatttaagtttatttaaagagagaagtaaacataaacttatgtcaaagagaaattctcttaatctatttcctgacttcacagtcaaaacagtataagatagtgaagtaacttataatcttatttggtcattctgttctataaacagacaaatataatttaggctgctatatgacatgataaattaaaaactgagaaagtaaaa

SEQ ID NO: 297216 - DNA, 482 bp, Homo Sapiens
agaggacaacgtgcataccttaattttaaaatattgccttgctaaaaagtgcttatgatcatctgagccttcagcaagtagtaatctttttgctggtgggaagtcttgccttgacgttgatggctgctgattgatcagggtggcggttgctgaaggtcagagaagctgtagcaatttcttaaaaccaggcaacaataaagtttaccacatttattgacttttctcttcataaaagacttctctgcaacatgtaatatactgtttgataggattttaccgaatgtagaactttcaaaattggagacaatcctctgaaacccaactgctgctgtatcagctaagtttatataatattttaaatcttttattgtcatttcaacaatttttatagcatcttaccattagtagatttcatcttgagaaaccactttctttgctcatctataagaagtaactgctcatctctttgttgctgagattgc

SEQ ID NO: 297217 - DNA, 554 bp, Homo Sapiens
caagtgaattcttcatgtactcacttgtcccgggagaggtgagcttcccctaagagggcccctgaaataaggcatttgcaagatgtcgctacccatgaaagcagtctgttatcttctgccctggacctttttacccaggagcttgattgctgggaccatgccaacaaatagcattctcttgcagcagaaataaaatgagaaggaaaattaaaaacttttatgaggtaaggataggatcatttccaaagaaacagaagcttagaggaaggaagaaaagaaagtgaagacagcataacatcaggtttgacttttctgaaaatcacaatgaccaataccctaaatgatgttattaaaacaaagggaacgactatggatgtgattccttgatccctgctccttctgaggcttgagaaactttatataaccttagtagagattttataatctgggctgctgaaatttcaaataagtacatattgccttaattttatcttaacccctgccatgtgattgatgcatcactttttttggtagttttgggctgtttagttatt

SEQ ID NO: 297218 - DNA, 580 bp, Homo Sapiens
aagaaaaaagttaaatttcctggaaattatgtttgataacacagtaatttaattatcttatcattgtgcagactgatattcaagaaaatgatttgccatggtagatgttttgctgacttactctacaactcaattacagcagtatttaagggcaaagagaaaatggctagaagttacactaatttcattgcaactttgacttgtagttattttcagtctgatttggtaggagttggctggagctgtttcatggaaatgatccttatttttcttttgtaaccctatgacctcttccttgaaaataaatctcttcattgacaggctcattcagagttggtctcaaatattttccccatctctcaggtcttcagttggaaacctgcctgcacggccctagggaataacaagcttctaactgcattatatgatcacttctttggaaatatattttggtatccatagttttgattttctattaagcagttgattttgccattaagttacgtgtctattatgagtagatgctatttcacttggtagaaaatccccaaagcagggcttcaacaggataggcattcat

SEQ ID NO: 297219 - DNA, 587 bp, Homo Sapiens
  misc_feature (468)..(468): n is a, c, g, or t
ctgaggcaagaataaaccaatgttcaaagaatggtgaaatggccaattaggttgttacaaaatgttcaatgggtacagcagatagaattgaggttggagaggcaatgggagaaaaacatgtggtgctctgtaggccatttacagactttggattttgccatatgtaaaatgggaagcattgcaggatattgagtagaagaggaatgtaatttgatatatttcggaaagaacaccctgacatctaagttgagaacaaactttaagatagaagagaaaattgaagctcagattagagtagcagcattggaaatggtagaaactgagggatacagggtaagttttgaaggtagatccaaggagattttctgatgtgctgaatgagatatatgataaaaaggaaccaagaagaatttcaaaatttttgacttgagtatatgtaataatagaatagtcactaaatgatatggnggaagtctatcttatgggcagacttggtggatcatcgatttggggcatgttgagtttgagatttctattagacagccaaatgaaaatgtcaagtaagcagttggaaatgtaggcttgta

SEQ ID NO: 297220 - DNA, 238 bp, Homo Sapiens
gagcactccctttcagtctttggctgaatgttaatttgcacatgaatagggtaaatttccagatgactaggcaaagaacaaatgctagggagccataagctgagcaattatcagaacttacacagtaccaggagacattcaagtttcatccaaccagagaggagggatctcattgaatacttgggtgatcagtagagatcctacaagattcataccttaatatcaagggtaaggtagc

SEQ ID NO: 297221 - DNA, 437 bp, Homo Sapiens
catttagtggtggatgaaaaaagagaagttgctttatcatatagtttaatttggctcggtctactaagaccaccagggttgacgtattcctccatttttggtgtgatctttttcttcattcaataaagttattaaatatatggcaaaacttttttcagtttctagtgaaaatgcatgatactcatgtcatggagtcaggcttgggaaaatctatgaaataatagtttgctgataatgatattttcttatggctttgtatagactacatcctcaaaggattttgtgcttctttgcccatagaaggctttttctccctttgtgtgcttttattaaatctgttgaattatattaatattttttgaatttacagggccaattatcttttttgatggattacttagattaggccatgggttcttcctggcctttctttttct

SEQ ID NO: 297222 - DNA, 408 bp, Homo Sapiens
  misc_feature (276)..(329): n is a, c, g, or t
tatttaacatggtgctaaatgtggtgagcgctctctgggtgttttgtgaattcatgtaagattaaaacataatattttggaagttatgcaaccctttagacgagtacacccatacaaattagtctataaaaagatttaggaatgactaccagaagaataattgcatttgtttagacatgctattatacattaaaatcccagtttcttaaagactgtttttctttttgagatcattaggatcttttttaaactgattcctttttccagtttgagatnnnnnnnnnnnnnnnnnnnnnnnnnnnnnnnnnnnnnnnnnnnnnnnnnnnnnnttggtagaaaatgtgaaaaataaggggaaaaaatcctcatgtttttctaccgtacaaagataatcactgttaacatttg

SEQ ID NO: 297223 - DNA, 287 bp, Homo Sapiens
tagtaacctgtgtattacccaaactgtgcaagtgatagatcaatatgatataagtgtgatctttccatcgaatgtatactgtcctggtattgctactcacccctctccagtggcaggaaaaccaaatgtctggcctaatgagttaggttgattgatggacagtttcaactgattggttacttgacatgaggtaggctaaatgcagatagtctatctctcggcagtcatgctagaagctgtggctagagattttcagggtacaatgcagatccacaattatttaggca

SEQ ID NO: 297224 - DNA, 580 bp, Homo Sapiens
gtggaaataggtaattccaaatcctgtgacagtcaggtaaatgaatatacttagattttaagagccttcaggaagccaaaggaaaaagggaattctatttgatagcagaactgagctttatttgcttcattgtaaaatcctaatcttgtatttagtatacaaaagtcaacaaggtttgactagaaaaaatcagactgaattttagctactatgttgccctttcacttagcgagcttggaaaaatcattataataaaccccagtcctacaagattcaccacccagattttaatccaagttaggaaaagatatgaaacccaataatatggtctgagggaaaattaaacatgtgtaccccagggtgataatctttatcaagcattgagaaaacatgatattccctattaaattctcatcctaccttaagcccaacagaagaatgatttaacatctggtattaaggaatccgaccaaagataacaaagggaccccttgcacctgagctagctcttcttttggaacaaagggtctcaggccatttaaagagggcttttgggcttctgtcctctcttcggaacatt

SEQ ID NO: 297225 - DNA, 510 bp, Homo Sapiens
gaagaagaggtttttttgacatgccagaaaaatctgtttcaagctcttatagtcaattaggtgtgtttggtatgtatatatttaactaaattctgtttcttagcaataatccaggttgaaaaaaatttctaaaaataattagcaaaccagtagttttgtctgtattgaagctaagcttttaatgttctgttcatttaacaaatgattgctcatcttcatgaggagttgcaacatttaaactggtttttgagtcactagattatgatttctttcattttcaaggttgtattgtgaagcatacttttaatatatgtaaatattcgctgctgagaacaaatttcatgtaaaaactggaactgttaatccacaagtacattgtaatgtctattacagcttaattcatgagtgataattctgtaattcaaaaagaatgatttttattttcttagttttaggtgaaaaaagttcaacaaactgaattacccaaagtcatcacttaaagtatcattc

SEQ ID NO: 297226 - DNA, 172 bp, Homo Sapiens
tacattgtaagaaagcccaaaactacaatttggcagaacatctgtagaattataactaatcaaactgtactacggcaacttcaaaaaaccaactgtgcccctagatgagtcaaatgccgccttcaattctccctgacaaaagtaaaataccaaagacatcagcttatgtatc

SEQ ID NO: 297227 - DNA, 337 bp, Homo Sapiens
ttcggccggggaaaaattctccaggggatacacagtaactttctggagacttgtaaggtttccttttgagctaagctttagatcatttgtcgtagtgacaccacttcctacataagaattcacaggtagcttatatactcaaactatacacaatactcaaaaaatcaaaggattctacatgagtaagttatcaatcggtacattcattacatcatattaatgtgacataaatgttgttattgttgaatatttataactttcctggttattttctagagaataattataagtagttcgtgattagctgttgtctattagaggctaccttcaaagttta

SEQ ID NO: 297228 - DNA, 217 bp, Homo Sapiens
tacaccaccgggttttccttgaagcatcaatatgtagtttttgcattgtgcttcctttgatttagccttcttctagagaagctattgaataccaaaataaccaagatttacagcagggaacagcagatggaaggacaaattctaacaaagaaaacccaaggagtgtccatgaatgccaagcctgggaccttacagacactttaacccactatttaga

SEQ ID NO: 297229 - DNA, 203 bp, Homo Sapiens
gagagggccgaccagcagaggaagggagaccagagggcagcttgcacagatcttgtcttgggttataactgttgacaagccacttaactgcctccaggtttaagtttgtctgtgtataagatggaggtaacaatatttatacatctcactggagacttatgaaaacaagattttggacagatcccttgggacccatggatgga

SEQ ID NO: 297230 - DNA, 242 bp, Homo Sapiens
gatattctcttgttttaaataaaagttacccagagtcattgggtactctcttttctcttatgcattgattttggccttagcaaatatgtaaatttcttaaagtgtgaatactcttgaactaaagtaataattatcaacttagtaagagttttgttaagtggtgaaacttttcttcctcaatattaattactaattcctgaatgataactaaatatttcaattagtagttcctagcaaaggta

SEQ ID NO: 297231 - DNA, 549 bp, Homo Sapiens
cggccggggttgagcatttcttcagatgcttgttggctacatgtactgtcttcttttgagaagtatctgttcatgtcctttgcccattttttaatgaggtcgttttttgcttgtcgagtgtttaagttccttgtagattctagatattagacctttgttgaatgcatagtttgcaaatattttctcccattctataggctgtttactctgtggataatttcttttgctgtgcataagctctttagtttaattaggtcccacttgtctatttttgcttttgttgcatttgcttttgggtaattcatcacgaaatgtttgtcaaggcctatgtccataatggtgtttcctgggtcttcctttagggtttttaagggtcttatagttaagtctttaatccatcttgagttgatttttgtatctggtgaaaggaaggagtccagtatcaattttctgcatatggctagccagtttccctttagcctaagaactcactgattaaaagcaagaaaaatctagggcagtacattgtagtggataaaaagtcggaag

SEQ ID NO: 297232 - DNA, 538 bp, Homo Sapiens
cggccgggtgcactagatgggggtgtaaagagaagctgttggcattaaaatgagctagataatcagcccttgttgaagcatattccatggtataagagtagcacagacatgaaacatagataaagaaggaaggcttaatagactagaagacttccacattgaagtattattaacccattgtatgtatataggggcatgatcagagtctctataacttcctgattaacaatacagtgtatcttgttacccagctgtcagtctttgagagctttcagtaaaatatagtaaattctttcagcataggctaatgtgtggttactgagatgagtgttgtgtactcagaaccgtagcaacatttttatgaatggtaaaagtacaagaggaggaaaagttaaaattagaagaaaagtacaagttattgcttaatcataaatcacaccagataacacattttgttaatttcattagctattactggaaaggaccttaacgattatttacagaaaggggagtgaaattcattgaggttccatatcaa

SEQ ID NO: 297233 - DNA, 298 bp, Homo Sapiens
gaatgttaagaaaaaacttaaaattgctcttaaagtataatgtcgaatcccccgaaatattttccctttttgcccctaagggtactgttgtgaaaacattttgataagcaaatcttttggtttgtttaggttagcagttctaaactgtaaaactgtggaaatatactgacgaaaaaattagtatgaagtaaaattttcctatatatatcagcagcacaagcatctttattcaaagaaagtgttgctatttctttgtcattttagatttttatttttattctttgctggactttatacc

SEQ ID NO: 297234 - DNA, 267 bp, Homo Sapiens
  misc_feature (109)..(142): n is a, c, g, or t
ggactttgaaataataaatacaaatgtttgtgtatacgacaagacagatttttctccaaaggtaagttcttccatataaattacactttggactcatctatatagggcnnnnnnnnnnnnnnnnnnnnnnnnnnnnnnnnnngtccttcccttataattcttgagtattaaatactagatttagcaaatatattgtattaaagaaatttaattagatgctaatttattttcccaacatatttgaaggaatgtgtagcacttagcctc

SEQ ID NO: 297235 - DNA, 312 bp, Homo Sapiens
gtcttctcaatctcttaataaacattgatagagtatttacaatatgctgtggggtatgcattctgccatgtactagagatacaaatataaataagaaacattctttgcccccacagagttcagtctagtacatgacacagacctatagtttatagaattgtaaaatagcaagaaagcactgggagatatgcacaggccattctaggaaggaccataacaagagacctccacctatgtagctataaagccaagagagtcttctcaggccactgtcttccaagaaaatctatcaccggcatcattaccattgtc

SEQ ID NO: 297236 - DNA, 480 bp, Homo Sapiens
  misc_feature (125)..(161): n is a, c, g, or t
gcactaactttttccccagaagagaatacaaagttcttgactattgtttgctcttctccttgatatcctgtaacttaaataccatgatacaaagtcaatacattttatgttacatggtattaatnnnnnnnnnnnnnnnnnnnnnnnnnnnnnnnnnnnnntgtttataacaaactgaggagggaatactaatgccaattacatttatccttcctgtaacaggtcatgtggtcatagctggtatttataactactttcttccattctgtattccctttgccttcagcaagcatctcagctggctgtggctttttaacctggtggagttacccaaaccttcattcctgaagggtctgggccatgcctagtactgcctgaattgtgttgtggttttccattgaccttaaccacagggaataataatactaagaaatggcctaagggatttcctgtattccaaacatactttttcttacttcc

SEQ ID NO: 297237 - DNA, 318 bp, Homo Sapiens
gcacccaggccatctagcataatgttttgcatagttgtcagcagataaatattgaatgacaaaactcagatggaggaaaaagaacaaaataacctagttctcagaaagatttaatgagcaaatgggaaaatgtcaaaaagatttgcaatgccattcctaaataactatttccccttttagtcattagaaaacgtctaaacactttcaacattaaatctttcacttgcattttaacagagcactacttaattttgggttaccttttatatactttgtacattttaaggtgattatactggagatagaagggggttagac

SEQ ID NO: 297238 - DNA, 415 bp, Homo Sapiens
aaacattatttctcaaaatgaagctttgatacatcttggattgctgagagttgaaggttgtaatcttaggcaagaatttggaatctggatattattacctgttgattaaaagaagattcctatgcattgatagacaaatggctacagggccagtgtaaatttgtcttataaaaataaagacacctgatacaggtacctgagtagatagccacctttcccagtcatcaggtgagcagggaaataataaaggaaaggatattcctatactcggatttgatagcaatggacccatcaagatgactttcttgtgttgtaagcccccaacctgtgttggggaaatgtaatttaaaaacagaccaaaacaaaacctttctgctaacccagaagttcccttcactagggtagtagagaaaga

SEQ ID NO: 297239 - DNA, 259 bp, Homo Sapiens
gtggcataattagcacatggtacaaaagagccaaaggaggagagggaagtgggggccaaatagagtaggagccttgctggaagaggggaatgcaaaaggatcttgcagcatggagagattttagacatacgttgggagggaattcagtgcaacccaccaggagaagggccatggtgtgtgactggccacactcctaagtctcctcctcacatgtggcaattatcccaatttcccgaaagtcactttatattagcatttg

SEQ ID NO: 297240 - DNA, 583 bp, Homo Sapiens
gaaaagcatgtataaaacacgttgcaaggttacataaatagtgacaaaaatgagttcaatatatctggatctgatctgattatttagtttaggagaatcgctgttgtcaaagatggtgactctggaaatgctaaactcaggcttctagaatgagaaggggaaaatgggcaaggtcacgatggtctagctgctttttaaaaatatgtattaagggattgaatatgtttcctagcttcactgtatattattagaaaatctatctgtgaaattggttgttcgagatttcgttttctgtgcgtaagtggctgttcagatgcttacatgctgtcttaataccgaagatgccatccttttttccagggccctcttcttacatgggaagatagtggatcctactttaaaatgcgattatagtggggaaataatataatgttgaatgtgagccattgaacacaaattgcattttatggctatagttaaatggctcaggattgttctgctgagttaagggaggtgggaggaaagtattttaggaaaaaaatatgaagcatcttacttttaaaaaaatgcagattgtgtttgc

SEQ ID NO: 297241 - DNA, 477 bp, Homo Sapiens
caaagtgttcagatataaaatggtgctaactgtaggatttataacaaggctataactgatgtccttttggatgttcagtatgagatatgcatgacatgttttgatagtcttttgcatttttaatggcttgattcatttgtgcttattaaaaatgttagtgattatgccaatgttaacatccaaaaatcatcagaatggcctgtgttatgcttttcatggttcctgaatagtgatttaaagaaagttacacttttgatcttctttcttcttgtgctagatattacatgtctttcttaaaaacagaaatatatgcattaaatataaagcactaggcagttatgcattactttgtacatttcttaggtaactgaatattttaaggttattgaggaaaactggaactcgatgtttacttgagtaatagttctaagttgagttctactttgattaaagaaatgatcttttaaagcaaaattg

SEQ ID NO: 297242 - DNA, 267 bp, Homo Sapiens
ggttttgctttggattggtaggtttcactgtggcgtggttttgctgttgttattttgcctgattctggaaaatgctgaggagatggactgagctatgaagttcaatggttcaccctttaccatgtttgcagaagatgatcgaatacagatgaccctgctgtcgtgtcttcatttgtaaaattctcctacaaatggagacattgaaggattatgtgtatggaaatttttacaaaattcctttctgtacctattctgtagatgcctgta

SEQ ID NO: 297243 - DNA, 223 bp, Homo Sapiens
ggagactgagtcagttactaaaagtgacattgtcatatccttgctgcaatcaactgcctcttgccctctcctgagtttcggatgatcccgagtgacaattagcctgaatgtttacatactcccgtggaggtttgctctctgaaatgtggaggagtgagatgctccatgcttgaagagaaagacagtgtggctccctggccaaaatcgtcatcatttctaactt

SEQ ID NO: 297244 - DNA, 191 bp, Homo Sapiens
cggccggtggaaagggatattggaggcaatcctctggtttcacacttccttttcaggcaaacagggccctccttagagttatctgttcaccagaacaacccaaaagcacatgttccttttttcctgtcatgttgtagctcatttgggggaaaagaaggccgacttaaaacagtcccaggggaggactgctt

SEQ ID NO: 297245 - DNA, 563 bp, Homo Sapiens
cggccgggactgaatcagaacagttaaatgacaggcttccaagtcatccatgtagcaaggagcacatttgcctcccaaactgatgctttttctctagaaccataatgcccccctaattacatttcagtagcatagaccgcaatgaacttcctactgtagggagacttgagtctggaatacattcagaacaaggttaacattacagttcttaatttcctttagggcaaacaagataattaaacttgggttttgtgagtctttttttgatttgcagattatatatggtaacacaataatggtggtttgtttttaagttttttctcatcaggtttgataatttaatgcaaacttcaaatctggatgtgaataataatatttttattatagtataatccaggtgagtttatagaatttgtgttttgtgcttataaactgtcaccttctgatacttttcttcatccctctatttgaaaaacccttgtagaatttaacgatttaatggaaaatgttgcactttatagaaggccattttagaacttacaggtaacctttttgaagagctt

SEQ ID NO: 297246 - DNA, 202 bp, Homo Sapiens
ggagcggcgccatagagtcatacctggaaaatgaaggtgtttgacttcggtgcctgtcaccccgtgggttggtctctggggctgactcaggctgacttagttggctaatggggttcctttcttccctgccgttcttgcagctcaggtgaagaggatgaccttcccagagagaggaaatgagttcctcggtcacgtcatgact

SEQ ID NO: 297247 - DNA, 491 bp, Homo Sapiens
  misc_feature (307)..(307): n is a, c, g, or t
  misc_feature (314)..(314): n is a, c, g, or t
gggaactctggtgtggggctaggctgcctctgggtctctgagccgtccgccttgggcacagcgctcccccggaagttcagtcaggggtggcttcctgctgggctcctcctggggcagctggcaacccctcctctctgggacttaccagcctcttagattttgagcccatgccagccagcctcagaagctgcagcaaccaccctcttagatgttccagaagccctgactgggctggtcacttccttcacaggccccgcatttgcccacatggatgaccccagtgccagcctccttgaggtggcacagncacctgnccaccctgggctggcctctttcaggtacaactgcagaatgctcagtcctggggtcaaaccaccttatccaggacgctgattcgggaatcttccctccttatctttccatccgtcagtctcctgcctctggtgtctgatcccactgtctgcgcagagccgagaatgaagccagaacaa

SEQ ID NO: 297248 - DNA, 258 bp, Homo Sapiens
gtggactgtacaagtccttggttcattcctcttgtttagaaaatgaattaattcctcctgttgcccttttttgttgatggcagtacttataaacaattcttatagcaaaaacagtcagaaatcaaatttgtattagcttaatgtattatttgttagcaggtcagacccaatattagcggtgtgcccattgtgctatgccattggtcagttaatgactttcaaagtgtctatagggaaaccaccaagttactggtcaaa

SEQ ID NO: 297249 - DNA, 261 bp, Homo Sapiens
  misc_feature (107)..(107): n is a, c, g, or t
aaaatctatattatttgattttatttctcttcttctgggagtaaaataatttcctgccaagtgagtccacctagattatagactgttcagtttattttctgccctgncagcagaagcagtaaccagcagagactggaaccacagttgaggctctgtaaatgaggtgactgctaagggcttcatgggaatattaatctggggcattaagagaatcaacatgctgaagtacttggagacagctctgtaatgttttatgaggtc

SEQ ID NO: 297250 - DNA, 498 bp, Homo Sapiens
tgttgtggcagattctgttggttgtttccaaatacccagcttccctttcttttttgggtaatggaattctgagtttcagctgggtggtggccaccagcaattgaactatgtttcctaggctctcttgcaggtaggcatggccatgtttctatgttccagccagtgggaggtgaatggaagttgcacaggcaacttgcaggccatgactttaaagagaaaggggaattatctcagcttctttttaccccttcctgctggtggcaatgtggatggggcaaggtccatggggtggcagtgtgatttgacagtgtctgatcaatgagatggaaagggcctgggtctccaacattatggatgtcccatatcagcctgggacttctatgctctgctgtgacataagggagaaatgaactgctctcttgtttagaccactgttgctttgacatttgatatgctaggaaaacctatattgtaatacatataactgtttatgaaaat

SEQ ID NO: 297251 - DNA, 483 bp, Homo Sapiens
cggggacgtatatttctagttactctaagcagagaagtgaacacatcaaagaacaggctttattttgggagactttgaagcaactttaaatttgatgaaacatgatttactgtaatgggactgaatatgatataccagctttgttcagagttgatagctgaatttttaccattacgtgaacactttcaggcaccagctgacttaatacagtttataaataactctttaagtttgcactttgtctagtgtcaactgtcaactctttacagtttctttgtatagactggtcttggttaagagacgacatcattaactgaagtcaaatcaactcatgtaaaatatgtgattatataggattaagtaattatttagaaaagactgaatcttggttttacattagtgaaatgtggctatctggcagtggtagcataagcctagctacagcccttcctgttacatcaagccctaaaaggagttaactac

SEQ ID NO: 297252 - DNA, 368 bp, Homo Sapiens
ctaatcggtcttattctttcacatatgatgcaatgatagatgtaatccttttctgaagtgtttgtcggattggcatagtctattcaaaaataaggcttatgtaactttcagcttgctatgtgacagaagtttaaatgtgtatttaagtacacagctttatgttcctcttaaagctgtaaagagaaaagaggacttttcctcatcaagagagcttgggagacaaagcatacatttaatttttttctttcaaaaaaggcaatgtgcactttcttctcctaaattttatatgccctagcagttgcgaatgttgtgtccaccttacaatttgattggaggctcccatacactgaaactctcaatagaattct

SEQ ID NO: 297253 - DNA, 435 bp, Homo Sapiens
gaagtcagatttaggagacccgtagacattagatagacccaacaagacagcctactgtattagatgtggggggagagaggaataaaatgtaaggacccgaagatttgcctgagcaactactgaatggtggtgccgtttattgagatggagacacttaacatctgcgatagtgggaggggtgtgggcaggaagcagaggttccgttttgatcatgttaagctgaatatataatttatgacccctagtagagatggctatgcaggcctttggatatatgtctgaggctagagagaagatttcaggtcctcgttgtcaagatggcatggagccttggcactggccttggatgtgcttgcctattggatgagtttgtaaagaggagagggctgggacagctacagctctctaacactgggaagctggggaaaagggaag

SEQ ID NO: 297254 - DNA, 454 bp, Homo Sapiens
tgctgaagggacatgagacacgaggatggcggctgatgactgagaatgcctgctgcagctggggccccttcatctgctccagagtagtgagccccaggccaggatggggattcatatctggccttcttgtttgcatctttggatttgaaacttggtttgtccatgttcaaaataagggcaatttctactttagcccaacatggggggaaaagagagaggtagtagttgtgaacatcttagcacagatagtaataatgtaattgtcatcatttcaagaagcaaagtgatgtttgcagtgccactgaagaaataagcagcagtggaacccctgcactgatgtgccaggatagcagattttgggttgccagatgaaccatacaggaaagtattggcaaaggagatagtgagcctctcaggcatgatcagagaaggctggaggaagtaggttggattc

SEQ ID NO: 297255 - DNA, 575 bp, Homo Sapiens
  misc_feature (309)..(354): n is a, c, g, or t
aacccatagagtatgtttttatctcacaataagatttatgatgaactagataagcatggacaaaaaataacatctttcgtgtatggctgctgagcagtaagctaggctcttctgctagctaagtaactaccccctcccagcagctttttgattaaaagttccgtctcatcaaaattacatttttttacaggtcaaaatgttgcttataaataatcaaaaatgctgctacacatcttattttccctggctggaatgctattctgctacatatgcacatgtgcatgactgtgagtgcacatgagcgcgcgnnnnnnnnnnnnnnnnnnnnnnnnnnnnnnnnnnnnnnnnnnnnnntactgttgctcacacaaacttatttctctaacttttacttgatctttctgaattcagctgaggtgttctttataccaaaagtcttttaagatcttcctggtctggttcagatgcacaatttgtggttctaaggcattctttgcacacatctattcgaactcatcctgtggctgttggtttattcgcctttctcccctactagatcatcatactgtctgtga

SEQ ID NO: 297256 - DNA, 555 bp, Homo Sapiens
  misc_feature (74)..(87): n is a, c, g, or t
ctaattcagtttatcaaccacttgttatcacatagttttatcaacctacactgtgaaataaaggagtctagggnnnnnnnnnnnnnnggaaggaaacgtatttatcgaaagagatttatttagattattctacatattctctgggaatttgtagtgtttcttaaagttggactaaatgttgaatgggaggataggaggagaaggcgatggaccctacaggtacaaactctttccaaatcaccagggctttggctcttactcactcacccccgccttccttgctcttggagccttcagatttttccccagtagcttcaccttacagcaagcttagcagaagcagttccacagcatgccaacccccctcacttttgaataatccagagactccctgtgccacagataacatgcaatcataaatcttctcagcttcagcaattttcgtcttctaaattcaattaagttgagcccagtaagaatttgtggatcaaacagtgagctctatatagattcaaattcaacttagggttctgatgtttgttactaattttcagg

SEQ ID NO: 297257 - DNA, 578 bp, Homo Sapiens
gcaggtttatgaggaatccttgcatgacggccttctacaaggaattatagaaaagtagggctacttggtaatatacaactgagagggtaactgtgtccctcaacaaactactccttagtgcctctttcaaaggcagaatgttgatctgaatgggtcactggtcaagtatggcatctctaatgttcttgaagggggaggaaggagatctggtagctggaaaatataattattccacgttgggctcacctgaattggtttaaaatcatattctgattctcttctcatcccttcctcccctcacccaccatatacctctggcatccctccatgcaaagaaatgtcgaataggcatttcttggtataatttacctacacttgtgcttgtggggtgggagtaaaaacatatccagtaagtaccaaggctaacctcctaatggctggagctcagttaggtctctgggctctctaaaggagtccagagctcttgtccatgtcacaaatggagccttagaatacctgtctttccttatgtggcagctttggccattgtgtcttgaaattctccctcaggaaatgtg

SEQ ID NO: 297258 - DNA, 665 bp, Homo Sapiens
  misc_feature (563)..(563): n is a, c, g, or t
  misc_feature (588)..(588): n is a, c, g, or t
  misc_feature (611)..(611): n is a, c, g, or t
gggggaaaatctaatgttcctatgtgcctagatcagcaagtgccctgtagaacaaaggttcttaagcttctcaattttccatcaattttcaattacctaggaattcctaactatgttgccaatttcttgatattttaagaaaagtttaaaaaatatattgtgtccagcatttctatatgttttcagcagagagttactctgagtaacctagttcatcacttgtacaccaaaggttccacttgtccattttgttagagttagtttacttaaaactaagtactataatttgtgaagctgctttatttcatacactcagacagcaatgtattatgatgagacctccctctcgttccccaggattcctggtaccttacacaccagagacgtttgaccaaaggagagcaatgacattacctacgtattagatagtagtaaaaatgaatttcttcttcgtattttacttaaaatcaaaacaaaaaatgtaatattttcttccaaatccgaaaagatcatctcatgcgtccctttctgaaattgggttctgttaactgagggatcctatngattctattaaacctgctccagtanacagatatgctgtcagaaatgtntagtagttcctgatcccagctctttccttgactgcaggagatcctggtcagctc

SEQ ID NO: 297259 - DNA, 685 bp, Homo Sapiens
  misc_feature (97)..(308): n is a, c, g, or t
  misc_feature (577)..(637): n is a, c, g, or t
  misc_feature (672)..(672): n is a, c, g, or t
gatatacaagtcaataattttctaacaagatcttaaaagcacagtatattgctttggtacagtggctttatgagagctttttgaactgtttagagtnnnnnnnnnnnnnnnnnnnnnnnnnnnnnnnnnnnnnnnnnnnnnnnnnnnnnnnnnnnnnnnnnnnnnnnnnnnnnnnnnnnnnnnnnnnnnnnnnnnnnnnnnnnnnnnnnnnnnnnnnnnnnnnnnnnnnnnnnnnnnnnnnnnnnnnnnnnnnnnnnnnnnnnnnnnnnnnnnnnnnnnnnnnnnnnnnnnnnnnnnnnnnnnnnnnngtgtagaggttggttttcattcttcaagtttctagactgtgcgctaaaggttagggttgctgattctagatacacagatgcattttccattcatagataacctagttctggtgttttttagtatcagtcactcttgtgtagtttatttcattggatctgctcctagggccatctaggaccaagtaagagggcttaatattttttattcagtaatattcagagacctataatctttgatgatacaggatagagagcctgactgaaaagcnnnnnnnnnnnnnnnnnnnnnnnnnnnnnnnnnnnnnnnnnnnnnnnnnnnnnnnnnnnnntacctgtgtgtttgtttatatatcagacatagcanaaattcattaatc

SEQ ID NO: 297260 - DNA, 527 bp, Homo Sapiens
acggccggggaaggtggttgttaagattataaaattcatctctggtgaactgtttcttcagttagaaatatactgttttcagtcagtttaggctgccacaagatacacagactggttaggtagggacagtagaaactctattatctcatagttctggagactgtaagttctaggtcaaggtgccagcagagttggtgtctgttgaggcctttcctaacggttgtgtatggccactgtctcactgtgtctcctcacatggctttttctctgtgggggcacagagaaagagtgaaagctctggggtctgttcttctcatgaaagctctggggtctcttcttctcatgaggacatcagttctattgggtcagggtcccacccttatgacttcatttaaccttaattacctctttaaaggacctatctccaaatagtcacattgtgggttagggcttcaacatatgaataatggagggatacagttcggtccataacatacactaactgtctttgtatactaatcctcatt

SEQ ID NO: 297261 - DNA, 489 bp, Homo Sapiens
gaaaaaagtaggaagggagagagaaaaaaaaggtcgctttgcggatacgagccgctaggctgacaacttttctatttcattggcagatatgaagcagtgtcttttccagtaaggtacggaagctttgttgttttcatgtgtacccagctcagccgtttagaagcacctcggtttgcttcattaggtatttgatactctccagccttgtcctcaggcctgatttgatttgccagggtcctgacaccaaagcccaggccaagttctaaattcaggtgtgggctcacagtgctattgagcttgtcgaattctggcctcccctgaacattagccccacgggagcctgagggtgtttgaaaagggcgtgatcactctagggctgaaattaaaggctgctttcttttccttctgaagccaggctgcttcttcggagtacaccctcctgagccaggagcacaagcactagcagaaagcagggattgtttcaggaaa

SEQ ID NO: 297262 - DNA, 511 bp, Homo Sapiens
  misc_feature (237)..(256): n is a, c, g, or t
ggaatcactgtggagtgaaattttccacatcatccagaattgccttatttaagaagtaaaacgttttaactttttagcctttttttggtggagttatttaatatgtatatcagaggatatactagatggtaacatttctttctgtgcttggctatctttgtggacttcaggggcttctaaaacagacaggactgtgttgcctttactaaatggtctgagacagctatggttttgaannnnnnnnnnnnnnnnnnnnaacccacttcccctcctggtctcttccctctctgataattaccattcatatgtgagtgttagtgtgcctccttttagcattttcttcttctctttctgattcttcatttctgactgcctaggcaaggaaaccagataaccaaacttactagaacgttctttaaaacacaagtacaaactctgggacaggacccaagacactttcctgtgaagtgctgaaaagacctcattgtattggcatttgatatcagtttga

SEQ ID NO: 297263 - DNA, 300 bp, Homo Sapiens
tacggccggggaaaaagctctaaaatatcatttaactaaaattgtgtaatgtatataataaacattaattgtttattaagtaagcaattgacatggcatattggaatacccactgtactggaagttcaaagatttagcatttagctccagttcctccaataacgctgtaatgttcagcaagtcacagcttcttcatttgtaaaaagaaaacaagtaaactagatagcctctgtatttaatattaaatcattaaaattatctgaacataagtgctatcatgaaatttcaatggcatattct

SEQ ID NO: 297264 - DNA, 518 bp, Homo Sapiens
acggccggggctggaacctctgtggccacagcacctttgtctgagttcttgtcttgcatccagggagaatgaggtaggcagacaagcgaaggatgaacaagatgaagatgagctttattagagtgttacaacagctcagaggagacccacagtgggtagctctctctgtaggcaggtcatccatcaagtgttccattctcagcagagaggaggccctcaagagggtagctaccttctgcaactggtcatcctgaggtctgtagctctcagcggacaggaggcctggagagagtggctcctctctgccagcaggtcttgtctgcagctctcagcagagaaggtggtctctctgccctgtttgtcctctggctgtccactgtcctgctctggctgagcccagggcttttatggacctcagagaggaggaagtgtgtgccaattggtccatgggtggccatgggcagccaggaagaggaatcatgagtccctactgttgcctgcaggactgtcagcccgtc

SEQ ID NO: 297265 - DNA, 501 bp, Homo Sapiens
gtcctttaatggaattcagccaaactccaaaaatactgagttgcttctagttatctaaagtagtacagaatcactatcccgatgaagaagtggggtttttcagaagattgtaaactcatttccatggcacagatacaaatcatcgtcaggacttgttagccagtccatgtctcattgataggatgtagcctgccatctgcatagatggtttaacatggtgctgtttttgaaaacttgctgtggaaataaatttgacagaagagtagttattcgtaaagctgtcctagaaagaggttaattcttttggtatatgaatatttctcctccaatccttttaattaggtggttcagcttatcttgtattttctgagtcataactatactctagggccaagacctactataaaatctggggtcctaaccagagagttgtttagatcaatatgatatgctttgccaacatgatctaagaaggtattcattctttctgggtttgagaag

SEQ ID NO: 297266 - DNA, 188 bp, Homo Sapiens
cggccggggtactggtaaaatatctgaaagcaaaatcatgggaagatatttaagtatattatacatcatgaatttcaaaaacagagtgaagatcatgatacaggtttcttatatgaataactgtatggtttatattttccttcgccttttgaaatactcaggaaatgtttgttgtacacagaatttga

SEQ ID NO: 297267 - DNA, 561 bp, Homo Sapiens
  misc_feature (124)..(181): n is a, c, g, or t
  misc_feature (197)..(269): n is a, c, g, or t
  misc_feature (450)..(450): n is a, c, g, or t
agaaactgagggtttggttaatttaaatgatttatgctttggttctaagtgttggctgttgattagtgtgtataagattactggctttggaattggattcccaggtttttggctctggatttannnnnnnnnnnnnnnnnnnnnnnnnnnnnnnnnnnnnnnnnnnnnnnnnnnnnnnnnnattgctaaagtttttnnnnnnnnnnnnnnnnnnnnnnnnnnnnnnnnnnnnnnnnnnnnnnnnnnnnnnnnnnnnnnnnnnnnnnnnntgatataattcatgaaggctcttgttataatgcatgctgtataatgaacacttgataaatcttatttctcattggtattgatagttttctttttttggagtataaggatttgattgtgcaaaaaatctctagcctctcttgaatatgattataatttcattacagtaatgggtctagatgntgggtgtgtcccaagtcatttgttaccagggatcaagtactgacatttatgaatgatttatattaggtttataccgtaaaatatcgaatatccttctcactcatttcctga

SEQ ID NO: 297268 - DNA, 412 bp, Homo Sapiens
gggagaagagagacaggaaaggcaagagacagttggggagttactttacaatagtttacgtcagaggtaatgagctaggggattgtagcaacatgaattgagaaaggaatagatataatgattcaatgtataggtattggcaatggattcagaccttaaaacaaaaatgctaacctagattctgagcagggacactagtaacaactgtgtccacagtgtaacctaattattgtagatgtgtgtatgtctagatcggggtattccataggaataggctagagaaacatcaactcactagactgtgctttaattttaggagtagccaccatactgtcttgctgagtgttagaagctgtttgctgcataaaggcctgcacatatcattcatatagagaaagaggggaggaggaaa

SEQ ID NO: 297269 - DNA, 539 bp, Homo Sapiens
ctattaagtgtaacctattgtgatttctaagaggagtcctgccaagaactgtatgtccaaaactgatctgttttaacagttagtgaggaacagcttccgagataaagtaagttcgtttttctattgataattttgctttttaaaatagcagtgttataagactaatatttccacttaccaccaatagagggagcattaattaactatgtcatggaattgttttgatattttggaaaacaagtgattccacccataaaatgaaaagagaagattgaccttaataaaaaaactcttaaagctaggagacaatgacatgaaatcactcaatacatgttacaaatgaaagaaggccaaaagccactttaaaatattttaaactgtttcacagtagatttgaaagtgtctttgttcaaatttagcaaagtaggaagaattttcactaataccgcctgaaaagttgatcttaggtgccattatgggccacgtgtagctttctgtttctcaaatctgagagagacccatttgccttaatgctgatt

SEQ ID NO: 297270 - DNA, 431 bp, Homo Sapiens
atcttcattttgttaagaatcttcaatgtcttgtgtactttgttggattttctcatttcatcagatgattgtgatcacgatcattttgattatattaaatgtcacacttttaatattccttatttgaaaagatatttcagtggatagcataaacattaaaggtgaggtggtgaatttagtgcaaaatgcgtaaggtaggcaaccagctatcatttgtataattcatgcttttgttacaaatgccattgtccactaatgctgactttttatcagcttaaattgtgggaggctatattcgtagttaattgacagaattttatagaggcagcaaatgctttttatttaaaggacatccttagcttctatatcctgtgatataactcgtgtattttgccagtcagtagaagtagtaatgcactgaagaaatgtat

SEQ ID NO: 297271 - DNA, 184 bp, Homo Sapiens
atcccagcatcgtggctttggctcacccagacaaacccggatctgccacccaagtgcccaagtctccagcctgccagtgacagagaccagcgttggtctcctcaagggactgagtgaggagaccagtcaccacccggcgcaaactgagtcccttccacgcgggaaagggccacgagcaattcat

SEQ ID NO: 297272 - DNA, 569 bp, Homo Sapiens
  misc_feature (174)..(247): n is a, c, g, or t
gttcagaaatatttacaaaacaaatgcataattattgattttattgagaatatagaagacattttcataccatgtgtttgggaaatgaaatcccgtagtctgttgccagaaataaaactattaaaaatataagaaatactctcatttccacagccggcatctgaggaattcatnnnnnnnnnnnnnnnnnnnnnnnnnnnnnnnnnnnnnnnnnnnnnnnnnnnnnnnnnnnnnnnnnnnnnnnnnntgctggtcatgtctcgtgtttttaaaatgctaactcattgaaatcgtattgttgttcattcttttcattcatatttcccaggaacatagaccaaggcttaggatataaaaggtgccaataaatatttctcaaatgactaagattataatggcttttttagtcctgccaccttgctcccacctagaactccctggttatctcacccctgccatcacttcccatcacatggtgtggccacaagctccggcttggggaatcctgatgaagttgggcccccagaagtgttggcgctcttcactttcactttcacagtccgatgatc

SEQ ID NO: 297273 - DNA, 214 bp, Homo Sapiens
ctataaatgtttaattaatgtcaacaatgaggagacaagaaatgtagctccaaagtgtgctccccaccatggattatgaaaaattttgtttagtgttgtaggacatccaaatgtaaacttgagctagacacggccttactcctgacactacaccagactcacagacactgagtgaaccacactcaaaactaccttcttttcctgctacctttta

SEQ ID NO: 297274 - DNA, 630 bp, Homo Sapiens
tacggccggggttggcttttttaggtttgaaatattaacgttatttttatttcattctaattcatccttggttacagattaacttcatgaaaaataacatgacggtgatttaatagaatgtcctaagaagacaaagccagagttatatttaagaattgaaatatggaatggtttcctgagaaatagaatgattccagggggctgtggctgtccttgggtggttacattctaaggtcttgatccttgcattttcaggcctagagactccttatgtcctcccacccagaaatcattagctctcagatactggtgaattattgtataccaagctcaacttgaaatcaacagatgctacgttaacacatgctttctgtagccagatctccttgggaaacctagtagtcatcaaaaagctactcagtgactcaatgatagggagttggttgtgtataataacaagtggcatcaaagctataatgacattgtatcccctttcgatcaaccactcaacatttgtctgcactggcagtgcacctttactgaagaatattagattgctaatgtctgcctctctctcttttagaagtatcatgtaaactgcccccttttgttgttgtacagtataataca

SEQ ID NO: 297275 - DNA, 660 bp, Homo Sapiens
  misc_feature (57)..(66): n is a, c, g, or t
  misc_feature (242)..(529): n is a, c, g, or t
  misc_feature (535)..(590): n is a, c, g, or t
  misc_feature (613)..(613): n is a, c, g, or t
aaactcgagctgttctttggagacagaagacaatgaatttaaaaatctgattattgnnnnnnnnnncttgtgaccacatatcaacaagaataggagtaagaaatgctgtgtagacataagatattaagtttaaatgaatgttatacagagcagaatggattgtgaatgggttacaatttctgtgtaactggtaaataaattcaagagttctttgtgaagtataaaagcacaataaacttagnnnnnnnnnnnnnnnnnnnnnnnnnnnnnnnnnnnnnnnnnnnnnnnnnnnnnnnnnnnnnnnnnnnnnnnnnnnnnnnnnnnnnnnnnnnnnnnnnnnnnnnnnnnnnnnnnnnnnnnnnnnnnnnnnnnnnnnnnnnnnnnnnnnnnnnnnnnnnnnnnnnnnnnnnnnnnnnnnnnnnnnnnnnnnnnnnnnnnnnnnnnnnnnnnnnnnnnnnnnnnnnnnnnnnnnnnnnnnnnnnnnnnnnnnnnnnnnnnnnnnnnnnnnnnnnnnnnnnnnnnnnnnnnngactcnnnnnnnnnnnnnnnnnnnnnnnnnnnnnnnnnnnnnnnnnnnnnnnnnnnnnnnncagtgaagcgaccagtgtatacnattagatgtacaaaacaaatacttttcctatataccattcagtatct

SEQ ID NO: 297276 - DNA, 435 bp, Homo Sapiens
  misc_feature (165)..(165): n is a, c, g, or t
  misc_feature (173)..(173): n is a, c, g, or t
tactgcaatgggaaagggagtaagaaccatggtgaaatattacagaggccccatggctgttatttacaaccagatgaaataggcgaccatgacactgaaagacctttccaggaaggagctgaagacggagtgtggaagatgtagttagagttgtgggaggaaggnacacacanacactactcttgatagtctggcatacccttgccagtctgtcagctgaagggggagtgaacccacttctactgagaatcataggttggtatttactaagttcccaggaagtaaagatttctttaactgctagcatttttcttctactcctctctccccagttttaaaaatgtttgctaaaattatttgatgagtaatactatatgttgagtttacctgggcaatgagcactgtgaaggagaacatagtatgctttgctttcct

SEQ ID NO: 297277 - DNA, 605 bp, Homo Sapiens
  misc_feature (544)..(544): n is a, c, g, or t
cgggttataatttttttccaattgcattatatcatgaacatttccccacaatattaagtattcttcacaaacaagatttttaatcacggtaaagataatccattacctatttaatgttttcctgattttatgtttgaccatctctctacataattctaatcacaactctggttatttagttaggatatacttctagaaaaggaattccagggttaaaaccagagttccctatttataatcaagttttctaccagatttataccaagatagagtcctactggcagtgagtgagagacctatctcaccatactctcaccaacactggaagggatcaaaaggataaatagaaaatatgtgttttagttagtagtgactaacattctgattcaaccctctcttggggcctaagtttccttatgcatataaagagatagatagggaggcagctggagtatgtgatgcctgagagctaacattcaatggtcccttccatccttgctgctcattctttagttgtataatgtatgtctggaattaactaatntctctcttaaattgggtttccttgggggcagtacaagtcatttgcttaggaggtgatccca

SEQ ID NO: 297278 - DNA, 664 bp, Homo Sapiens
  misc_feature (652)..(652): n is a, c, g, or t
caataaaaaggtggggggaaatggaatcactttgccaactattgttctaagagttgacatcagttaccatttctaatgcattgttgtgattttgtagtgtcattcataactggtattgacattttagaaaacaccaaagtgatttaaaatatatgtggggaaaaaaacttctcactctagtaacaatgttttaatcatgttgtttgttaaatatttaaaagttattgttcaatttttgctagactatcttaaatcatgatagtgttgggaagggggtatcaaaatataaaattgttagtttgtgtatataaacaatgcacattaaaacaattgaattgcttccagcatacaacaaactaccttaaaattatgttcaaaatctattaaatatattttcatggctaatgtcgagtatatgttttcatcaattacattgttattgtattaatcgcggttaaacttggcatctcttggcaggatcctatttaatttctgttgccatcaaaatatatttatatgcatgagttttgctataaacctttattttctgctataaagttatatattatgacaaccataaatgcaattacaaattgggtaagaacaagctgaataaaagttgttcccatgactaatattagccttcatgctnttagcatatttt

SEQ ID NO: 297279 - DNA, 321 bp, Homo Sapiens
ctgcaagatttgtgctggcagtaatgtggcctcagggcagggcttagggtgatgccttgggtgtggctaatccatctgtccacctcaactctcccatctagttaatccatctgtccacctcaactctcccatctagtcactcatcacacactgaatccagaacaaagctgggaactgggatacagatggatgagttaaacatggtcactgcccccgggagggggcagatacagacacaaatcaaggataatggtaccgcgctgacaccccagaaaggttagagctttgcggtccattatgatatccatgtgtggcttttaa

SEQ ID NO: 297280 - DNA, 532 bp, Homo Sapiens
  misc_feature (323)..(384): n is a, c, g, or t
cggccggggaacatttagatgctggtaacggtgaagggcaaaggaatgatttgagaaaattaggggaaaggggaaaattaaaagtcactttggcctccttccaaggagatccctaagaaaaccttaccctttgaggaagagctcaaaatgagtaaacctaagtggccacctgaaatgacaaccctgctatcccctgaatttaaaagtgaatctctgctagaagatgttagaactccagaaaataaaggacaaagacaagatcactttccatttttgcagccttatctacagtccacccatgtttgtcagaaagaggatgttannnnnnnnnnnnnnnnnnnnnnnnnnnnnnnnnnnnnnnnnnnnnnnnnnnnnnnnnnnnnnaatgtgcaagataggccgagtgaagctgaagacacaaagagtaacaggaaaagtgctatggatcttaatgacaacaataatgtgattgtgcagagtgctgaaaaggagaaaaatgaaaaaactaaccaaactaatggtggcagaagtt

SEQ ID NO: 297281 - DNA, 534 bp, Homo Sapiens
  misc_feature (322)..(330): n is a, c, g, or t
cggccggtaatgtctctcctttatgctcaagtcaccatgaaaattagatgtatttaatgtgctcaaaataacttgagctttatttacaagaactgaaatgagaattcttaaattcacccatttcaaattgcctgagaacaataaaatacattcttttatgaactatcttcagccttgctaaacttgtcattgcatatctttgcaatccagaaatactgctgcataaatagcgtcttgctcaattgttcttgccaaagtcaaaaatgtatatggttgattcaagaaggatactaattttttaaacatgtctatgtgtcttcannnnnnnnnagagaaaaaggaaggcagagttgtcttcagtttgagagcactgaaaaatttaagtactaatttttaagatgaccaaatttattactttacccataataattacttttgcctataataatgtagccttaaaaaatggagagggtatgatttcactttctccagcattataaaacagaccaaaggacaagcctgattatagatatt

SEQ ID NO: 297282 - DNA, 516 bp, Homo Sapiens
cggccggggagtcacagacatgtaaccttccccatgccttctggggtccttgctctaatttgggagatacaacacatagagaaaaaggtacatgaggcagccttgccactggaagaaaatggcactcaaattcccagctgtcatctgggaaaggtcaattgttttctttacaaagccaccttcatagcaagactttatccatgtcagcagtctagaatgtcgtcatctttatagactcagaagcttgatttggtgtctatattcagaggttatttctatctcagggatagtattttactaatcaaatacataacagatatatacataaaccagaatgaaaacatattatagtgagaaatgtaattattgattgaactggatatttgtcttttcatgtcaacttattcattcagagcaggtgtgggaaaacaaattttagtcatgaaccgggttggaaagtattaaaaacgaggatttggtcatcttaacaaagtgtttctcagctacagtttcttc

SEQ ID NO: 297283 - DNA, 250 bp, Homo Sapiens
cggccgggaataaaaatcagattctctctatctgtatcaggctctatctctcagggaatgtagtcaaattcaggtatagggctctaactaagctcttcttgtcttttaaatgattagtaaaatttgttatgtgataaaggaaatatgtatttggtattgtgtgcgttagtatttgttactttttaacctagtgattgagttacagctttcttttcacacatgacatcactttcccatgatgtaagataga

SEQ ID NO: 297284 - DNA, 113 bp, Homo Sapiens
attttcagttttttattaatttttctctcattgcaaattctagctattctgacagctttgaattagatggttactggtctttaagattattcagttgcggagacctgtttgag

SEQ ID NO: 297285 - DNA, 362 bp, Homo Sapiens
ggtatttctggcagagacctcaggtttttaaagtcaggattctcacaagtcttagggatctttgtcactttaatattagagtgaaaaaaatgtcacagtaggataggataatctccaaatctcagaagcaagcatcagtaaaattgctcggtgatgctgatgctaagagtagctttctgaaaaaactgttgctcaactcctccctgttcttacattgatgtcttcttgtcctcacattgtcttacatttctctgtacagtgtactaaacttccctgatttttcccaattaaaccagctcttgttcttggatcgcattggaattgcatgggttttgcatgttattctacttggatttgaattt

SEQ ID NO: 297286 - DNA, 400 bp, Homo Sapiens
  misc_feature (228)..(260): n is a, c, g, or t
ggactaagtacacaatacagaaccttagattagtgctctgctgaacagagtaacaccctgtctacaatgactaccactgaaggtctttttttaaaatacacctttttgtgtaatttgactttaaccattctcagaatcatgtgttcatttctatcctgttggggttagtggccaaaatagaaggttggtgtggggtggggagctgctttgtgctcaaaagctgtttcnnnnnnnnnnnnnnnnnnnnnnnnnnnnnnnnngagacagggtctcactcggttgcccagtctggggtgccgtggcactatcacggctcactgcagcctcagcctcatgggctcaagccatcctctcacttcagcctcctgagtagttgggactgcagtcatgtaccaccaca

SEQ ID NO: 297287 - DNA, 251 bp, Homo Sapiens
caggcagtacagttaaaaatattttcgttgtttgcttgttggttatagagtgataatattttgcaattaggaagcttggatgagaaaccacacacgtgacataaaatggtttctcaacagaaaatctgtgccgctcaaactggggaaacagacttataaattccttttgacaaaagacacgtcaccacacaagcaagttaggacagaactctgagcattgtttttcatagacttgggacaattcccaaata

SEQ ID NO: 297288 - DNA, 145 bp, Homo Sapiens
tgagccaccgtgcctgcccgtgactctgaatttatatgctactaccaagcagtcatttccttacacttattcacacataagtacttcacagtaaaaaataagacatgccattaacacagtgaagacttacgtgctcaggggagct

SEQ ID NO: 297289 - DNA, 611 bp, Homo Sapiens
acggggccggggagtttttactaggatagcttttactgctattgaggagacttaaagaaacacttatatattctcttttgagtaaacactagggaaaattagtcacatgaaaatcagattttgtgctatcctgtaggtctggaggattgtatcacctctctgaaattagagctgtattcctaaaaacctccgaatgaatgaccgaattaccctttagattcatatccaggtgaaattgttgtcaggcacattgggctccttaataaaatttcaaggtcacaagtagtcatcagtaacacattggcaaatcatttctctaaatcagtttagatagaaggtttgtttttcctctctggcattcatctgatgcttagaaatgcctttgcgacttcatggtttgaagaagttgctctgtacttccaggaccacaccttggtctgaggcagattatccggtatttgagatgaataaagctctggataacctataacctcagcagagctcagtccccctccatagcacagagggattcaaagcgttagaccaactctgataactttctactggaatgtacaccattgagctttcttctctgatatgtctgtggccct

SEQ ID NO: 297290 - DNA, 544 bp, Homo Sapiens
ggttaactttacttagaaaattagtctgacaagctttgcacttcggtcacataagtgcccatgtacaaagttggcttactggatctgcatattcaaaatatgcaactacaaatttatcccctgcagaaatcttctgaggagtctaatgtattccaaatgacttaatattctcagacaaatgctttaaaatacttggattatctcaagatttttgaagctaataaagtaaatagaaacacaggccattttaaatggtaaattctagttacataaatataatcttaaagtatgtttgtatctgtaacagtgttagaccagattcggtttctacctccccaatgttataaatgttcacttttgtttttataaaccatattactgtaagatcaatagaactttgcctagttaagtgaatggaaccaattaaacaactagtagctttttataatgttagtgtgaacttgaaaaattgtttttggtggaatttttgtctgtggttagaacattttcataaaacagataaagaatgtgtaatactcttaat

SEQ ID NO: 297291 - DNA, 693 bp, Homo Sapiens
  misc_feature (658)..(658): n is a, c, g, or t
  misc_feature (667)..(667): n is a, c, g, or t
aacttagaggattctcgcaaaaatattttattacttttggaccattattcttcttggatttgaaaatccactcaaatgaaaaacattaatgtattttgaatgtactttagtgttaagaatttcaccttaattaaaatgtaaaacaatgtaattaatttcaagtgtctcttagaaataaacttttagctcttactttcctacaaaatgctgaatttacctctgcatattgaatgtgaagaaaacaaaatattgttaaaattttgtatttcaacatcaaatatttctactgatactgagacaattcaacatctatgaaaatggtctttttagttaggcactgggtcaagtgctaagggtacaaaattgttagatctaatcataaggacgttatattgtccttacagaagtgggaaaagtggtctttattttttattatctttttaagttttaaattatagtggacttctgcaacttttgtttaaaaacacttttagaattaaaattacggtgtcggcatgtcacatgatggaatgttatttagtgtaaaagctagtgggcccttgggaagtactagattaaaaaccaaggctagttgaatcttaagcaacttttgttacactgtgatttacatttcctccacaaccaacacataaacgtnttagtgtanacatctcttgaattaccaccttacaa

SEQ ID NO: 297292 - DNA, 283 bp, Homo Sapiens
  misc_feature (194)..(194): n is a, c, g, or t
tccttcttttttggtgggcttacaggtctttttagtcctaactatatctatttgtctatgattcagatcaacattttgcttaaattagtttacaagtcattatgattgccctttggtcatcattccctatataatctctcgcaaacccatttaatgccttccttttttttccctctttgctgtaagtggaagtnttcaggaatgctataaatgagataaaggaaaggagaaggtacagtatctagattccaatgaactttgctactgattgctgtttaattta

SEQ ID NO: 297293 - DNA, 602 bp, Homo Sapiens
gaactgaaaatgaatgtggaagcaagggaacaggtgatgttcagctctcagatctcacatggcatttatttggcttgaggtgcccccctccccctgtcccctggctgtgggctcatggattggcagagcccagttatggcttccgttttacttgcaaatatccagaggaatgtacagtctaccagaaaattgtgctcaggcatccctttgtcacattaaaagcattatggacacacgacattttattaagtattttgttctggtatcactttattaagtaaattatcataatccttatttagccatggactctcattaaagcatgttctggaaaccttggccaaggttaggagcctgtaaagtttgattcattgcaagagaaaagtgattagcagttggagagtgacattgatgggccccattaaaaggtcattggatgtggtggtggcaagcgaaggttggagttggaggtcagcaggatgccctgatttagaaccaagcttacctttgcataacctatagtgacactctcttcatctccccacgccttagccatgtctccctgaggttcatactgtttggaatttcacaggctcatttat

SEQ ID NO: 297294 - DNA, 635 bp, Homo Sapiens
gaaagcccctataaccttttctattcagagactttatccttctcttattcctacagttatagtctttgacagataatgttgaccttgtaaattaaagtgtaatttgattgctttggagcatttttggtgtgtttgcttccttaactgtgtgtacagtagagctacatttaaacacatggaatttggcccttttgcttttaaaagtaaataccaggctcactatcatatttattgaaggagaaaccatattcaaaattgttaggctataattgttctgaatcatacattcaaaagtgtatgtgtcttatcaacataaagtattttaaaagattggaacactagaaaactaaataggatggctattgaggacaacaggcatagttttaccattttggtaccttctactgagttaatcttggtataaacatatttactttaaaagtaatgtcaaataaaaacctaaatgaaaaatgaaatagttttctatcaaggaatcatcttactgtatctctgtatcatttatggtgtatgtgttacatacattacaaatgttatttgatgtcatgatttctgaatccaaactggtatttgtcagctaagattactgcttgagtacagtaataaaaatgaaaata

SEQ ID NO: 297295 - DNA, 687 bp, Homo Sapiens
  misc_feature (19)..(19): n is a, c, g, or t
  misc_feature (26)..(26): n is a, c, g, or t
  misc_feature (36)..(36): n is a, c, g, or t
  misc_feature (135)..(164): n is a, c, g, or t
  misc_feature (580)..(595): n is a, c, g, or t
ggtcactattgctttatcnctttagnttttatcaangttgtccaaaatattgcatgatctttcatgaatatataaataaaagaagatcagagaccccatctttgtagtctccttttccagttgagaattcagaannnnnnnnnnnnnnnnnnnnnnnnnnnnnngcttgggggtaaattttccctttaattcttcttttccataatgaaaaagttatgaaaattgagaagagactttaatatttactagtcaaatcagatatcagggctctaatgttaatggcaaaattggtcttagaagcagatcctcatactgagtcatcagatgacacattccaagatgcatttcttcagacaactatcaatgtgtgaataatgcatttctcaaaacaaaaagcagataacgtattcacattcagttagtgaagaacaggaaggaccttatcacacagtattttgcagcaagaacctggaccatctcattttgctaaaaggataggtaacatattctttaatcttttatgatttcgtgctcagattcattatatatggttcctaagtggacaaatactgaaggtaannnnnnnnnnnnnnnngcataggtgactagaaggaaacagataatgtagaaatgaaaaaattattaattgggtattataagtggtgttataagtgtaaaaatgaaact

SEQ ID NO: 297296 - DNA, 632 bp, Homo Sapiens
  misc_feature (504)..(504): n is a, c, g, or t
  misc_feature (600)..(600): n is a, c, g, or t
  misc_feature (618)..(618): n is a, c, g, or t
gacattggtgccagataaaagctttaaacacaaaacgttgttactgacatgttaatataattatgccacgtattatatatacaaaactttaaaagctaaatttagaagttattgctgtatcatttatataggctttgttctccttaaacacgttgactttaataaggcatgttttgtacaaataaagtctaattctaccatcagttgcagccacaggaaatttgaagtcatttttatataaaatttaaattccaacacttaattcaggttctatgacaccattttctagatccaagaaggaaatcattggctcaggattttctacagcgatctatcctgtatgttcctcagataatatgcccctagaatattattttttataagaattaatggcagaaacatttgagcttatcactgatggcatttgttgactatcaaaattgtctaaaacctcccacatttatccaggtataaaagtaaacttctaggttgggtgtagggtangttgggagtcaaaagaggacactctatagagtcacagttcataggttttcctaaagaacactttctaaatctaaatttttcctcccactaagccanatgaggagggctccaggnaaatcactggtgat

SEQ ID NO: 297297 - DNA, 723 bp, Homo Sapiens
  misc_feature (449)..(449): n is a, c, g, or t
  misc_feature (560)..(560): n is a, c, g, or t
  misc_feature (604)..(604): n is a, c, g, or t
  misc_feature (626)..(626): n is a, c, g, or t
  misc_feature (672)..(672): n is a, c, g, or t
caacgatcactgataacagatcaccataacagatataataataacaaaacatttgaaatattgcaagaattacaaaaatgtaacacagaggtgcaaaataagcacatgctaccagaaaagtggcactggtagacttgcttggtgcagggttgccacaaaccttcaacctgtacaaactgcaatatccgagaagcataataatgtgaagtgtaataaaacaaggtaagcttgtatatgtatgcatgcacacaccagtacacatccacctatccacacacaaatctttgtactaacaaagcctgtattttcaattccaacaatacatcatttgtaccttaaaaatctctgtcatccttgtagtgtccttttctgtccttgttatcagggtaatgctggcctcataaaaaatgtttggaagtgttccctcctcttcaacttttggaagagtntgtgaagaaatggtattaattcttctttaaacatttggtagaattctccactaagctatctggtcttggattttcctttttcaggagctttttgactactgactcaatatntttactcattatttatctgtttttattttctatttcttcatgtntcagtcttagtggatgtatgtntctagaaattattctaagttaaacaatttgttgacacatagttgtntagagtagactattattatcctttggtattctatggtaccaatttaatatc

SEQ ID NO: 297298 - DNA, 660 bp, Homo Sapiens
  misc_feature (420)..(420): n is a, c, g, or t
  misc_feature (535)..(535): n is a, c, g, or t
tatgtatgatgctcctgacacttctaagtacacagtaaaccttagctcgtgttatgatggaggtggggttttcctttatacataaagagaacttcattttacagtaacagtaattaattgttactgttaataaaactgtcaataaaatggtaatgaactgttactctaaaataaaatgcttataaatatggaccccatcagaactacagttttaatgttcaaaggatcatctacattgagaaactgttttgagaggtaaatcattgctgtacatgtggactagctctgtgtcatgcaaaagtgttactgctcagacaactaggtcaggggctgggcatgccaaaatgagcaacctggtctctgcccttacagaatttacagtgtgggaatggagatagttgagaatataaataacccagnggagtgaagaggtgaagagagcaagtaggaaagtgttgatcttggactgcttatgaaaatactcagccacgggcttccaaaataggacactgcagctgtggtctgagaccccttncaatattatccaagcagcgtgctcttcttgagagagggtgggctgtctggggaagcctgacagtcctgatgtggtgatctgggaatgggtggtgtccaggtaagtattaaccaaagatgtgatat

SEQ ID NO: 297299 - DNA, 663 bp, Homo Sapiens
  misc_feature (649)..(649): n is a, c, g, or t
gttctagcattgagcattacagatgaaaattcctatacagtttttctctctggaaattcataaggtttggaggggtgatgtgtgtgtgttgttgttctcttattctttcactttagcctctcttttttgaatttctgttattgcttttatcacattatctatttcttttctttctgtgttctcagagaatatcatcactgagtctttaatactgtcaacttcagctgtgtacattttgctcttcaactttcttttgaggctttaaattaggcaaatatatttttcttagaatttctgaaaactccttttcactggagcttattttaattatatggatgcattatcctcttaaacttctgtgaaaacaataattggagttttcatttgcattggctgtttcatgagaggtcaagctttttgcttatttattttgatgtttccttttcatgatatctgtgtcttgggatttggttgtatattcacatttttaattagctacttgatttaaataaagtatcagtagttactttcagggctcttggtgattataataattactcacctaccaggcttcttccttgcatgcagctcactacaggaatctgttgtgcctagaagatttcgggataagtggagaaaccccactccngttactgcatacac

SEQ ID NO: 297300 - DNA, 743 bp, Homo Sapiens
tgaatgaatagccattttaatgaaaaaaagatataaattgaactttacaataatgtattcttaataagaataaaaaacatgttttggaataaaaaaggccaaaatagaaattgtatttatcatctcagtaggtgcaaatataatgttttaagatatactagaaatgatgtcattggtatactgatgttacatatttcaaacagtattttggcagaaactagtcattcattcatgaaaatgattataatgttcattttgatgactttttttaaataagaaagaataattataggtcttaatcttggtgtcatctattattagtaataatgttaaagttatgtgtatagttcgtttagcttttgaaactatgtattagatagcaaggaatgtttaaatagttgagcaaaacgtcatagtggacactaaagcacacaaccaaaggacaacagacgtaaaagagtgaaatcttctatattgacttatgagaatatatcttggtcagaatgagttggaactgatatcagggttgggttgagaaaaagtgtgtaacctaaactacaaaaatattcatggttagaaatcatgatcagtatacaggtatgtttaagagtctagcacaagggttcaatatacgcattataaacaattagtctaactttgtaaaaaagacaaaagataattttcatttggggtactctgaagacttctggtgttttatatgtactgatttttacagtattatg

SEQ ID NO: 297301 - DNA, 669 bp, Homo Sapiens
  misc_feature (22)..(22): n is a, c, g, or t
  misc_feature (573)..(573): n is a, c, g, or t
  misc_feature (591)..(591): n is a, c, g, or t
  misc_feature (602)..(602): n is a, c, g, or t
gttgtaacaacattggaaatantgtcaagcaaattccctcctctggaagtaaattacaaaaaaagtaaacaaatgagaaggtttctaaaatgactcttaatgaaagcattaaatcaggcattaccaagaaagcttgagtaggatttgttgattcaatttgataaaaataggacttgtaattttatatatagtctaacgtgatgtatgaggggtttagaactgagtatgaatggtttagaaataataattaatcttataacaatcaatcacaaggtgcttattgactagagtaccttcatttacaaagttattgcaacacttcatcatttaggatgggtaagagcttttatcgtgctatgatttggcaaatatatgagtgtagatggtttgataagataacaacaaaccatcttggtggatcagaaatcttgcttttaaaatcaatatagaatgcctttaattaaattcaatgaaaactcagttattgaattagttttaagaggtttgttccaatgcttctagagaagtagacaacagtagaatatttacattccctcctttacaataatagtntgttttattgggactatntgccttatgtntatggaacatgatgcataaatacagaccttatattttaggtgacagaaactgatttctagctatgtg

SEQ ID NO: 297302 - DNA, 453 bp, Homo Sapiens
  misc_feature (360)..(360): n is a, c, g, or t
  misc_feature (406)..(406): n is a, c, g, or t
gaggaagaaggaagttgcggcagtttagagaaatgtgcagctacaagaaagtattacatagattaggaaagttggtagactatatcacatttagtttagctccctccctgaactctacgagaacaaaagaattcttttaaaaggcaacccacacaaaaagaaagggaggtataaaacaaggttccaaaaactggaaagtaaagggaaatagacctacctaaaagggactcagcagactcggcagagctggggacaagccatcaacaggaaaagctaggaagccaccacatttataccacaaaagccccagaagccttggacagtgccaacgtgcacacgtcaagggcataaatgaagganaaggaagaggctgaaagaaaagacacagcactcaaggggttcctgngggtcatggtgcagggagagccatgacaacaccacgcagcagacaca

SEQ ID NO: 297303 - DNA, 718 bp, Homo Sapiens
  misc_feature (170)..(479): n is a, c, g, or t
  misc_feature (546)..(546): n is a, c, g, or t
  misc_feature (585)..(585): n is a, c, g, or t
  misc_feature (616)..(616): n is a, c, g, or t
  misc_feature (660)..(660): n is a, c, g, or t
catacctaatttaatggatatgaaatttttattgacaatactgtggattactttgctattcttgaaaacccacattcaaattttatttaacgattaattttagccgagggagttgtattattttccaacggaatttgaagtatgtgaccagccaatctaagtcattcagnnnnnnnnnnnnnnnnnnnnnnnnnnnnnnnnnnnnnnnnnnnnnnnnnnnnnnnnnnnnnnnnnnnnnnnnnnnnnnnnnnnnnnnnnnnnnnnnnnnnnnnnnnnnnnnnnnnnnnnnnnnnnnnnnnnnnnnnnnnnnnnnnnnnnnnnnnnnnnnnnnnnnnnnnnnnnnnnnnnnnnnnnnnnnnnnnnnnnnnnnnnnnnnnnnnnnnnnnnnnnnnnnnnnnnnnnnnnnnnnnnnnnnnnnnnnnnnnnnnnnnnnnnnnnnnnnnnnnnnnnnnnnnnnnnnnnnnnnnnnnnnnnnnnnngaaatttcaggattttttcactaattatatagactataaacctcaaagatcacgggctgatggaatntgtcagtacttcatagggagctgtgcacagaggggaatntaatgcatgcagttggtggtaatagtggtgnacctcactgttggttttatttagctggtacaaaaaacagaatcnagcatttcattgccttttgtgcaaattacagctgtgtttttctgttgaacacttaaca

SEQ ID NO: 297304 - DNA, 707 bp, Homo Sapiens
  misc_feature (468)..(526): n is a, c, g, or t
  misc_feature (633)..(641): n is a, c, g, or t
  misc_feature (666)..(666): n is a, c, g, or t
  misc_feature (670)..(670): n is a, c, g, or t
  misc_feature (693)..(693): n is a, c, g, or t
ggccctatactaccttgtatttgtaacttaaaaccatgaaggtttgatgaattttttatcttaatgtttcataagttatagtctatgactatagctagacatcttgctatccaggtatcactagcctgaacccagatagactatcacagggatgggtctcaatgaatatgaccctcgtatagttagggcatggtgcaaagaatccaggtctgctggctcggtttctttggggtccaagtaatgtcacacagagatgatctctcttccccagacagatttcactctttatcatgtcaccattgaacgaatcttggtttgttgtcctagcctaagagttcaactacttaaaacttggggaaggtcaattgaggatagaaagaagtatgaccttacataggaggtagtcagcctgaacactgatgatttttagagggtgaaaggtaaatagacgtaaagaaaacttttatnnnnnnnnnnnnnnnnnnnnnnnnnnnnnnnnnnnnnnnnnnnnnnnnnnnnnnnnnnntgaaatgtgccacaagggatgttcacagttgttttaaatggttgaaattttacgttttccatggtctgtctcagtggtatagatacagataataattgggtaagggnnnnnnnnncctctcataataaatacagagtatnttanaacaatcagaggtagagcatgtntatctatggcaatg

SEQ ID NO: 297305 - DNA, 348 bp, Homo Sapiens
tagcagacgtggaattttaccactatattaaaaaaagacagaagtgaacactcctgtgttgaaatgtgatctggacagcgggtctctctgtccttggcattgaggttcctggcaggatgtatgtcctcagcactgccctccccagctctgtgctcttactcaagagtggcagtttctgtctcccagccttgtccctccattataacgccttcccacatccacacctgctgttttgttttattaattgcagctggggaatgtagcagcttccagtctctgttggagtcaggattgatgggtagtgggaaaaagccacagtgggcttcgttccctctctctgtcaccatc

SEQ ID NO: 297306 - DNA, 649 bp, Homo Sapiens
  misc_feature (290)..(307): n is a, c, g, or t
  misc_feature (309)..(566): n is a, c, g, or t
  misc_feature (628)..(628): n is a, c, g, or t
gcagttctagttagcttcacattatttggctgcagaatacccccgccaactgccccacgaatgtgtgatgttttaaaaggagactggaactgggtgacagttgcagatagaactgcagaatcactaccagttcaggaaaaattagttaaatggtggcaataccatttaaattctcctccataaaacggagcgagtttcgacagagtctttttaagcaggctagcgtaactccgtatttcagccataaaatttatgtaggcaagtatcagaaatttggcatcttgaattcnnnnnnnnnnnnnnnnnngnnnnnnnnnnnnnnnnnnnnnnnnnnnnnnnnnnnnnnnnnnnnnnnnnnnnnnnnnnnnnnnnnnnnnnnnnnnnnnnnnnnnnnnnnnnnnnnnnnnnnnnnnnnnnnnnnnnnnnnnnnnnnnnnnnnnnnnnnnnnnnnnnnnnnnnnnnnnnnnnnnnnnnnnnnnnnnnnnnnnnnnnnnnnnnnnnnnnnnnnnnnnnnnnnnnnnnnnnnnnnnnnnnnnnnnnnnnnnnnnnnnnnnnnnnnnnnnnnntgagccagcgtgcccggcggacacccttgaattcttaaccatttgagtcttgaaagatctantttccagcatagttgtttatt

SEQ ID NO: 297307 - DNA, 485 bp, Homo Sapiens
  misc_feature (200)..(226): n is a, c, g, or t
  misc_feature (442)..(442): n is a, c, g, or t
  misc_feature (453)..(453): n is a, c, g, or t
tacataaattagttacctttgtagtttgcttataacccataagacactcaactggataaaaagctgctggctacaaataagtaaccttgtcatcacatgctaaaggtggctaataggtttgtccctactgccaactataatcaacttatttttaacatgtatagtcacattgtaattgatgtctggaaacctggtttccnnnnnnnnnnnnnnnnnnnnnnnnnnngttaacttttatttatagacacatgcatataatttaaaagtcaaatagcccaaaaagacttataatgaaaaacatattcccccaaattccatcccactccccagaggcaagtgtcttctggcatttaccttaatttttctagacaatgtgaattatccagttaggatattccttcttgactccttgtaaggtaactggattgagcactcctatatncaccactcccncagcttcactttggcaccctaatcaccccatg

SEQ ID NO: 297308 - DNA, 488 bp, Homo Sapiens
  misc_feature (314)..(322): n is a, c, g, or t
ggtctgggaatgcaggaaccaagagttttatctcctttggaaccttcttccattattgctcgcaaagcacaagtgttttggacataaataattgaatcagagagcaaaccatctaattcctcaaaattaatttaggctgagtacacaaacacatacataccagttatttcttttaagttctagggcactatattatcagtagctaaggttaacaacccttcttgttgagttgtcctaagtggtttattccatagtagttgctcccatacaatgtgggtagtcgaactgagtgatcaccagttgcttcagacagnnnnnnnnnatggcgttgagctattcacaggactgacttaaaaacaaaccaacagaagttttagctaaggaaacctcccagagtgcttttgtgcaaaatctaattttgattttagagttaataagcttggaaaatagagataaatcaattttaactcttgtctcttttatacatg

SEQ ID NO: 297309 - DNA, 302 bp, Homo Sapiens
gcagcaccctcacagacacacccaggaacaatactttgcatccttgaacccagtcaaattgacactcagtattaaccatcacaagcccacccctcgtcaacttgaacccatacacatctcctgaaatcatacttaatcttcaaataaagacaataatgaggtcataattatgtgtaacgtaatacagctattcttcatgcaaccagaagctcactaatcttaacctaaatgttattacataaagttaacatttaaatgctgataagaaatccatttatcttatatcacatgataagggaaaa

SEQ ID NO: 297310 - DNA, 370 bp, Homo Sapiens
tggcagggttttcttctttttaaaaagctaaatagtattccattgtgtatgtaccacattttaaaatgattcatccttcgcattcaggttgtttctatattctggctactgttgataatgttgcagtcaatgactatgtgagtgcagacatctcattgagatggcgattttatttactttggaaatatacacagaagtgtgattgctggatcataaaggagttgtattttcaattttttgaggactgtttatactgtattccctaatggctattccagtttaaattcctaccaacagtatataaagagccccttttctccacatcttcgccaataacagtcattctaacagctgagaggtgatatctcat

SEQ ID NO: 297311 - DNA, 430 bp, Homo Sapiens
gcacctcaagagttctgtctttgtctagaagcaacttttcattttgccaggccatatctcttccccaccccccatcccccagccaaggctctctagatcatctacctactattttctgcaggggtgggggcagtgataaggacctgatcttattttatgtgcattccaaactatccttgttctcagtctactggctcatttctgtctcctatgatcactggtacctccaatttctaacccgttttgagattctgcatggtaaactaggggagtagttctcattctgtcctctcatactccactagcattcccctctgtagatgcttaagtgtagtcatcctccactctattaagtcatttgccaatcatatagccactttgtcttcagatgttgtggtgcagaaatgtagatgggtcatttcatttcaat

SEQ ID NO: 297312 - DNA, 453 bp, Homo Sapiens
gggtttcagtgaatgcccagcaggcggctaaaccagttcattaagagagaaaaagacgggttcttaaatgctgttctcagaagcaaatgcctagaaaaacatattgtgacagcaaaaacacatcctggaactcatacactctatgaaactttggtttttgtcatcaacgaataaacaaactttccaaaaaatatttcccccttcatttaaaacaattaactaatctgtttaccatctgccagtcttcgctcccacaaaaatgtgattcttcttgttactctggaactcggaaacatttatctttaggattgtttaattttatagggtcatttttaaccacatacttaaaaaggaataattgacgtatgaaaaccctttttttccctctgctttagaaatctaaattctgacctgaaaagcaatctgcaagtagcatcctgtcaaactgagatg

SEQ ID NO: 297313 - DNA, 540 bp, Homo Sapiens
gagacaggaataagaagaatgctgtttctgccctccttagaatagtccagcagcagctattactctgatcagaatgtcatagtgatagtgctttgagtagttggtcctgtacaatttgtgttatgattttgagtaagattcttctgaatgagagaatgattgggagatagtgcttttgatctgggattaatgattctaggggcacagtaaagaaatcattgggcagtcataaattcaagaaccagatactgtaatcatcgcaactaaaaattggtttctcaccccctatctgtataccccaaaactttatttaatatgagcaaataatgctgttcctatttctgtaagacttaagtatatagataaaaatccaattattatatttattaaaagattgctccttataacatagaaaccacataaagtctaggcagcaacttaaagtcttatgtcagtattttagttgattgcattaatattttcatatggaaggatcattcatagggatcttaatgtactgactggatactctcatagctc

SEQ ID NO: 297314 - DNA, 482 bp, Homo Sapiens
  misc_feature (394)..(424): n is a, c, g, or t
taatacagtttatatatagagaaattgtcaggaaaaaaataaatgtagtcaaatagtaatatgaagccaagcaaaacaatttcttcaaagtatggtgaagtcttgaataattattaaagatgggtgacaaattaatctttgaacttctaattacatagctggtggttttcaggtaacttacacttatagcagggagcatggaaaaagagtcataacttctcctgtttgctgggaagctttataactgccactgaagggagagtcttcattagcacgtaactctctactttggtaggaccttagttgacctaagaagactattccatttaaactgttagaacaacaaagttgaaaagtattaaaagttaactagttacggtaggttgtttggggnnnnnnnnnnnnnnnnnnnnnnnnnnnnnnnggtcacaatgtcccttaacaattaacctctaaaaagtagaatggatagaaggttttta

SEQ ID NO: 297315 - DNA, 606 bp, Homo Sapiens
ggcaaggtcacccattaaagagtttaagtagcaggggaggagcagttttcaaaactgtcaagcaaaattttcaaacgatacattcaacccttcctcataaatagacctgtccaaagttgttcagaacacaacgatactgaagtcctgcaaagttcgcaaacacctgacttactaaggcagcacaggaaagacaggggcagccgcagaaggtggccctgaggcacctgaggggtctaggagtcagtccctactgttcccagagcacccaagctgggaaaactttggcggagcttgtgggttcttcccctgtgcttcaaaaggtcatcctgcctgtgcttctcacaccgcaaggtcgcatcattgggagaattctcaaaagtgacccccaggaaaatgtgggaaattgatttattttttgaccaagttgcataatacagagttatcagtatacagaaagatctgagttttaataaaacgtgtgaaatgctctgtcatgaaatttgaacaattaatctgactgggctgacacaagaataatttgctcacagagcccagtttcaatgatttataactataactgaacataattaaaacaaacggaatcag

SEQ ID NO: 297316 - DNA, 396 bp, Homo Sapiens
ggggctgctattatttaattattactaaagcatctgagaggaagctgaccacaagttaattttaaaatcatgctcttagcagcattagcagagcctcccaaagtagctgccaggtctgagtcctggagcttgcctgtttcctcttttgtcatccgagattgattttgtattggactctatcttgaattcaacaccataataattggcacaaaaagagaagtcaagtcattttatttaccaaaagcagatataaatgtttgaatggtagaaaccagagggtctcttcatgttttctctcattgtttagtctaagaaggaaagtgcagcttgaaatgaataaacgagtgttccatttttatacttcttattgtgagcaatcatcatttccttttttta

SEQ ID NO: 297317 - DNA, 630 bp, Homo Sapiens
ggtgttcggtattattattcatttgtttcttcagattttttttccgtgtgtgtccttggtagcaggcacatgctaggcactgggaattcaaagacaggtaagtcacaggccttgccctctgaggacagctcacaatctgtgatacaatgacagtgaaaaactatgtccaagggagcactgagaaaagacacaccaaaggatgtctgttttccaagtagtgtaatttcattttcctgtccctttagatgggaataattagagatatgtgtcctgtagcgataatatgaagatgaattaaatacaaagatgtagtcttaagtgagcaaaagaaatcctaggaagtactctcgagaataatgtatttgttaaactctgggtaataagaaaactactgcctgcttgtgattaaaagaaagtcattagattagagaacaagttttcccatctggtctctagaccagcatcagaatacattataccccttgggctccatctgagggtagctagatgctgatttcttgttttttcatcagattgccacactattggtatacaatttggaaaagtaaatataatgcagtatttcttatttaaatatatttagttcacattaatctgacaggacactga

SEQ ID NO: 297318 - DNA, 637 bp, Homo Sapiens
  misc_feature (365)..(383): n is a, c, g, or t
tgaaacatggcattttattcgttattcaaatggccaaataaaacaaggtgtaattagtcctgacttcctgttcttgctcacacacctgaggcccctccccgctctgctgcagctctgcatacccaggctctcaggggaagcagtggaggcagccttcttggacaacagctcacttgtctacacagtcaaaagtatgtatttgatcaaaatggttgggaggaggacaggtgttacttagagaattacctgtgtaactagaacaagaaaaggaggcagcatttgcagaatgtttgcaaatctttcaggaacttgattcaaggagtgtgtcagatgttaaatccaggcatatatgtatatggctactnnnnnnnnnnnnnnnnnnnaatagtgtaatttcacttttttaaaaaatgaagacattcacaattttagccagaatagttggtgcaaggtccataagtgctacctgctaagaatataattccttctacctctaatgtttcattatcaaattaaaagagttctctcctcagtggatacttcatttatcatagctctccttggaaagctgacctctaaacatgaacttctagaaggaacacagaataagaacaagggaaaagcattcgggaaggag

SEQ ID NO: 297319 - DNA, 474 bp, Homo Sapiens
  misc_feature (196)..(315): n is a, c, g, or t
ggtgagagacaaaccgattaattctgcataagggataagtgctgtatgtgggaagcaatccaatgagggctctgaggatggcaaaggaagggttcctggaggatttacatttaactggtgccttgaaaggtgtgtagaagttggcaagatcaaaagggagtagagtccaggtggagaagagaaaagagcagggcannnnnnnnnnnnnnnnnnnnnnnnnnnnnnnnnnnnnnnnnnnnnnnnnnnnnnnnnnnnnnnnnnnnnnnnnnnnnnnnnnnnnnnnnnnnnnnnnnnnnnnnnnnnnnnnnnnnnnnncgaaaggagcagggtatatacaaggggtctgccagccttctcagcctttctgtgagaagcgagggtagggtagtacaggagagtggcaggagatgacactaaaagtaggtctgtgttgatctaacgagtctcaactttactgccaaaactaatgaacta

SEQ ID NO: 297320 - DNA, 476 bp, Homo Sapiens
  misc_feature (77)..(408): n is a, c, g, or t
gatacgttcgggttgaggagcttactagagatccccgtggagatgcagagtaggcaggtcaataataaatgtgcatnnnnnnnnnnnnnnnnnnnnnnnnnnnnnnnnnnnnnnnnnnnnnnnnnnnnnnnnnnnnnnnnnnnnnnnnnnnnnnnnnnnnnnnnnnnnnnnnnnnnnnnnnnnnnnnnnnnnnnnnnnnnnnnnnnnnnnnnnnnnnnnnnnnnnnnnnnnnnnnnnnnnnnnnnnnnnnnnnnnnnnnnnnnnnnnnnnnnnnnnnnnnnnnnnnnnnnnnnnnnnnnnnnnnnnnnnnnnnnnnnnnnnnnnnnnnnnnnnnnnnnnnnnnnnnnnnnnnnnnnnnnnnnnnnnnnnnnnnnnnnnnnnnnnnnnnnnnnnnnnnnnnnnnnnnnngtgcagtccaggcaacaggtcagggctggaaacacaagttattctttctgtattctgtatcttcatga

SEQ ID NO: 297321 - DNA, 258 bp, Homo Sapiens
  misc_feature (149)..(198): n is a, c, g, or t
ttcagtcttaaaaaaagcttcaaattgcccatactaatttcattaaaaaaagttaccaagccatgaggttcaacatgattttggcatacattttgttcttagaagtatctggatcacaggataaaatcagaaacgttggcatgacccannnnnnnnnnnnnnnnnnnnnnnnnnnnnnnnnnnnnnnnnnnnnnnnnngctttctgatcagcagtttttggaaatggagtattgctgtggaagtagaaagggaatttt

SEQ ID NO: 297322 - DNA, 135 bp, Homo Sapiens
tataataacttcatatgggatttgacctcaatacttttctgttgcttatttctacgtaggattagttttcctgaactcttagaatgagttgggatttaagatggctttttaaactccatagactccctccctctg

SEQ ID NO: 297323 - DNA, 472 bp, Homo Sapiens
tcaaaatgtcagtggaaaaatttgctaaaatgcagttcttttatttgcagtttttttagatcataaaaatagaatgttttcagttttgtatatgtgtaaagtgaatgtgtagaattagagctttaaaaatttttgatctggaaacaacctagacatcatctagccccgggcttgtttttacagatgaggaagtgagaaattccgagaagcatagtgactagtgagtcatgtggccattgcagaacaaaagggaagaaatcttctgtctcctgtctcccagtgtagggcccctttcactgtcctatgtcatttggatgcataggttgcatttctgctacatgtttggggtttatgacactagctatactccttaaacttgttaaatgaacagccatggttttctagcctagagggaaataagttgtactcaaactctgctcttttggagatatgattttgagctgctttaacc

SEQ ID NO: 297324 - DNA, 597 bp, Homo Sapiens
ggttgggtatacttttatttttaaaaatcggtttcattgtttcttaccattttcttctttattggagtctaaaaatattgcaaagtatgtttattgtaagaagacagatgtggagatgaataaagaatgacagtagtaagttttgcttcctcttgttacagcacaccccttggttcatagttggtgtccctcctcctgtgtcttcaatgattatatagacatacagctaacaacgcagtgccattatgtagcagtttaattttcctggaaattcaagagtgatcatatctcacacagttctctccctgttgccttttccctccacttagcagtatggtaaagagcacctttcgtatggttccgagccagtacctttaaacctgattctttttgatagctggataatattttctagcatggctgtacttattcaacattgttcttatgtgtaaagattcgagttgttctctttctttcagataaagaaatctttatacatgtatctttacatactgatgcgttcatttctatacggtgtatagattataaaactagaatttgctatctcaaacatcaatgacattttaaatttttttg

SEQ ID NO: 297325 - DNA, 289 bp, Homo Sapiens
  misc_feature (128)..(249): n is a, c, g, or t
gctgtttgggcagacactgagctagctgcaggagatttttttcgtaccccagtggtgcccagaatgccatcaagacagaaccagtcactcccctggaaaggcggctgaagccagggagccgagtgttnnnnnnnnnnnnnnnnnnnnnnnnnnnnnnnnnnnnnnnnnnnnnnnnnnnnnnnnnnnnnnnnnnnnnnnnnnnnnnnnnnnnnnnnnnnnnnnnnnnnnnnnnnnnnnnnnnnnnnnnnncatttgctattactgaggcttgaagaggcagttttcccca

SEQ ID NO: 297326 - DNA, 569 bp, Homo Sapiens
gtgttttccttgattattagattattatgtcctgaagtaacttgaccaaagaataaatcctttattcttcagcaagaatcaagtctctcccatgccattgcaccttttctcctacagacacaaattcttagataacaaggtcatggaatcataagaagtggctggaaccttggaaaggaaccctcgaatcttcctctatcatcccccactactcctttatcaaccctttggctgtgtctagactgaattcataatatttcccagaatgtgcttttggctactagcaaattttggcatttcatatctttatgaaatcttttacatacaaagcctatgaaatatgcaagagtttatatctaaagtatctgttcggtgggagttggcgtgtcattgaatctcaggtgttaaaatacgtttttatatactccatgttggaatgatacaaagtttgttaactgagggaatgagttaaaatatgtaaattgaaatgttgcaaatatgctcataattgtaaaatttctttttgttatgattattaagcaggtggcagattgaaggataatattctg

SEQ ID NO: 297327 - DNA, 560 bp, Homo Sapiens
gtgcttggcatacattaaagctggccttttcagagttgaggaaattgaggcttttgacgactgagacgaaatgattttttttccctgtgtcaggcagagagagaaagagaatgagaatggtcaccaccttaccaggtatttgagaacaaggtggaccaggaaagactgttttcagaaagctctgcaaatcttttattcccgttttgaaatactttttctccaatatgatgcgacactttttattacgtagtaatgatacagctctttaggggcatctgtcctggtcccttgaagtccccttgaggctctttctgccattcccaagttcctaatttagagctctgtaattaccagtattcaaatgggttttgtaaaagaattattttgctgttgatgtcttagcaggtttctaaagtctcccctcttaggactttggaaagaaccaaatcaaagttaacccctgctttcccaggcctgctggaggcatcactgtggtgggcctcagtgctgtgtgatggtgatcacactgtgatttcctgtggatggggcggtaggaagtt

SEQ ID NO: 297328 - DNA, 548 bp, Homo Sapiens
gtcttctatgaacttcttaagttaaggaaagacctcatacttcattctccccttccaaattccaagcaaagtcaagaatccatctcaattcttatttattggaataattctgagcaaaactcaaaaaggtagggacacagacaagtcacccctatactcaggcagctgacagtccagcaggaggaacaaagtagcctgtcaactctctccagcgtgacatgtgccatgagaggtctgagaaacaggtcatgtccaagtataggtacagtgaagagatcaggaaaggtttcttgaagaaggcaacattccagacgacttaaagatggggcatcacagttgggacaggtatgactccaggaattcagagtctgaaatcaagtctacccaaaaccaaaggatctgtaacgtgaagagcaagacatcatatgttggttagtgacatctgtgatggaggctttaagtgaatacaggaggagcatgcctatttaaaaagaaagctttaaacattaactacaagggaaaacagagtttatgaaaaaaactttgct

SEQ ID NO: 297329 - DNA, 692 bp, Homo Sapiens
cgggatagttttttatgtctaaatctccttcagtacagctcttgttattttttgccttctgctagcttaggggtttgtttccccttgcttctctccttattttattcataatgttaggttgttaaattgagatctttttaactttttatgggggcatttagtgctataaatttttctgttagcactgcattagctgtgttgcagagattctgatatgctgtactttgtcctcatttgtttcaaagagctttttgattttgccttaatattattatatacccaaaagttattcaggtacaggttgtttaatttccatgtacttgtatggttttaagtggttttccttgtattgaattatattttaatcaatctgtggtctgagtatgtggttggtataattttgggatgtttgaaattgctgaggattgttttattttggattgcgtggtcaattttagagtatgtgccacatggtgctgagaagaatatatattatgttgtttttagatggagagttctgtacatttctagtagggctatttggttaagtattgagtttagttcttttttaatttgctgcctcaataatgtgtctaatagtgtctgtggggtgttgtagtctcccactattgtatcagaatctaagtctcttcatgaatctctaagaacttgccttattcatgtgcacctgt

SEQ ID NO: 297330 - DNA, 669 bp, Homo Sapiens
  misc_feature (564)..(564): n is a, c, g, or t
  misc_feature (626)..(626): n is a, c, g, or t
  misc_feature (638)..(638): n is a, c, g, or t
  misc_feature (654)..(654): n is a, c, g, or t
gtcctttaaatatgtcacgctactctttcctggcttgtaatgtttccactgaaaagtctgttgccagacatgttggagctctgttgtctgttgtttcttttctcttactgcttttggaattctttatcattgattttttgggaatttgattaactcgcaaaaggtagctttggaggtagtcttccttgggttaaatttgcttggtgttctataaccttcttgtacttgaatgtttatctttctctaggtttgggacattttgttatccctttgaataaacttttctactcctatctctttctctacctcttctttaaagccagtaactcttagtattggccctttcgaggctattttctagatattgtaggtgtgcttcattgttctttatttttcttttgtctcctctgactgtattttcaataagcctgtcttcaagcttagtgattttcttctgcttgatcagttctgctatttaagagactgatgcattcagcagtatgtcagttgcatttttcaaatgtagaatttctgcttgattcttttaaattatttcagtctgtntaatttatctgatagaattctgaattccttctttgttatcttggatttcttcgtgtttcctncaaacagctgtnttgaattctgtctganaggtcacatatctct

SEQ ID NO: 297331 - DNA, 597 bp, Homo Sapiens
gatcatctttgaagactgttggtcttaaaaatgccacagattattccaaataattaagaatctctgttttctttgtactttatagctacgtaagacaggggcttgttttaaattttcttggtcagctcctaacttacttcatatgtctgtttttcaaagagttacttggtaaaggaatttgctattgatttttttctacaaccatttgcttcaggccatccttaccctctgttctctgccttctcctgttttcatctaccctgtttctgtccttgataaggacagtgggaaagggaaaagagaaaaagcatgagggattactccttccttccctttgttatggtagttgttactgctctcctccctgccatcgctgctcccagctgttcactttggcatggtctcctaccctgtatcttgagttctgtgtgtgagaatagaaatgcaaggcatggctctttagctgaggaacgatgggcatctcagggttttggtccttctgtgatctctcttttggtgcctggtattgaaaagcccagtgacatcttgtatctgagcaagtgttttctgctccccagcattctacttctctctctc

SEQ ID NO: 297332 - DNA, 431 bp, Homo Sapiens
  misc_feature (197)..(197): n is a, c, g, or t
tcatgggtactaggaagaattgacaaaagtgtttatatgattaagaactgtaggagttttggtggaagcctattaaactgtaactcagtgtttttggcttgtcttgccagttgtgaagaggtgaggagtagtgcaggctagtttcctagtggcctcattcgagctgcctctgctattagaatggtaggtgtgtcccnagggagagcagtcaactacttagaatgttggtggtaatggccttcatttgtgaggtgatgaggttagagatgatgaagctttggccagaaagatcagaatggcagaccaagtaaatgggccacccatgtgaaagattctgggggatagctagatcccattttagcctcgataaagaacagacaagattcttaaatgaaaagtataagtgaaaacttgcagttaagatgttattt

SEQ ID NO: 297333 - DNA, 568 bp, Homo Sapiens
  misc_feature (59)..(231): n is a, c, g, or t
  misc_feature (522)..(522): n is a, c, g, or t
  misc_feature (546)..(546): n is a, c, g, or t
ataaaatgaaagttaaataatggtgaattttgttattcactactcttgtatgggcattnnnnnnnnnnnnnnnnnnnnnnnnnnnnnnnnnnnnnnnnnnnnnnnnnnnnnnnnnnnnnnnnnnnnnnnnnnnnnnnnnnnnnnnnnnnnnnnnnnnnnnnnnnnnnnnnnnnnnnnnnnnnnnnnnnnnnnnnnnnnnnnnnnnnnnnnnnnnnnnnnnnnnnnnnnnnngccagatatttatatttaacttagttttttttaattggagaagagatttttatatgtttttgtatgatgtatacgtgttataacttttttaaaattcagatccattaaactgtttccatttcattttataaacaccaagttcttaccccatggtaaaatcaggagccctggaaatttcaggtgaattttatttgtagtaatatacctttatgtgatctaagaaccaaagaaacaagacgtggtgttcaggttttgctttgccaatacctccatgggcttctaaaaaatgtntagtataaagcttttgtatagaanagatggagtagctctttgccct

SEQ ID NO: 297334 - DNA, 765 bp, Homo Sapiens
  misc_feature (683)..(683): n is a, c, g, or t
aagaaacattttaaaatatatgataaaatgcatatcatccaaatatcaatctatattgtgtattctgatacactgtgtgtcacactgtcttagcctcatactactcaccatatactaatgagggggttagtcatatgggctttgggcataaaatttgggtgggtggctaagggaccttcatcaacctagcaggagagcaaagtgatcatgttaagacatctcttctgaagtagctcattgacactcttccctcaccttggtggccgctgcgtgcctgattgctaagtgcaccaccgtaacaataacagtctataatggtgatattattaactgcatcgtgcatattattgatttactctttgttctgcatcattatcctttcaccaacgagtttactgcattattctcacatacttagtcaagcaccaaattacaacgaaagggcaggctcttataatggcatctaatggaacattgcataagccatcatcactgcctcctattatgagccacctccagccaatgagctttctgccttagtggaatgtgcacagagcaattatgaagtgcaagggacatggccattctaaattttacccaggaaattaccatgctgcatgttcaccacctgcccaagtctcagagcgcagctagagactcagatgctgtcactatgagcctgnggggcacagggacaggagttgagcctcttgctacatacagtctcttcactagaagccagtggttttatctccacagtcagtc

SEQ ID NO: 297335 - DNA, 414 bp, Homo Sapiens
gtcttagtctgtttttgctgctataacaaaataccaaaaactgggcaatttagaaagaacagaaatttatttcttccagttctggaggccaggaagtctaggatcaaggtgctagcagattcagtgtctgatgtggactgctttgtccttccaagataatgcttcttgctgcatcctcatatggtagaagggcgtaaaagggatgaatgctgtgcctcacatggcagaagagaaggaagggcaaaaaaaggcaagtgctgggaggactctttgatacgtacctaaattgcattcacaaggggaggagcccttatgactttatcaccccttaatggccccacctcttaatactattgcattggagattaagtttcaacatgaatattttggggacacaaacattcaaactgtggc

SEQ ID NO: 297336 - DNA, 382 bp, Homo Sapiens
  misc_feature (319)..(319): n is a, c, g, or t
cggggagcatgtatttgttaatcaagaaaaacacagatactaagctttttctattccctttaaaaaatattagtagattctatctcataaggttttgtttcttatttttttacaacgtgtgctgtgatgagcctattttacaagttagatccttgtccctaatttaatggtgatgtagaaaggcaaaaagattgataatggtgtttgaaaaatcagcattcacaggtcatattgtatgcttcaattataaggaaaatataaaccttatagaaaaagttgttctaaatttcctgattgagtttttacctaaatcactcanttttttcttatatgtttatatggataatgaaataaagcagcaatggacacagatctccctctg

SEQ ID NO: 297337 - DNA, 404 bp, Homo Sapiens
  misc_feature (279)..(279): n is a, c, g, or t
cagcaaaacctttgccatcatcctctcacatagctagggcctctgcacgtatgataacaagacagctaccttagacttatgtcatgccatccaacttacaaagtgctctctcaaccttgcaccagaggaaaccaaagctccaggaagtgacttggctaatgtcaccggttggactgtagcacgatcaggacctgacccctggtacattgacacctgacccagtgttttcatcgggcactttttaccttacaggttgctaaggattaatgatgggatgtnttgattcttagtctataagtggatcctctcccaggaggctccaggtctccggatgccaggcactcatgttttatttgggtgttgcagctgtgtttcattgtagtaacatattccaaatgctatga

SEQ ID NO: 297338 - DNA, 702 bp, Homo Sapiens
  misc_feature (16)..(16): n is a, c, g, or t
  misc_feature (47)..(47): n is a, c, g, or t
  misc_feature (178)..(376): n is a, c, g, or t
ccgggggaagagaccntggtggcacttgtcatggtgagacagtggcntctcttctgagggagctccacagccaccatggatttaggtggacaaacagtggtatcctggtctgtggctagcatgggccccagagctgtgtgtgatgcatgtgttcctgatagcacaggggttctcagtnnnnnnnnnnnnnnnnnnnnnnnnnnnnnnnnnnnnnnnnnnnnnnnnnnnnnnnnnnnnnnnnnnnnnnnnnnnnnnnnnnnnnnnnnnnnnnnnnnnnnnnnnnnnnnnnnnnnnnnnnnnnnnnnnnnnnnnnnnnnnnnnnnnnnnnnnnnnnnnnnnnnnnnnnnnnnnnnnnnnnnnnnnnnnnnnnnnnnnnactgaggccaaggaaaggaacggcagcagggcaagccaggcccaaggagggctctaagaactccctgatgctgagtctggagaccttggcccacggtgctcagcagtctgttgccagggaggtaggagagaggggcagcaggcacactgggttgacaactgcactgtgttgaccccatggcgggcatcaggggaccacaggctgtggttgcgcctgtccgttctccctcccttttctcgtaggcttcttcctcctccagtgcaagagctggatccaggattggagaatttgctcttgcccacctctccatgtcctcgttgccgact

SEQ ID NO: 297339 - DNA, 692 bp, Homo Sapiens
  misc_feature (642)..(642): n is a, c, g, or t
  misc_feature (653)..(653): n is a, c, g, or t
  misc_feature (661)..(661): n is a, c, g, or t
gtcagcatcctttcagtatttcactttcttgagctcaaaagatagggtaagtctatccaaggggatataggcataacccagaggttaggagcaacagataattaactactattgctctaaggcaaagaatctgagaagcggaatgagggaatccaataataagctaaaggtacttaattcagcagagtcaagggaaggcagcttcatgtctgtgcacctgcctgttaaaaagaggtcaagtgcatgagttggatgttacttttatatgcagcttaggaagttagctactgtgaagctctcaatttttattcataaacttgactgttaatgtgaattcagtaagagcttttgtgattttctttattttatcaaggggcaagaacatatttcctgcaactcacaaaatgccgttttaactttaggttttctttatgatgaatgcagaccatacttatctcagacagctgcaacataaagttttaaaagactgcttaacattttgtatatatttagtgtaaatcactcattttgtctctggggtacaaaatctcacttctatttttaagtatcatattttagctatgagatgagcacagtaatctttgcagagtaccataataggaatacagaagtccgtggaantcaagttaatnttcttcgnggttgtctaatggatcagtttatttcagtgc

SEQ ID NO: 297340 - DNA, 681 bp, Homo Sapiens
  misc_feature (568)..(568): n is a, c, g, or t
tcccttccaaatttatttgttttggacttgcttgtctatcttaagttttgtcagaaatctgatttgagattgtgcaatgtgaggtctacttgttgaatacatttaaaaatatatggtatatatttgtatcagagaatgaagacttgtcactatttttttctgagttatattggtagaataattcattttgtgattttgctgtagttctgttttgattattacccttttgagatgttgttacctgttaagaatgctgaatgccgttctttaaaattagacttgacctgagttgatagcaaaattagatttaaattatattgtctaataagatttcaggccagacttttttttgttcttcagaaggttagaataatgcaaaatatggtaggaatttagtggaagtaagagtgaattacagagagaattccatgtgtatctatagatctgctaagaacagttttacttggtaaagatactgcccttcttcattcactgtggactctgctgttctttaactcacagataaagtaaaatctgtaattacagaagcagtaatatgcagtatgtntttatgagtattgggagtcaggtacatctgactttggaaaatcaagtagtttcctgtaacatttacaaatcaaaatggcaaatatccatctatctgtggatatgtgggtagct

SEQ ID NO: 297341 - DNA, 575 bp, Homo Sapiens
  misc_feature (127)..(158): n is a, c, g, or t
gaagtttccttttttacctgtaccagtttcagattagtttaaaaatattagttattttttcatcttgattcattttagcatttgccatattgaaagtattgcatttgtgggttcatagaaagtcatnnnnnnnnnnnnnnnnnnnnnnnnnnnnnnnngacttttttatgctgaagtataaatgctatacacagaagaaaattatctttatgagccaagctctccactagtgttttcactttcctttcatttaatttttgtgtcaaatctgtaatattgtgttttcagttcataggtaaggaaacgaaagccttaatagggtaaatgacttgctcagggtctcataaacagcagggatttgaacttaagtttttggactctaagccagtattattgaagatacattgaagaaatataacccttctgtgatgagctaaagagataatattccatttagcttttgaaaggaaatgatctaacggaaactcacaagagctatggaaacattttttaagctaaggctgaaggctttaagtttgaaatggattcttatcaaagagacgtaccctttcgtt

SEQ ID NO: 297342 - DNA, 750 bp, Homo Sapiens
  misc_feature (600)..(622): n is a, c, g, or t
  misc_feature (629)..(629): n is a, c, g, or t
  misc_feature (682)..(682): n is a, c, g, or t
  misc_feature (698)..(698): n is a, c, g, or t
  misc_feature (733)..(733): n is a, c, g, or t
gttcatgagtagcacttaattcccttcaagcacttcccctttgctttcacaacctggctgtttggcccaaaaagcctaccttttggcctgtcttctctttcgacatgccttcttcactgagcttaattttttctggcttttgatttaaaataagaaatgtgcaattcttcctttcacttgaacacttagtggccattgcagggttattaattggcctaatttcagtattgttgtgtcttagggaatagggaggccaaggagaagggagagagatgggggaacggccagtaagtagagcagtgagaacatacacatttatggattgcttgccatcttatatgggcgtagttcatggagccccaaaataattttgatagtaacatcaaagatcactgattacaggttatcatagcagatgtaataataaagaaaaagtttaaagtactgtgagagttaccaaaatgtgaaaccgagacatgaagcgagcacatgctgttggaaaaatggcactaatatacttgcatgacgcagggttgccacaaaccttcaatttgtaaaaaatgcaatatctgtgaagcaaagtgcaataaaatgaggtannnnnnnnnnnnnnnnnnnnnnnatactanaatatatgcagttgactcttgaacaacagagtaaggcattccacatggtaganacatcccacatagaanattcacctaaaacttttcattccctaaaaacgttnagtactaatagcatacg

SEQ ID NO: 297343 - DNA, 532 bp, Homo Sapiens
  misc_feature (460)..(460): n is a, c, g, or t
gagtcccagaagaaagaggagagacttgctgaagatctggatgggacaatagaagtttggggcacattaaaaagaagcagcaagaacatcaacaaaaacctcagatgattcaaacaggcttcttcttggctttgtggaaccttttgcagttgctcagaatttgagtttttgcttcagaggatgatgagacaaggcaatagagggtgaggaggatcatgttggattcttgcttctctgtctgcctctccttccagttggaaaaatcttcagtccataagaagcattatcaacaagcctgaagaacacatcttaccctgatcctggatgctgttggagttgagaattacatccacttcaccaggactttatggaggctgttcaagaaaaatagaaggaagcaatacttaaggatttctctgtttgcattagtcctgtgccatgttacattttggagattgtntggaacaagtgagggagggctctgtcatcttgatctaggaggatacctgagtcccttgactacacagatgat

SEQ ID NO: 297344 - DNA, 609 bp, Homo Sapiens
  misc_feature (512)..(512): n is a, c, g, or t
cacccagattaccacttgctcaccacgactaccactctctcactcccatgtctccatcattaagggtctttagtcaaagggaagacacagggtcttgaggactgaggaaaggaggacctaacagaagagaccagagctcctggtcttaacatccccagtcctgttatatgcatgtttcaacacaaacttccaaacacgcccatgggtgagcagaatagaacagcacgaactgtatgcaagactatttatcactgcgtaactaggacatgcctctccactactcacaaatcatgttgcccaactttttcaaaacccttttggctctcactttaattctcatgtttaatctcttgaggtactgatacctgaaaacagatgtcattaatttcccttataatcttgacctccctattgttactgaaagtactaccattcttagggaggcgtaggtgatgcattcctctctctacattctatgtgtcaaggccagaagaactctagagtacctcctnggactgatcttccatttaggactacaaaacccaccagctatcttgtccttgtcaatccatcctgcagaacagaagctatgcttcaagatcttctgat

SEQ ID NO: 297345 - DNA, 695 bp, Homo Sapiens
  misc_feature (580)..(626): n is a, c, g, or t
gttgtgaacagaattgttttcttaatttcattgcatattattcattgcaactatatagaaatacagttgatttttatatatcaatcttatatcctgcaatcttgctgaacttgtttattagttctagtcatttttttatagattcctaagatcatgttgtctgggaatagagatagttttactttttcctttctaactgccgtggctggaacctctggtacaatgatgaatataagttgcatgaacaaaccttcttttttttgttcctaaacttaagggaaaaggttttagtcattcactgctaagattgatgttacctgtcagctttttgtagatgccctctatcagactgaagaggttcctttcaattactagtttgttttgtgtttttattatgcaaacattttaggttttatcacgtgctttttatgcatctcttggggtggttatgcaggttttctcccttccttcagtgtaactgaaaattacacttgactttcagttgttaaactaacttattcttgggataaatctcacttgtatatggtatataatttttttaatgtgttgccaggttccnnnnnnnnnnnnnnnnnnnnnnnnnnnnnnnnnnnnnnnnnnnnnnncatctatattgggtctgtagtttattttcttgtgatgttttatccttgttatcggtaatactggccaca

SEQ ID NO: 297346 - DNA, 579 bp, Homo Sapiens
  misc_feature (80)..(93): n is a, c, g, or t
  misc_feature (502)..(502): n is a, c, g, or t
tcacagtataattttgccttaatgactatagttactgcaactacagtgatatatcaacaatgaggtcttgcctcttatannnnnnnnnnnnnncatgttttaagcagtctggaccgaaaagaaaggtaagcttaatgttgaagaaattagagcatggatatagtggtaaaatataaaattatttatatgttttgaaaaatattggttgaattagagtttataattaaagctttttttaattttaaagttttagttgacatgtaataattgtacatatttataggatacagagtaatatatcaatacaggtatacaatgtgtatgatcagatcagggtaattagtatatccatcacctcaaacattttttgttcctttgtgttgtcagcattcaaagtccctttttctggctttttgaaaacaaaaaataaattatagttaaccatattcaccctatagtgccacagaaagtgagaactcattcttcctgtctagctgtaatnttgtatttgtgaacccacctcctccatcctctccctccccctaccttccagcctacagtatccacagttctactctc

SEQ ID NO: 297347 - DNA, 665 bp, Homo Sapiens
  misc_feature (37)..(37): n is a, c, g, or t
  misc_feature (376)..(501): n is a, c, g, or t
  misc_feature (609)..(609): n is a, c, g, or t
ggacttctaagctgttagtgtaactttctaaaccccntttataaactaccttaccaaatatgatagtcagtgacaccaaaaatcaggtaccccatcataaagaatgttatcctgttatccttttcttcatattccctctcattcctgcctcattctgttctctagaattataaaaatgctcaactatatcacattgatatgaaactctggtttttataatattattttgaaggctcttttcacgtaggcagataaatgaggctgccttattccttacaagtaggaatttccatatcatagagaaggacatgcattttggagacaaatggtacaaatcctggatctttttacttcgtgatatgaggcacatttccannnnnnnnnnnnnnnnnnnnnnnnnnnnnnnnnnnnnnnnnnnnnnnnnnnnnnnnnnnnnnnnnnnnnnnnnnnnnnnnnnnnnnnnnnnnnnnnnnnnnnnnnnnnnnnnnnnnnnnnnnnnnncagcagtcatgtactactgtgatcatttatcttttttacagaggaagaacctgagggccaaagactgtaagttatcttgcccagcgttgcaatgggattggacctganatgaacatgatgtgtctagtattcctcctttcctgactcaggaccttcctacacat

SEQ ID NO: 297348 - DNA, 715 bp, Homo Sapiens
  misc_feature (659)..(659): n is a, c, g, or t
  misc_feature (704)..(704): n is a, c, g, or t
ggagtctgggtggaaatgatgccttcgcagagctgagagcacaaaatgaagttggtgattcatgggcagcagccacttgaaaatatgaacactcctgcgtccccagccccgccggcctttcacacccatttggaggcgtgttgagcagagctgctagcctgctgcatcctagtctgcatgtgtttgggcaggatgtgaggacaggccggttctaccctgacaaggagcctgcaaagggcagcagcacacctgggagcactccaagaacgtctgcccaccccccgagaggcctcggctggaacccagggcagggctgagtaagaggtgaagtggcacagtaacgcattccaggaggacatcgctgagggccccaattgtgaggacattgcccatcaatcttggagcctccacaccaagctgggattctctctcttctggacttcatagccttctgagaccgcactggggagaacagtaagagagctttgtaaggccactctggctcctcacccaccttttctgggctcactcttctgaagccatagctgacctaagcgacccacctgggcttttaaggtgggctacattcccccaggcccaggaactacaaatgggagggcaggagtgctatatgccgcagccagaggcgtctgtgctcncaaaagtcttctgagtgggcttctcagcagtggatgggaacgtanggcagtcttct

SEQ ID NO: 297349 - DNA, 728 bp, Homo Sapiens
  misc_feature (22)..(22): n is a, c, g, or t
  misc_feature (716)..(716): n is a, c, g, or t
atttcagaagagaaatactctnctcttttcagaagagaataactatcttccctttacttagcttcatggctggtgctaaatgaaccagggaggagagagatctgctgaatcatggcattgaatttgatgttctaagcattataatttctgatgaatagtctcaagaggcttctgcaaaatgatacattctgacatccagtgaccttttaaactaatatttctattatataattcagttgcttctgtttcctgaaagtaataacattagtttgtactgaggtagataatgattttgttagcaatttcctttgtggtaagtgtttttacagtaatttagtttgaaggaagaatcgtttgtacaaataaaatccagaggagctcacttgtagtgtactgggatcaagaaaaaaggtagttattgactcctgggacaatattcttgagactcaggataaatagttgtattgacagaatttatttttggtgaagcttgtttccaactgcaaatcttaagcatgtgcacatgcatgcaatattggggcaaagggacaagaatgtggaattcctgctaattctttctattgctagttctttctcattaatggataaagattacaaacctagatttctttattcacaagacaataatacctcacagagtatatagtaagtgttagtgaaatgataatcagaggcatatactacagtgtctggcntaatgatgctag

SEQ ID NO: 297350 - DNA, 638 bp, Homo Sapiens
  misc_feature (489)..(489): n is a, c, g, or t
  misc_feature (492)..(500): n is a, c, g, or t
ggatatcaatcaaatagtgcctaccaggggagtaaacagacaacttttaggtttttagtttttgcttttgtgtggagttgagtccaatttttaaggcaactattgttgacctttctctaggcggtagcatttaggatgggaaaaaataatatgagttatgtgcgaaaagcagttttcaggctatcatttagggccacagatatgcttatttaggactattttcagggtaggagccagttaaagtttgtatatcagtcacacattgatatgtagcagctctatcaataccacaacaaccttattaccatagtaattcaggggtctcaagtaatccaggagtctcaaactgaaatgtcaacaagagccaagtaaatattttagaaatagagtaccctggagtagatgggctctgagaggagcctgtgaaatccagacttcatgtgaattctcttaattaaatgtgggccaaagaaaacccggccatgggcnagnnnnnnnnncccagcttctactagtcttggcttgcaacaatgccactgtccatctggcattacctagaccggtgatacttaaacttgactgcgaattggaatcactgagaagctttaaaaaatattagtgcctgagtgttactttat

SEQ ID NO: 297351 - DNA, 542 bp, Homo Sapiens
  misc_feature (157)..(459): n is a, c, g, or t
  misc_feature (498)..(498): n is a, c, g, or t
cccagattagtagtcaatcttcaaaacatattttgagcatatattttgtcatgaagtgtttaaaactacgccactgagtaaaattggtgttttgggaatacatattgttgctatgtaatctcacggttttcatcaatactgttttggggaatcatcnnnnnnnnnnnnnnnnnnnnnnnnnnnnnnnnnnnnnnnnnnnnnnnnnnnnnnnnnnnnnnnnnnnnnnnnnnnnnnnnnnnnnnnnnnnnnnnnnnnnnnnnnnnnnnnnnnnnnnnnnnnnnnnnnnnnnnnnnnnnnnnnnnnnnnnnnnnnnnnnnnnnnnnnnnnnnnnnnnnnnnnnnnnnnnnnnnnnnnnnnnnnnnnnnnnnnnnnnnnnnnnnnnnnnnnnnnnnnnnnnnnnnnnnnnnnnnnnnnnnnnnnnnnnnnnnnnnnnnnnnnnnnnnnnnnnnnnnnnnnnnncaataataagttagttgctattgtcaaggtatggtgagngggggaaaagaagggacctaccaacctaaatgatcaatgggggt

SEQ ID NO: 297352 - DNA, 411 bp, Homo Sapiens
aattctatatttttttctcaaagtaaaaacttgcaatgttgtatttactttatgacttgatatagttttgtttgcaaatttaagatctagaagatatgaaatgtattctacttcatagcatcacataattatgaaaaatcaaattccatatattctcaatcaccactattaatcttaatgacaaactccacataaagtaaatctctcaaaatagaatagccatgccctttaacccttggaaatcacagcagtttactcgactgcaaatagagagctactgcaactaggaactggccaagtttattaaaatgtctaacatatcctaaattacaagacataattcctatttactttacctcctttgctaccaagcttgcatcttagcgtgatttctttctcatgaacttaaat

SEQ ID NO: 297353 - DNA, 453 bp, Homo Sapiens
attctccagaccagtaaacaatgtttttggttgttattctctattaatgttaattaaggttatttgcctaaaaaggaagttttcttttccaatatggtcaagtggatgcaaagccagtactaatatggtcattctggccaattataactgggaaacttaaatattacaccttggatgtacaggatgtacaggcattattggtatgtaacaactgacggtagatagttaagtatataatgtctggattataatgtctctcatctccatatttataaaaggtttagaaaggaaaacactgttaagaagccatgttataagaggcagactttgatttaaaaaattgaaaggctgaacttctggtttaaagaaggaacagcgaatttttcttttctttattggcatagcgattctgacattgttttattacgtttctggtaaattcacattcatgac

SEQ ID NO: 297354 - DNA, 389 bp, Homo Sapiens
ggtcaggaaccatggtagaccattacgaggtcacctggcctgaccattgagctttgcctgctcccaactgacccctcactgatggctcagggagagttgatgagggggagaggcagctttatagggcagggtctctgggggaggactgcttgctgccctgcacttggctatgtggcagatgctggccttgatgggagtccacagaaaatggggcctcactgactgcttgtccaggtatctcagtgggagggaatgggagtgggaaatggagtactcaaggccacaagacaggccgccatagaactttggccttggggaatgaaccaaagctagtttggagagtagggtgattggggtgatcacttttccctttaaaggtggcatgctgc

SEQ ID NO: 297355 - DNA, 451 bp, Homo Sapiens
gtaatatatggatacattactttttaagtgagattttaaagctaaattgataaagtagagatctagtgataattagatgttcatacaagatttgaaaaatacagacattcttagtcacacaaaaataccaaaaagcattgtgataattcactttttcttattctaatttgtaacagcattttaatatggtcagtagaatggcttcagcatatttacaatcttaaagtttttaactagaaaacagtttgatgtatagatctgttactcagcaacattttagatttaaaacttaatttaattttatagctaatttaattttatagcaaatttaattgtatagcatgtaaggcagtttacatttgatttaataaaattaacacttaggcttttatgatagctttctaactcaggtatcagtgattttcagaatgcagagattttcaaactgaaa

SEQ ID NO: 297356 - DNA, 465 bp, Homo Sapiens
catatgaaattcaaatagcatcttacaaatttcaatgtatatttcctagaagtaattcaaggtaccctcaatatatgctgtcaggtagagtataaaggggtgtaatgatcaatgcagcaacttcatgacagacatgagctgaaatgggttgtagaatgttctttctgaagacccataattagatttctagcttgttgttcaataaaatagttcaggtaccctaagtgaagtacatgacctctcaaacaagaaaactgtctcattctgcaaggccagttgcttgcttttcacagtgacacccatcaccttactgaatcctttaagaatgaagttcttcttgtccagtaacactgcagctggaaacaaggcagacgctggaaagcactagaactgtgcacaatgttgacagtgtaatctgaaactactcagcagttcctagtatcaggttcacacataatttgaacc

SEQ ID NO: 297357 - DNA, 397 bp, Homo Sapiens
gtttgtgacctgagtgcaaggacaggcttgcttcacctcatggatcattaattacaatatatctaatttaaatattactagtattatggtattaaggagacaatctgaggcattcctaccagtcagtttgatacacgattggcaaggttcctttgctcttgccaccttagagcatgccctgtcccaggtcagacaccaaagattcatagttaatcttacagcctttatagtctcagccatagtcatcctagcaactgctagttttgctgtagcatctattactgaatcagtacaaatagctgcttttgtagataacttggccagaaatgtgtctaatgaacttctcttacagcagggtacaaatcaaaaggttcttgcacatctgcaagccctcgag

SEQ ID NO: 297358 - DNA, 539 bp, Homo Sapiens
ggagacagaagtaaataggactgttacttttgtatttctcttgctgtagaccagtgaaagccaactctttcagcctttcccacagatcacttagaaacttttcagcatttttattttcggtcattctctgttggtcaattttcatttctctatttaagcacagaggatttttgccacagcagtacccaaaacttaaaaatcaccttcaattgcagctttgccagtgcttctataaaacaggtctgtctaagctgacagaattaaaattattagtgacgttcacatttaaccagtccttgcaggaataaaccttttggaaggtgcaaggaatttgtaaatggttttcattatcagtacagagcactctgtttccatatatctatttatatggtgtctcccacagatgtgcttacctaggtgttttgacaagtgtgttatttgagccagccttcttctgaggtcagtggaaagagctcagaatgggagggggttgactgctcaggatgccagaggctgagggaggatagaagataacagag

SEQ ID NO: 297359 - DNA, 510 bp, Homo Sapiens
cagctatacattgttaagctgtagggtgatggttacagtgtccaatgtggcattattaggttaatttatagctacttacggcaatagcaggcagtttcaagagatgagcacatagctcaaagtggggagtaggctgtgactgctgtctcattttaatacctctctgggcctgatattaaaagggtttgcattcttcagataataaatagttcctttttttcccatttcacattgtttcaaatttcttgttaaagatgaactttttataggtaaatatttaggtgtttctgatgatactattcagccatatcctgaagttgtaatcaccaaaagatatgaaccattaaaataaactttttgtaattataaatgcagtacattttcgttatggatgttttgggaaataaattttaaaaactaagaagaaaataaaaattacctcagattgttttccaaagagacccaacatcccttctatccacatttttgtagtttgcttcttactggggt

SEQ ID NO: 297360 - DNA, 427 bp, Homo Sapiens
tgggctattctgggcattttgtactctattttggatgtaacttttcttgctcttgatttctgattagctgttcttcctccttgctttggcctctcaacttgcttggaagcttttcaacaaatctgcacttggatgacggctttgttcaacaaataaacattatctcaaccttggggaagagttaagaagacacaggatggaacactgttagatgcttctggttctaagcatggaattcctggaacagggaagctagcttccaatacattgaagtccggaagttgttttcctgctcaaggaggtcacatttctaccaagagaaatgtgaattctaaggcattttcaaaagttttggatgatttggtgagatttaaattgtcttatttttgataaatttttagaaattaaagaatgcattatttgctta

SEQ ID NO: 297361 - DNA, 196 bp, Homo Sapiens
gtccaaactaattatagattagggccaaagaaatgaaattcgaggaggttttcagctaatgaaatccatactgattttattgtaaatgcgttttatgtaaagagggtgatggttgagttctgagtgaataaatcgctatgtagctgctaggcacttggttttgaagcacaattctgctgcattaacctttgatatt

SEQ ID NO: 297362 - DNA, 560 bp, Homo Sapiens
atagcaaacaggagccgcagacacatgccaaatattgtctcttggcctttaagctccttaggtatagtcgcagcccaacttatctttatgtagatgatcagagggaacaacagtaagttcaaaaggactagatacttaaataggttcaattctgtcgcactatttcatgctactgttagaaggcatctataattttgcgctaaagttgtatgatacagagtacctacctctaccctcaggttatgtggtgttccaaacttgactgtcctctcagcttcatatttcatgtcactatagttcagtaaacattcattttacagtgaatccagacttaacaagattaggacaactttagaagtgctccaggcatctgccccaaaaagagagatatgctatggagaaccatggttgtcatgggaaccacatgtccagttcaacagagctgtaggtgaggtattatgtttaagagaccaggaagtaactcagatgactacaggtgctcccagtctcctcttcctctgtaatgactgggacttttgggattaaataacaggagaatt

SEQ ID NO: 297363 - DNA, 426 bp, Homo Sapiens
tcttctacatgtggcttgccagttttcccagcaccgtttattgaataggtatcctttccccaatttatgtttttgtatgctttgctgaagatcaattggttttaagtatttgactttatttcttgaccctctattctgtttcattggtctatgtgcctatttttataccagtaccttgctgttttggtaactatagccttgtagtataatttgaagttgggtaatgtgatgtctccagatttgttctttttgcttagtcttgcttggctatatgggctcttttttggttccatgtgaattttaggattttttttctagttctgtgaagaatgatgctggtatttggatgagaattgcattgaatctgtagattgctttgggcagaatggtcattttcacaatattgataattcccatccatgagca

SEQ ID NO: 297364 - DNA, 591 bp, Homo Sapiens
ctgatgaaggaggggacaggtgtcagggggaccatggatattttatcccagggaagtctcaccccagacactccatgtaacagattgagggcatttcatcctgcctaggcatagtttggaccagtgtctgaggtttcataaataagagtttttctttctctccaatcagtcccctacaagagacatttttatttgttctaggtaaaatgtataatacagctccagagtgtgttggtcagagttcagttgtgcagaggagaacccactgtagctagtttcaggaagaagaggttccataaaccagaggtgcacattgtggattatggaatcaatgagggaagaaagagaagcagcctctaggttaagacacaccacagagcgtcctccctcttctgtaatcaggaagccaccggtccagaagtccagtgcccctcaggtctggtccacacctgtcaacatcggcaaagctggagaccaggtgtggggcctctgctaacactgtggcagaaaaaccaaaggcttctgtgactgctcaggaacagcaggaagcctgttaatctcatagaagtgcatgtgattagctgaatctaa

SEQ ID NO: 297365 - DNA, 129 bp, Homo Sapiens
gatgaccctcacaggaaattcaggatgggagactctaaatgctgacccaggtgacactgggtagatttacaactagaaactcctttcctggatatcaaagtattaagtttctttctcatattaaataag

SEQ ID NO: 297366 - DNA, 520 bp, Homo Sapiens
  misc_feature (338)..(363): n is a, c, g, or t
actgagatgtggccatgcaatattttacagtaaaaacagtgcctataagaaaaagatacatactatttttccatgatattaagtgtattttgtaactattttcatttggtccttgtaacatgaaataatacatggaacttacctttataataaaaatggagtgccctggttcatcatagaggtgcatctagtttgcccttaatggaagtatacttgctgtgtggattgatagcaccttcttgaaatggaggagcacagctggcctcatggatgtgcaatttttgcagtcccacagggccttgcatacagaagcaccccgagctcagttgaatgtctgnnnnnnnnnnnnnnnnnnnnnnnnnngagacacagttccactttgtctttttgtcacccaggatggagttcagtggcacaaacatggctcactgtagcctcgacctccctggctgaagggatcctcccacctcaacctcccaagtaaccgagactacaggcatgtgccagcatgtccagccaa

SEQ ID NO: 297367 - DNA, 471 bp, Homo Sapiens
gggccacaccccccagggagctgcaattatcctgtggtcacagcttcctgcttggctctcgctgaaatgtaactgtacacaggccttccctgttccccgggtgggggccaagaagtacacacggggccatcttttcttgcaaaacaatcccaccaaaacgggggcacgggtggcagctgctcctgcctcgacttcctctgaacctcgtagccagcgggtccacggaatgtctttcctggcctgggctcccctacccccagctggcccggggctctggcagaatgaccagggctctgtacgtgtctatttctgcagagcaagtggccagcttcctgagctgaatctccagatcccactggtatccctttgacaaatatagcccatgtcagtggctgacttggggtggagagagagagaagattgtcttcttgttgtctctatggaaacagggactcaagttcagcagggcac

SEQ ID NO: 297368 - DNA, 561 bp, Homo Sapiens
  misc_feature (128)..(145): n is a, c, g, or t
  misc_feature (167)..(420): n is a, c, g, or t
gaaatatcctaaaatcagactcatccctggcctttacaaaagctaagtttcacaaaagctagccatccagaaggtatatggaatggaaattgggcgatgggtgatggcaagagagaataaattctgannnnnnnnnnnnnnnnnngagacggaatttcgctctggtnnnnnnnnnnnnnnnnnnnnnnnnnnnnnnnnnnnnnnnnnnnnnnnnnnnnnnnnnnnnnnnnnnnnnnnnnnnnnnnnnnnnnnnnnnnnnnnnnnnnnnnnnnnnnnnnnnnnnnnnnnnnnnnnnnnnnnnnnnnnnnnnnnnnnnnnnnnnnnnnnnnnnnnnnnnnnnnnnnnnnnnnnnnnnnnnnnnnnnnnnnnnnnnnnnnnnnnnnnnnnnnnnnnnnnnnnnnnnnnnnnnnnnnnnnnnnnctggctgaatattttaacatctccaatgaacatgtaagaactcctcactcgatgtctagacttatccccctattcagttgatttcctttgaaatgtttatgttccagttaaggtaaacaataatggataaaaaacaaaaca

SEQ ID NO: 297369 - DNA, 191 bp, Homo Sapiens
gagagagggagagctcttgcgaggcagaacaggctgctgaaggacagacctggctggcgcggttaataagaggcctgcatcccgtagcctgaacaaatattgaagtagctaaagtttctaaagtgtgttaatttgcatacttcctcagcagtccagcgtggaggataaaaggggtatcttgtgagtcgatt

SEQ ID NO: 297370 - DNA, 429 bp, Homo Sapiens
gacagacaggcaaacaagaagactaaaaaatgcattctctgttgtctctcaatcaatcgagaatagatctttatagaagcagcataatatagattctcatcccaacaaataactctaaatggtcagaccataaaaccaaacttcatttattcctactatcagcgaggaattacaagtacacatcagaaccaaacttggtctcatatcagaaacaaaatcatagaactggaaataaaaatcagagaaactgtcaaaaagcaaagtttgttgccacttggaattaactgtgggtgccaaaaaatcatgtaaatgggcttaaacagctcatgaattgcatctctgaggcatcacaatttaattggttctggtaggtgagtctgcttgagcatctctgtgggacctccaaaactgttcaaagtataatttaag

SEQ ID NO: 297371 - DNA, 418 bp, Homo Sapiens
ctgtgcttttcaggtttggaagttactgttaaaatatcctcaagttcagagattatttcctcagttatatccagtttaataattagcccatcttcattttcattacagtgtgtttgatctctatcatttctgttttattctttcttagaattttcatctctctgtttacattattcatctgttcttgcatgttgtctgccttttccattagaacctttagcatattaatcataattgttttaaatttctggtctggtaatttcagcatctctgccatgtctcattctggtttgatgcttactcagtctcttcaaactgtgtttttgcttttcaatatgccttgtaattttttgttgaagtactgggtgaaaggaactctgggaaataggccttcaatggtatggtggtattgtgtggg

SEQ ID NO: 297372 - DNA, 599 bp, Homo Sapiens
  misc_feature (368)..(381): n is a, c, g, or t
taggatttaagctttctcacccacaaaattatggtcctatatttaccatctgtgtgtcacttttttatttatgaaattatataaaaaaagaatttattgggacagtaaaatatttttgaaaacaatttaaaagcataaatcagtggcttagaaatgcagttgttgataagacaccattcattaggcataacaatagctcattaataaaggataggtattggctaataacttttgatagggattattaattgttaaaaagacacgagctattaaaaaggctattctcttctaaatcgctacagagttcattcaattttaacatacaatggaaaaaatatgaaagttacctttgtggcatctttgaaagnnnnnnnnnnnnnngcctgggattcaaaggtcatatttgcttttttgctagaaggtttgcactgaaggaagggctaccaaaatgtaggtcactttgtcaggtacaggacagtttgagaaacaggggaagctgattctatcaggctaatatacacaggtgagatgcaaatctcctgccaactgttcccattggtatcattagcccttccctccataaataaatgcctcgctga

SEQ ID NO: 297373 - DNA, 504 bp, Homo Sapiens
ttatatatttatttactgatgataaaaactaatgtgaaaggaaacttgttattagaggtagagaagttgaggagtctatttgttcttattgttgtactctaagttcatagcaaaatataatgaaatttaatgatctgtaacataattgttcatgtagttgatataattagatatgattataaagctacttgccagtagaagattgtggcaaaaaagatgattttttaaaaataaaaactatattttatacttatatatgcatcttctataattaatttaaattcttattcatttataataaatacaaaatggtgaaaagaaaaaaggtaactgaatcattgatgaaagaatcaaagaaaaacacatttatattgaggtaaattgtttccattgacctagttatcttatttgaagctttaaaaaaatctgaccattaaatagataatacaatgagatagtttttaaatattaaaatgatactatttcttatagctaaaaatgcag

SEQ ID NO: 297374 - DNA, 600 bp, Homo Sapiens
  misc_feature (543)..(543): n is a, c, g, or t
gatacataaacatttgctcaagaacctgtataaaaagactggtggatagtgactagatcctcaggatatgcagggctcaagagaaatgaaatatcttggggatatggttacttaagacgtgatactgtcacagtgaatttcacagaagatggtgctgccctaactgaggttcaatccatgtataagccagaccaatctgaagacaaataaagtatttcacagccacaatttctgttgtcatatttattttgcttgcatacttacaaatctacaaaaaagaaactggtacaatggtaggaaattgttgcaaaaccatctccaccactggaaaagccataaaacgggtatctttttcaaagcaaatcagttatattatctctttgggttaaagctaaaatattatacttgagttatgtaagtgttatctctaacaagtatctaccaacagggcagtgccaaggtattaaccaaatacatttgtaaggaatcaataacaaagaacaaacacaccggaatagctgaatggaatgaagtggttctttntttctttttaaattgtaaacctctaggtggttagcattaaggtagagagtaccctga

SEQ ID NO: 297375 - DNA, 565 bp, Homo Sapiens
gacacaaataattctgaattgcatagttgaggtatcaagtcatggactgaggaagcaagcgatctccccacaagcccccagagaccacagccagggccttcggacagcagagaggtttagatgcactggaggggcctggaaagaaagcaaccgcaaagggccaggcgcaggagggctggactgagcagaaccagaagaacttgtgcaagcggtgactaagagccgtggccactgcccaggccagcagccagacacagcggccagcagctggacatagaggccgtaactgagggtgctgggccatggctgtggggacacctgggagcctcagggccatcaagatggccctcacagcacagcaggtgccctggcaggcatgcagcattgcgatctggaacaggatctgcacagcagggcgctcataagcccctaagagctccaggtgtgttcagtgagagagggactggggttctgtgcagggctttccagactgtcactgtcaggacgccacctctgagaggagaggctgagccgctcaaggactgcacagcctgtgcccactcgc

SEQ ID NO: 297376 - DNA, 637 bp, Homo Sapiens
catcatgaaaaaagtcacgtcacattgactaacaaggttggtaacaaatgtaatgatcaactttatcatttaacatttcacaagactttttattggtttctaaaaagcagttaatattttaaggtacggtatataaacaaaatagccatatctgatttttggcaacatgaaaatgccaatttcctttcaaaccaattcccggactacagctacaaatgtggtcaacaacgtcatcctggagtaaaattcagctcctgacacacacttctatggcaattataacatagttaacacttggcctgtacctatatgaacactgatccattgggggccactgaataaaaatttcttcaatctcatttgctattttagttgaggattctaatttacagaagagctgggcctttccttctcccattccttttataacttcctatccagtttcctgcagtttgtttttcctcctatttgaattgttcttataatctttaaacgtttctgtttccattcactttatgcgtgcatgcttctctatgacttatcaaacgtagcactgggtgtaaagtggtatttttccaaggtcaaaaaaagtatacgaattcatttattaggattaggcttaaactgctttcattga

SEQ ID NO: 297377 - DNA, 426 bp, Homo Sapiens
tcactcggttacattccaaaatgtatgtcagtattgtaaaatcatccagcctttcaagaagcttttaaatgggattatttttcaaaataaaagtagctaagtaaccaaatgttggcaactaattttttaatagcatattttcaagttaagaagttttatccatgggccaaagtttgtgacctatattatgtgaatttaagtatcattctttgtttaagataacaataacatatggcagaaaaatgttgcctgtaggttgctgttttgatttcctgtatagctaattcaaacttatgtttctctttctaaaccttttatcttatgcttgtgttctcaaatggagactatgcaagttcctagaaatatctcccaatatacctttccaaataccttcctccatctttgctttcttcccttgtgcaaagg

SEQ ID NO: 297378 - DNA, 415 bp, Homo Sapiens
aaaagaaaggagagttaacttttattgaatggtctgataaccttctaagccatacaatgttcatttatttaactattgtttttcatctccaagtccacccttgttttctctgctttgtgatgccggagaacaggaagcacatcaggaagagtttcaggatgagagggaagaaaatacctgattcttccagttttctcactctttctgatagtgtggtttcagcaagatacaagttgtttcagttttcacttttttctgcactcccagaaccagttgtattgtgccccctcaaaagtaccagcaataacagggcaatgtctccctgtcaaggatccgagtccggctgtgtgaagtgccttctacatcccttcgattttaacaatgcaaacctcttctctctgattccatggctcca

SEQ ID NO: 297379 - DNA, 496 bp, Homo Sapiens
  misc_feature (98)..(106): n is a, c, g, or t
  misc_feature (255)..(288): n is a, c, g, or t
  misc_feature (367)..(379): n is a, c, g, or t
tgagcaggaaacatacttgatgaaatattttcaaaggagtatattcaattaccatctacaatcaacttaactatgacaacaaagtttttgtgacaaannnnnnnnncagtttgaaagttccatgtggttctgtttgttagtctccatgtattttggtacagttcgagatcagcattgttacagtaacaaaaaagctaacaagactacattatagaaaaacaccaagaacatcatttttggtttcacttgctctannnnnnnnnnnnnnnnnnnnnnnnnnnnnnnnnngtacattgcaaaggctgttcatatacctcttcacctcagggtcacgttcgtttatgctttctttcctacccaaacttgnnnnnnnnnnnnntgaagaaagtaaacaaacaaaaaactagtcaaagctttgtttcacagtgggcagtatctcagcgccaacaaacaactcaatttatgcttctatttaaaatgttttaatttattattt

SEQ ID NO: 297380 - DNA, 580 bp, Homo Sapiens
gtaaaatattgactttaatatgccttgtgtattataatactatgaactcaaccataaggcttattaaggaattctattttggacttaatgatagagattattaaagaattttttatgagcttaagagtttgttttgtaatacttcgaaataaattaaacctagaatataaaatgttttctaattttaaatgtgaacaactagaacttattaaggtttttgttttgtagtcaactggagtaagttatactttctattaaaagcttctttttaagtataagcatatttggtattttaggacataatttatctttaggaagctctttttatctctgtattcttgccttggccaaaatatgaaatctccaaaattgagattttgtgtcttgagaaggcacgatccatgtatgagaaaattcagtctaccaccacaagcaatgaaacaatcaaatcactttgctgcttgaattgttataccaaatacaagctaagcttttgaaaaagatcaccttgaataccaacactttcttatcactggtagttttccactgggagatgtgcaacccatggaaattgctaccg

SEQ ID NO: 297381 - DNA, 622 bp, Homo Sapiens
  misc_feature (257)..(320): n is a, c, g, or t
  misc_feature (361)..(361): n is a, c, g, or t
ggcctcaaagaatgtcactgaggctccttttggaacagattcaggaagaaaaggctgtcttgaaaagtgctcccttccctttgtgcaggggggattcaatgaatatctgcattgtataacattcattgtattacgtaactcttgaaacttttacaaatgactttcatatacatcatctgattgttcagacttaaagggtgtcagacatctgctgttgatggctgtgctttttgaacaagggcagtgaagcaaaaacnnnnnnnnnnnnnnnnnnnnnnnnnnnnnnnnnnnnnnnnnnnnnnnnnnnnnnnnnnnnnnnntcatcgccaggcttatttgtatttctcctttctgggaggantaggtggggagggggaacttctgtacatccgaatcagttttgttcaagtggtagggggaagcagcgcttcctttgccttcatgtctttctcggttcccctggcccttgttaaactcacttcacaggctttatgagcggggcagaagttcccagtcaatggcgtgtgtctttgtttcctctttcactgtgggaatagtgaatcattttcgcctttagcctgaaatagtttatgaggctattacggtctctgagttcatacca

SEQ ID NO: 297382 - DNA, 567 bp, Homo Sapiens
actcactgtcatgagaacagcaagggggaaacccacccccatgattcatttatatcccaccaggcccctcctcaacattggggattacaattcaatgtgagatttgagcaggaacacaaatccaaaccatatcagttattatttgagagtgaaatgaaatagacatgtgcatcaggtaaacttcagacttgtccccaaaacttttctctcttgagctaagagatgctacttgaagacattgttaggtctcagtaattctctagttttgcaagtcagcatgtgcctggctggtggagtgctgtgctgtgggtatttggggctgtagaggtttagtggttaaggcaacacggaccacattactgattgcccctttcaaatctcccagtaaccattaacataaatatcatctcaccattttggacaagggacaccacccttatgcacgttagtaatatgatgctaatgcttaactctttcattgccctgcttcaaaggccttgtcctatatccattgacagggagtctctttgaacctaaaggagaaatgaaagggttaactccttttgg

SEQ ID NO: 297383 - DNA, 681 bp, Homo Sapiens
gggtctgcgccctattttctctaccaagttttttagtacttgactctcttcaagagagaatatttcttcgatttgtaccagcttataacttgagctctctcagtcccaacaagacactctgaggaccacaaatactggattcctaggacacgatatcttagagtctcatgaaaacaagccagttgcagcaacaaatcctaagtacactgaggttcctttcctcacgcctctctatcccccctgacctagcatcttagattcagaatattatagctaaaagtgctttagacatcatccaatcttttcattgaacttatggggtaactaaggcctagtgacagtcaaagttttgtctaaggtcactgtattcatttttccatggctgctgtaaaaacttaccccaaacctagtatcttaaaacagcataaatatattatcttccacttctggaaataagtctgacacaattatcactgagctaaaatcaaaatgtcagtcagcaaggctatgttccctttggggggtttggagaagaattaatttccttgtctttcttttctggcttctagaagctacccacgttctttggctcatggcccccttcccccattttcaaaactaacaatgtagcattctcaaatctctgttcctttttactatgtaaactaacatactgacagg

SEQ ID NO: 297384 - DNA, 410 bp, Homo Sapiens
cggccggggagtcaagtagaagactcaagtatgcaagaagaatcaagtataactccaaggcatttggcctcagatacttaaaggatagatttgacatcacctgagatggcaaaagtcatgggtagtgcaagttttagggaagggaaaaaaatccagtttcagacatattaagatgagatatctattggccatccaagtggcgatgtcagttagtcagttgaatataggcctacgtgaatctggaatttgggaaagaggactgagatgaggctataaatttggaaatccttggcataaagttggtatttaaatctgttagactagatgagatcaccaaggaatgagcgcaggtagagaagagaacaaagagctgaaccctgatgtatgccaaaattaagaggtcaggagga

SEQ ID NO: 297385 - DNA, 544 bp, Homo Sapiens
gccgggggaagaagaggtaaccagagacttctttagaccgtagtaaggagagtaaacactcactcttaaaagcagaggaagcagtgatgacttacgtcaaagtggtaatagagtcttattcttgaaatattagaagagaccactagtggaggcagggaagccagaaggctgttgaagcattcttggtaaagtattagtgatggcttacttctactaggtaatgtctgtggtgataaaaatgaattacctcatttgagagagagttaaaagggcgaatggatggaacttggtgattgacagggttgaaggagcagtagagagggagaagggaagtatcacacccatttttctggcatgaagaataaggtagatgggaatgccactgagataaggcattgatccagtacagatacaggagtgaggtggtcaaaacaatcattttagttttggacgtttgacatttgaggcatctgtgagttttccaggtagatttatctggtaaactgttggatatatggatttgagctgagctagagataattta

SEQ ID NO: 297386 - DNA, 565 bp, Homo Sapiens
  misc_feature (80)..(99): n is a, c, g, or t
cggccggggtgttttgccatttaaaataccttctactacgtatgtttttaaaggctactcttatccatggtttttagtgnnnnnnnnnnnnnnnnnnnngttatcttaaaccaaatctgtaaggcatgcactgctacttaggtaaataaatattaaacagtcacctttacaatagatagttttattcaaaggaatgatttgtttctattgcattccatcatagtgtagatttattgaaaaaagtacttatgcactctttcaacctgtgtaagtgagcagtttaaatgcacacctcagcgaggatgtcactcttctgaaaatatattactatacataatattgattggcagtgttcaaaagagagtgaaaatgaagacaatttagggattggggaaggtgcctataatgaactttaacttcacatgagtaataaatttttgttctatgctagggtatagaggctgtatataatgtagtttggtactgtgatacatatcaaaataaagtttctccctgcttttctctaattaaaaataaagcattgattttaaaactatttgtatgt

SEQ ID NO: 297387 - DNA, 289 bp, Homo Sapiens
gatattctattgtatgtgattggaatttctagcttctgttagttttcaaagatgtattcactgtaaactttcctaagcacaataaataaaaatattaagtaattttagactctttaaaaaccatcctatttttgtcagtacacttgagcaattcggcaagcattcattaaatacctcctatgtgtctactgtgtaagatgctggagatactctcaagaatatatcctaaaactgtcataagttactcaataggagagacagagaagtaaacagataatttcagtataat

SEQ ID NO: 297388 - DNA, 500 bp, Homo Sapiens
cggccggggggcctggtgtaacatgtgccttcatgtgtgtgaactcctctgatcactcatggttagagggatcacttgcaggctgagattacgaggaggaggcagtaaggcatggtgggcttccgcagctgcgtgtgcgagctgggattacagttccgggcgcctggctctggagcacatgcctgaccccacatcctgggtcacctgcagccagctaaggacacttactcagtggttgttggatctcagtgtccgacactgacaaggggctgcacccactaaagactgtaccagccagcatcagacaccagtcaagggtgttgctgttttctaagttttggaagcttacagcttttggagtcatccttaaattgtcttacttaccccatatcccgttaatcgcctggaagactcattctaatgcttgagtttatcacatgtggaattcgtcttcttccttccatcgtcacggccctggttagactttcaacactgatgac

SEQ ID NO: 297389 - DNA, 554 bp, Homo Sapiens
cggcccgggcaaatgtggcagttttagacctatgtctttgtagtacatcttcagcttgtctttcttgtattaattccagaagaagtgaatgtactggttatcgttactatgctaggctgtaaaattcttactgaaattgcccacttgttagacactactcaggaggagcccatggccagggtagtagaaatactgtgcatctggtccaggttttctatgcttggctcatattctttcataagatgcatattctttcataagatgcatatcatgtagtcaaaagctttctgacaaccaattatttttcatatgtttcacttatagtcgaagaatacaaaggaacaatcagaaatagcagcttttaatgaatattttctatttattggttgctgaactgttaagggatttgctgtgtggtaattttacttataatagaaacttgcttattttagtggttgaggtgcttctgttgtcctaaaactacttctgaggtttttaaaatgtagaaccatgtttttgattagtgtcttaaaagattactgtggtgctcagca

SEQ ID NO: 297390 - DNA, 552 bp, Homo Sapiens
cggccgggtattattttctagtcagatactgttacaactttatcattgaagtactagattagcctttccctagagttagtttaaatggtgagtataagaatatagctattcgaaggcgaatttatatgaagtcttttatcatgattccatccgtttgtgaatgaagctgtccttatatttcatacacgtgttcaaaattcccaggctttgcttttgccataaggagcctgactcatcatgtttttgtattttttaaaacaatacagcaacatcctcttccttaagcctcacagtattctttcattggatagttgtcctctgggctaataccacagctatattttattttaaagacttcctaagatttcaatcacagtttatatattttttagagttaaggtatatatgcatactctttggggcttgagccttataatgagagtttagttatttctctccttattaaatgtttagaaatccctgttttatatgattcagccaaccaaatatgctttggtaacaagtagctccttttgcttaaaaaagtttttt

SEQ ID NO: 297391 - DNA, 571 bp, Homo Sapiens
  misc_feature (15)..(15): n is a, c, g, or t
cggccggggggaaanctaaaaatggcattttggagcatatggtaagcatatgtttaactttgttaagaagctgccagactcttagactcccatactgttttgaattatcagctaggtgttttgcaaatattgtctcccagcctgtgtctccttatcatttcactttttttaagtgtcttctgaacaccacaggttttaattttgattaagtacagtttaccaagtttttcttctgtggctcttgcttttacattgtctttaagaactctgcctaacccaagattataaggatttttctcctctgttttttggtagaagttttatagtttctggggtttcacatttagatctgtaactcattttgagttagtgtgtgacaaaaggctcagtttttttcgtgtcagtgtccacttgttctaggggcatttgttgaaaaaagactgtcttttctccacctttgttgaacatcaggtgaccttacatgtgtaggcctgtttctgactctgtattctgttccatgtatctgagtgttagctataccacatggtcttgtagctttctttatagctag

SEQ ID NO: 297392 - DNA, 564 bp, Homo Sapiens
atggtgtgttcaaatattttacataaatatatttcactgtaaaaatgtaaactttatacatgatatttaacaattccttatattaagaggaagcaaaaaagcagctaagaaaaatgtttttactctccatatttctttctaccttcatgtaaatgggaatactttagttttatgataacagaccggttttaaaaatcttacttacctcatccttataagcatttcagtgttagctgaaagtaaattactctctttcctttctccattttcataatctattgccgccatttggaaatatctgttctcattagtaactatggcacttgcagcctaaatggtcatgaagtcactatccggaccatttttaggatgtccctgttggatgcaagtagtttaaagccatatgattcgtttttattagctgtgctgttcttaaccagggataataaaggctttgcaagtcaagtctgcatggcaaaaaaggtgtccacaagtgtgaatggctcatttttaatgactagccaacagccacttgtaaaagatgtaattgaaattgttcagaga

SEQ ID NO: 297393 - DNA, 344 bp, Homo Sapiens
taaataaataaataagactgagacctactgggctgcattcccaggacagcaggtgttcttagtcacaggatgagataggagtaagcacaaggtacaggtcacaaagaccttgctgataaaacaggatgcaataaagaagccgtccaaaacctaccaaaaccaagatggcaatgaaagtgatctttggctgtctcagctgttcattatatgctaattataatatattagcagcctaaaatacactcccactagcaccatgacagtttacaaattccatggccacatccagaagttaccctatatgttctaaaagcaggaggagccctcagttctgggaatcatct

SEQ ID NO: 297394 - DNA, 239 bp, Homo Sapiens
ggatgtgttaaggcccaaagggctaggggacaagtgtggagaggcgagcgtgtccactcaagactcagggtcctgccctcaggacccccacgtccctgccctcgtctactctcgatgctcccacttgccctcccagtgctaagcaaccagaggaagcccatggccaccaaaaaggctttcctctccggctagatctccaggatcctgcttgtatgttacaaatcaaaaagtttggcctg

SEQ ID NO: 297395 - DNA, 573 bp, Homo Sapiens
  misc_feature (44)..(482): n is a, c, g, or t
atgtcacttggctctttgaatcatatctcagagttaggaagaannnnnnnnnnnnnnnnnnnnnnnnnnnnnnnnnnnnnnnnnnnnnnnnnnnnnnnnnnnnnnnnnnnnnnnnnnnnnnnnnnnnnnnnnnnnnnnnnnnnnnnnnnnnnnnnnnnnnnnnnnnnnnnnnnnnnnnnnnnnnnnnnnnnnnnnnnnnnnnnnnnnnnnnnnnnnnnnnnnnnnnnnnnnnnnnnnnnnnnnnnnnnnnnnnnnnnnnnnnnnnnnnnnnnnnnnnnnnnnnnnnnnnnnnnnnnnnnnnnnnnnnnnnnnnnnnnnnnnnnnnnnnnnnnnnnnnnnnnnnnnnnnnnnnnnnnnnnnnnnnnnnnnnnnnnnnnnnnnnnnnnnnnnnnnnnnnnnnnnnnnnnnnnnnnnnnnnnnnnnnnnnnnnnnnnnnnnnnnnnnnnnnnnnnnnnnnnnnnnnnnnnnnnnnnnnnnnnnnnatttttcacttatgggtaaatttcatggtaagtaaactgtaccttaataaagctgtgaaaaaccaaatgattttgaacaactagaaatgta

SEQ ID NO: 297396 - DNA, 211 bp, Homo Sapiens
caccctcgtgtgctagagtgcaacactgggtagacctgcataaatgcagtgtcatcccccactgtgctgaatatgtgtgatgagtaaattactgggaatttcgtctgctcagtgtttgttttgtctgcagccattcccagaattctagggcaagactagcttcttcgccagtggggtgaacaggaaggaacccgagtgggaattgcgtttt

SEQ ID NO: 297397 - DNA, 466 bp, Homo Sapiens
catgtgcagagcggtgaaagttgagttgcccggtatgcacattcccagttgaggttgaacaaggcaatactctgccgtcttgtttcagctctcagactgtaaataattatactcgaagtatatttagtgccacgtttttcacatttttgtgcattttgtgggtgattttgctgcttaaaatggctcccaagcatagtgctgcagtgctgtctagagtccctaagtgcaagaaggttgcaaactgcctgaccagagaaaatgttcattagagaagcttcattcaggcatagggatagagctattggccatgaattcaatattaaggaatcaacaatatatattaaatacggtgtatttacacagaaacacacgaaacaagcttatgtgttgataggttgctgaaaatgatgtgaccagaggctcacagaaacctagccatgtatttcccctaggagcagtggtccag

SEQ ID NO: 297398 - DNA, 561 bp, Homo Sapiens
tcaccttgaaacataaactgtaaagttataaatcttcccagctacaaatagccagataaactttatccaaacctgaagaaggaacatataaatttgaaattaccagaattatcagttgtaatcttggtgaaggttttttattaaaggaaaatcttccaaaagaatgatgttagatgtaattaatgaaaattctctaatcttgattttcctataagtataattaggtgcaattaattgtttcttttcttttctgctccccatatattgctaacagtttccttttgaaatacatggtcaggtggactctgcttattattgtcgaggctacctgtctataaacaaatctgtatatagtccttaatatgttaaataagtaacacatctttttactaccatgatattacagtgttaactcttgcaatttgcttgcccaccattctataagaaactatgataaaattttattaaaaacattaaaataccttaatctcctaataagattactttctgattcctggggtaaagcttgacatagaagcaaattcagatttctgggaaata

SEQ ID NO: 297399 - DNA, 198 bp, Homo Sapiens
aacagagcgtagtgatgagctagtacctacctgttagagatgtacttgaaatctagaattgtatttcctagatggatatttttcagatttgtggatgacaattggtgaacagcagtttgttgcatttaaaggctcttgcccatcttggttatatacactttcagcctttggaaaatatgaattaaaatgtgagtcttc

SEQ ID NO: 297400 - DNA, 312 bp, Homo Sapiens
  misc_feature (189)..(199): n is a, c, g, or t
actaccatttttcttttttctacaactttcaagagctggtgaagaaatgatgtttagatttaatagatatagtagcagtcatatattaatagaatagaaactgagactctaggaaaaagatagacatgagataaggagtaggcatggtagacatttctagattatttatgaaaatgttgtagaattcannnnnnnnnnnggtctgacctttggcaatggtgctgaggaagggaaagccagcccatcaggcacggctctgttttctgcattttatcccgtttgattcttctcgttaggattggagcaaataat

SEQ ID NO: 297401 - DNA, 424 bp, Homo Sapiens
gctttctgccttctaaagtgcaacagtatatattttgtttaactgtgggaggagaaaaggtaatgtttctaccttgctccatattcttacttcaaactattttgaatagaggttcactgagccattgctgatagactgtgcatagctactagctgtcacactattgtaggttttttggagagattcatagggaagtgaatgtaaccaggaataaaggctctcactttagctctgggactatgcagtggatcttgggaacaaaataagatatctaatctattttccccattctggctagattttggttgttgtgatgctcctacttcctgtataggtttttgggatcatggtgcaggctagtaataggattcagaattgcttcccttttatatcgaccatgtaagggattctaaaggagggtaaa

SEQ ID NO: 297402 - DNA, 493 bp, Homo Sapiens
tacctgtgttcttcttgccgtgctttggggtagctccccccgccttttctatctgtactggaacagtgtaaacccggacatgagaatgcggactgggccattattcagggctagaaggtgacaaggtaacctcttggaggccactccccagaatcctcatgggaagtgtatccgcaggagccagtgcctgccatgaccacccatgggaggggaaagatgaatcagactgggggctgcacacagtgaagcaaatgcagcggtgacctgatgttgcggtgactgtggagtgttttctgtggcaagaagaacaagctgaaagtgggtccagagagtggactcaggccaagggccaaggactgcaggacctgttccatcttccctgcatatattctccctgagccttggtgtcatgaaaggcacagcagtttccttatctgactcccagtcttggtcacagcagcaacaagagtccctggtctttgcacggggttgt

SEQ ID NO: 297403 - DNA, 219 bp, Homo Sapiens
acaatctgagatgtttaaaggtagaaaagtagaaagagaattgaattagggcaatgctaatctattatgtaatcaaaggcagaaaagtagaaagaacactgaatttacaagcctttcactaaattcttatctaggtgttacttttcctagaaaaccacgtcacacctaaaaatcacaaatccagaatcagaactataacaattacaggggttcaataag

SEQ ID NO: 297404 - DNA, 515 bp, Homo Sapiens
  misc_feature (99)..(99): n is a, c, g, or t
  misc_feature (349)..(357): n is a, c, g, or t
taggtttgttaacatgtttcacagtgttttagtccagaagtctgaggtgtgtttactgatgcgtaaattcatttttaaaaggcgatgagaaatgtccanagtgacattgagaatggcctaaatacaaatggtgcaaagatgtccttgtcttgccagcttagaaaagttattgtcatcgctgtgtacctgataccatacaaaacatgctcatcatcttccagaaaagaagctcttcatcagattcaaggccagctttcattctagtctttttgttgtgctttctgtctacctcaggaaccatggaagtcatgtgtaatcaaggggtgatacggtatttgtgtgtgtttgnnnnnnnnngacatttatattttaatcttgagtttataaatttttttgtcaagatgttactacagtatttaagaaaataatatcattcatgttttcattaacctaaaataagttttcttgcttgcttatcatccttcagctcttgtccatattcatacatagcatta

SEQ ID NO: 297405 - DNA, 412 bp, Homo Sapiens
cctgaatttacttataaatatacaagagaagtgactcacgtcttcagtgatacagagcaattcagttgtaaaaagctaggaaaagtggaaaagtgtgtaagagtttcagcaagtacgttcattacccactgactagaaaagggacaaggtaaagctattattatagtatatactcatgtatatcttcttcaagaagatgagtcttataaaaattaatatgtctgtagaattctctaaattgttaagggaaggtagtacttatatcttaaatttgcataggagaattatagtttctgttaattatcatggattgtttacatttgctgactgattgacctacctatgtatttattcattgttgtattttcatctaattccaaaagcatttgaacctggtcttagattattactc

SEQ ID NO: 297406 - DNA, 526 bp, Homo Sapiens
gtagcgttatggaggcaaggatttctttatgaggtatggcagttactgtatgctggcgctgccttcactagcctaagtggcagtaagcctaatggttctgtgctctgcaaagctgtggattgacaactgaatttaaaacattcttcataacaaacaaggaacacaaggtatggggactatttgtatattctcaatttggggtattccatttgaatgagcagatagaaaacgagtgaaatcaacctaaaaatgactctgagtcccataattcttgctaatagtggaacctgtgaccagcctttgtggtctatcttagcttatcaacagtttcctttcaaatcatatttgagcaatctggattccgttcaagcttactgttttattatcttaccactattttggcaccagtatcttggtttctgctctcgccataaatcaatttagcccttattattattaattattcaacataatcttgactattggttttctatgcagcaatcattgctctttctttcccatattg

SEQ ID NO: 297407 - DNA, 123 bp, Homo Sapiens
ggtgtcttgttgctgtttcaattcgcatttccctgatgaggtatgaagtggagcatctcttcagatgcttatttgccatctgtgtatcttcttcagtgaagtgtctattaaggtcattggctc

SEQ ID NO: 297408 - DNA, 652 bp, Homo Sapiens
tactataattagttgtgtagagttaagtctgcatatctggactaaatccaagcctccattatgtactatatatgtactgtatgatgatgtgactggatgaggatgttctttgactgttagaggttatctattttgaatcttagacatttgccacagtatgtaagaatgtacagaggtttgggaactggcattcttttgataccagaataattaattcttgaggataccatgtgatcattaaaacctctgagctcctgggttggtgctcatcttctagcagtcaaaccagattgccgcttaggattctcaacttggatataaactaaatctcaagggtgttggttccaaacattggatttggattgaaatgagtgtctcatgcatttatagaaaagtcttgaaagattttccttgaaaaggaatatgctctccagttaggaacgggggcctgtttgttggaggtgtatctgcctcagggttactctctattcccaaagcaacagtgactgtttcttctcttactaacagcagctcctgactgcgtgctcatgtacatttatcttcaaaagtacacacaagtgcacaaaatcatttaaaacaatttctgactttccatcttctctgtgttattcatcttaataacatcattttg

SEQ ID NO: 297409 - DNA, 211 bp, Homo Sapiens
acaaaaaacatattccagaagttaaggacttcaatttccagattaaaagcaccaccagttacctgcaatatgatgaaaatacacttacatcaaaacatgtcatatgaaattttagaactctgggaacaaagatggtttctacgtgcttccagagaggaaaaccaagacaaacacactcatacaaaatcagtaattggaatggttttgaacc

SEQ ID NO: 297410 - DNA, 540 bp, Homo Sapiens
gctttcatttagatgcttctacccagcttaagcaaggagggaggggatgggaaagaagcagatgaatacttttccgcattagttattaaccattaatattgttcacctgtgcacggtgctgtgtttagacacagatccccagatacgatgctgggtattcagacttccactagggagacagaggcagatttgagaatctcatctggatgttagcttagtgttgttacctacactgttttttagggacgcctttattgctgtaatgtttttctaagtctctggtggaaaagtcactggcatttgttctagcagcattgattcattgccaagttttaaaaaaggaaataattaagagaatgcaatgacctttagagaaaacaggtcacccatgtaagtcctgatttcagggtggtgtgctttcttctgcttttagagtttcttttctcttttgggctatgaaccgtacctggaggccaggcaggccttattctggagcagatagtgagtgaggttcctagagtactgcatagcctgagagtg

SEQ ID NO: 297411 - DNA, 613 bp, Homo Sapiens
  misc_feature (44)..(109): n is a, c, g, or t
  misc_feature (177)..(297): n is a, c, g, or t
  misc_feature (318)..(333): n is a, c, g, or t
  misc_feature (336)..(433): n is a, c, g, or t
ggtaaatgcaattttatgatttgtttgtttgtttgtggagacannnnnnnnnnnnnnnnnnnnnnnnnnnnnnnnnnnnnnnnnnnnnnnnnnnnnnnnnnnnnnnnnntgggttcaagcgattctccttgcttcagtctctcaagtagctcggactagaggcacacactaccacannnnnnnnnnnnnnnnnnnnnnnnnnnnnnnnnnnnnnnnnnnnnnnnnnnnnnnnnnnnnnnnnnnnnnnnnnnnnnnnnnnnnnnnnnnnnnnnnnnnnnnnnnnnnnnnnnnnnnnnnatgagccactgtgcccagccnnnnnnnnnnnnnnnnaannnnnnnnnnnnnnnnnnnnnnnnnnnnnnnnnnnnnnnnnnnnnnnnnnnnnnnnnnnnnnnnnnnnnnnnnnnnnnnnnnnnnnnnnnnnnnnnnngtgcttcatactgctaagttatcaaaggtacttatttttgaagcttcctgtaaattaaaagaggagcttggaaccttcattttgttgtgacagttaatcacggttgttatgttagaacttgccatgcagagctaggcgattttttatttggggtacttcatttttatcaagcatttgaaa

SEQ ID NO: 297412 - DNA, 519 bp, Homo Sapiens
ggggatatgtgttaacatgtctccctatcacacttcagaatttcagctaacaatgaagattagcatccagtttcctgactaaaattttcctggttgcaggaccccttgatccattctcaattctaaaaattgtagccctgaagtggcattaaaacattcatcacaagcccaccaaaacactttgtatttattatttctcttatttagacttccaaaccaaattatgtcttcgtatattttaggcaatcaataaatattaatttattcaatactagagggaaaaggatgtcacagaactgtggaatcatttcctgcttattgtcctttctttaatcaccaagtgagggtgcggtggtctggctatttctctaagtttgaaatggcaaatttagcttcaattccgatttctattcagtaactgagtgacttgggacatgtcatttgacttttcggtgtcttgcttttctctaaaaatgaggataaaatataaattactcaaagtatactcagtttgatgta

SEQ ID NO: 297413 - DNA, 200 bp, Homo Sapiens
attgatgagtatttcttgttttaccagaagtggcactgttgaccacacacctttgagaattggttgtatacaaattatttgcttcaaaatgtattcacttttaactgagtcagatgaaccttaaggggagtgtttattttgaatgtattagtttatccacaatggtagcatgctaccacggttgaatgcaaaaatctttg

SEQ ID NO: 297414 - DNA, 330 bp, Homo Sapiens
ttatttgattaaagacgctgtccgtaggtaaaagatttagagacataattaatattcacaagataatttttggaaaaactattttggtttacttcccagaagattagaaactgaataattctcatgtctgtgtacaaaccctattagaagttagatgattcccaattaattgctttcaacaaaattaaaggaggatctaattaggtgtgagctgatataagagagcacctgccttacttataatttattttttagttttctcacttcctaagcacagcacatggctatgtgtttgatatatagctgttgattcctttgaagaaaggagag

SEQ ID NO: 297415 - DNA, 320 bp, Homo Sapiens
cggccgggctactttaattgtttatgtttattgtaagataacatgctctttgggcattattagaccagtctctaccttgagatactaagttaattacatgaggtgttaaatggaagtaatgatgttagttgaaaatcgcaagaagtgtttttctgaattgtgtgcccatttgccttaactttttctagtattagttgcctcaggccgtgactcttcaactctgtaatacttgatactgtatcaggtatcttgtgggtagagaatatagggattgccaaaacttttgaaacataggtaccttttctttgtactttccatct

SEQ ID NO: 297416 - DNA, 160 bp, Homo Sapiens
cggccgggggtcgtttatataggtctggcataaatgcgaaagtgcagagcagctgtggaaggctgatagattcaatcccagagtccgccccctgaattggggcctttccagggaggagagaagcgtctgaaaaacagggggcccagtgccattcgcagca

SEQ ID NO: 297417 - DNA, 269 bp, Homo Sapiens
tgtgcactgtggtttggccttattgccttattttgaagaaaggaaaaaattatcacataataaaccaataaagcagatattaaatattcagtcagaacacgtaaacaacttactgctttggaatgtagctaaagaaaaacaaatttatttgtaagtatacccttctttccttcaaggctgagaaatctacaggagaagataaagtttagccaatgttttcctgaattttaactgcctgtgatagacgtgctcatatattcctcacatag

SEQ ID NO: 297418 - DNA, 320 bp, Homo Sapiens
cggccgggggctggaattcactttatacctggctgttcaactttatccgtagagaaaaatttgtgtggaacctagtggtttgtggggtaactgctgtcattttccaggtatttgtatgtacacagttctcatgaattctagattctttcattggtctctgcctacctgcaaatattacagtatttgcttccttctggtaaagcacctcccggtttctaaattcagttagccattcctgaacttgtatccttctgtgtaattattgaagtttatagagctccattagaaatcctggtggaattttagttgtgattgcattg

SEQ ID NO: 297419 - DNA, 166 bp, Homo Sapiens
cggccgggtgggcgggtggccttgtgaaaggcccatagccagtgagccacagacctgggtctccagcccactcccgtcatcttcagggctcctgccctgacctaggcttctccatgcccaaaagatatagactgtcctttaaaagccacacaaaaatgcaaaatgt

SEQ ID NO: 297420 - DNA, 300 bp, Homo Sapiens
tacggccgggcattgaaaaattcttcagttaaataaaaaacaaaatgccacccgtgggaggtgaggtgagcaagatctgtctgggttttccctgagggttctccgagaactccagtttgccattaattgacaatccacagtgcaaaaagcaaggttggagattaggttggggagagccctggaaaacatatgggggtgttcttctcagtctcagggctatgaaatgtggtgcttttattcaaagacagaagcctggggcaaaccatcaaaggcctcataatttctgcaggcctggtaaca

SEQ ID NO: 297421 - DNA, 524 bp, Homo Sapiens
ggccggggcagatcccacaattggcccatgggttctcatcccagtatctctgtcacacaggaatagaggagcagccctctatctctgtggctgaccatacctctccactgtcttccttatactagatgtggccacttgtttgtcagaggccactctgcagaatgatgtcctctaataccttcagatagggaatgctcttccccacttgttacaacctacttatcccacaaaaccttgaagccaggaggttggggcacagatctgattgctaatattcctgactcctatccctatttcccccccaaaaaccatgaggttggaaagaatgggctttctctttcttttcctgcatgatgaaaatttctattttatatccttcacttccttaaaagacttttgcctttccattttcttaaagctatgatttgagtgggcctaaggaaatagaaaacctgtttaccaatagggaacacacataagaagctattgaaaatatttttatccttgatgtgctctgagaatta

SEQ ID NO: 297422 - DNA, 370 bp, Homo Sapiens
  misc_feature (56)..(85): n is a, c, g, or t
caggccgggatagaatatctaacttaaattaaaacagttgaatttctccttgagtnnnnnnnnnnnnnnnnnnnnnnnnnnnnnntcttttcacttatatttttatacgagtgtatgtatttattgtttagtagcaagagtgaattggatgaagtatctgaatatgagatttttatgtgtagtgaattcatatttttatcttttatattttctgacaccctcctccattcatgagtgtccttgagctgataccttgtgccagacatcttggaatattttagaactgttgtggaaaagtgatggtttaacacacagctttagttatgtcatggtgtaaattaagctcttaaatgaaagtggctagcttttg

SEQ ID NO: 297423 - DNA, 536 bp, Homo Sapiens
  misc_feature (43)..(362): n is a, c, g, or t
tggccgggacttctgatgaaactattgctcaaaagagctatgnnnnnnnnnnnnnnnnnnnnnnnnnnnnnnnnnnnnnnnnnnnnnnnnnnnnnnnnnnnnnnnnnnnnnnnnnnnnnnnnnnnnnnnnnnnnnnnnnnnnnnnnnnnnnnnnnnnnnnnnnnnnnnnnnnnnnnnnnnnnnnnnnnnnnnnnnnnnnnnnnnnnnnnnnnnnnnnnnnnnnnnnnnnnnnnnnnnnnnnnnnnnnnnnnnnnnnnnnnnnnnnnnnnnnnnnnnnnnnnnnnnnnnnnnnnnnnnnnnnnnnnnnnnnnnnnnnnnnnnnnnnnnnnnnnnnnnnnnnnnnnnnnnnnnnnnnnnnnnnngagctatgttgtttgttcaaggacaggtataccttttatatttttttcagacaaatttgtggagtggactctaacctttgagtctgtattaaatatttacttgtgtctcctgcataacttcttcaaatttagaggcagattaagataaataacttaagcactatcattgtacat

SEQ ID NO: 297424 - DNA, 270 bp, Homo Sapiens
cggccggggaggcatagtgggactctggaaatggcagcctggctaaggagagtgaagagaaggggtttaaacagaaacacaccttaacattcaagacttggagctgccctagcgtcctcctcgatgtgaggaccttgtaggctttgggcagacggccctctcctctcctggcgtgcctccctctcctcaggcttcctctgtttcccaagatgatctaaactaacagtctgggtggaggggctaaataattttatcctcctcacctcaccc

SEQ ID NO: 297425 - DNA, 535 bp, Homo Sapiens
cggccggggaagtgagggcaataatttgttctcaagtccctgtgctttcagaaacctagacatcttccctggctccacccccattatctgaacgcttgctccctaataattaagccctttactggggccagaatgagggacaaactatgtcagaacagaccctgacatttaggttttattctcatcttggcatcggtgacatctgtctgagccatcgcatattcaagcggctactcccaagattgcatgtgtttgtttaaaagtgacctgctactacctcaccattagcccactgggacttgcttcctctttaaaattttatgtaacactgatgctcctgttttgatgtgtatgaaccttaatctatgtgatatgtgactttgtgaacattgaattttttaattgagacctggggcaaggcatagttgtagctatttttatcctctttcctggcacttcttccctgtttggcacttccagcccctgcttcttatcccaagactggtatggcattgctgtgtgttaattctgcccc

SEQ ID NO: 297426 - DNA, 319 bp, Homo Sapiens
tcatccaggcaggtttccatgctatgagtggccctttcgttctgctctcacactccccacattgaaagctgagtcatcgctgctttggatggctacctcctctttagccccgtgcccgtctcacacagcctttgttttccacctccacccttgcagtaggcatctcccagttggtgccttagtttcaaatcccagttgccatctaagatccacccaaacttgattttgtcaccctctggattagaatccttctgtgactccgctgcccatgaagtccaaatgacttcctatggggtgaaaggtccagtggggactgttc

SEQ ID NO: 297427 - DNA, 280 bp, Homo Sapiens
ggccgggaactaatcctgactttaagatcctctacgggagaaaaatgcaacacagaacaaatagtaggaattactgaaatgcaacacagagcaaatagcaagtactactatacttcattggaagtattcaaaaagattatttttgtttattaggaactgtttaattttaaagttttcaactgaaattataattcactaatatcattatattttaaggagagaatcagttaaggagatgtccatccaagtaattatttttcctacatcaaccataaaatta

SEQ ID NO: 297428 - DNA, 471 bp, Homo Sapiens
cgagacaggttcttgggctcactctgtcccctaaggtggaatgtgcagtggcgtgattagcctcccaagtgaccaggactacaggtgcacgccaccacacccagctaattttgtattttttgtagagacagggttttgccatgttacgcaggctgttctcaaactcctgggcccaagagatccattcatctcagtttccaaagtgctgggattagaggcatgagccactgtgcccggccatactaagtcttcaaaatcagttatttgacaattacaacacatctcaattcacattagccatatttcagatgctcaatagcaagatgaaaccaggggccaccatatagaataggatgaatttagaatgtttagcataatagctgttggcagaacaaatgaaaaaataaactttgtattgcatttttgattgtggcaatatcccaagaaagagataatagcaaatgaaggctt

SEQ ID NO: 297429 - DNA, 426 bp, Homo Sapiens
  misc_feature (116)..(116): n is a, c, g, or t
tatctaaggggcgtctcaaacttaatatggctaggataattttttaatttctaacccctatgctcacaaatctccttgcaagtcttccctatgagtaaatgacatgggggtctcangcttggggattagacccaagtactccatggctccaggagagagtctaagcagcatacttgattctttccttcttcttaccaccctccgcctaattcctagatgaatcctcttggctaccaccttagttcatcatgtctgattgggctgttatagtcgccttctaatttcctccctgccaaaatttcctcttacctttctccgcagaagctagcataagtttaactcagttcttatccctccatgcctaagatgttctactagcttcctatcgcccctaataatattcaaatttcttacctttgcctgcaa

SEQ ID NO: 297430 - DNA, 535 bp, Homo Sapiens
  misc_feature (179)..(188): n is a, c, g, or t
gagaaacttcagaactaaagactaactgaaaatgatgtcattacactcaaaaaaaatttataatagggaatcctgttgccacatattgtggaaaaatcatgtcatatttaaatataccatactctgaaatgtgaggtttttacccagtaggctgacagttttgttgcaacttgctctannnnnnnnnnattattggtccctatagcttctttctagaaaaagaggcaaacgtgccttgaaaagccagagtggctcataataaaaggaatgcgctagatacttcaagaaaaaagctaagtttaaatgaaccatgtgacctctgataagtcacttgaacttgtgccttagtcaggttcactgtaggtttacatatgtatgtatgttttacacaactcttgtaattgtcatttgaggggttttgtttttgagagttctgcataagaacagaactttattaaggattggagggaagatacaaatattactgcgtttaattgatgtctaatttcatgtggcttagcagcaattaataacc

SEQ ID NO: 297431 - DNA, 281 bp, Homo Sapiens
gattgcttaccagtagtatataaattcagagtcaggagtgatggtgagccaaacaaccacagattgtccacatgaggggctgggagagtaacacctttgctttctgatggttcagcatacacagacattattttatgcacaaaattatttaaaatattgtataaaattaccctgaggttatatgtatgaggcctatatgaaacatcaatgacttttctgtttagacttgggtcccgtccccaaaatatctgattatgtacgtgcaaatattccaaaattgg

SEQ ID NO: 297432 - DNA, 511 bp, Homo Sapiens
gaatttaaggacattctaatctgattagcgtggccacagtatttataattcagcgttgcattttgttagttttacactttctcatgcaaatgacatatgccatggagtatgatgtatgccaagctgttgattagttgggcttggaaagttaaacaaatacgtaaaggaagttaagcttgtgattggatggctgaagagaccagtaatatggaaatgggtaaggcctctgtagggaagaacagggcctgatgacataatgtcatggagaggtctgaacccagggagtgaatcagtgaatgaatgtctgaataagcgagtaaatgaagagaggaatgaatgggttcctaggcagaaattgtgatgtaaaaaaatcagtgagaaaccagcagtagacacccaggatatattaaagacagagaccacagatgggtaatttggttttagctcaggtagccctttctcttaaggatagtacagtgtctgtaagggcttgatggcgaaacataccaaa

SEQ ID NO: 297433 - DNA, 303 bp, Homo Sapiens
agggtgaaagagggcatgaatattgtggaagccatggaatgctttgggtccagtaatggcaagacaagcaagatcgccattgccaactgcagacaactctgataaatttgacttgtgttttatcttaaccaccagacctttccttttgtagctcaggagagcaccgttccaccccattcgctcacaatatcctataatatttgtgctctcactgcagttctttgagttctatattttcattatgtccctccacgtatagctggattgcagagttaagtttatgattatgaaataaaaactaac

SEQ ID NO: 297434 - DNA, 467 bp, Homo Sapiens
  misc_feature (109)..(288): n is a, c, g, or t
gcctgaggtatataaatcttgatgcctccattagtgaataagattttgctttttatttccccatttgagtcatgagttctttcttcactaagattgttgccacattgcnnnnnnnnnnnnnnnnnnnnnnnnnnnnnnnnnnnnnnnnnnnnnnnnnnnnnnnnnnnnnnnnnnnnnnnnnnnnnnnnnnnnnnnnnnnnnnnnnnnnnnnnnnnnnnnnnnnnnnnnnnnnnnnnnnnnnnnnnnnnnnnnnnnnnnnnnnnnnnnnnnnnnnnnnnnnnnnnnnnncctcgcacaatccttgctttaaaaaatttgtcttgattaaaagactcacacaaagttattcttcctagtcttttctgtaaagtacatggaaacccttaacatagtatcataagtcatggtaaagaatggagtttactgttgtctgatgttatttggtcctaatcctatttaacagtgga

SEQ ID NO: 297435 - DNA, 587 bp, Homo Sapiens
gggaggagttgttagtgcatataagcatttagtttgaattatttaacttaaagtttttatattgcggtttctcttcagttggtcagatgccttttgtaaatattttagttttaaatataattgtgtagagtatgatcatgtgaagtgttaaaaataatgtggaaaactcagctatttaatgcagaggagaaatgaataggttgaccaaagtttgaaaaaactggcaccttttctggaaatctcttattgcaaagaaaagatactgagtgtatagaaaattttgtcaccagaggaaaaataaacaatatataagggtggctttcactttaacatttgggatattttggagttcttgatacctcgaaggtctccatttctattggtattttgaatatctgtaacatgtaatgtcgttcttataacagttcaacactgatttttttggtatcgatagctttatatataaacaaagatgcggacaaaatagcttaacagaagttgtgggcttttttgtggctttgcctgcctgtttgaccaaatacaggggttaattgtttgcaggctgttaactaaagggaaagcttacc

SEQ ID NO: 297436 - DNA, 493 bp, Homo Sapiens
  misc_feature (298)..(330): n is a, c, g, or t
aagtgatgatgggttccctacctatcagaaatgtcttaatttacttaattgcatagcccctcaccccttttaagtcccctccctctgaaaaaattaataccaacaataaaactatttccccaggcagtgcattgtgagatgaggcatttttctctggggagaaccttgtctttgtgtatggcagtggggaagaattaattaagggagaggatgaagcttagtaattgaagttaggggcccaggagctctgaacactcctaggtctgctattaaattatctggctgcagatagctggtnnnnnnnnnnnnnnnnnnnnnnnnnnnnnnnnncccccacaggatggatgcagtggttagaccaaataattaggaagccataaaagtgttgttttatctgaagttaagcatttttgttgtgataaggaggcgttctgggatgatggataaaacgcttcggcactgaagtcagacgtagctggggactcaagtcagc

SEQ ID NO: 297437 - DNA, 151 bp, Homo Sapiens
aaggaggcctatgtacctgaaatgaacctgctgcaggatctggcagattttatatccatattagagaaaaggagtgaaatcgcatctcctggctgtaataataatgtaatttaaatttatctgcgacccacacttctaaaggttaaaagcc

SEQ ID NO: 297438 - DNA, 515 bp, Homo Sapiens
gaagaatctcggattctctctgccttccagctctgtcatccagtagctgcaggatggctgttaaatactgaactgctgttctgtcatttgtaaactgaaaatgactagaatttccatgaccattcttttgaggatagaagttggttacatatgtggaaacgttttgtgcacttaaggtactccagaaatctcaaagggctgaaggatgcagctaagtgggaaggaggcataattcatgccaacgtcaagcaggctcagtcagcctctctgtatggcatatccctttcctccccacagctagatgattcctattttcgtttacagatgagcccaaatggttcccttctcttcctctgttctcctgttacattctctttgtcttggcacgcgttcacggtgaaattacgataaagatgagggagataacaggtagcaccatggaatcaaacagccaagtagagttggcaggcagaaaacatgatgaccaccaagtccagggtgtcccatttttccaa

SEQ ID NO: 297439 - DNA, 371 bp, Homo Sapiens
gcttttccaaaatgcaaataattcaagtgaactttgtgttatatatggtagatgagtgcctgaagtgaatatataatcaatatattataaggtaaaatatattttcactacctcatataagggtataccacagctaatcattttcctatgacatgaataactgcagaatgatcagctatggtttgtgcatgctttgtaggtgtgcacaatgggtataaaactctccagacaatttagagagaacagctgactcttaccccaatagggggctggaggcttctcccagcaatgcctcaaacctgctttgtgactttctggacattcattttttcattctaacaaaaaaacaaggattaaagcaaataattgag

SEQ ID NO: 297440 - DNA, 505 bp, Homo Sapiens
  misc_feature (193)..(229): n is a, c, g, or t
gtctgggcttgggcttaaagagagcttttttcatctcaaattaccattttggccattagcaatattcttttggacagttctcagccgttattagttcaagtagtgctgcttttcccttctctcttttttcttcttctagtagtcccattatgcctaagttacacttgtgcaattgtcccacagttcttagatnnnnnnnnnnnnnnnnnnnnnnnnnnnnnnnnnnnnngaccttcagtttgagaaagtttctgttggcatacccccaagctgactgattctttcctccccagtgtgtagtctactgatgagcccatcaaaggcattcttcatttctgttacagtggtttttatttctagcaattccttttggttctttctaagtttctatctctccatttacattactcatctgttcttgcatattgtgcactttttccattagagcctttaatcatagttgctttactatcctactctgatacttccaaaatctctggcatat

SEQ ID NO: 297441 - DNA, 510 bp, Homo Sapiens
  misc_feature (245)..(283): n is a, c, g, or t
  misc_feature (339)..(413): n is a, c, g, or t
tattgcagttctctgagatttcatcagtctcatatgttaccatatgaccatactacatactaacataagcaaaggactttgaaaagcgtacaacttaattattgaaatcagaaatatgtggggcataatagaacattagccactatctgagaatacttgttaacctgaagagtcacttaaaaggaagttaggagaatgtttatgaaactaataaagttgaaacatgagcacaccctatgtaatannnnnnnnnnnnnnnnnnnnnnnnnnnnnnnnnnnnnnnttgtgcatatgcatgacaggtacaagaatgttgctgcattgtttgtggtaggaaannnnnnnnnnnnnnnnnnnnnnnnnnnnnnnnnnnnnnnnnnnnnnnnnnnnnnnnnnnnnnnnnnnnnnnnnnntgaataattccccaaaatatcaaggtgaatgggtacaaaagcacatcgcagagggttttcttgcagaatggttccgtttatataaatgaaaataatg

SEQ ID NO: 297442 - DNA, 319 bp, Homo Sapiens
atggcttttgttttttcaccatctcataatttctattttggggagttagggaaattttgattttttaatgccagattctatagaattagatgtgaaattgagttctaaaactctaagtcaaaatgactgattcagccccactaactaagagtctagggaaggaacagtaacttagtgtagatgtgctagtgctggaaactgacttcttataataccaaacatcctgcaaatgaaaaggtttttgtcctcagtactgcacaaagagtgtgtctggatagatacttttataaatcagtgatacagatgaaccagtgaaata

SEQ ID NO: 297443 - DNA, 371 bp, Homo Sapiens
  misc_feature (43)..(43): n is a, c, g, or t
  misc_feature (254)..(254): n is a, c, g, or t
  misc_feature (307)..(307): n is a, c, g, or t
ggtgttctaccccccaccaattaaagctgaatctctagggtgnagcctcagatgttgtttctgcatttgtctttcaagctgctagaattctcaagtacaaccagggttgacaaccactgcattggtctttgatacctaagaattgtgagctctcttatccgtctctgcccaccaaagacattcagccaggtcaacaacatatcatacgttgcaaccacattgatcacagactgatcaccaaactgctatatttncttttctcttcctctaggcacaagatatcttagtggctagatgggtgcagganatcagtctgtagatccctcttcatatctgctgcagcctagccactgcagaggcactctgcatag

SEQ ID NO: 297444 - DNA, 619 bp, Homo Sapiens
catcaaagtgtgaatgtaaagcaaattctgactgtatcataattgtaacgaaactttgctccctgctgtgctggaagatctaatctaagcaaaagtcagactttctaggtttcacgcttgttttcctgtgatagaaacctgctcataacatttagctcaggagaaataaaaaatcatatgcctaaaacatgaacatcactccctgagtgcattccccaagaagcactttataaaatcggataatacaatgttaaggattaggtctttagattgctcaagccaagaccagttcttctgatcagatttttttatcaaaatgctttgtcttcttactaattgtccagcctgagcaagcctctctgtagaattcatctctaatggttgtccattgacacacacaaagtagatactgtcaaactccattagctcagcaaatctctgtttgtagaattcttgagctagaggacctccatcttttgttctgcgccgtatgtggagaaccacagcagaagattgagaaattcagactagtgtttccacattcctaaaagccgtcactgtccgacaaatatatttcggtctttctgcatttagctgccctgaaaaaacagttaaagtt

SEQ ID NO: 297445 - DNA, 466 bp, Homo Sapiens
  misc_feature (269)..(269): n is a, c, g, or t
  misc_feature (293)..(293): n is a, c, g, or t
  misc_feature (313)..(313): n is a, c, g, or t
  misc_feature (398)..(398): n is a, c, g, or t
  misc_feature (436)..(436): n is a, c, g, or t
  misc_feature (452)..(452): n is a, c, g, or t
gggaccagaatttaaccaattccctatgattgttcatttaagttgtttctcatcttttgtttggtcacaagcaccatgcatgtccctgttattggaagagatgtgcagagctggtttttcacaaggaagcctcaggcattggacagatgggtccctgaccttggcccttccagcagatccaccgtgtgtcctgctcctgcactggctttttcagtgacagtggaggagcctgcagggaaagccagtgagcaagggttcaactggctctntttccttgcactttcacctagttntcatatctcatctgtttttnatgatcatttgacttgttttcacctttattcatgttgacattatctcactgaccaaacactttccagcagaacctagaagggatnaggtgggggctggcacagagaggagcagggggaggaanagtcaatgagtatttncccttctatgtcta

SEQ ID NO: 297446 - DNA, 473 bp, Homo Sapiens
  misc_feature (123)..(156): n is a, c, g, or t
gcaccgtcatatgtgcggttcattattatacagcacatgtctgtatattatctttgtcattttgtgaaaacctgtcactttgaaatgctgtctcttagcaaaagggatcataattcattgaannnnnnnnnnnnnnnnnnnnnnnnnnnnnnnnnncatccagaatgtagactagtgggaaacacatgaaagagctggactactcaagggtgattggcagtggcctcgtgctgcctcttgcactggggagggtggaggaggaagagtggtagcaaaaggccatttgctagcccaaccctgtcctgcagggctcctgtcaagaagggaggggaagatggaggaggacttcagttaagtaagtcccctatcttggtataaacactattcttagggacttcatgtttatgaggacaggttcagtttcaccagcataaaaaccttcaaaaagcagtatgaaaatagtattaaataat

SEQ ID NO: 297447 - DNA, 582 bp, Homo Sapiens
atcttattcaaaattcagagaaaaattcagaagtgacctattagatgtttgagaatgtgctatacagcatcaggtgcacaagttcctgtgaataagaagcaaaaaagctagcactttccctacttctgtttttaaagaataagcttatcaatggatattgaggaaaaaaactactggtaatatttaaatggtaaaatgggtacggtaaaataatattacgagaattttttcaagtaatacattttgaactttaagttttcttctgttaattttatctgtttataggagtaatcctgttttgttcacttcagtatattcactattcctttcccttacagtcaagcattgggcatggccttgatattgctggtgattacccatagggctcaatgttcatcttttgtttctaaattccaaaagcaaagttgattctaaaggatgataataatcattaataattcatagaatacccatctccaaaacaggatcaggaatgctatagacaataataagcacacattaaaccaactgggcactgtgcccagaaaatcagccaagtacacacaataggcaagaaaagag

SEQ ID NO: 297448 - DNA, 381 bp, Homo Sapiens
gtaaaagacaaatgaacaacgtactcagaagagatgaccaaatggtctgatttcatgttggaaagtttcttctggtggtcttgaatctgcgttttaatctccttaaaaatgcctttttagcacataagcaaaattaaacattattgttttattaaaaactatgcagtgctccttattagttaagagaaaaatctcttaaatcctttttgttaaggacatgtgtaatttaaggctttcattttgacagcctggtttcagctgacaggtatgttaatctctatttgattgctttggtgaggagttgaaaatcacctaatgcctggcttagtgtgcatttgtaaatgcgctttcttttagttttcatttcatgcaataatgaaa

SEQ ID NO: 297449 - DNA, 394 bp, Homo Sapiens
aggcaaattaatgactcacaatgacaaagagtaccctttattaaatgtgtaagtcattatacatgactgtcaatatttttgcctcagtagaaaatatagatacaatcactgctgcttacaaatttcaaatctcaaattgtaaaaagtttcctacaaagatgtatatacctgcttctctacaaagtcctgtctccacttgtcaatataatatttgaagaacttttcagactttataattccaacaacatatgcttccagagaatagcacagtcaaaagtgactgccttagaattcacagtatttcatatataagctgtaatagttcttagaattagcttcctgagggcactgcttatctatccagtgatagtacagatcaaattctgtttgtttt

SEQ ID NO: 297450 - DNA, 501 bp, Homo Sapiens
  misc_feature (189)..(400): n is a, c, g, or t
  misc_feature (407)..(407): n is a, c, g, or t
  misc_feature (443)..(443): n is a, c, g, or t
  misc_feature (445)..(445): n is a, c, g, or t
gatccattcagagattcaattggcttctttgttccaagctgtgttggctcttcctctgaggtcagtgcacacagaaagccctcactgctgtggtgggggagggtaatgggtacagatgtcgagggcaggaggtgggaaagcagtccttaacatacatggtgtcatactctatatcaagatatatccccnnnnnnnnnnnnnnnnnnnnnnnnnnnnnnnnnnnnnnnnnnnnnnnnnnnnnnnnnnnnnnnnnnnnnnnnnnnnnnnnnnnnnnnnnnnnnnnnnnnnnnnnnnnnnnnnnnnnnnnnnnnnnnnnnnnnnnnnnnnnnnnnnnnnnnnnnnnnnnnnnnnnnnnnnnnnnnnnnnnnnnnnnnnnnnnnnnnnnnnnnnnnnnnnnnnncaaaaanatatatccctggtacatgtgcctgcatatggatagnanacgtgtgtgcacaaatgtgtgtgctccatgtatgagtgcacacgtgcattcccctg

SEQ ID NO: 297451 - DNA, 480 bp, Homo Sapiens
cagatacaagttttctaagaatttaattttcatttgaaagcttgaattttatcactggcaacaaatactaacagttgttttccttgaattgacatgcccacttcatttatttttaagaaaatatctgtgaaatacccaagttcgaataattatagtttgcctgtaagtcattttttcaagtaaaaatggtgttccatgaaaagagaagttagttaggttcacgagtacttttccttgagacaacccttagacttttacatagagcagaaatgttttgtatgtatttcatcacacagaatagtaacgtgtcaagatttaataaaattgatagtttactgcttcatcaaggccatttttatgtaaaacacaatggcagctggtagagtttggtgccaccagcatgatttgtgctaaagggccagcagtttcactcactcactctctccatcaatgttaatgcaaacacaatgcaagaggtaa

SEQ ID NO: 297452 - DNA, 394 bp, Homo Sapiens
gggatctcaagccggagtccctggcctggcctccttgacgtaggtgttctcagcaagcagtttgcatcccaccgtctttctcacacttgcccccaagacttttgacagagcagacgtaaaacaggactcagaaaaccatttttctctgttcccatatgtagtaagttttgattcagttgtgcataaaccatagttttctgccctgctgtttgctttcaatggaagacagtaaagggaagatggtgctcacatctctccatgtgacatctcattaggaactaagatgcgatggattagaaatgtaaaacttcagaataaaattaaatttcagggctctataagtcccgttttcccaggtcctgttccgtttctacgtagataacccaatttgttt

SEQ ID NO: 297453 - DNA, 526 bp, Homo Sapiens
tacggccggggcctttgtgtttttacttcgaaatttctttgtgcagtgaaatatgctacctttgtatttgtgctttggtaagaatgtggactgtttgcaattgtcatgtgaaagtacaaagagaatgagaatgaattttgtgaaattagctcattcccagtctggcacaccatgtgccctgtgtgactgctgattctgctggcagattgaagtgccgaaccaacttctgctctaactgctaaaattgccagccatcattccaagcttttaaatcttgttgttcacatcagcgatgtcagattttgagcaaacatagctctgtctttaaatcccagtggaatttgcaattccctggattgaaaggaaagagttgttcctttttgcctttgaagaacttgagtggctgtgcggggaaagtcagcagaataaatctgcagccttgctgtgtcctttgagtcattgtagaaagctgagtgctctgttcgacattcagcagattggctgtcagagttgcaccgctgcttat

SEQ ID NO: 297454 - DNA, 452 bp, Homo Sapiens
cctgttactgatttatttctaaaagtggtgttaaagaaataaccactttgcctttttcaccaaaaactaattaaaatacaagattcttaaagcaccactaatgtttgcatatgctcagtttaggaaaatcttcagcactttgaatgttagttacctccaatgaaaaaaattcagttgctggtttagtagattagctatgtaacctgtatcaaaaaggaagtagttgtgctgtgttctacataccagacacattaactttaggcagaaaggacattacatttatacacaagtatactaattgttctgtgcttacctgtagttttactggtttcgaaaaatggcagatggggaaaaatactgtgatagagaaaaatgatgttgcacattggttagtgtaagtggattgctgaataggctctcagtattcagtgcttaatttctttatgccatct

SEQ ID NO: 297455 - DNA, 534 bp, Homo Sapiens
cggccgggcctcactgtgtgtttatgtatacacagataaccactgaagggatatgcaagagactgatagcttcattcctcactgtgtgtttatgtatacacagataccactgaagggatatgcaagagactgatagcttcattcctcactgtgtgtttatgtatacacagataaccactgaacggatatgcaagagactgatagcttcattcctcactgtgtgtttatgtatacacagataaccactgaagggatatgcaagagactgatagcttcattcctcactgtgtgtttatgtatacacagataccactgaagggatatgcaagagactgatagcttcattcctcactgtgtgtttatgtatacacagataccactgaagggatatgcaagagactgatagcttcattcctcactgtgtgtttatgtatacacagataccactgaagggatatgcaagagactgatagcttcattcctcactgtgtgtttatgtatacacagataaccactgaagggatatgcaagaga

SEQ ID NO: 297456 - DNA, 498 bp, Homo Sapiens
  misc_feature (319)..(411): n is a, c, g, or t
atctctttttgcagtcctttcagaaaatgcttcaggggcttgattccatttgtttaaaatttcctttgaaagctctgctcctgtctgcagctgatgtgagtgaaatagttttggcacccattcagtagagagtttgcttgattttaatttttcagtggaattatgtaagctgaaccaactgagatgtttataatatttttttgtgggggttcatactttcctacagccttgaactcctaggctcaagtgatcatctcgcctcagcccctgaagtaggtgggagctggctaccggcgtgtgtacccacacctgactaatnnnnnnnnnnnnnnnnnnnnnnnnnnnnnnnnnnnnnnnnnnnnnnnnnnnnnnnnnnnnnnnnnnnnnnnnnnnnnnnnnnnnnnnnnnnnnacgtaagcctcctgagggaataaaggtgtgagccacagcacctggctggtattgcctatttttgtgctgttaatagttggtcctctt

SEQ ID NO: 297457 - DNA, 523 bp, Homo Sapiens
  misc_feature (81)..(95): n is a, c, g, or t
  misc_feature (256)..(266): n is a, c, g, or t
  misc_feature (327)..(327): n is a, c, g, or t
  misc_feature (379)..(379): n is a, c, g, or t
  misc_feature (435)..(435): n is a, c, g, or t
tacggccgggtaatacagaggttttcttccttacaaatttgcttctttggggaaagtaaatcctgtctgaacaacacaggnnnnnnnnnnnnnnncccgtgtcttcaaaacaggagagtgatggttgtatgttagcagattttttctatgcgtgagctctttgttttaatatatttaaaccatctaccgtgtagagtagctttaggatgcctttttttcctaaaattgtatcaatctctgaatgcaggctagagcnnnnnnnnnnngcctttatacttaagtaaactaattttacctttttaaatccttttgaaacattttgttagngggtcttgaaagaccattcctttctgagtgggaataaatctcgagagcttanaactatttgggcacaacatttttaggataagcatggagaaataagctgtgactcanaaaataaactgttggtgcagactgaaatggactccttcagggtgaaaaggcgacttgaagtcttatcacaagctgaaaggggccttgg

SEQ ID NO: 297458 - DNA, 266 bp, Homo Sapiens
tacccatttttctcttttattggttaggttgagccactattaaataacagtttttttgggtcaaaactggttgaatactcagcagttccatatagttcaacctaataataccattgaagggaaaggagggaagaagacatagaataacttaaaatatataacgagggcttgaaaacttaaacataaaatttgagtattttaaaacattgttccatagttactacttttatattattgagacgtaacagtatttaccatcctcctaa

SEQ ID NO: 297459 - DNA, 394 bp, Homo Sapiens
  misc_feature (56)..(56): n is a, c, g, or t
gccctgagcccaggtgcatatcttcccatcagggatgagtggtcccacactagcantgcttgcctctcctgtgacaagagggtaggatatccgtaggactctgagactgggccctatatctcaatatctcatccacactcactgataagatgccggaaatgaatgcactgtgtgtagctgtcttgatttagtgggaggatgtgctgcttaggtctccaaagatgcccacctgggtcaaattcagaataatgaactcaggtacatcacccagaggcatttagaatggactctctcttcacctggattatgtgctgagtgttaagtgatttttcaaatatctgggggaaggagtgggaagagatacactctggtcatcctttggtgtggtttgggg

SEQ ID NO: 297460 - DNA, 513 bp, Homo Sapiens
gaaacacttggtcagtgtttccaccgatctttgcatcactcagcattcatgcctaaatttgtggtgttctcagaattgtgctaatgtgtaaaatatctctctatacttaactatgagtacagtctgttggctctgtaggacacaactcaaagtgtatgtatttttctagttatttcttaaattatgacaatatgcttatctgatatatgtggaaccagtttgttaaaagtagtctgttagtttttaaggattagtcttctaagaaagattttctctttcttttctaacatgcaaatgagtgcatgcttaggggcttgatggcaatgagtgggatatagttaagcacatattaaaggcataacataataagggtgtcctctggaaagaaaagcctttacacaacccaaaataggtaaaaatgtggccttcgcctgtggctttaatcaatacatgccacagttatcgtcggacaagaattgaagccctcaaagttaatcttttccatctttcttc

SEQ ID NO: 297461 - DNA, 531 bp, Homo Sapiens
gtaccttgttgatgtttaaatgtttggataagaagtaaaaattcattacaacaaactgaagatagctcacatttagatacgaatttagttgaatcagaattgggcagggtttctgatttaaattttaaaatatgtccttatcttatttttagattcaacttgtacatcaagccacagcctacagcatgtaaaacacagttagcgctagactcatgtgccttcttcatttaatttaaaccaaagtttttttaaaattaggatggcacgttttttgtgttataggcaaacaaattcatgaaagttacattaaaagaagtatacatctgttggtaaatgttagaatcttaacatttcagagctggaaagagaccttttgtaggagagcaaagacagtttgctgttttgacagagtgcattcttagctttctgtgaccatatattaaaagaaaataagctatgtgacatgagactacttgagaaatttagctaatgcatattagctaaaagaacattagaagttgccagttagaa

SEQ ID NO: 297462 - DNA, 171 bp, Homo Sapiens
aaggcagcgagcaggatcccctcctctgcgtgagtggcggggcgtctggctcttcgcggcggcggcgaggggaaagggagcgcgggggctgggtggaatcgataagtgagagagggggggaacgggcgggggacagggaccagcgaaggcgtcagggggaatctcccgagg

SEQ ID NO: 297463 - DNA, 485 bp, Homo Sapiens
  misc_feature (17)..(17): n is a, c, g, or t
  misc_feature (48)..(169): n is a, c, g, or t
gtctcagcttccctggntagctgatactgcaggcatatgcttatgcannnnnnnnnnnnnnnnnnnnnnnnnnnnnnnnnnnnnnnnnnnnnnnnnnnnnnnnnnnnnnnnnnnnnnnnnnnnnnnnnnnnnnnnnnnnnnnnnnnnnnnnnnnnnnnnnnnnnnnnnnatgagcgaccacacctggctgtcatcctatcctttgaaactttgaagccaggtattgacttttctctagctatgaaagtcttagagggcatagtcttccaacagaaggctatttcatctacaatgaaaatccgttatttagtgtagccaccttcatcttttctcttagattttctggataacttgctgcagctctctatcagtccttgctgcttcaccttgcacttttatgttatggagacagcttctttccttaaacctcatgaaccaactcctgctagcttccaacttttcttctgcggattcatcacctctct

SEQ ID NO: 297464 - DNA, 669 bp, Homo Sapiens
ggagtctaaaagtattctaatttataagaagacattttggtgatgtttgaaaaatagaaatgtgctagttttgtttttatatcatgtcctttgtacgttgtaatatgagctggcttggttcagtaaatgccatcaccatttccattgagaatttaaaactcaccagtgtttaatatgcaggcttccaaaggcttatgaaaaaaatcaagacccttaaatctagttaatttgctgctaacatgaaactctttggttcttttatttttgccagataattagacacgcatctaaagcttagtcttaaatggcttaagtgtagctattgattagtgctgttgctagttcagaaaggaatgtttgtgaatggaaacaagaatattcagtccaaactgttgtaaggacagtacctgaaaaccaggaaacaggataatggaaaaagtcttttaaagatgaagtgttggagccaactttcttatagaattaattgtatgtggctatagaaagcctaatgattgttgcttatttttgagagcatattattcttttatgaccataatcttgctgtttttccatctcccaaaagatcttccttctaatatgtatatcagaatgtgggtagccagtcagacaaattcatattggttggtagctttaaaaagtttgtaatgt

SEQ ID NO: 297465 - DNA, 750 bp, Homo Sapiens
  misc_feature (568)..(568): n is a, c, g, or t
  misc_feature (584)..(584): n is a, c, g, or t
  misc_feature (602)..(602): n is a, c, g, or t
  misc_feature (635)..(635): n is a, c, g, or t
gacctgttacagctagtgaggaaattgtttttttacatttcaacttttattttaggtacagggggtacatgtgcaggtttgttacgtgggtatgttgtgtgatgctgagatttggggtatggatcccgtcatccacatagtgagcatagtgcccaataggttgtttttcaactcataccccactccctccatcccccctctaggtagtgtacggtgtctcttattgccatgtccccttgtgcttggtgtttagctctcaattacaagtgagaacatatggtatttggttttcagttcctgcattaattcgcttaggtttatggcctccagctgcattcacgttgctgtagaagacatgatttcattcttttttatggctgtgtagtattccatggtgtatatgtaccacattttctttatccaatccaccactaatgggcagttaggttgattccatgtttttctgttgtgaatcgcatggcaatgaacatatgagtgcatgtgttttttttggtagaatgatttatttttcctttgggtatatacccagtaatggaattgctgggtncaatggtaactctgtnttaagttctttgagaaanctcaaactgctttccacattggctgagctaatntacattcccaccaacagtgtataagtgttcccttttctccacagcctcaccagcatctgtcattttttttaactatttaataccattctgactggtgtgagatggtatctcattg

SEQ ID NO: 297466 - DNA, 342 bp, Homo Sapiens
gacctgagaagaaatactctcctgccatttctctttgagattataaggcaagctctttagagtgggagtggttatacttctacaatatttctgtgatttgaattttaaaaactgtacaaccaaaacataaaaataaagtggataccaaggctgaagttattacagctgtcctctatagtaatatgattttgtttataatctgtgaaagtttaaggtttaaatttattgacattatacgtttataaacaaattagatttatactaataaatattagtaatagttttttatgtattgaagtttctcactggattttgtctaaagaaaagtggttctgttgttct

SEQ ID NO: 297467 - DNA, 442 bp, Homo Sapiens
  misc_feature (56)..(137): n is a, c, g, or t
attcaaagtaagtggttctgagaataataaaattatcctgagaatccagaaggtannnnnnnnnnnnnnnnnnnnnnnnnnnnnnnnnnnnnnnnnnnnnnnnnnnnnnnnnnnnnnnnnnnnnnnnnnnnnnnnnnctcaggtgacgtcacccactgggactgactcttaagaaagacgcccctttgcaatgagaaaggtatctctctcctacaaggttacagtaggtaagatgtttttggcttatggtaaacagcttgtttgagaagttgcctaagaaaagtataaaccccgtgtcagctgtttgttagacttactcatcagcccctgatgtggcatccagacaccacctacccacccatagataatctcttggcaacatcaccactaagctggccctgctggctcacagaaagaacaaacagcgcacttaggagctact

SEQ ID NO: 297468 - DNA, 273 bp, Homo Sapiens
gtagaactagaagttgaacaccctcagtttcttattgctgacattgagagggtgggtatcaaggacggatgtttcagagaacgaagaggttcttggctctttgtaccatctgtgcctgttccagctctagctgcccttgtttgacctgcttcttgcaggaggtagtggccagcatcgtagggaatgcccatgaagtactctgggcttctccgatgtaaagggtgagaaaaatcaaagccagctcttatctccatccacatggtggggataaaa

SEQ ID NO: 297469 - DNA, 576 bp, Homo Sapiens
ggttacagggattaggaagtatccgaggtacaatttgagcccagacccggagggtcctcacctagcatgcgatgccacctgctacctgcagcctcgggcaggaccctgtctatgtgactctcgggccagatgtggtcagtccttatgagtaagagatggtgaccacctggcctcaatcaagtgaccttcagtcagaggcccctactcttctcatgggcccctttagatggtgatgattacattgcagaattgaggctcaagttgtttcacaaactctctttccagcttttgtagttaataggaaacattgaagtgatgatcaaattggctgtaaaagtctcagttaatgtttggtaatggacagaaatgttcagtgatattttggcagaaagcaacctggcagggctctgaaataggagacgaaggttttcacacatacaggttaaatctagatgcccctagtatattttggaaggtttctgacccagcctagtgaaacgtgtaaggtcacgtttgaaaaacccacccttctgtcctcggtgtaacacaggcctccctcgctggtctttctggacc

SEQ ID NO: 297470 - DNA, 228 bp, Homo Sapiens
  misc_feature (50)..(63): n is a, c, g, or t
ccatgaattataatatatttagaatatattcaggcttcctcccacgactnnnnnnnnnnnnnngagtatattatagtgtcaaaaagcatggctaatgggaagtgctgctaaaaagaggtcctgccagacctgctttatctaatcctgaggaattaattcagaacttaataggttttgcagttgtggtttgtttttaaaatatcaataattctgagtagattcaaggtc

SEQ ID NO: 297471 - DNA, 179 bp, Homo Sapiens
caccattaatgataccaggctttgcaatgtgtttgatttagatgctaaagactatttattggttccatatttcaataattcactgaggagaaaagtgagggaggtaaacatagaatctgtgaaatcaaaatgcctttctagagcaagacaatcaggtttctatagtgaaacaagactct

SEQ ID NO: 297472 - DNA, 337 bp, Homo Sapiens
  misc_feature (47)..(55): n is a, c, g, or t
actatacaatcacatctggattcccttacatgatgttttcgaatacnnnnnnnnncatcacgctcctgccagatcataattttgcatgggagatacatttccagctactgcagccgtggaactaagtgttgctaatgaattgtgaatggaagtgatcattcatctccagttgtcttcctctttctgtgattgaaacccacatttggagctgagtcagctttgaacatgactgtattgttaatgcttaaaagccacagcttgttctcggctctctccctgcatgaatcagcagcagtcccaggacaggcagagaccatcaggagcttaaccttcacac

SEQ ID NO: 297473 - DNA, 621 bp, Homo Sapiens
  misc_feature (85)..(85): n is a, c, g, or t
agcagggttgatgttgcagtcttgaacctgagacaaaattttttcctctttatgagacctcagtcttttctcataaggccctaanctaattggatgaggcccacccatgttatggaaattaatctgctttactcaaagtttattgatttaaatgttaatcacatctgaaaaatatcttcacaacaacatctatactagtgtttgaataaacaactgagcaccataaccaagttgacaccatcgcacacatctgtaagtgtttaccactatgcctgaaaatattgtagctccttaatgactgttacttgttttcctttctgaatgagactttacttgggtctttattttcaaataaggttataaatctgcctgcatctttccagatatacccacactgctttagtttgaggcactcagcaaaggtttctggaataaatagacagaattatagactcatcttatgtgttcctgaagcactctgttttgttcccttattaagcacttagcacttgtttgtattcttcactacactctagcttcattgaatttcagggatggtatctttttcttcattgtgaaaaccagtatattttccagcatatagtaagctctaaatatttg

SEQ ID NO: 297474 - DNA, 235 bp, Homo Sapiens
ttaccttcccattgcataggctgacttagtgtggtgatattatgagcattattaccttaatagaaaaatgtgtcactagattatgtctagaatctgtatccataggatggagcaattcactagaaagggtacagtaagtaatgctggcttcttggatggagaggcaagtgaatagtgtctgggtgtttgaattgtcctgtcagtgattgtgaatatgactgatcaggcttcatcc

SEQ ID NO: 297475 - DNA, 580 bp, Homo Sapiens
  misc_feature (557)..(557): n is a, c, g, or t
caaataactggtgaaccaccacgttccagtgagcacgcatgctcagtcagacataacaagtggctttctctccgggacagccacctgtaaaacaacctggaatacccctcccacccctgggcacagatgagtgcctgggctccagagagagagagggagctgaaggcctccaacaggagtccttccagtccagtcccatcccaacaaacatccagccaaactccttgctgctccatgggtcaacaatgtgcggaagcctgttggaccggactgcattccatacaagatttggtcccttccccaagaggaagagtgctacctagggacaagtgtcgtgcacctcagcatacggcctggtctcttgcctagggggagctgagcacattcctagagaaatctgcagcagcctgcatgcagggccacacatccacacacctcttcccctgtacccactcacactgcccccagtgcgacctaccccaccatgccacagccataagggtgggatgtattgaggataggctcctctggttcactgggacccctggccagagaanaatccagaagaaggagggaggca

SEQ ID NO: 297476 - DNA, 502 bp, Homo Sapiens
  misc_feature (179)..(196): n is a, c, g, or t
  misc_feature (342)..(342): n is a, c, g, or t
  misc_feature (440)..(440): n is a, c, g, or t
  misc_feature (489)..(489): n is a, c, g, or t
ggcctgaaaaggtagagtgaaaaagcatgacaatgctctgaactaacaagttcagatgtagagtatatgctgggggcgtagaatgccgaggtaaggcatgataaggtagacagaagtcaagatggataaatgttttgtattggaatctattctgtgggtgctgataggccagtgaaggnnnnnnnnnnnnnnnnnnaataggaatattaaggggtagaatttgagacattcctttaaaaataaattattcttgaattgggaaatcaaatgatagaattgtaaaaattataagcatatatgttggcaatgattatggctaataagtcgtataatatatggtgnaatctgttttatccctttcagataacatataatcttagtacagataagaccattttaatcaaaaaatgcatgatgtcatcagtttgtttttgaaaganatttatttttactttatggaattattacagactgtattctttcttaaanattctggcatttt

SEQ ID NO: 297477 - DNA, 454 bp, Homo Sapiens
  misc_feature (332)..(332): n is a, c, g, or t
  misc_feature (339)..(340): n is a, c, g, or t
agcattcctaaagggtgctcataaagtagatgctgtgtgaaaaggggttctcagtaactttggaaactttgaaattttgggtcagttgatttaaacagatttggttactgcagtttttcactagtggaacagagaacctccttatcttacagggttctgatgttcatggaaatgttgcattgtaacaaagaaaagacgacccagatgacctgtaattctgccacacagagataaaaaacactgaacatcttgataagtgatttctaaaactgttctaggcttatattttcctttgtgtctttaacacaaatgtgatatactgtatgtagtanatatacnntgtatatgccgtcttgaatcaatagcttcatctctgcttttattactgctcctagcgtaaattatttagcacaaatgcagacataatctcagaaaattattattttttgggaca

SEQ ID NO: 297478 - DNA, 341 bp, Homo Sapiens
  misc_feature (121)..(133): n is a, c, g, or t
  misc_feature (191)..(191): n is a, c, g, or t
  misc_feature (241)..(241): n is a, c, g, or t
  misc_feature (322)..(322): n is a, c, g, or t
gggacaaggtccttcagtaatttgtgaaaagctaatggccgtatgaaatctttctccctcattttgttctttcattggattatatatgtctcttctgtttgaatgttgtaaggttttgggnnnnnnnnnnnnnacccccagaggacccccatattttttaatgaaagaacagtgggaatattttgtagtgnaaacattttcacttatgtcaattttaaaggctgtacttgaatctcagaanagtcaaatgcactcttgagcatccagtcagcctcccctgatcacaggaaggatgtgatctctcattctggactctgagaanaaacttccaaagtgaagtt

SEQ ID NO: 297479 - DNA, 560 bp, Homo Sapiens
  misc_feature (148)..(148): n is a, c, g, or t
tctgttgttccacgtgctaattaatccggtgctatctttaagacttttatgttcttgaattaattttttagatgatatgcttcagtagtgagggggcgatgatgaagacttcttgattgagttgtcttagaaacagttaatatttcanagtgagaaattaacaggaaatacagggagagggggcaaaggattgtgttcttaatgttttaaggatctcgtgtactcagagagagagactttgatgttttgaaaattattaccacatttctgtttcatagaatagatttcgtattgtgatatgctgcctgagttgggtgctttctgacaccatccggcattactagatagtaataaactgaaacccactaaaacaagagggcaaacactttctcattctgggaacttcaaaacttctcttgggcttatttagacgtgatcatcctacagctggatgcatattgaggcatgcggcacataccagaaaggtgtctatttatttaacgcatgttttggatatcattcattatgactttatggatcttccctctttcctccttttt

SEQ ID NO: 297480 - DNA, 503 bp, Homo Sapiens
cggccggggtgataggacttacttagtaggcttccttgttgccatcagcacgtccaggaaaacatttttgcacaacactatgttgtattttctgttgctttggtacagtaaaagaaatgaggtttaatgaaagagaaatcagtcctttataaaaataaactttcttgagagatacatgtttagcaactttgaaccagcaaataatagacctttgcttcaccactgcaatcccttccaccatgtcccgtcctttgactgaatagtcaatcagtaacctcaactcttccatggagaaagagccgagaatgaagagctgactcacaacgaagtcaagtggcccttcatgttaacctgtatttggggtgatttttcagaataatatattctcagaggtcaaaataaatttagatatagcacaaaacccttaatgtccagaggaaaaatgcagtgaccacatttctggggaaaaaaagatcaggcaataaaatctaacccaaagctca

SEQ ID NO: 297481 - DNA, 532 bp, Homo Sapiens
cggccggggggtggacgagtgcaaggaagacttcctagataaagcgtggttggagtggaaatctggaaaggtgaggcaaggatggaggctggaaggatgggggtgtggaattactccaactcagggggcactgcgtgtgacgggttgaaggaaagaaggagcacttttggttaggagatgaagaatgttcagtaagattggaatatatccaataatttattgtagggacattggtgaggtgtcaaaacctttgacagaggaatgggagaacagattcgtgctttagtaaattagctagttatagtatgtgaacatatcagaagggcgtaagccctaaggcaagaagagtagctgggatatgaggtgagagtgaagtaaatcaagaataactgagcttttggcctgaggatcaggaagaaaagaattgccgttaattgaaatgaagattagtaaaggagcaggagggaagctagccagatgcagtttaataaatgggacataggtgtctaataccagtcactcacccacctag

SEQ ID NO: 297482 - DNA, 499 bp, Homo Sapiens
gctgatgtgtgagcaactcacaactcttgcaatcagcatgcagctcatatggcatcagccagtcagctaagaacttcattgtgtgcattgtaatggggttggattttgtgaaatggcttattttcttatgcaggagtgcaagttcactggcatttattggaaaaatgtaagcattgacagattgttaggctgattatggccccttcactgagtgaggaaggaacaagagcatcttctcaaatagaaaatacaaattattggtcagaagtctgtgcaactacatttgttttcaattggatgggagatccttgacatacatggatttaactttcatacatatgtgcatacaaacatatgtgtatacacatattttcataatatacatgtgcatatgtgtgaacatatacacacgtataaacatctgtgtctacacatacttgtattttctttacaaacaacttaaaactccaggagatgaggcatgattttaaatgtctgc

SEQ ID NO: 297483 - DNA, 457 bp, Homo Sapiens
  misc_feature (150)..(163): n is a, c, g, or t
  misc_feature (275)..(303): n is a, c, g, or t
ggccgggtatcctccctggataaggggggaccactatattgttattggtcttagggagttagagggagaaatgcaaatgtgtaatgtattgtcttatctagaatttacagtctggttatgggaatacaacacagaaggttgtgtaattgnnnnnnnnnnnnnncatcagattataagaagagggaagggcattcatgaatgcctggtataatggaaaaggctcaccttgaggagaggggccttggttggtctaggctggtggcagtgcagttgcnnnnnnnnnnnnnnnnnnnnnnnnnnnnnaatgaatgatgccagagggaacctgggctatagtggcttctttaaatttacggaaaaatataaatcaaagatgataatcttttcagcttaggagatgaggcaaacattggatatcagaacctgaaagttaatgggaacacaggacagtctagcc

SEQ ID NO: 297484 - DNA, 217 bp, Homo Sapiens
  misc_feature (23)..(23): n is a, c, g, or t
  misc_feature (67)..(67): n is a, c, g, or t
  misc_feature (143)..(143): n is a, c, g, or t
  misc_feature (150)..(150): n is a, c, g, or t
  misc_feature (193)..(193): n is a, c, g, or t
aactcttcaagaataatcactgngtaacattttgaaatatatacctttcagtgtttttttaatgtanatacacaggttttctgactaaattgatttcatatgctatactactagttctttttacctattgtttatattaacangtagcanataaggatatactctctaggatgaactattcttctacctaatntttaacaattgcatagtgctatca

SEQ ID NO: 297485 - DNA, 492 bp, Homo Sapiens
  misc_feature (355)..(355): n is a, c, g, or t
ggccgggggagtcaaggtctggtcttgatgtcttcactctccagacactgccagtggatgtctagtctttcctcaaatgtaaaatggattcaccttagataactcttgttgatctgggctgttttacagaaaaaggcaagtagggtactatttgtcagcctcatattgctaggttcagactggagttatgatcacagcttctaaattttttttgtatatactccctaatacaacttccagaaacatgaggcttccttgtcaacttccagaaacattaggctgagattattttacataaacttccagaccttaaaatcttgattgtgatattgagacaattctcaattcatttagncttttggaagctgcttaatctattctcctgttgacaaatggaaggaggtatgtgtatacctagaaagcacaatagaaattatttgctattgctgaaattttgcatctgagttaaatggcaaagcctcaagtacatta

SEQ ID NO: 297486 - DNA, 410 bp, Homo Sapiens
taggcacatcgtgtgtgttaaaatcagcaccccatgcacctgtaggaagagactgaggcaccctggaggcccctcccaataattaaaaggccctctggggcctgtgggagccctagctgatgaaatcacaaaggcctcagcctctaaagtgtttccagtaaaatgctaccaggattttcctcccttaaatctggatgaaagggctgtctgtgctacaaagtgcacacctggcgttgatacgcagtctgttgctgcctgttaactaacccaccagccgacaagttctgcccactggcaggagcaaggacttataaaaaatagtgcctccctcccaagggcttatgagctggttaagtgcagaggacaaatagaatgaaagaaaaggcaatctcggcatagtatttagttaa

SEQ ID NO: 297487 - DNA, 365 bp, Homo Sapiens
gatctctcccagggttcttagtcttcctggtgtgattctgcccttgctgtgcccataccccactgccaaggctccaaagctgcgggggcctcaggtgggaatttcagacatagagggtgtgggccaggacgaggtctcagggaagcatttcatcaggtttccctttgttcctgtagacattcgtagaagttctaaggcataggacttcctgatttgacttaatgtgtatctcagaaacaacggggagatttcgcatcccccccttgtagaagatctgtaacaggagttggtgtgttgcttggcagggagcgtgtcaaaaatctcagacacacaaaatcccatttcagacggccaagcaccatgac

SEQ ID NO: 297488 - DNA, 388 bp, Homo Sapiens
gtgactttaaaggatgtaactgcccaacatttgcagattctgggtggtctatgtgaccactttgtctcgtatccaaaaaccccggggctattggaacccttccaacactttttcctttgtcatagacaagtttatatataacttaccaagatgttggctgtcctggtgtattgccagacagctctcttttggttcccattccaaatgtgctgctgtccttctttgcatttcacgatatcaaagaaaccaccacccttcttcctaacagcattttatgccttttattccacattaaatgggaattgtgcctacttaggagtgcccctccaattaattacatgtgtccaagaataatccaagctagagacacaaggtgggaaaacacttc

SEQ ID NO: 297489 - DNA, 257 bp, Homo Sapiens
ataaggactagttgtaccggttgagaaagctgtcttaattcagatgcatccaaaaaatatgcatccttcaaaagagatacggctgcatacatttatactttaagaaacaccactgtgaacttcaatctctgaatgactcaaagaaaacgtttaaattcttcaagcttacagacataagaaagaatgcaataatattgtgggaactggtagagattttgccaaaaataaagggccttctcttttgtgtatgtatgagg

SEQ ID NO: 297490 - DNA, 714 bp, Homo Sapiens
  misc_feature (69)..(78): n is a, c, g, or t
  misc_feature (601)..(601): n is a, c, g, or t
  misc_feature (626)..(626): n is a, c, g, or t
  misc_feature (647)..(647): n is a, c, g, or t
tcagaggaaatcccatttaatgttagattgtttggcttttgaaattacttcttatagaagattgcattnnnnnnnnnncaactttgtgcttctgcatagcaatttatccattcagaccttttcttttagaataaggaaacttaaaatctactttctaaagactgaacaaagtgctagctgcaaattatcttgaaatcatttggctcttttctagcatgtgtgtaatcatgttttcttctgattcctgaatgaccatggtagcattagtgtttagcaattgttcaggggaaaattgagctattttccatagtggctagcaattgctacacatccttagatactcctctctcccataggataaatgttacagcacacaaaagaaattttctcaattctgatttggaaaatttcacaggtgtcattattgtatatctaagcaataattatctgaatgttttggcataaaaaattataatgttctaacttgttttataagttgaatgacttttcagtcccttgattttatattgttgagtgataatcagactgatagtagcaaatctgatcatacattactaaaatagattgctgattgtctatntaacgaagaacagtgggttacattntaaatatataatacaaaaatnttctctaacttacctttttccagaactacttctttaagcacttttcctattaatgcctattgttgat

SEQ ID NO: 297491 - DNA, 616 bp, Homo Sapiens
  misc_feature (69)..(143): n is a, c, g, or t
  misc_feature (156)..(260): n is a, c, g, or t
gactgaatgaataggggactaaaatgatttttatgactttttgtgtttgacacattggagattctgagnnnnnnnnnnnnnnnnnnnnnnnnnnnnnnnnnnnnnnnnnnnnnnnnnnnnnnnnnnnnnnnnnnnnnnnnnnngagatggagtttnnnnnnnnnnnnnnnnnnnnnnnnnnnnnnnnnnnnnnnnnnnnnnnnnnnnnnnnnnnnnnnnnnnnnnnnnnnnnnnnnnnnnnnnnnnnnnnnnnnnnnnnnagctatttatagctttttaacaactgagtaaattatactcttgtgatcaaaatttgaatcatatttctttcactctacctgatttctccagaatgtggaaaccatttgagagtattcttaatttatggcaatatagttatttgcatgatttcaataaaaacatgttttcttttgtaacaggacacaattggagacattggttatgtttccaaggctttgactgaactggcatattttcagatataaacagatgacttcgaggaattcaaattgactttataaggtgctaaaagactcttggaaggactagtctcctaccttgtctatgcaattttttttacatctcttgacttgtg

SEQ ID NO: 297492 - DNA, 653 bp, Homo Sapiens
  misc_feature (539)..(539): n is a, c, g, or t
  misc_feature (578)..(578): n is a, c, g, or t
  misc_feature (630)..(630): n is a, c, g, or t
tgctcttagcaactttgctaagtaaaaccccgctgccatccagtggcaattggctatacggcatggtagctgtaaaatatgcccttttctgccttttctccctcagattccacctttctcagatgctcccagttttttttcccagatggcacctgacacagtacttgacaggaaaaattgactttatgtctggcttaggtaattcagggcaagtgtgcatttatttaccttgtctcttctcctagcaatactaatttttatctacgttgcatttttattttctccccagatttgtcataacacacatactttttccttgaatatttttgttaccttagctaaagaattaatgcattgtggtatttctgcttgtcatagttttactttagagtagatttcgcttatatctttgtatttatgctttgagctgtggtttaccaatttcctagcatgtttcatgacacttatcctacatttcagacaaggatttatgtgtcccataggattcaagctggacttggagaaagagccagctagcnaatggaattattctgacttgtgaaaggttcagccttttnaaactaggctctgagaaattaaaaacaaatattcttgggaagaaactgggtntgtgagtacttggctagaaattt

SEQ ID NO: 297493 - DNA, 580 bp, Homo Sapiens
  misc_feature (158)..(275): n is a, c, g, or t
  misc_feature (463)..(463): n is a, c, g, or t
  misc_feature (503)..(503): n is a, c, g, or t
tctatttgctccagtgttgagttgaattacgatagaaaagatcattaaattagattgccctagtacctacaccaattgcatcaccctgcctgcccacagtcgtaagttgtgctgtttgcagagaatgccattggtgtgtcctgatgatgggggtgcannnnnnnnnnnnnnnnnnnnnnnnnnnnnnnnnnnnnnnnnnnnnnnnnnnnnnnnnnnnnnnnnnnnnnnnnnnnnnnnnnnnnnnnnnnnnnnnnnnnnnnnnnnnnnnnnnnnnnctacttcacagagttagatcatagaaagggatgaacattattgatctcctttttgggctcggttgagggctgttgcaagttgggcctggtttactttgttacagttttctttgctgtctgtaccaggaatagggaggcttctaagcggctggtttgtttttaggttgtgggttttatacatgttgtanagattttatttccctctgctagagtgcttaggaccagatntgtagcccctccagcaaagactccacaacataattagtcaaaatgttggctcccggctagtttattgttcttatttt

SEQ ID NO: 297494 - DNA, 498 bp, Homo Sapiens
  misc_feature (318)..(318): n is a, c, g, or t
  misc_feature (404)..(404): n is a, c, g, or t
  misc_feature (451)..(451): n is a, c, g, or t
tatatatatataagattttaaaggacaaaatctgtacaagtggacagttactctttacctcagttactcttgcctgacattatctgccaaggcatcataaaaacagtatgtgcccttcaaataggtttaataatactaggcttacaaaaaacttccatactgtgcttacttaaaattatgctcaatgtatgccaaacgcttaatcaataaaagaaaaactatgccatacaaggagggaagagggagttattaagcaaagggagttacttagcgggggagttccagtttagcctcatagcagtttagtctaaacaaatnttttaagttattttttaataggcttagcttgaaaacccaaaaactgtcagctggcttacagtttaaatattaaaccatgttatgtntattactgaatctattattcgaaaattatgtactatcctagcaccanaatcaaggaaactgggcacttctcatatgaatgaaactaaataaact

SEQ ID NO: 297495 - DNA, 557 bp, Homo Sapiens
caatatctttagtggtattcccgctaaaatcgagacggtcaatcaagagagcaagtggacttttttcccagagacaatcaatatgactatgtgagcatgatgaaaagtggggggaccctaacctcacctccgtggtgttagattgccgttaaagagaagacgataatttatttgaagccactgtagcttttgtgagtccaggagttgggtgacattattaaaccctcgtggcagtgtcgctgaagttcatgagtttccaaaatgaaggttccaggtgctcagcggtacggagaattgcatctagagccttaggatttaacctcctgtttaggataggcagcaggaaatagcttgttacggttttcccagatttgctctatgatgtagtgttttgactcttaagaggtataggtgtatagaattttgtgaccggtggcatttctttcaagaatttcttttttagtaaaaccaagctgaaggtttagtcacccccgtgagtttaagataataacatatttaagtggaaaatatagactcctaagtttcataaataacat

SEQ ID NO: 297496 - DNA, 478 bp, Homo Sapiens
gttgaaaaatgcggtaaggatataagggatttgttacttgtctttcttgaaatgttacagttggggtgcggttgcttctatcttctggacctctgcccattcagcatacagctagaggagtctttgggcaaatccacattctttagcactagctaggctttgactccaaagctatctggtctaccttgatgttctgagcaggaaaactgaggacctcaagaaccattccaaatttctactcattctccctaagacccagagcagacccaggacctaaagaaattacatcatctctattttcccttggctccagcccactcttgtttgaacctcccacttttgttgttccaactacttcttgagatgaaggaagggcagaacattggccctcttcactgaagtcttcaccccttaatccagggttcaatttttagttcaccttagcctgtttgagattagaagctgggccttaacttac

SEQ ID NO: 297497 - DNA, 514 bp, Homo Sapiens
gattatgacgttggggaaaggctcagtggtgtagaaagcttatagcaggttcaaagaagaatttgggtgaagcagaggctttttataaagggacttgaatgctggtggaggtgttcagtcttcatcctgtgggcattttaaggcaaaaacaggtttctacaggtggatgacctttaattttcaaacttttagagccaaactatgaccaccaccctcccttcatgtaagtggtattttatgaagttgaatctggcaggtttttatagtgaactaaaagagaactgacatgctccagtagttcctaaacctgcctctgttttggaatcacctgagagactggatacatgtagaaatcatggttccactcctcaatattcagtaggtcttagaaaaactttggaaactattttagaatgcctccatatatgatccttccaaatgctaagttggcattttgggagctctgggcgtggacacagaggtgtccaagcatgagataatgagggtctggact

SEQ ID NO: 297498 - DNA, 495 bp, Homo Sapiens
ttgtggcctgttgctcacaaatgaaacatcagtacaaaatggtgcagtgcaagttactagttataaattcccgtagtttctatgaggagtgtcttgctgcaaacgtttctttagggaggaaggttttcttttaaaatgggggaaaaagtaattttaggtggtcttgcccaattcttatttctattaactgaagtagatttgagaacaagaatcaaaatcttctgtaattttcatgttttatatcttcagatgtgaaatccaaacaaaatgaactctccacagctcagcctaaagtttctgataaacctgttacctagcactgttattttttgggctgaggaataactattggtaaattttgttacattttgaagcaaagcatttgtaacaatttgtagaagtaagtagaaaggaaggacatggtctcttacagttgttccacatcctgctcttagttcctggtcagcttagcaagttctttttggaggagccaaa

SEQ ID NO: 297499 - DNA, 716 bp, Homo Sapiens
  misc_feature (596)..(596): n is a, c, g, or t
tgggacttcaactgggatgggtcatgttttatttcttatactgaatggtgagtcaaaggtctttgttatgttatccatacttttctgcataacaaatgtttcataatatattttttaaaaatcggatgaattgtgctacataaatagcttgagtaaaaaaaagtgtgagggtttggggacttactactgaagcctgtttattcattctgatctgccaaccatttttaggtcttcaagaaaattaaaatgcaagcagccaaatgcctttgtctttataagctgtggaaactataaaaactgaatgtttcagtctgaggaattgagaatgtggttgtcctttgaaaaaagtaactatcagatgagaatatgacaggattttttaaataacagaaaatattcactatttcttagtcgtttgactaagaaatatacaatatcaagaagtagtaaactcttcttgttcttttatttaatgcataattcaaattctacaaaggcaaggatccctgtccctctgtccaacaagcccttgactttctaaatctgcacggggaccttggcctggcctaggcaatgggctgagctgctcattccantggggttgagccagcattgctttaatgctttaggctgttgcgaccctagaaatttaggaactttgactaagctccgttgctctgaggggaggggatgcggacatgtttttgacagccatg

SEQ ID NO: 297500 - DNA, 696 bp, Homo Sapiens
  misc_feature (15)..(15): n is a, c, g, or t
  misc_feature (649)..(649): n is a, c, g, or t
  misc_feature (653)..(653): n is a, c, g, or t
tgggtgtgcatctcntgttagatcaaataggcatttatattgaagctctttcatccattccaatttcatatacaaaacagggagacgtgagggatcccaggatggactcgcgactcatatatcttacttcagggtgaggagacactgctcttccttaatcagggcctccgtggagtgcgaaatgcccgagggagaacactttctgacgggcagctgtgcccatgttgggcagctgtgcccatgtcgttcctctggttggttgggcagggggcacaggtcctgctttgccctttctccatctttgtggcagctagctgcgttcagaaaccatccatccgcccacccgtaccttgcctgaatattctctgagctgcctgtccccttttctctaactttttcttcctctgactgaggtcctgtgcacgtcagattttcagcattgttttagttacaggaaatattttcagtccatcgttcatcttctcagagcatgtcttctttctctcatcctggatttcatccttgggcccttttgtatttctgattctggtttttttagtttctgatggttaggtgtgatattgaaatacatcttttcattcatcaaggtatccttagatcttccagcagcctaatgtgcagtagaatntgtntttacccaaacgaataggcaatctactttttggggtaggtgac

SEQ ID NO: 297501 - DNA, 703 bp, Homo Sapiens
aagctaaatatgagccacagtggctttgtgggagtggtccgaaatgctgatgcaccttcacctgcgtttaatagagtatggcatctagaacaaagtgagtgggtgattctgcaaacctagaacgcctggaaactggcaagtgcagaggtcatgtgagcctcaggcacagtttgaacaggactctagctctgtttttctgcagcacttcttgctctgcccttttttgtgcctgggcttcatccttggaatgttttacctcatgggccatgagacggctgcctgctgaaacccaaactatagatatccctgttcccatttaggggaaagagcctggtttgctatattctcataggcttggctgactgtatatttctgaaccagtcattgaagccaagagaatgggattatggtaatatgaaccactattctcctgaaactgaatttggacatagtcccatccaaacctcatggtactcacacagtggagaagaggtggccccgcaaaggaatatctgggtgctgttaggagagggagagaggactggaagctccgtgggcaaccacaggccttctgcagacctctttagcccccctgtcagagaccctctagagagccgggctttagttcctgcctcaccttctgaaaaggcatcagccagctgcactgtctacacgaggatgctgagaggaccaggaatgatgg

SEQ ID NO: 297502 - DNA, 486 bp, Homo Sapiens
gtggcctgagacggccacagaagatgtgctgtggacgcaggctcacagcctaaggtctcaccacccggggtcaccgccaagatccagccaactacagggcggtcaacctccacccgattgtgaatacattcaccagatcagtcaagaagtcctaagccagcctttcagagaataataagatggcagaaatgggccagaaattgaccaaaactaatgaagggcagcttcacttcaaagcaatcactgggtaagcagcctcactgcgatgcctgcactgtgaaaagtcaaatgagaaaagtttatttatagctcaatcgaagtccttggccaccaacaataacctctcctggaggagacagggtgaccctcctctgacacatcaagcgacggaaatgtgcgaccagcaacaacacattccccaagaatatggaaacataaatagcctcaaacacagtgaccatgccaatgagattaaacatatctaaa

SEQ ID NO: 297503 - DNA, 733 bp, Homo Sapiens
  misc_feature (638)..(638): n is a, c, g, or t
  misc_feature (653)..(653): n is a, c, g, or t
  misc_feature (696)..(696): n is a, c, g, or t
tattgtggctgatttgatcttctatccagaccactgcacctttctccttatcagccataaggttgcttgctttcttatcattcatatgttcactgaagtagcatccttaacttccttcaatgacttttcctttgcttacacaacttggctgcttggcacaatagtttcagctttcagcctctcttggcttttgacatgcctttttcactaagcttaatcatagctagcttttgatgaaagtgagagacttgagactcttctattcacttgaacatttagaggccacggtagggtaactaattggtttaatttcaatattggtgtgtctgagggaatagaagtctcaaaaagagggagaggggggaatggccatttattggaacagtcagaacacacagaacatgtattaactatcttatatgggtgtggtttgtggcacctcaaaacaattacagtggtgacataaatgactactgatcacagatcaccatggacagatagaatgagattttaaaagttggaaatatcgcaattaccaaaatgtgacacatgaagttatcacctgctgttggaaaaatggtactgacagccttgctggatgcatggttaccagttatctgcaaagtgcaataatgcanagcacaaataaatanagtgtgcctgtacttctttttattagtaaacatgtacttttanagcaattcacaatttatagcaatacaatagtgtgttg

SEQ ID NO: 297504 - DNA, 657 bp, Homo Sapiens
tgctgtggcaatgtcagggaaagttacccttatggtctaaaaaggggaagcatgaaataatctacccctttttagcaaataatcaagaaaaagccacaaaaatgggcaaccagcagcccatgctgctgctctgcctatggagtggccattttttttattcctttactttcttaataaacttgctttcactttactctacggacttgcctcaaattctttcttgtgcgagatccaagaaccctctcttggggtctggattgggacccctttcgggtaacagcatcttttatctttgctgagacccacataaaagaaaatgagttttgtaccatggggtagcgaagaagttcctttaacagggagagtacatgaggttgacctaagtgggaagacggcagctcagagaaggtgaactctattgaagctgcaatatggctatctaagctgagtacttccctacatacattatcccattttacactcacaacaccccctgttgagctaagttttataatcctcttgttacagataactgagaagcggagctactcacttcggatcacacagctcctcactgcacagcaaaggctgattctacatgtcttggactccaaggctactggttttccctgtgaaccaccttgagattaggtggat

SEQ ID NO: 297505 - DNA, 586 bp, Homo Sapiens
ggtgaatagtgtgaacacataaacattaattttagaattttacagtgaaccatgaagcaaaagtgcaatcaaattatacaatttatgaaaaactgagctactttttgtgccatgcttcacagagatctaaagatatgtgtgcgtagaagtaatcgtgtagtacttttgcccatgcctttgtgttatgtctatatttagaatatctgaattgttagatttctcttttacagcaaaatgtgcttaagctaaaaagtaattcagtgataggctgttggctgtccattttataatggtgactatatacaaaaatgtgtctttaatattgtctgttctttctattcaaagacttctgaaatattagaacatcagggagaagggtgtcggtcataagcaactgagtcagaaagtataccgtagtatacagattgtttttttaaaatacaaggtagttgagacattttctttgtggttaaatggaatcaactagttatttttgaaaagtattctttcagttagtgctaaggaatccacatttgaagaggagaagggaaaacacttaagtctcttattgctattttctctctgg

SEQ ID NO: 297506 - DNA, 594 bp, Homo Sapiens
  misc_feature (577)..(577): n is a, c, g, or t
ggtaactgagaccaggaaaagacaattgaaagtggttccagttaaaatgggagccacagttttttcgtagtatatatctttaaaaaggtttgattaatactgttcttaaaatgacaacaacaattgtgaaaggaaatttcattcatcttatatttatcagtgtttgggttccagtggcacctgtgtgctaattcttagaaccaagaatggatcacataactcagtaggtatttctctgactgatttgaaagcatgataacagcttccacttcacgctgactttctcagcattgtgccgagcagagttatttttgcaaaaaggtttgaagatttcatcagtttttccagtagacaggcatggctccaccagtgttggtctcctctttgttggtgatgaactcgacatccgagatttactctgtcaggggtttgctgtgattggagtagtgtattagtcaatttcatgacttcctgcatccactacaagatctcactttttgatccggggctgatttttgtggcacagtttgtattatgggatgtatctgctactcagaaagggagaacaacagccatntacatggtgggcaggaa

SEQ ID NO: 297507 - DNA, 723 bp, Homo Sapiens
  misc_feature (547)..(547): n is a, c, g, or t
  misc_feature (614)..(614): n is a, c, g, or t
  misc_feature (638)..(638): n is a, c, g, or t
  misc_feature (688)..(688): n is a, c, g, or t
  misc_feature (706)..(706): n is a, c, g, or t
ctatgtgcagcatgaggaatcactgcatagttctgctccaccaataatatgattggtacagcaccaaaccatggcaaagttagatgttaaagaacataatgttgcaataatgatgttatattggatcttatgcatgaacaaatggaaagtaataatttatcaactgtgatccatgattaaaggcctcattatcactaagaaaatgaacttaatgaaaaaaattataatgagcaatgacaatattcctataaaacctccctctgggtatcaagagacatattacctgccaaggccagattttactttttaaggtttcctctctctcaccaaagacactagtgggcacagaggtgacactagagttagaatgttaccagagtcatttgcattagacagtttatctgatcatgaacatgttcccagtgagattagaaaaatgggaagcaggcctctaaagatcctccttggacatttgtgaaaaggctggctgcttctccaggaatgtctgaattaagcaagaattgtgccactgaaatagcttcttgtntttatattaaacaaggaacgattgtgcagtggatgacctggactgaaagatgtatgatggtcacgtntaaacatattaattcctgattgtnttcttaaatacccaccctagtcattttttggaaaatattgccagacatanttgacatgaattcatgtntattctggcttctgttc

SEQ ID NO: 297508 - DNA, 620 bp, Homo Sapiens
  misc_feature (383)..(383): n is a, c, g, or t
  misc_feature (492)..(492): n is a, c, g, or t
  misc_feature (538)..(538): n is a, c, g, or t
  misc_feature (572)..(572): n is a, c, g, or t
atgtaataatgtggctgtttgtgtgtggcttctttcacttagcataatgcgtttaggattcatccagttgtttgtatcagtagtttatttatttttatggctgaatagtttaatatatggctgtgtcacaatttgcttttctattcattagctgaaggatatttgagttgtttgcaatttttgattatgatgaaaaaagctgccataaataatcatgctctgatttttacatgaatgtaagttttcattttacttggataaatatccaggagtaggatttctaggtcatatggtagcatataattaactttataagaaattgccagaatgtttttcagagtggctgtacctttttgcattcccagcagcaatgaataagagtntcagttgctctgtatcctcacaggcattttgtagtaagacttttaaaaaatgtttttaattttagctactcttacaagaatttagtggtatctcattgtggctttaatntgtacttccctaatgactatgttaataatcttttcatgtgcttatntgctttccatagatctttttttagtgaagtatcntgttaagtcttttgcctttttttaggggaggtgtattagtacgctaga

SEQ ID NO: 297509 - DNA, 645 bp, Homo Sapiens
  misc_feature (612)..(612): n is a, c, g, or t
gtatgtaacatttccttaattaaatgcagtaggctgtgccccagaggattccagacagtggctggctgaggtgggtggggagcttttccttgagactgttggtcctaagaagccagcccttttggagaggcagctgcaaaaaggtgcacgcccatctcaccgacaaaactgtggaacagaaggccaccaagtgctgtggggaatcatgggtttcagtgctgagtgaaaatctatacctaaaaatcatctctgcaccttgctttgtttgttttctttccccactcatagtactgcaggaatctattctcatttacacagacctttttttaggcttactatgaacattggctgtattttttttaaacagtttagtgaaattttcttttcaaaacccacacttccatatgctgttcgtagatctctttctttaaaaactgatgttgagagatctctgagaatattataagtgcatgggaaatgggcccaaccaccgaacagctcttacattacaaaaccaaatgcaagggttagtcctgctacctgaggctggggaagtgaccttccttttcccaagattgtcagttgttgaagaaatagggctatctcattgtntacctccctcttctcttctcagggagactgctg

SEQ ID NO: 297510 - DNA, 493 bp, Homo Sapiens
  misc_feature (460)..(460): n is a, c, g, or t
gacggacactcagatatcccagtgtccctgctccacagcctttcttcagcaaccttggccagacacctagttttccaaacgctaacccagaagcttggggctggagtgggagaggcttaagctccaggggtggggtcaagacaggagcagggaggggaagacatggaccaagtccttcccctatggagggatgccccctcccccttcctggggaagctgtgccacaggaggctggggagattccagaaggtgtcacctgccaaggagggatgagcttgctgagacctgccaagactcaaaggacattttaaaacagcagagtttgtgaaaggcagcagaatcccgctccccatgcttgccttcgggaacctcactggagcagaaccattgcttagagcgtgagaaggagaagcgagtgtcccgtcacatgctggctctgggtgagacctcggttagtatntggtttctagagcacagctgcgtcctcacagcc

SEQ ID NO: 297511 - DNA, 613 bp, Homo Sapiens
tctcttgattagttgtctctcattttgtgggcctgattggaatgatcggtctgggagaaatgtaggggtataggaacccgttctcttcttccctccttgtaatacgatgttgcctggcatggttttgccgtttcctccctttcctatgcccactgaaaggggaagcccattatgttacatgtttagatagttgtatttctttaataggtagatgtttttattagttgatttttagatcaattcttatttcctggatatagctaccctgtgtggtaatgtgaattgggaagggcggatgaccagcctctggtcattgttatttggcagagaactataggaaccacccaatctcccaatcactctgatcaccccttgcctcttcactacctatggttttcaccttcacttcacaagagtccttaagctgccccatattactaattgttaatgctgacattaacaactagtcctctcctgtccaatgcccatgccgtggtgaagatgtatgctttacctatctttataagagaggcaagagtagcatggaaaagttttccaacaaccggtttcctcccatattaggctgcagcatcctgacttcaacgtacatagg

SEQ ID NO: 297512 - DNA, 298 bp, Homo Sapiens
  misc_feature (203)..(211): n is a, c, g, or t
cagttaaatggtcttcacactccctgtagaaaatcatttgactatatatactagtactcatactaattttatagaggaggtgattgacattgaggtgtgactgatagacaatattaacatatttttaaaaagaattcgttaaccttgaagtaatttatatttggtacagtaaaataaagtgaaggtttttagggttgtgaggnnnnnnnnnggtgtgttgcagtcttctcccaggatttttgtagttctgccaggccttataaaacgactttgaaatggttttaaaatagtagttttg

SEQ ID NO: 297513 - DNA, 430 bp, Homo Sapiens
  misc_feature (365)..(365): n is a, c, g, or t
  misc_feature (371)..(371): n is a, c, g, or t
gtttgtcttcttttctttactttctcaaatctcagtgggagacatgtagagttggggcctgttgctaccatctcaagtacaaacatttctttatgtctgtagtgaaagtggggatctgttgttgggtcatttcagcccatctcaacaaatgcaggtatcgaagtgtgtgtttgcaggatgaagacaagctgcattccaggaagaaagttttcaggcaaatagtttcaggaccaatcatcagttatatcaggacaaacaggacttcttcgtgatcgagggagcccaggctattgtcaattcctgaagcttccaatacattgaaaaatgaaggaatcttgaaacaggttataaaaattggatatatntatatncttttcattgaagaaattatgctttttacacagtccagtgcagtgactaaatgcgtgat

SEQ ID NO: 297514 - DNA, 599 bp, Homo Sapiens
agaagtaatcaactcagcataaccactttccctggggtatttctgtcaccaaaaggggtacaaaacaatgcttccaacacaggcataaggtgaatgtctactggggggctggggtcactgcagagaaaaaacagaaacagtgttaattctttagcactatggaggtcaggaagaaatcgaaaacatgtagtatcaaagcatctggccccaaaggaccactagaccaggacatgggggtaggggtagggtgaggaagaaaggaggaaggtcagattcaagggggtccagtctgtaaaaggccttccttctgtgagatttggatgtttgacatttgctccaattttgaacaagccactggaaatcacgtcttaagttctttgggttcatttcaatttgctccttttcctctgtacactggaacagtcagaaggccagctttgtgtggattcaggcaaattcaagtgacttcgctagctgggcctcagttttaccttgcagcatatagagtccctatcagaatgggggccttgcagagactgagatgatgtgaaattaacaagaaactgtgagccagctctgagagttcatcctctaagtat

SEQ ID NO: 297515 - DNA, 462 bp, Homo Sapiens
  misc_feature (61)..(73): n is a, c, g, or t
  misc_feature (121)..(132): n is a, c, g, or t
ggccagaggtgagatcctagaaaattatgtcaccttgcttgtttacaggccattgtacagnnnnnnnnnnnnngctgataatttaaaaacggctatttttgatcttaaatacctgtttgannnnnnnnnnnnaatgaggaaaggcagtgctccaatgagaacattctcacaggcaggtaacagaatagcacacttttattaggaggggtaaaaagagatgcagaaagcaaggaaatctttttagaaatgtattaaatactaaattttcttttgctgtaggttgtttctggcaaaaccggagttttattgatggacttcctttatgtactcactctgcgttagcatgttggagacataggatttgctggcatcatctggttatgaatgtgactgtggggcccctgggaggttcccaaggttctggttggtggttcgagtcaggactcaggttttcctgtctct

SEQ ID NO: 297516 - DNA, 490 bp, Homo Sapiens
agattttttattgagaaagctcactctggcaactatgggagtttgcgctggaggtagaagaaggaggtggaaggtgtatgcagtgctctagtagagaaaggatccatgtgttcagttagacagcaggagtgggaactgactgggaaatcctcagagatggagtccacaagacttgcctttgggtgagggaagccatgagaaggtgaaggcctcagtgacagtattctagttgagtactgagtgcacggaagttttatttcccaggagagaaacaggaagcgggacaggtttatgtggacagatgatcatttcatttgggcatgatgactctgaggtgcctgtgggacatgacatggaaatacctgttggggacacagcatgaaagctcaggagagtggtctgggatagagatgtgtatttggagtcctctgtgtattaattttcagttgaaactgtgggtttaaattaagtcactttgggtgaatataga

SEQ ID NO: 297517 - DNA, 211 bp, Homo Sapiens
agcggcacgagatgatggcatcgagtgtcgtcctggaggggggctacctgtgggacaggtggcaaagccgagcaagcggcacagacagtgaggagtgtccctttattgttggggttggagatttacagagagaccagatgtgaaatagtcttctaaaagagaaagggagtaactagggaaatttaggaggtggcaagacaacactatggcc

SEQ ID NO: 297518 - DNA, 473 bp, Homo Sapiens
agagtcttagaactgattcacgttccaatactgggaaaggaatagtagatctgacattgcaccagctgtctcaagtctcttaactattcatctataatttattttgtttgtctaaatttagcaatagcattgttgggtatccaactatctagcttctagagacattgtgttctactagccaaacataactttctgtgggtcaagcctcctatgaacaggccattcattttggctcatgaacaattaagtactgtaattggaactgccttgattttctagggagtggtgtgaggaagggtcctttaatcccgttcactactagtcatctcagttctaagatgatttcacttacagtaagcctgatacagcaaagagccaatgcgaatcttagtgatgatggtgtcctttcactaccatattccctgtatttttgaaaagtggtgcatcctattggttctctcatggaacatgag

SEQ ID NO: 297519 - DNA, 341 bp, Homo Sapiens
ggttatttcagttcttagaagttaataatcctttatagctcccttttatctttacagaatagcacttgatgactggtaaaaagaattaacgctatgggcttgcccacaggaatcaagcaaagggcgtatgcttttggatgagtttgccagctggggaccatactgagaataacggttctctctcggactaagcattgagatgctttgtcaagcatccttagcctctgctttctcttcccttggttgagttataccaaagcctccttccgggaaatccctttagtccttttttatacagtcaaatcaaacacttctttatcagaagtgcatctatgtccaac

SEQ ID NO: 297520 - DNA, 185 bp, Homo Sapiens
  misc_feature (91)..(130): n is a, c, g, or t
gaaacagacaaaattaagaatattcattatgggagtctatttctattaaattctagaatatacaagctaatctatgtacagcctgtacgcnnnnnnnnnnnnnnnnnnnnnnnnnnnnnnnnnnnnnnnntaagaaggagccggcaggagggaaagatgaaaaagggacattgaggaaacttagg

SEQ ID NO: 297521 - DNA, 330 bp, Homo Sapiens
gggtgaagcttgacgtgcattttcttttcatgatatctgtcaagcatgaataaattagcaccttgtggttgtaagtgttgactcgtaatattccattaaactccagctacaatggagttggctgggttcaggctcccaccatgctgagtcatagcatctcccaatttaaaaactaccaaatacatgtcagtacttctgcaagtgaccatgaggtgattgtcactaaatcattgaggtgtcttatttaagaggaacaagtggactatcttagtctccatggccctgaaggaagaaccagatgccaggtatagttgcagtctaattaccccc

SEQ ID NO: 297522 - DNA, 478 bp, Homo Sapiens
ggtttttcacagtaaataattttctctaaatagatcttattgaggggagggagaaagtatttttactgatttctaaactgtgttttcctttttattttgctttttcttaccctttgtagcaaagataaaataagtcatgccgtttcgtatacacccctcctcttattgaccatgttttgtataacacatggattggggtatgtgcatctgtcttttagaacctaggtaggcacctctccaggttcaagactcatcttcatgtaatggggtatcagaatactcttagcgtagaagatatttataataattaaatgtatttctttaaatatgaggaaagtactttggaatattatgtttgaaaatataacacactgtgctgtcattactcatcacaatgaaaatttcattttttttccaccttgggccttttcttcgtggcataactgttgaagaaattgtaaacgatgttacaacaaac

SEQ ID NO: 297523 - DNA, 397 bp, Homo Sapiens
gggtcggggggggagcagtttaaggaagaaactcgggggaaagttctcgttaaaagatacctctattccctgccccctccctttccgtgttaaaagttcttggtgaaatatctttctagccgaggttttttggattaatagataactcatcagccacattcttctctgctgagtcaaagaccccgagcctgggcggtgaacgcttgtgattttaggggccgtgcagctgaggggagcagagtaagagggttaaaaatgcagcaattcaccaaatgctcatcgagggtattttcataggactttgacttctgagcatgcattttaggtggtgcgtccgtaatcatgatgaaagttttgtgactgcggagcgttccttcggtggaaacaaaattgagta

SEQ ID NO: 297524 - DNA, 348 bp, Homo Sapiens
  misc_feature (138)..(138): n is a, c, g, or t
aacaaggaaggtacagtaagctgcagagtgctgtgtatctgtcactatcgaggggatgccctttgcaccatgattctcactttagtggtgagttgaatcttggcctcaaggcatgtcatggagctgtggccactgtgngaaacaacaccagcagacagcttagcctgtatatggatggagcgtctcagcagggagaggaacagttgagcatctaccttcacaagagggctgcttttctacatagagaggactgttagtccagccttaggcttttctgctgtatctaaacagagccgcccattggggtcatgtttgaaaacagcaacaacagagtatcaagtaggtaca

SEQ ID NO: 297525 - DNA, 267 bp, Homo Sapiens
gcctcaaaatttgcctactctgttttcatataatgtaatccttttatgaatcaaccaatcaatacatatttctgctttctacaaggcagcgtgttagaggtgaaaagttcaaagatttataaaaatacagttatttccttcatgttgtttacaatttagacgggtgctaaaataatatccatgtgaatacttagtttaagtattaagtatctatcagccaatataggcacttctgagaagggaaagaaatcagttccttctgggtta

SEQ ID NO: 297526 - DNA, 456 bp, Homo Sapiens
gaaaaaaatgttcctctgactcagagacctgatattatagaaacctggtcactagagagggtttcctagttcctggggagggttggcccgcgaagcgcagtgttttaactaagagccagctcagtcacccactggggatgggccacagtagggaccctggaattctgagcccaggcataatgcctgccttggcaaagcaaacatccacaggtcttcctgttccagttcttcttcggttgtcatgctggacatcttggctttttcttggctgcatctgagcacggaatctctggcctggtctctatgtaagtttttctggctggtccttgggttatacgacatgaggaatgagctcttcccatattgggcactgctcatgcaatggaattgtttaggtctagttttttgcagaatactcacgtgcatcttttgagctcttgaaatactggcctcttc

SEQ ID NO: 297527 - DNA, 591 bp, Homo Sapiens
  misc_feature (95)..(191): n is a, c, g, or t
cctgagaagaaaggtcaaggatgcatatgtaactttgggaattgtctatatatagatgatatataaagccatgggaatagataggatcaacttannnnnnnnnnnnnnnnnnnnnnnnnnnnnnnnnnnnnnnnnnnnnnnnnnnnnnnnnnnnnnnnnnnnnnnnnnnnnnnnnnnnnnnnnnnnnnnnngtgtctatgagtagaacacacggcttttttacatcaggtgagaaactttattcacctaatgcagcctttttggtcattcaggacacagaaacaattaccaaagcagatgagttaaaataattgatgacactgtgactatatgtaatatcaatctacactctgttcttcaacatgtgctacagaaatcagataattcattaatggaaaaaacccacttaaatgtatattttatagatacacagtgttatagccataagaatagctctaaaatattcttgcctatgcattaatggtccattaatgcacttctaaagaggctgaagtcattttgtcttcaatgttccatggtttataattcacttgaggctgagattaatttttttatatgccattttcagtc

SEQ ID NO: 297528 - DNA, 223 bp, Homo Sapiens
gcactttgtcagcaaaaaaagctaacaaactttactatatttgtgcttcttgacagataaaatgggaattactaagctgtaatcaggcctaaagtggcctgacttaatacagagactttctcacttctccatcacaattatttgggtagcttcggcatgcagcattgtaagtgaatactcatatctcatcagcctatgtaaagcttgaaattctcacagttgg

SEQ ID NO: 297529 - DNA, 513 bp, Homo Sapiens
aacaaccaaattttgagaagagtaatggataggacgaatccagggtcagtgtcatgctgtggtctttggtaaggggtttacccgtcttaacttatttctgaaaagacgacatttgtttttcagtagagtggtatatgttattacgcgggtaccaaattaatagaaatacagtgctctgatccaaaaaatgtctggcattttacttcattttttgggtgttctcttttggttgttttctttgagaatttgagtccctgatgcatatcttggctttattagtggtatccttcaaaaagatgaaatgcctactatgtgccaagcacgatgataagcacgttgtttgctgtgtcttgtttaatcatcataaaatcaccatagcatccatcctattgtcaccagaatttcacatgtaggagattaaggtttaaagtcatgaaataatttgtttaacaccgtaaagctcacaagaagcagaggtgggtcttgaagctaggtcagtttaacatgttggtc

SEQ ID NO: 297530 - DNA, 500 bp, Homo Sapiens
  misc_feature (396)..(417): n is a, c, g, or t
  misc_feature (419)..(419): n is a, c, g, or t
  misc_feature (421)..(421): n is a, c, g, or t
  misc_feature (423)..(423): n is a, c, g, or t
ggggcttgaatcttgaaagagttccccataatttttcctcttacacttgttgcaagctcagattaaataagtttttataatgagaatattgttttgacagtgctgtgcttctttgtttatgcaaatttaaaataacagccagtaacaagggactctaggcttgactttgttcttgacttactccatcattttgccgcctttcttccctcctctcgctatacaaaaattttctcgtgttatggaaaatgagacatcacttaccccttgcttctctaaagtaatgcttctcagacttttcaacccatatagctgtagatgagaggatagtgactttacacccccaaacagggcatagttgtagatgactgaccacaggctttcttcagagtctccagnnnnnnnnnnnnnnnnnnnnnngngngngtatttgaattttgcattttactcttcacatatctgtatttattttgctactaaaatgaaagcttatatttctttcc

SEQ ID NO: 297531 - DNA, 520 bp, Homo Sapiens
gcatcatttaagatatgaatgaagaggcagtctaggaaggagcgcgagaagagctccagcaaggtaggaaaatcaggagagaacatggaatagataaaaacacagcagagcttttcaagaaagagggtatgatcagcatcttaaatattgtaaagaagttatgcaagataattaatgaaatgtatcccttagatttgtatcctttaattggaattgaaaattgaaggtcaatttaccttaaacaattttagtagaataatggggccaaaagccagactagagtgtgttaagcaacaaacgtgaagagaggagaaaattacaaatgttgactaattttcagtgagcctattcgtggagcataggagagagagtgactattagtacctcaataaagaagactattggaattttccctgctttttaagtgaaattgacctgggagtgtttaaatttgccttaaatcatatggttgtttttattataatttttccttatgtacgcaagtagtgggtaattattg

SEQ ID NO: 297532 - DNA, 165 bp, Homo Sapiens
gactatgtgtaactctacaaatactaccttgttttcaccttgtcttttcacaatgcagtcatcattcaatttttgcttgtcaaaacactatgttgagttacagggaaaagtatacttgcataaagccatttttaatcccctttaactgaatacattacctccctc

SEQ ID NO: 297533 - DNA, 322 bp, Homo Sapiens
gaagaaatgtgaaagcaaaagtatctgagattcagtggcagtaaaaattcagtttgactggctttaatagatggttaactgaaaaaatataacttcggaaaaatataaataaactttctgataagttcttttgcaaaacaggtatatttgggaaaagattctgggaagattagccgcaaatgtggctaatgcagtcattttgaggccatggttcttaaatttaatgtacatcataatcatgtaaatgcactgattgagaacagcaattgcagggtccagaaattgtcactctacagggctatcgtggggctcaagaattggc

SEQ ID NO: 297534 - DNA, 466 bp, Homo Sapiens
gggtcatccgcattcagagatttagtgcatttttacttacacttgtgcttctgctgttgacataagaatatgcatggctgagttagcctgctggagcatgagactccatggaacagagccaggttgccctggtcaccctcactgaatcttgtctagattggctgatggccagccaaacccaagatatgtgaatgattccagccaagatcagcagagtcatctaactgacacctacctgattccaaacatgtgagcaaggaatgtctattatgccaccaatgtcttatagctatttattgtggctatagatatctcatctttggatgcattatcatatcatcttcttcaagtaccttagaagattctcagtctcatgtttcttgggctcttgaccacttgctttgccttagctaccacctcatatagtaacagattaccagcaggtttgtatgattcctctgcttga

SEQ ID NO: 297535 - DNA, 456 bp, Homo Sapiens
  misc_feature (87)..(367): n is a, c, g, or t
gggatacaaaagtaaataagtcagaggttttgtcctcaaggaactaaccatccagaagtaaatagaaataaacttggggaccacatnnnnnnnnnnnnnnnnnnnnnnnnnnnnnnnnnnnnnnnnnnnnnnnnnnnnnnnnnnnnnnnnnnnnnnnnnnnnnnnnnnnnnnnnnnnnnnnnnnnnnnnnnnnnnnnnnnnnnnnnnnnnnnnnnnnnnnnnnnnnnnnnnnnnnnnnnnnnnnnnnnnnnnnnnnnnnnnnnnnnnnnnnnnnnnnnnnnnnnnnnnnnnnnnnnnnnnnnnnnnnnnnnnnnnnnnnnnnnnnnnnnnnnnnnnnnnnnnnnnnnnnnnnnnnnnnnnnnnnnnnaaagaaagaaatttggtcctttttctgggctgtaatagaagtttactgtacagtggggtggatggattgtctgttgtattaacaactta

SEQ ID NO: 297536 - DNA, 478 bp, Homo Sapiens
tatgttagagtttacaataattctggcttctgcttgctttctttcctttcctctgtcaaagttaaattcattctgatcaagggcttcttatcattcttagtagtattcagaaagggtgaaaaactttttagccatacctcaatgagccattgcactttacaaatataagtatcttgctattttattttccctgtgaccgtttctttatatttaagccacaaaactaaaacattaggaaataaccataatagacgtaacagaataatattttttggggataccctcatatttaatcaattttccactgctgacatttttctgacctgtgttcttggggagcataaagagtagaagtattgctggatgattcgaggtttgccattatgatcaccttcctgaaatgtattctccttttcaaatccctttactaatgtaactactatcttgagatatctagggctatggataggataattag

SEQ ID NO: 297537 - DNA, 647 bp, Homo Sapiens
  misc_feature (153)..(161): n is a, c, g, or t
  misc_feature (163)..(239): n is a, c, g, or t
  misc_feature (243)..(464): n is a, c, g, or t
  misc_feature (567)..(567): n is a, c, g, or t
  misc_feature (571)..(584): n is a, c, g, or t
ctatcacgagaacagcatgggggtatctgcctccatgatccaatcacctcccttcttccacacttggggattacatttgagatgagatttggatggggacacagaaccaataccgtatcacatcacaattcacattcccactcttcccattcnnnnnnnnngnnnnnnnnnnnnnnnnnnnnnnnnnnnnnnnnnnnnnnnnnnnnnnnnnnnnnnnnnnnnnnnnnnnnnnnnnnnnngttnnnnnnnnnnnnnnnnnnnnnnnnnnnnnnnnnnnnnnnnnnnnnnnnnnnnnnnnnnnnnnnnnnnnnnnnnnnnnnnnnnnnnnnnnnnnnnnnnnnnnnnnnnnnnnnnnnnnnnnnnnnnnnnnnnnnnnnnnnnnnnnnnnnnnnnnnnnnnnnnnnnnnnnnnnnnnnnnnnnnnnnnnnnnnnnnnnnnnnnnnnnnnnnnnnnnnnnnnnnnnnattatttgtagcagttagagattttaattttgatggtatctaatctatcagtttttcttttttgtggcttgtgattctggctttctaattttacttaacctgngagnnnnnnnnnnnnnntccagccaagtataatacatgtttatgtaagattctaaatcctgtgcatacttatctgtatac

SEQ ID NO: 297538 - DNA, 730 bp, Homo Sapiens
  misc_feature (394)..(407): n is a, c, g, or t
  misc_feature (577)..(577): n is a, c, g, or t
  misc_feature (602)..(602): n is a, c, g, or t
  misc_feature (690)..(690): n is a, c, g, or t
  misc_feature (692)..(692): n is a, c, g, or t
tggctgtttactgcctgagttcctcagaaaaatacgcatcctcctaagaccaagaagccacatgaggtagttgggctcatgtgtcatcaaaatacatgtgttttcccacaccactaaatatagaatacattaatttcaaagaactctagtctgagtccattgaataaataggtgtctgcatagtaatagacacagatgacatcattgtcagttgttctgggtagcttaacagttgttcagtttcaaatttgatagaaaaaattactaacagttctttctaattgcttctagttgatagtcatattccacaagaccataaattaggggacctctaacaataaatctagctaagctgtgtgcttgatggaaaaagattacttctaaatttcttccnnnnnnnnnnnnnnggaattattcaggagcaagccctggagccttgggatttttctgtcttttctctcatcattttctaggcatcacttccactaagtagtgatctgacacagtttccacaattccagacacaattccagacagaatttaccaggggcttaagcagaaatgccccgggacctgngcaggtgacatagatgagagcctgngccctaagaaggacagtaggctgtggtggggactgtagtctacttggagaacacaagctccatccaaggctttcagattaaacagatnanactgcaaaggacattgagaaagcactataacaggttgg

SEQ ID NO: 297539 - DNA, 637 bp, Homo Sapiens
  misc_feature (462)..(562): n is a, c, g, or t
  misc_feature (603)..(603): n is a, c, g, or t
ttccctgaagcttccagaatgaatgtagccctactaacacctttgttttaattaacattatttttaattgacaaatcttaattatatacatttatggggtacagtgtgatgttctgatatatgtatacaatgtggaatgattaaacctggctaataattaacatatctatcacctcacttatttttttctggtgaaacatttgaaatttactcttattttgagatacacaatacattattactgagtatagttaacctactgtgcagtagatctcaaaacattcctcctgtctatctgaaactttgcaccgtttgaccaactacctatttccttccttgccctccccaccagcctctggcaactattgttctactctgtgttagattccacgtgcagtttaagtgagattatacaggatttgcatctctgtttcacttagcgtaatgtcctccaggttcacnnnnnnnnnnnnnnnnnnnnnnnnnnnnnnnnnnnnnnnnnnnnnnnnnnnnnnnnnnnnnnnnnnnnnnnnnnnnnnnnnnnnnnnnnnnnnnnnnnnnnaccaggaaagacctaagaagctctcagtcctcatccttgtntgtctttgaaacactgtgctggcagaaagtaata

SEQ ID NO: 297540 - DNA, 262 bp, Homo Sapiens
ggtaaacataggttgattgcaatttgttactttccaagctattcttcccctcagatatctgcttctgtttcacagaattcaggtgcactttatccaaatataacaaatgacaatgtgatttacagtggacatgtggaaaagtaaatggtctttctcttgtagatttccaaaaggcagtatacagttgcttactagctgctttcagcataatacaaactttcaagttctgctgttgtacaaaatatggatgctagagcttctt

SEQ ID NO: 297541 - DNA, 577 bp, Homo Sapiens
  misc_feature (347)..(356): n is a, c, g, or t
  misc_feature (395)..(403): n is a, c, g, or t
  misc_feature (437)..(437): n is a, c, g, or t
  misc_feature (445)..(445): n is a, c, g, or t
tgagtcacagttgctgttgtgccagcacaggtgttgccattttatgtagaatgctttattaatatatttgatctgaaacattttaaactgtcatgattttaaaatgtattaagatacacaggtgtaaagcacagaacagtaatttcattcactgttccctactgcatattacaaatggaaagatctcataatagatcaaaccgtattgtagtcttgttcctgaaacataacaatttgtatttattggaccaagggcattttactcctaaggtaaatgtgcctgatttaaactgaatcctcaaagaaggtaagttagggaggtattttggggtttgattttgttgggnnnnnnnnnnccatcaaacccaacatgacatgtaaatgcttatttggannnnnnnnnctggaaagtagattcatttggagaataatatgtntgtatgtntgagtgaatttagcgtgagatgctttttgctgtaaagttgccacccttttattacctaataattaagaccccccccttttttttatgaaagttaatttgtcctttcgacatggcttatcagatgctattaat

SEQ ID NO: 297542 - DNA, 725 bp, Homo Sapiens
  misc_feature (59)..(59): n is a, c, g, or t
  misc_feature (71)..(71): n is a, c, g, or t
  misc_feature (80)..(80): n is a, c, g, or t
  misc_feature (143)..(508): n is a, c, g, or t
acgggccgggattataaaggctttctttttgtaattaataaatattttgtggagaggtnacttttggaccnctttacccncgtttctcatcagacttcaactttttccccgttattgatgtgaattaatgcaaacttgtggtnnnnnnnnnnnnnnnnnnnnnnnnnnnnnnnnnnnnnnnnnnnnnnnnnnnnnnnnnnnnnnnnnnnnnnnnnnnnnnnnnnnnnnnnnnnnnnnnnnnnnnnnnnnnnnnnnnnnnnnnnnnnnnnnnnnnnnnnnnnnnnnnnnnnnnnnnnnnnnnnnnnnnnnnnnnnnnnnnnnnnnnnnnnnnnnnnnnnnnnnnnnnnnnnnnnnnnnnnnnnnnnnnnnnnnnnnnnnnnnnnnnnnnnnnnnnnnnnnnnnnnnnnnnnnnnnnnnnnnnnnnnnnnnnnnnnnnnnnnnnnnnnnnnnnnnnnnnnnnnnnnnnnnnnnnnnnnnnnnnnnnnnnnnnnnnnnnnnnnnnnnnnnntgtggttttctattttaatcagtgtgtcgtactctgttactatcattacttttatgctccgattgacccagatttggcaagtaggagcctttcaaactgatttttgtgttcttttgatgtttccatcattctttgagcatctctgctttttggcctgacaagattttccaggctcatcctgtacttttcctacttcagccctgtattcggccattta

SEQ ID NO: 297543 - DNA, 567 bp, Homo Sapiens
  misc_feature (364)..(364): n is a, c, g, or t
  misc_feature (432)..(432): n is a, c, g, or t
tggaaggggctgttggcatggaggaggaagctcctgagtgcacatgaccaggcagtcaaacgcatgaaaaggaattaaaacaccacaacatgacaccaagtgcttagttatatctataataactttaaagttgaaacgttatgctctaagcattataaaaagtagtccaaatattctgtatgagttgatattcacaaaatgtccaaattaataagctattcaaattgcaccaaaaatacaatctgtatgtttgtctttccaacaagaaacatgctagtgatggcaaactttcactatacatatggcaatacattcctcagatgacccagtatctggacagctttttatgacttgtttggcctgnggtaccttagaagctgtccgtcctctgcctcatctccctgcattgatgggtggctcagggcatcctgngtacatgggcatgggtgctggggttggcaagggtgatgtgggtggccaggggtgggctgaccgggcactcctctttaccaggtagcggctcaggggccccagaagctgctgggaagaaataagtgccacgtatca

SEQ ID NO: 297544 - DNA, 268 bp, Homo Sapiens
  misc_feature (201)..(201): n is a, c, g, or t
ttatcgcttcttactcctacctaaccaccatacacattacaagtgatgatatgaaaacccaagatacattacttagaataagatatgaatataaatatagtcattcttatgttcaaaaaaatgtatcggggtaatcattttcctggaagaatatacacagccaactgctagtattagtcatctctggagcgtaagacctgngggtgggtgagaattcatagttttcactttatagtcttataaaatagaaattttttagactgtatgt

SEQ ID NO: 297545 - DNA, 652 bp, Homo Sapiens
  misc_feature (552)..(552): n is a, c, g, or t
  misc_feature (558)..(558): n is a, c, g, or t
tacggggccgggggaggttgaaaattgtttttatttagctggcatccgtgtcattacagcactcagcatccccagggattgagcgtggcttgcaactcagtgacagacaagccccactgggactgtgaggctcagggaatttcactggggattcagacaccacccatggtccctgcagaccaggtagtgctcagaagcatggaggcatcagagatcccgttctcatccaggacactacgttgcctgggaggcaccacattgatataaaacaactaagttagggtaggcatgggaatatcagagacagttgtagggggacgctgtaaacccattcacgtaccgcaaggaacaccagaccagctgaattgtggggccctttccagcgctgggcttctgggattcctttgagcgccttctgtgtgcaatctactggtccaaactggcttatgcaaaaagttaacttgttggctcctgtgacttcatagtgtagaaggagagatagctctggccatgactggctgcaggtatggcaacaccatcatcaggacctgngttctntctccctgtctctcagcaatgcttcctctctgtggcttccactttcagaaaggcttgccctcatggtgacagaaatggcagcagctgctctaac

SEQ ID NO: 297546 - DNA, 519 bp, Homo Sapiens
ctatgtatggaaatgcaaagcaccattagcatgtctaaaaagcagctggaaccttacccaccaatgcttgattgaatacagtatcatcccaaatttaaaaatcctatgtgtatatgttgtaaaagtcctggcaaagaaatggaggatcctgtggcagctattcccacctaaagccaaccctataatgatgggtcatatattaaccatgctatgatctactgcacacacaaaaaatgtcatttagtcttgtcacattgctatcacagctgcacatatgagcaaagcactgtaggtctgtgtatctcagtgggggtactcttggcattaggagctggataggtctctgctgtacagaatcatcccatgcattgtcagatgtttaatatcccaggcccctgctgactacatgtcagtagcattctcagtcattgtaaacaccaagaataaaaagcattcccccaggtttcaatgccctccctgagaggttggtatcacctcccctgaatgccactgtctact

SEQ ID NO: 297547 - DNA, 695 bp, Homo Sapiens
  misc_feature (544)..(558): n is a, c, g, or t
tatagcaagttagaagtatatataagtatattattatatgttattgttaactataatttacctactgtactatcaaatactagaacttattccttgtatctaaatgtattcttgtaaccattaactaacttttctgaatttcctactctccccttcccctcccagccttgtaaccacctttctactctgcctccatgagacccattttttaatctcccacatatgagtgagaacattcaatatttgtctttctaggcttggcttatttcacttacattaatgacctccagttccatccatgttgctacaaatgacagaatcccattctttttcataatattgtccatacataccacattttctatatccatttatctgttgatggacacaggttgcaaagggattgctggattgtatgataattctatgtgtagtttcttgaggaaccttcatggtgttcttcatagtggttgtactactgtacattcctaccaatggtggatgagcgttcccctttctccacatcctcacaagcatttgttannnnnnnnnnnnnnncaaatgaacattttaactggggtgagatatcttaatgtggtattggtttacatttccctaattatggttgagcattttttcacatatctaatggccattcatatgtcttcctttgagagatgtctatacagatctct

SEQ ID NO: 297548 - DNA, 391 bp, Homo Sapiens
cggggtccttgctttcgtttttatttgccagagtgaatctaggatctcccttgtctgccaacttatattttgttttatacacataaaaataaaattggccaagtttttcccattgaaagaaaatccctttgaccttgaaaatctctctagctcctatcttttctacttgcttttagagcaaaacgtctagaaagaaccacctacttttacgtcttaatttcccatggaactgaatgtattttggtttctttctcctaccactttcctgaaaatgatgttgatgaaacccccattaggttgttgtcaaacgtgattttttaaagtgttttcttcttaagttagtcctacttgacttttccacatgatcggttacttttgattatgccctctc

SEQ ID NO: 297549 - DNA, 526 bp, Homo Sapiens
aattggttgctgtcacttcagtgttacaagattttaatcagcctgttaacattgtttcagattctgcatatatagtacaggctacaaaggctacaaagctctaatcaaatatagtatggattatcagttaaatcatctgtttaaattgttacaacaaactgtaagaaaaagaaatttcccagtttatattgctcatattcgagcacatactaatttaccagggcaattaactagggaaaatgggcaagctgacttgctggtatcatctgccttgatggaagcacaagagcttcatgtcctgactcatgtaaatgcaacaggattaaaaaataaatttgatatcacatggagacaggcaaagaatattgtacaacattgtgctcagtgtcaagtcttacacctgcccactcaggaggcaggagttaatctcagagatttatgtcctaatgcattatggcaaatggatgtcacacatgtaccttcgtttggaaaattgtcatttgtccgcgtgacagttgatgcttat

SEQ ID NO: 297550 - DNA, 393 bp, Homo Sapiens
gctagggagaagagagagatctcattccaaacaattattggtcaacaatagttttagaccattgaaagaatataagagaatgttgacttgataataaatattgccatttagatgtcaggtgataaagtttattttgttgttaagctctctccattttgccccattcagtttaaaaggaaagtttttgtgtttaggaaactaaaggatgggtgatatgtagcagacccataaggttattttcatgaaaaacctagcttgggctaatctgaaagattcctcaataacagtctttggtgtcttatcctttcttctccatttgcctaagaatataattgtataagcctggatgtttattccttggctatcgtttttacctaggaatcaatttctgca

SEQ ID NO: 297551 - DNA, 522 bp, Homo Sapiens
ggtaagcagtgaaatctaaataaacattgactatatgaaaaaaagggataaatggggattaggctattggtgagtttgttttgactaactggcgagttttcaagacctgaaacttagtgaaattcaaattattttcaaattaatgagagatataaaacatacatatttgatgtcacaaactacactatagaatataaatataattttatgcccttatacgtcctgcatgcctgtctttggctttctcagttggggcaatgaagtttatccctttccacccatgaagtcaggtattcacaatgaaggagaataagaattcctgtacaaaaattaaaagatttctttcccttggattcttgctagctgaagagaacagaacttactcttttgtatctcctcactggctaatggaaataatgagaagatactgccatgttcttctctttcatgtgggagaaaacacctggctaaaaagtggttcaaggttactctgcaaagtgcagcctaattgttaagcttata

SEQ ID NO: 297552 - DNA, 485 bp, Homo Sapiens
gtttttaaatttttgatgctatcttatagtatttggaagtattatttataaagaagtttttgctgcctcctcttatttatttcacacactttcagagatcatatgtagatatctagtcattacacagaatagagctgtaacataacaaggctggtttccctgacatatacaaattggtctttgtgatcaggttatgtacctgaaaacattggtttacttgccaatgtttagtatctctgcttttctcaaaaattacaccttattaatggtctctccaatcataatattttgctggtccatttaatgttctccctacagggccccggacattttacttggacgagggagatggggaggaacatctattcagggcctgctactggccagcatgatgaagtggctttacacctgcgagttgctctcctcttccctcagcatggacatgtacacacaagtgtagccacagcacatgtgcctgcgcacgt

SEQ ID NO: 297553 - DNA, 197 bp, Homo Sapiens
atattaatatccacatttccaggagctttctacaatggacattatcagtggtaatgtctgtgagaccatgcagaaaaatatttcattgtcttaaggtcatcttaaggtggaatagaaggaaactagacctagaataatatccctaaattctagtcttcacttttcaactcattagctctataacttcagaaaactaa

SEQ ID NO: 297554 - DNA, 485 bp, Homo Sapiens
  misc_feature (87)..(95): n is a, c, g, or t
gaaaaaaagagcccacaggcataaaggcaatcatcctagattttgtcttagaatataatttgccttctaaaacttctgggaaaaagnnnnnnnnnaagagggagggttagttgaaatgttgaagtaggattgccattatggaataagtatcttgcaagtttaacaaataagagggacagtcttggtcagttaaaatattttagacttagtgtcttcattttgaaagtatcaagatcattttcccttaccctcttaagcttaaacttgtttcttgcctgggattcctgatttaaagttaggaattaaaagaatccagttttcttgttttttcatgaggatataagaatagttaactgattgtcccattaaaaattctgaataggtattttttcgtagtcacagagttcacaaaagatagtcagatttttcatgtgcagtctggaacttatttgtaagctttttctaatgataagattatttcccaa

SEQ ID NO: 297555 - DNA, 447 bp, Homo Sapiens
gtctccgctaagtggggttcacgccaggtcctctgctgtgaatgtggaggctgtggagccgaggccgcgaaatttctcacttttcagggattctgttcaagttgtcccaaaggagaagcccatcaaacaacccagtctctgtgcgagctcccccgggggcatttactactcagccagtgagagccaggtttccaggggaatagaattaaacaaggttctgctttttgctgaagggaaaaaccgctcccttaggtgggagaatccccagggttctttcttcctggccagggagggagaagggggtgacgttttattgagcatcggctagggccaagctctcaattaggccctttcttctttcttcttagggtatctgtgagataggtgctgctgtcctggggaggtagatgcagacagattaactctcaaggtaaatgctaatgaata

SEQ ID NO: 297556 - DNA, 476 bp, Homo Sapiens
caaaccagcaagagcaacacaagtggtcctaaatcacccgagggccatgagaggaaaccattaaaaccagcagtttttaattgactttggaggagagaaaggagattggagatggagaggccctagagggtttatgaggctttgaaggatgggctgggtatggataggcaaagaagggagtggaaacaagcattccagggcagggcgttttggggactcaacagaccaaccagtttgttgggagaggagtcactctgggagaggtgggcagtgaggttagagaaagacagaagagccagctgggaaaggacttgaacttgggtgcttagcagtgctgagtctatctgggcaacagcccagatagaaacacagaaggtgtttccataggtgaatttcacacttcagccatgtgcctggcaaagtcagacaatgggtctgagacacaaggaatgaggcagcacaaggcacaacttgca

SEQ ID NO: 297557 - DNA, 466 bp, Homo Sapiens
ccttttatctttggagtgaagaatccactctcatatattagaaaagggaatctaagagaggttggtcatgcataaaagtttgatttccaaaatgaaaggtcatgatgtaacaatgtcttggccgaaaatggaagcaaactgctaactccagacctgtgagttgccagaaaaatatcctgatctcctgacttaaacaggaaagtcagagacagaaccctcattcagagagagtcaaagagaaaccgctcaaagtctagacctccaccaaagaaacgggagtctggattcaggagaactcacccgcaacaccaatgagacttctgaagatggagaacgcaatgggtttgtgctagtaccaaccactgccttcagagaaaaacaatgggtggttgctgtgggggattcactctgaatcctgctgacttacgccagctatatcgacctaaaggaaaatacattctgggtg

SEQ ID NO: 297558 - DNA, 234 bp, Homo Sapiens
  misc_feature (67)..(67): n is a, c, g, or t
  misc_feature (157)..(183): n is a, c, g, or t
gatcattctgtactttagagaataattcagcattgcatttgatgaaataagccattacataactatngcattttattttggacagttgggcacttacctgttaaaaaggcataatgcagtacgaaattcccacatttcctttcatcttccttcacgnnnnnnnnnnnnnnnnnnnnnnnnnnngttttctgttcttctcaaatgtacattacccattctgtgcatctcctgaat

SEQ ID NO: 297559 - DNA, 512 bp, Homo Sapiens
  misc_feature (97)..(155): n is a, c, g, or t
taggaagaggtagtaaaaatggagtagtaaaaaggagcgtggactttggagttgagtaggcctgcattcaaacctcagctctgttgctaaacttgannnnnnnnnnnnnnnnnnnnnnnnnnnnnnnnnnnnnnnnnnnnnnnnnnnnnnnnnnncacctactttggaattatgatatttgatattatatctctctgtagcaaaaatgcaatgttcttatgcttgcacaagtgttcttaatctgataatggtatattagacagattccaggtaaagaaacccaatctctccccttccttctttttattgtttcccatccttgtaattttattccagtgtctccagactcatcattgcgttttccaccccagtgacttcgcttatattggtgactatgcctgaactacccttgtgtctcttctcacactatcaaaattatcttcctctttgaagtgaactatttaagtccatattgagcagaccttcctttaagtgtcttcagtatttatctg

SEQ ID NO: 297560 - DNA, 298 bp, Homo Sapiens
cagtttagtagcagttacctaacagtgtgagaagtgctctggggcagcactgcaggtggacatggaaatccagggccaggccacgtcacctcaggaaaggtgtccggcgttgggggttgggggagtgtgacagagagctggtttggaggagcaaggagttgtcagtcttggaaggagagagaagagtgctccggctagaaagagcagcagatgtgcaggccttggcgcgtgccaggcaccatgagctcaggccactggagtgagcactgtccagagctgggtgggtggagtggattgg

SEQ ID NO: 297561 - DNA, 386 bp, Homo Sapiens
ggatgttcgtaaacaagcatctgctttgtgatgctatttgtctttctaacctctgtctgattaagtcagaaaatacctacccctccccaaccccctaaacttaagacctattaaagtgaaagcacaagtgcttgagggagattgtatgttgtgtgaatccatttgctcaaatactttggtgaaatccagggctatctaagtgtggcagaaatgtattttggtttgagatataatttcactttggaagatactcacataatatttctgagttataattatttagcattcatctggaagaatgagaataaaaaccttgaccagtttgtgagtttgtatagtgatttcttaaaggagctataccttctaactcaaaaacctatcccagg

SEQ ID NO: 297562 - DNA, 153 bp, Homo Sapiens
gcagcccaaatactattcttcttttaaaatttgtttcaagtgtgtcaccaggcactcataaaattcatttatttgttatataactcaatgacctgaaataataggtgctcattgctttttcatttgatccttaaaaacaattttattctgtct

SEQ ID NO: 297563 - DNA, 530 bp, Homo Sapiens
gtttactttgttgaataattttgatagtttgaaaagttttagtttttgggctgaaaactgcccttttcttatttctattcattgatcctagttctgcccgtttgtcacaacttaaactattttgaccctacatatagtatcttaaactatttgacagcaaccgttatgtgtgctcttggctttgttaggctaaaccatttataagcgcttcagcttttcatcatgtgacatgtttctttacccttacctcctttgtatcccttttgccagggtagctctaaaagtggttaatgaaggataaagatatttataatctttggtccagtcatctgtgattaaatgatttatagcacattaattcaatgtaatatattgtagcccttaaaataacaaatataactgtagaactgtgggatatatttataaaacaatgatattttaaaagtagaacattaaattgtacctagatagttcatatagctgactctgtgtgtgtagatgaaatttagaagggtacatgaagtaatgag

SEQ ID NO: 297564 - DNA, 275 bp, Homo Sapiens
cagctctgttgctactcttattaagaaccaatgtatttaggatatctctctgcatccctttgctgtcttaacacagttttctaataacctttctttctggcctggtggttgtaatttcaatgttgagaatttgacaagagcctttagctatatttttagtaactgcaatttgtcctcctattactaatatctgtgtcattcctgacccagtaaaaatagattgcttaattcatacaggtaaatattagttgggggtcattactgtctctttattt

SEQ ID NO: 297565 - DNA, 444 bp, Homo Sapiens
gaatacaggtacactctagaatgaatatgacagattaatgtacaaacatcagctagaaacagtagcaaactaatgaaggctaaatacctacaagaaataaattttatgcagtagtcaccataatttgtcatgttctttctcaagtccaggcctatggataagactgactctcaccaccctctgttacccaccttgatgaagtaacacaaagtcatttttcagatgtctgtgtagatgccacttcttgcaggaccattttgagggacagtgcctccacccatattcacttatcgccccttctttgagccttccttgatcctttctagcttcttgtaattagcctgtcaaaggccttaaagcatttttgcattgactctttccttctgatctctcccacactgttagcctcataactgctatgcaggaactgaaaagatggataga

SEQ ID NO: 297566 - DNA, 472 bp, Homo Sapiens
  misc_feature (327)..(335): n is a, c, g, or t
gggattacaggcacattaattttataaattaacttagaattaacacttttgttatgttgagtctcctatctaagaacatggtggctttcgtattggtttatgtccacttttgtgctctttaggagtgttttaaaattttccttgtttagattttataccattttgattaggttcactcctgagtactttatctttttttgtctctgtaataaatggagtgtttcattctgtcttttaactggttatatttgactttgctcttcttatccttcaattagaccccaaaagccatgcttttagaagattctgatttaaatcttattctgnnnnnnnnnactcatacatcagccagtgatttgataggatgttcttatatatacattgtgggtatatttggtacctgcaaatggttatgctaagtaataatgaacttatatataaccaggtagatgaacaaaacatttgcatttgt

SEQ ID NO: 297567 - DNA, 162 bp, Homo Sapiens
attgtttcataaaagttttacttattttgtaacaattgtattggataataatcacaatgaggtagagttttaactggaaaacaaatgctgcctctctgtgcctatatggatagggaagctgaggagaccagaaattcaagtgttaagaaggtaacttttggc

SEQ ID NO: 297568 - DNA, 552 bp, Homo Sapiens
ggggatccatcctagcctttccatataccttccctcagtgatctcaactatcaccttggctctgaggaatatctatgctgtggacactggatctagatctactttctgagctccagacatctctttccaattgtatgttctacaggcacctaaaattcagcatcccccaaactaagctttgcatcttctttacaaaccaacctttcctcctgtgtttcctgtttcagtaaatgaccccaaaatgtgcctgattactacaaaccaagtgcacacagggtctcatgatctgggccttggttatcttctcaggtttatctcctcccctgccacattcactgtgtgccagccatacgaatctacatgaggttggagcacactgcttcctcatgtttgggctctgcatgctgctccctctgctggtaacaccctttcctcacttgtcaacctggaaaattcctgctgatttttcagctcttgggcccaatgcttcctctttggtgtgaaaccttccacaacttctctaggcagacttaggcactctgtctatattct

SEQ ID NO: 297569 - DNA, 513 bp, Homo Sapiens
  misc_feature (61)..(113): n is a, c, g, or t
  misc_feature (471)..(471): n is a, c, g, or t
gctttatttttgtataaaaaaagtacatgtttatggttattgtttttaaaaccaacagatnnnnnnnnnnnnnnnnnnnnnnnnnnnnnnnnnnnnnnnnnnnnnnnnnnnnngagtacacacagttgtgttctcacaggaatggcatgattctgcagcccacctccccgagtgtatcttgggcattccatatcactacagaaggaacacctcagagaccacaggttttaattcatggaaatggaatggtctcaaaccatagccctccaagaccattttagaatctagatataatgagagtattttgacatacagatttgagttgttggaggctttctcagagactgaccctaaggttgtaggaagccaactagtaccagaataaggaaactgtgaaagtatggtgaggaggagatgcctagaattttttctttcagagagaacctatactccgaagtatactctccttgngacatctggatccttgtgtaaagtaaatttacaatagtaaaa

SEQ ID NO: 297570 - DNA, 476 bp, Homo Sapiens
tggattcctgcatccagtggtggtaggaatggatgaccagtgaagttccttcaaataatgaggctcttccccctgccggttccagccagaccactgtcataacacgcaatgcaaatgaagacagccttcactaagttccacataaaattgaacagctctattttagatagatctcattatttttcttggagacttctaaacaatccttcaagaagacctagaactattatttttattaaacagggtatattaagttatgggtgaaatctcacaaggtcacctggacaggggctccatttttctaacactttgacattgttttctagggtgcactcctaatatactttgcatcaagtacatgttttttaaaaacaccttagttcctggttgtcaaaacctactaacaatttttgtctgttcttgtggctcattggtaattggtgtctctggtccctcctgtccagtagattattaga

SEQ ID NO: 297571 - DNA, 242 bp, Homo Sapiens
agtgtttcacaaactatggactggagacagccctgaaactcggcattcatattctattagacatcttcagtagcagagatttatatagaagtcgtgaaataatcaccaccttcccgtgtgggaaaagagggcgttggctttgattgatacgcagtgtcctgtgtagatgcatcagtgagaacgctttccctgccagctgccgatttgacttgacactttagggacaaattggagccctcata

SEQ ID NO: 297572 - DNA, 146 bp, Homo Sapiens
ctgatgttaatggtgctttctattacaaccacatcccaaagcccagctctacaaagatggagcatgaatgaaaggaatgaagtcacatgtgaactgcaggcaaggagttttcaaattgcccaagaaatgtcaagtatcactgtgtt

SEQ ID NO: 297573 - DNA, 449 bp, Homo Sapiens
  misc_feature (67)..(67): n is a, c, g, or t
  misc_feature (75)..(75): n is a, c, g, or t
gcgtcgggaacccccaaatcacaaatggccccctcctcccagggtgtggggacagttcctacagaancgtccgangaggacggaaagacaggcggtagcatccacagcggggagaaaagcaaagaaatgtgtgatccctcaggatgcaagcccacagaagactaagcctcttttccctccccacacccagtcccatcctggagcttaggcccatgggaaggagtgggtagggcccatcttacccagggcttgctgctgcagtgatcgaagggacttcttttatacttctaaattattcataagaatatgcagaccatgatggtaactcggtgctttcccatgaccctaaaaatcctctcataggagtcgtgtgtacaccgtaccctcttagccggtgaagtcccctctgaaaagatggtgagagtccaggccagcctgtgagttgaaag

SEQ ID NO: 297574 - DNA, 592 bp, Homo Sapiens
ggcctcattcctcattaccctttaacctatctgattcaagcaagctgcctcatggttatctcacatacacattgtgcttgattccaactccatccccattcatttaccaaatatacagaattcttcagatatgccaggcactatgttgagcattggtgctgaccgatgtaggcccagcccttttgatgtttacattttggtgggagacagacatagctaaaagtcaggtcccccctttcacttatcctttacagccttacccaagttttgctctgtcttctcttccttcctacactgatttcctcctcttctgacctgtggctatctgctttctttggcacacattttaaatacactgacattccctattttttgtatttagttttgttctgcatcaccagctagatgagaacctcttggctttagtgaatatgtattctacttttctttccatgacaacactcagctcaacacggagccatagtgggcttgaagtaattgcttgtcatgttgattaggaatttgccactccagccttcagtgagaccaaaggtctgtcaatgtagctagcctttgattggtcatccagagt

SEQ ID NO: 297575 - DNA, 619 bp, Homo Sapiens
  misc_feature (185)..(473): n is a, c, g, or t
cttcaaataattttgaaggtatgaatgaaataggagttactattttcagggtcctaattctttcttacatttctagatgcttcccattataacactaggcacatagtcgcttcttttgtttttttctggctacctggcatttctttgacattcgagaaatgttttggcaattaaatattttgagnnnnnnnnnnnnnnnnnnnnnnnnnnnnnnnnnnnnnnnnnnnnnnnnnnnnnnnnnnnnnnnnnnnnnnnnnnnnnnnnnnnnnnnnnnnnnnnnnnnnnnnnnnnnnnnnnnnnnnnnnnnnnnnnnnnnnnnnnnnnnnnnnnnnnnnnnnnnnnnnnnnnnnnnnnnnnnnnnnnnnnnnnnnnnnnnnnnnnnnnnnnnnnnnnnnnnnnnnnnnnnnnnnnnnnnnnnnnnnnnnnnnnnnnnnnnnnnnnnnnnnnnnnnnnnnnnnnnnnnnnnnnnnnnncacatttgtccataggagataacattttttattaacattaatactttttgtattttctcccatactttaatatctctgaaatttagctacatcttatatttgattttaagacatgatgtagtttaattgacatataaaatacatta

SEQ ID NO: 297576 - DNA, 431 bp, Homo Sapiens
tgaaaaagtagagcctggtagagtgaagccacttgcaggagtcgtttagttagggctgtgttgccttacagtgctggtgtcctcacagatgataatagtaataaaaaacaccacaccggtttattgtgtgccagctcgggttaagtgctgtctatgtatatgctcatggtaacacaaaaggcattaatatcaactttttataggagaagagacaggcccaggaaatcaagatctgtaattatttcttctttttgttatcttggcccttaacttttagaagttcacacatttaaacattccatcttgacagatttacccagcgtttgagtgtctgtggggcttctctaaagctcagggtcaaaggggatatcctgcccacacagcactttctagttcaggagtgggaccaaccaggcctttgcagcaagata

SEQ ID NO: 297577 - DNA, 693 bp, Homo Sapiens
aggagcagaatgcatagcaaggcctctgtccgtttctcttggcaagccctgttgagtatggcacgtctaggaacgtgatgggatcttggccctccctgttggtttcatagaactaaatgatcagtaacttaaataacattcaacagtctgtagcagaggagcctgtatgttaagagaggcctcaagggaaagggaggcagccctggggaactgtgtgttgaaaggtgggtctgaaccgtggagtttggggctggatttgacagctcttggatgctgagttaaggactgtgttgacatgggaggagaggaaattaatcagatcagcagactgaaagtagggctgctccagcacacagcttgagagtgggctctggcaggatgagaggtaggtgagtgtggtgatgtgatgtgggaatgaacagcagaagatacctgagggggagggtcaaggtacctgggtaggaatttcagttgacctcgagatcaccagcctgggtaatcataggtgccctagactgaggaaaaaccaaaggaaatgggaacagattaaggttgcagatgccttgcagccaaccacttggcttaacctaggacaggtgggaactatttgataatagcatataacacattgtgcctcttgggttagcttcatattattttaattgaactaataagaattgatttgcgaatctc

SEQ ID NO: 297578 - DNA, 336 bp, Homo Sapiens
tctccagtctggatatgctaggttacgcttcagaaacaatccctaagtcttagtggtttattacaataagggtttatttgttgctcatactacatgcacaatacaggggtacaagagagttttgtttattatggttattcagggatccagactgaagggaaagccagcatcttgaacactgtcaatcattatccaacaggaaagagttttggaaggtctcacaccagcaattaaatgatctggccccaaagtgacacaaggcagatcgtttataacttgtcagaactagtcacatggcttcaaccaacaataagggccagaaaatacaattttatc

SEQ ID NO: 297579 - DNA, 607 bp, Homo Sapiens
  misc_feature (424)..(424): n is a, c, g, or t
  misc_feature (488)..(488): n is a, c, g, or t
  misc_feature (559)..(559): n is a, c, g, or t
gaatttctgcaaggataatagggcctgagatgagggtacagatattcagaggcagtgccgacactgaaaaaattccacaggtttcttctcagaatcttgctgactccagaaaacaagtctagagtatacttttcctactgaaggatctgacagtcctctttcaggccaccctgagacgggctccataatattttgaaagtattaggttgatttgactttagcttcaattctactaaaggaaagatatatttagatagagaatagatttctgggagctagagaaaatgaggcaaaaaagagctagagtaaagctaacccaaaacatagatagccccttatcaagaatcgggttgagtggaatgaagaaaaagttggcaggatttacccccacaatgatgcacacattcttggtgggggcccttanttacatgggtcaggaactaataagtccctgtggcacttttgatgctttctgtggcaagtaacancaacaacaatcatcacaatcataacaacttatcaaactgacttaaacataaggaaatttgttatttcacanaactgaaattttaggactaaactcaggacttttaagctgcaccttgaa

SEQ ID NO: 297580 - DNA, 575 bp, Homo Sapiens
  misc_feature (538)..(538): n is a, c, g, or t
gaaagaaaagatgcaaaacactcagtttattatagattccagtttattatgatttcattgatcagtggccactgtgagattccatttaagggatctttattattggatgtatcaaaaggtatttaacatgttatttgaccttaaatctcctataatttagattttaaaatattgtagtaagaaaacatccacattgtatgttttgtgatgaagaaatcagacttcttactatttgatgaaactagaattctacagagtttattgatatacaaggttttctgataagaacagcacagaggtcactgtattgaacatacagcttagtagaaggtctgaattaatgtgcaaattgaggcatatctaagtagaaagtattgggattgtttcagtttacttagctggatatatttttcagaaagtgatattttagttgtcatttcagtagattcaccactctaaattactgtatgtgattattaggatacatacttttaaaacaaggtgttagcagatttatcttaaatatttttgttaaggntaataataatgcatacatcattattattgcatctatt

SEQ ID NO: 297581 - DNA, 540 bp, Homo Sapiens
  misc_feature (452)..(452): n is a, c, g, or t
ggaacgaaggtgccgggatgttcaggtgagcagtccggcagccttaagctgggggcagggaaggaaagagtgggagggtaggggaccatgaacgaagccatactagagagggtattccctagatcttcctgaaggaagaaagaggggacgtgttcagactgttaagcgggaaatctccctcctatagcatgtgaaagaccgatggaaggggtgagactgagtggagacagactgtgaggaagctaccactgtcctctatctaagagatgataagtatggggagggcggacgggccagacaggtgagtggagagtggaggttcctgagagttctggaaggacaaagttgttggaaccaaggaagggagagcagaacagatacaaggagtgaaggaagaataagtttggttttggatgttttgacttgaaggtactccccagacacccaagtangaaatattcctcagtcagtgggaactttgggcctaaaccaaagacggaggcccaaacccctgggagtaagggggttgggatttagaag

SEQ ID NO: 297582 - DNA, 701 bp, Homo Sapiens
  misc_feature (635)..(655): n is a, c, g, or t
actccatttctttttaatggcctcataatgttctgttatatagattaaattataatttatttaatcattctcccattgaatatttgtgtcttaaaaattattcgccattataaaaaatgttgaataaaaaatgttgcaatattacaatgaatttcgcttctatttctttccttgctctctctggatttttacagttcttattcctagctgtggaatagtggaattggaggtggtgccaatttcgttaggtaatatcaaattactcttcaaaaagttgcaccaagccttacttcctgcagcaatatgtgacagcttgaatgcacatggttaattttcaacttaagccacgttattgagcatggcagtatacaaggagcacagcagtgttgtatacaatgcggtatataatatctaacacggctagtatcataaatttcttccttgagcacaggcagttgtttcagagaccttttacttgactgatgttaatgaaagagctcattatggacttgggtgcccctgcattgtcaggatcctttgcagtgtgaggactgttaagtggtattgacgcctctgaggttatcttcatttgtgtacagaagatgcgtattggtgcatctttcatcaagcagagnnnnnnnnnnnnnnnnnnnnnactttgataatatttaatgcaaattatttgatgctaactctgcctc

SEQ ID NO: 297583 - DNA, 657 bp, Homo Sapiens
gaacagtgacaacacttaattttccagtattggcttttatatggtgacacctgaaagttaaattcttgaggaaggaattctgtccttgtgcatacctagaagtttgacaaaaagtctatgctacgttcctctgaaaggcaaacttatgactgcatagaggagaatggcaaagaacaagtgtgtttcggtatttgcctcctgtggtagaaggaataatgtgtaattttatatgtagttctccagaattgaagtagagccacagtacaacagaaatatttagacttgatgattctaaataaatgacttaatcatttgctatgttgatgcaaaatgggaattgagtgtttgaagatactccaagagatctggatgttcttaaccagccagacaatatatagggcctacaactttttcccccttctcgtactccattgtaaagtaaatgagccactgaactactgtgtgcaagggaagttgcctgttaaagtacttgattttgaaccacaagggcctatgacattaaagaaaagttgattaaaactttccacagagaaaccgaaactttatggaagcatgggaaataaccctgggattgatatgctttaacgtcccttaaagctgtttaaattactcctataatggtattttttcttttca

SEQ ID NO: 297584 - DNA, 497 bp, Homo Sapiens
  misc_feature (363)..(372): n is a, c, g, or t
  misc_feature (426)..(426): n is a, c, g, or t
aaactatggagaatttcagctgatgttgtatgggaagagggaggctagaaaagttaaggaatcctcattattaaggcaaaacaaatttaagagtttttttgtttctttgatgggaagaaaagcttaaagattgtttttagtataatagtgatactcattgacttatcagaagcattaaatatcaacagttatgatactgctgtgagaaaaactaattccatgaaataattgccaaggatataactggtgaggctaattgtagctgtggttaataagagaaagcataaacctagggcattgtgagagctcagaaacaggaagatgtttgcattagtgttatgcaagttcaaaatgaggaatcannnnnnnnnnctgtatagaacaatatgtttgtgtagcaccctacctctctactttttctcttgntattcctaaacatgtacctgccaccttaatgaaaggaatttcttcctatggtttttcaagcatatccttgc

SEQ ID NO: 297585 - DNA, 432 bp, Homo Sapiens
tgatcaaagagaatctgttatttcctttagaatataattttaaactttcatatttttatttttgtaagtttcttttgcatattcatttcacagaacaaaacttgtttataaaaccaaaaaataagggaccaaaaaaatcagattactttgtcttgggtgttaaaaaatacattttcacttttttatttaagtggtcacttatctctaaactattgatcagttatgtgaaaagttcccatgttttcacataaaatctttattcagtttggctttaagaatgcaaggttgtcatttgtttttgtgccaagttacttgaattatacttttgtgtctaatttttctttcacagaaaaattttacagctgtacagatgaactattttgatacattttttagaatttgccttttttattgaagtctagctcgtatcat

SEQ ID NO: 297586 - DNA, 688 bp, Homo Sapiens
  misc_feature (654)..(654): n is a, c, g, or t
  misc_feature (667)..(667): n is a, c, g, or t
  misc_feature (669)..(669): n is a, c, g, or t
gaggctgctgaacttcatgagggacccggcagataataaaggacttaggcatttgttttgagagagatgtgaaatcatttgagggttttgagaagagacacgtgatctcacttctgttttaacagtgccactctggctactgtgttgcaaattgactgcaggaaactagggcagaaataagaaaatcagtttggaggtattggcccagagtgtgggcaatggttttggagtaaggtggttgaattctggatatatttgtgagtggagtcaacaagattcgctgtcaaactgcttgttggcacataggaaaaatggaggaattaaggttggctcccaaaatttggagcctcagcaactgcacatatgtacttttcactaacagaggataggaaggagcaagattgagacatctaagaggaaatgtgaagtagggatgggaattagttttgctgatctggatttcagaagaaatgtctgggcttgagataaaaatgcattcaaaaaaatgcatgtaggtaaaatccaaagccatgtgcctgggtatgctcacctgaggcgtagggaattctgagacctcttatagagaaaggaactgagccctggggtgctccaacatctaggcatcaagagggatcaggggaagtctgtacagangaacagccaaaangntaggaggaagaccagtatc

SEQ ID NO: 297587 - DNA, 569 bp, Homo Sapiens
atgagccaccacactccgcctacttctccattgaagtgctctagttttggtaaaatcttctccttgacttcaggaccctctccacatttatccccagtctataactcgcatatttcgtgttttcaaacagaaaaccgtaattcaggagtgaacagcatcctctgtaaggtgtcacaggagcagcctgaaatccattaggcagtcattctgaagctgtggtgaaatcgaagggaagctaatgttgcagctaggaagatgagatccaggctgaggatcacactttttccagaatacttttttagtgtttccaaagccagcaaaagccgtttagaagtctcatctccagaatgccagaatacacaaatgtaaggctttattttaggggtgggccctgggttttgcagtcaagtcagccgctatttgtatgagcaagacttcatcggtagcactactgggctccccctcttctacatgatggcagcaatttggccttagaaaatatgccctaagtgactccacaggctataagcctatttttcttcataagtagaaatggaagatttctgtta

SEQ ID NO: 297588 - DNA, 624 bp, Homo Sapiens
  misc_feature (248)..(334): n is a, c, g, or t
ggggaaaaagcaaattaggctagattcgtactttatagcacataaactttggttaaatcacatatgtttggaaagtaaaactaaacgaagaaaatatcaaaatgtcagtttaggtgatgaaggtaatcataaaaacataaaaagcattagccacattaatggattaatgaatattaatggattttattctgtcaaagttaatgtctttttagtgaaggactctatatttggagttaacagatgtgaannnnnnnnnnnnnnnnnnnnnnnnnnnnnnnnnnnnnnnnnnnnnnnnnnnnnnnnnnnnnnnnnnnnnnnnnnnnnnnnnnnnnnngggaaatcagtagaagatggacaacaaatagtttgcagaaaacttggtggtaataagtatatgaagtgttactgaaaggaggaaaggaagttaaaataacaggtgagcaaaagtttgtgatcctttatgatctagcagtcttattcctgcgtagcctcgtcagaagaacatatacacgcctgtctatgagggttctatgtcttaggatgtcatttataggatatagagttggagctggttaaaaggatggatgagtaaaatgaagccattacatactaaagagtactatg

SEQ ID NO: 297589 - DNA, 547 bp, Homo Sapiens
gggggcccctagccttctaaggaactcccaggcacctacttaacaaggccagctacacactcagtatgtgataagccccatgatggatgcaggttagaattcaaagacctggttggagtcctagatgtggagacaggatgatcaggtcacacttgttagatgactaacactatcagtagaagctcttgagagattttcctaacgcagcaagatttctgtgagtagaggtatcctgggaggtatcctgggaggcagcctattgacttgaccaagtaagctgatcaggtggcctcctctacccactaaagaaatgtgtaaacactagcaataattgctttatcttaaactcctggacatactcagttcttccattccactgttctattgccaataccttttgttgttttcttcacactcctcttggcagcaaatgtctgaaagtatttcaattgtgtaatgttaaggagttttttcatagcttcagaaaagagggcagcaaatatgaagccttaagttcaaaataagtcattctacctagaaatacaga

SEQ ID NO: 297590 - DNA, 691 bp, Homo Sapiens
agtgatggatgtcagagaagcacatcaggtggctgttacaggctgggtaaaagagaatgaagacttgtaacagaatgagaattacaaagagtagcgaggttggatttcagagagatgccaaagaagttgagtctacgtgatttgatgactggagttgaggaagaggaagaaagcaaagctcacttttagattttatcacaaatgactcttagatagtgattgtgataatgatatctttagtcagaagagggcaaatttggggactgggaaagatactcaagtttggggcatgttaagtttgtgtggaagaaacttccatggaggatgagttatacacaagacatgaaatttacttgtgacagatttagaagaaacgtttatagatttgttactttttgttaggaattttggcttacattttcacctatttttagtttgttattaatagaatttctgttgaacattctgtggcttattcagcctgtttaccatgatgctaatagtcctaagaaagtgcactgtctagtagtcttcacacttttttgattgtgtacattgtcaatagaaatatgcctacaatatatgtacatttgtttattgattatatatgtcttacagtacaatcatattgtttatattataaaacatatgtagaaagaatttttcaaaggctaagacaaatacaaattgt

SEQ ID NO: 297591 - DNA, 414 bp, Homo Sapiens
  misc_feature (117)..(117): n is a, c, g, or t
  misc_feature (345)..(345): n is a, c, g, or t
  misc_feature (365)..(365): n is a, c, g, or t
  misc_feature (378)..(378): n is a, c, g, or t
  misc_feature (402)..(402): n is a, c, g, or t
taagtaaaataaaatgttcagacttataaactagacaggtagtcagcataattcatagtaatgccttgacattaggcgccccaaaggactcctttgttctttgttccaaatgtctgngctaactgcccattttgaggagagaagtctgcaggtatagttagtgctgctgagacatttccactctggcattctagagttctctggcttgcccttgttgctttaaaactggttccaacttcgtgggctttatgattgagcaacactggtgattgtgatttctaataccaccctccagattcatgtcacaggtgaaagtctgcctgtggggagagctttcacattctnctggagttgaaccaaaatangaaaacatcaacnaacacagttaccaaaagcttccangggggatggagg

SEQ ID NO: 297592 - DNA, 685 bp, Homo Sapiens
ggttgtcttaatgtatatttaattctaatagtatttcattacttaatctttgtagttcattatggaatctacatattatcactaaaattagcatcaaattaaacttaattttaaaatgaagtacactactagcagttgatttctttgaaactaaatccttggcttcattgaaatactgcaaaatatcctatcgagtctcctcctcctccacttttctgttcccttccccgtgctaccctactgttacctactgctgctagtgtcaaaggagttggagtatgactatccacttttgtattcagtattagtcctactttgttacctatcagcttgacctcttcttttttgcaatgaattaagctgttctaaatgaactgattaatctgaaaagcctttgacagtctaaaaatagggctgctatcctgttaagtcaggattttattgccatctattaaaatgttaaagttgaaaaatattgattaggtttcatgaccatgacaggtaggtcttttaataatcagttgtatatatactatcacaggaacctcaagccagtttctagagctgtaaattgcaaattataaatgttaggtctggaacatttagagctagtcgtttctgagaaacttttagccatttgtgtcgttggcatttgagcagagttgcagtttgtattttaatttat

SEQ ID NO: 297593 - DNA, 581 bp, Homo Sapiens
atcctctgattgaaagtgatacaatttgaatattggtatattgtcattggtcagtaatggaaaaatgagattccaccagtgggttacccttttcttgtcttggtttgctatgccttatcccagatcagtgttttgttccatccctatggtcatctctaaagccttgacaggagcatcccagactggagaaatgcagcgtatctgtggcccagaattttgtttgatactctaaacagcaatgcaaagactgcaaaatcacactattctaaacagttgttttcagctcattttgaagattgacctggaaaacatatagatacagaatatatacatttaatcgttgcttgtgattcattgtgtcaaaataacatttaattttcactctgattaatctttattttccatttaaaagattatttcaggctacttaaatacaagaccttgcattctaatttttgaaagcggttgttttccctgagctctctctcaactttgacagtttgtgaatgataaaaagttactaggtttgtcctttccttgatagatgtagagcagttcatctgttttgtaaaggtacagtt

SEQ ID NO: 297594 - DNA, 375 bp, Homo Sapiens
gtgctgtgacatctttggagctgtgtgctaacttgcacctttacatttatctttcatatatgagttatatatgtaaacacactaatattgaatgtctgtaaggcacaatgttttattagtacttgcaggcttcacagtgaattgtatacagttgggagaaaaattatatgtctcattaatggtatctgagtcactgatggaaacgaagtttaaagtttatttttttgactgcaattgtcctatttttgtcctttctaattttcatttctctaagagaaagaatagagctacattaagtcagctgacatagaagtgtgtttactgtcactgtatatttaggagattgtcatgtctttcatacagactttcagttgg

SEQ ID NO: 297595 - DNA, 237 bp, Homo Sapiens
ctcctcccgagtgtgcattcagttaatataatcagttgcttgcttctttcaaagtgctttgaaggtcttgaactcacgtgtgagcatctttatcaactatcccaattgcatgttctccatcacatattctcttatttgctctgtaccccctgagaatatgttttagagatattggaataaagctgtctgggtaaggagtaggcttagccgacctatgaataatacactttagtctag

SEQ ID NO: 297596 - DNA, 517 bp, Homo Sapiens
  misc_feature (12)..(12): n is a, c, g, or t
  misc_feature (52)..(52): n is a, c, g, or t
  misc_feature (61)..(61): n is a, c, g, or t
  misc_feature (150)..(150): n is a, c, g, or t
  misc_feature (207)..(207): n is a, c, g, or t
  misc_feature (330)..(330): n is a, c, g, or t
  misc_feature (376)..(376): n is a, c, g, or t
  misc_feature (385)..(385): n is a, c, g, or t
  misc_feature (406)..(406): n is a, c, g, or t
  misc_feature (409)..(409): n is a, c, g, or t
gcctccaagacntcgagcatcatgcagcactcgaagtcatgcagtgccctgntagggctgnggaggcacctgggcagaagctaagaggcacaagcacgaagcctccatgcctggccacgtcctgtgtcctggcatgaagtcccctggcangggctgaccgtcctttcattttctcttcagagtgggggcagtttgctttgggtcccnacagattgatggaaggattgtggccagtgagggtcccctggcctgggagagtgggagggacagacctgggatgtgaaccttgggcaaggtgcagagacccatgctaaagccaacacccacagncacatccaggcaccacccatcccaccgcactgggttcacgcctgcnagctcaaancacgttgggagaaagagcatntanaaagtactgggtcatctcaggcttcttggaaaaggatttgaagtggacgggcaggttttcaaaagaccagactccaatcttccaaatgcacaggcatcagtgtgagca

SEQ ID NO: 297597 - DNA, 620 bp, Homo Sapiens
  misc_feature (371)..(380): n is a, c, g, or t
gtgctagagaacatttatcatagttaatggatgacataaatttctatctacaaaatttctaagaaagcaactagtctgctgaaggttaatgtgtgtgcattttgtgaggggaggggaatgttcatcgttttcttttcttatccagtccagcttcacctcataagagagctttaccccgtaagagagctgttactgcgatccatacctatgtctgtcttggcctctcatacataaaataatcagatacatcactttttctcttccaatgaaaagaggaaagctatccatggcttcttctctggaagttccatgaaaagattgaattaaagatgaatagctgaaaggtacataaagaaaaacaatggacccannnnnnnnnnctcacacactcatcgagtacactgaggtctgattagaatccaaaaagtaagtcatatagtgtaagggaggcaagtagtccactagaattgtatctacttgctcaattttggttgccaaaaaagaatttcattttcctgttctataacaatttttcaagaagctgtcagaatattcatctccaaagctttgtagcatgactacttttttagtcaatagttgccctgctttaaaatatttca

SEQ ID NO: 297598 - DNA, 322 bp, Homo Sapiens
cggggcagcggaaggtggagctcctgcccacccgcccgctgcaagatgggacagccgtctgctcacaaccgacgcccagggctgcgggagggggtcttgtccaaggtcagacaccaaccacgggcaaaaggttcaaaggttgcgtgcctcccccaacttccccgagcccgcgctgtgcgatccccgatcccggtgagtgtcatctctggagccttccgtttcctcctctgtaaacctggggtggtaaaaatgttaaaaatgttgaagggtatgttggaacttggccagagctgcgcccaagcaccagctgtgcaggggttgg

SEQ ID NO: 297599 - DNA, 300 bp, Homo Sapiens
cagaagaatacagaatagtataacactatgtgtaaactactcatatcttgagtagaaaggttaaaagatgaactgataaaaaactacaagttttcaagacagtacagtaagatataagtagaaacaacaaaaagttgaaaagcacaaggacaaagttaaagtgtagagtttttaattaatgttctgtttccttgcttgttacattgtttacacaatcaatgttgtcatttaaaaataatgggttttattatttggaagtccacggtaacctcaaattaagaaacatacaatagatccata

SEQ ID NO: 297600 - DNA, 562 bp, Homo Sapiens
gatgttaccactttgggtaattaaaatttgacaggtttttgtgaacaacttaatcttagcccataaaaatattctcaccaaaccaaacaattctctacctaaaacaagaatgaaaaaaaggaaaaatagatacaaaagcaggtatgcatattataaaatggctaaagatgttaaattagcaagaaaatattggcattacaagttattgcactgccaatctggacgttagagtgttttcctcctgggacagaattttcataattactttaagaaaatgtataaatcacttagcatggcacagctagtgcttgtatccaactaaacacaaatgcagagctaacaagaaaaggagactaagcagtatttaacaaagtacttacaattataggtaatttaaaattcttcgatgcaacttaagattctcatctactttgtgtacattatgtatgattcttgaaagcaagaaggattagagaaaccttctgttgtctaaagagacttgaaatttgacctgacttccccagtgtaagggaaagtcaaagtaggtctagggacacagact

SEQ ID NO: 297601 - DNA, 718 bp, Homo Sapiens
  misc_feature (416)..(582): n is a, c, g, or t
  misc_feature (597)..(597): n is a, c, g, or t
gtaagagatacaatcataaagtgtgcccagaatttgaagagtgctggcatatttgcatgcacccaaatggatatcactgtgggcatctgtgaaatgacgaatgatatttcagtgagtggaaattgtgccagggtctaaaaatattcaatagagtggaaaagaaaattgggaaacagttgacagcacttttgttcgttaagtggcaaatatttgtgcatgaccaacggtggaaaacaaatatgacaaaagtatattgttattggactaccaagaatcttgtattagtttgagttctctcagagctgaccttgagactacaaatgagctcaagtagtttgggaacttgcaatggctttcctgaggtgtctacttggctagactactgtcttcaattattctaagactaactaatcacnnnnnnnnnnnnnnnnnnnnnnnnnnnnnnnnnnnnnnnnnnnnnnnnnnnnnnnnnnnnnnnnnnnnnnnnnnnnnnnnnnnnnnnnnnnnnnnnnnnnnnnnnnnnnnnnnnnnnnnnnnnnnnnnnnnnnnnnnnnnnnnnnnnnnnnnnnnnnnnnnnnnnnnctcacctgtagacancagcgctagcctgtccccagagactccagcctgcctatgatatccctttttctgaatgcccaccccatgatatcaactttttagccagctcatgcatttgtaaattcgattttcttataat

SEQ ID NO: 297602 - DNA, 325 bp, Homo Sapiens
ggctgggaaagtgggcggggcctcgcggggtagtcctagttctgcagtgtgcgagtttgccggatgtgactgtaacttcgctagctaaaatgcttaagagcggacccttcatccctttgagcatgtttcttcctaaaatgcgcggataccgggagatcaagatgagggatgtcatgtgccttgtgaactgtcacccgccgtgcgtaagtgaatgacgttttgacctcacaggactgttttggggcataaatgaaacagtgtatgttaaaccaggttttcggctgtatgagaggagaaataaaattagaagtttgtgtctgccacc

SEQ ID NO: 297603 - DNA, 666 bp, Homo Sapiens
catgtacaccagcctgatcctcttcagtgttcctagtctagttaatgatacctttcctgagttgattctgccataaacttagggataattcttaatctctcctttatccctctttgtccaacctttcaacaggtcatgtcatatctactccataatatgtcctgattctatccgcttgtcacttgcactgttggcctgtcttacccacatcattatcctctccttcttagacaactataatataataataaccttctaactggtcatcttgcattcactcctgcttttacctgagtctccacataacaatgtatttttaaaatatgtagttttaaaagacagatctcatcctattctactccttaaaacagttgagtggctattactcttaccataatgcccaaatacttttttgtagcctacatcatcttaaataatctgacatcttctgtaggtttatctctattctttctactccagccacatttgctccttcgtgccccaggagctgtgtacaagcaatcacctctgcttgaaatcttcctttacacacctctcttcaccctgctaatttttattcttcagttcccacataaatttcactttttcagggaagttttattttctcatatgagggtaagttacttttaaaaaagctttttgtac

SEQ ID NO: 297604 - DNA, 406 bp, Homo Sapiens
  misc_feature (95)..(95): n is a, c, g, or t
caagcctttcttaatgacacatgtaagaagatttaattctattgattttgtgtttccaaattatatcactaatcattaacaagaaaggcatgacntctggtagtcagattcactcctcctggagctctgaggaaacactttcctcttgtcatgtttgttctcatgtctgccatttaatcaacaggccatagaagtgtaacatcagtttggcctcttttaatcctcacttggaaactcatttctcattcctcggtctcccttggagtgagtgacttactagaaaacaaaggtagttcatgattattcatttctatttagaatttgtggtcttttgtgagaaaattgccccaaatcctcctactacagaaagtgttgatttttcaagctaatttttcattctcctcaa

SEQ ID NO: 297605 - DNA, 497 bp, Homo Sapiens
  misc_feature (44)..(67): n is a, c, g, or t
  misc_feature (414)..(414): n is a, c, g, or t
gctctacatttctgttaccaggaaggaggcacctaaaggtctgnnnnnnnnnnnnnnnnnnnnnnnnagggctgtattttaaaagtatctcttgagtgtcagtgaaaatatgtgaactcagtactacctgaactctgatttggggtttgaggaattggtacttcaggagttaaattaagccatggcatctgagacaggctcacgttgaaactgtgctttgtcggtaatctgtccatacaattctagtgtgattggcatcaaaggtaaaccctgatagaaggagtaagacagtatgtgccaacatacgatgtcaggaacttgttggggctcagaaaatgatactccaaaatatggttctttgacaaactaaggaagcggcctcaagttctatgccaaagcacaggatgaggctgntccttgaagttcctttatctgcctagaaaccagacccccaaaaggaatacaattgcctttgatcccctcctcaaaatttcatt

SEQ ID NO: 297606 - DNA, 386 bp, Homo Sapiens
  misc_feature (266)..(266): n is a, c, g, or t
  misc_feature (341)..(341): n is a, c, g, or t
ggaaacaaggccgaatacctcacgttcctctaccctgaccacaaaatgatcacagcttcagagtagcaatactttgctgtcttatagaactgtttggacagggactgaaatagattagcactgttcgttttacttttaaaactattgtctgtattagaagaaatatggattctaagcacatgcttgtcagtttaacgatgatcagcttagagtataagtctctcagagtacatacaaaatgggaaaaaaatcagtttgaaatattntctgcccaaaagttaaaaacctcctatgggagtgaataaaaaaataccatttaatacaaactactcaacaatttnctcactatgtcctcctatgaaattaacttttaacccaagcctttt

SEQ ID NO: 297607 - DNA, 751 bp, Homo Sapiens
  misc_feature (703)..(703): n is a, c, g, or t
gactaatactattattcacaagacagaatgatcttaagaaatgtcaaagttatcctcgcgtggctgtttccttctcagctttcaatgttgtgggactttggaaaacttcagttgtattttcaggaccccattctcttaatatataaaataaggaggagacagtaggtaatttgagttgccagcttaaattttgtatgtagccttgactagaaagagagaggatcaagttagcagctccaagtgcttaggtacatattgatagaaattgtttctcatgtgattaggcacacagtaaatagtagctcctggtcattagtcagtagtaatcattattttgtgaacatcaaaatacattttcaacttagtagttgatctaaacttttgaacgtaactaagaatttatctttgagaagcgtttctggtggtacattaactgccgctacagagtgggtccccaacttgaggcctatgtaataaattactttaaatttttgtaataaatgcttataatgccaagatattatgcaaaagaaactaggtcaaaattgtgttattcttagtgggaccctcaatacaccaattctaagtaccttttgtgaatgaacctgctgtcttttggagtgcctaggtttacagagtacctaatgcaaatgtcatttccaagcttcttaaaattagcagaataccttttttcccttatagngtggggtagatggtaataaatggcgttcttactttttcctgtctaaaa

SEQ ID NO: 297608 - DNA, 756 bp, Homo Sapiens
gaagacaatgtcatccatacagaggacttacagagatgcctacaaacaaatctgaaatattctcagcaaagttttcatatttgtttagatacttgaattatcacctaaagctctgcagcattgaacactgtgaaattatttggaccttgcagattttcaaggcaggtgcatcacattttcagtgtggccataagaccttagtcgtcttctcatggaatgtctggtttggagctttatggctttctggtgatagacaacataaatgactgaaatgcttccccagtagctagggaaaataaattacaacataatgttatttgataaagatagatttttacttgtagaatagttaatataaagccatctttactaataataattctgtatctaatgagaaccagctatctattgagaacattcttgactcttgaccttatcattagtatagggaagaagttcgcttctctattttgtacaggccttcattcataattagagtaattaagttggggtaaagaaagaccccaggatacagtgccgttttacatggttcagaatcattatctcatctgtcaagagatgttgctgccatcttactacttgggattcaatgtccacagctccgcttctaatcagctctcatccataagggctcaaagccaataacagttcaaataattcttgccagccttttgcaccaggtggtatataatttgtagtggaatggatttgcctgcttgctccttctgtaaatgt

SEQ ID NO: 297609 - DNA, 386 bp, Homo Sapiens
gggacaccaacagcatacactgtagtcacccatgattttgtaactctgagtttggagtgtattgttcatctctgtagtctctataatcctgttgatgtcttgcacagggaaggcactagttggtggaaccgattcatcaaagatctggaggaaatgccccctagttggctctcattccaattcactgccatttgtaataacaaacacctgtgagggacttagcccaatctcctgaggcagcagtgaaccagagtatgtgggtgatagagagaagaatatgcaagtttacattgcatgttccaagaatctcgttgccctgtcaacccaaaagctgcctaaagaccaaatgctcaaattcagaataggcaaaaatacttcttgatacc

SEQ ID NO: 297610 - DNA, 281 bp, Homo Sapiens
gagtcaaaattctatttctgaaatgtcatcttgatggcttctgccctcacaccttcccatcagatggcgctgtcatcacagtttataccaagtgtcaatatttttatagcaagtacacagtcacttagccaaggttctcatgctttatatgcaacattgtacttggtgtaaagtcttttgtccaatgaatgaccttcctgtacccagtgtggttgggaccaacaggctctgattgcatgaccaagaaaagaaaaagttataagaggaactaactcccactt

SEQ ID NO: 297611 - DNA, 322 bp, Homo Sapiens
acaaagaaatgcggtcaggaaagaaagggaaagaggtactgtcaagcaagcaacttctatgggcgactggacatcagttctgctggggaactctggaaaacgtgtaaaacatgcctcagaggtattctaaataggggactgctttttgaggcattacttttgtagacttccagtttgccttggaatgagccaaccatgctcctgcagccagaataaaggcaaggaataggaagtgttctcagtaaagaacacctgaggtgtacaaatgaggtctcttaacacagtctgctgtaacacgttatatcatttaaggtttatagta

SEQ ID NO: 297612 - DNA, 564 bp, Homo Sapiens
  misc_feature (417)..(467): n is a, c, g, or t
gttcaattctaggacagattgcgtgcatatatacagagtactatggaaatgctgggattattgagtggtttgcagccattttcgaccatgtgcctgggactagctaacacattgtcagggaaaaacatgatgtagcaacaatattagatcatgcaaatgagactactgaatagtaatagttatgggcaatattttggaaaacactgattagtgacagttttattacagcaaatgtatgtatcaagtccccagatttcattgtaacgcactgaaaacagatgtcaaagtgtcccaaacagaatttcatggttaatctacatattgcatggaaagtacaaacaaaccatttagaattctgttatttaatccttttagaaggaatgaaaatatacaatttagatttactctattctttcnnnnnnnnnnnnnnnnnnnnnnnnnnnnnnnnnnnnnnnnnnnnnnnnnnnattaagatgcatataggagaagacatatctgcatatggacataattttacttaatgtactttgaaatgtaagtttctgaacataaggtctttacatt

SEQ ID NO: 297613 - DNA, 654 bp, Homo Sapiens
  misc_feature (46)..(102): n is a, c, g, or t
  misc_feature (625)..(625): n is a, c, g, or t
agacctaggtttatataactgcttgactttaataattttaaggttnnnnnnnnnnnnnnnnnnnnnnnnnnnnnnnnnnnnnnnnnnnnnnnnnnnnnnnnngcatacactccataggattggtgttacaattaaattaggaaaaagtatctatagcatttagtctagcagccaaatacatagtgagcattcaatagataaaaattcatttccttcccttcacagaactcttctttttatggagtctgcatattcctgctatccaaagtgttatttttaaggcctcatataatgctaaaatgttatgattctgtgataaagccaattttttactttggaccacttccatcatatgctgctgtattcaatagtaaatatgattactagaagagggaggaactaacttagctgagttctatccaaggatgacagcagtagttatgtgctacaaggtaaaatggtgtatgacaataacgtgcaggaaatcatttgttatatgcatttgctaagttatgagacaaatttagtactcaggtatttctaaagattcctaagaatagcatgattcctaatatatgattgttcaaatggagactcacatgctgcataaagatattcctgtggnaacatggatctatggcagcagacagacag

SEQ ID NO: 297614 - DNA, 301 bp, Homo Sapiens
ggaatccacatataacgcttacaattcatctggcattgttgtaaacaggttaaagatgttaccccatatcacactcatgccaccctttctgactcctcaatatagcaccagctccatttaaaccagctgtctctgagaatggaaaggaatcttgctcatcacaaaagctcctcctccatcgtatatccagacatctggattgtgtaaatgttattttttgaactagtgtcctatcatatatttgatgggcaacacccatcttatttagaagccagtttggtgtctggcatatcctatggag

SEQ ID NO: 297615 - DNA, 482 bp, Homo Sapiens
catattaatataatcagaaaaataacagaacgagaattttttaaattattgcatattgaaagtgtactcataggcaattagtatgctaaatatatattacaagttacgagcaaaatagtggttacatcgattgatttttgaatagtggaccagccttgcattgatgtaataaactcccacttggatgtgatatataatactgctgcattcactttgctagctaacaatagaaactaagattagaaggaaagcatatgtttagcttagcatggtggttccaaatctggctaatcaaaatcaactggaggacttgaaaacacaaatttccaaaccctaactctgcagtgagtttggtgtgctgcctaggaacctgcattttaaatatgctttctaataatatttatggagccaagtaagcccagccatctatttataaagtggaatagtacattgagattgttggtttagtgtttaaaacaaaa

SEQ ID NO: 297616 - DNA, 552 bp, Homo Sapiens
gggggggaatgataaatattttaaatggtaattaaaagcactattatactaaaataatgttgctatagcagaatgtttgcactgtatttcaatatgcaacacaagactgtgcctgaattagaacttaggccatattctcaaacttccaggactacttcttcaccatcttctgctatttgatatatgtcctacacttttccactaattttaattatgttactaaactcaagtttattttcttctcaataccagtcacataacaagtgtctccaacaagcctggttacccttaaattagtaaatacaacccgaaaaataacattttatgtttacacaatttaatatacaatttaaagtcagaattaaagcaaactgaaaataacttaaatggggactgtacttttgtatttatgatttctcaaggttgtggctgtaacactgagtcaatttcttttataagctgtgcaaaatacaaatactttgcagatacggactactagcctaatttttagaaacaaaatactttttcatatcactataatttctttgccta

SEQ ID NO: 297617 - DNA, 427 bp, Homo Sapiens
aaggtcacagaactaaaatatggtggagctccctaattccatgctacaattttaagctattgataatatcctgcaagttgttttattacatataaatccaagtggagacacttagagaaattgattaaaagaaaaactgttgagcataatcaaacagtactgttgaaaggctgttttattttatttgcagagcattttatgttagccactatcctgttataaggacttgttcattgtgagtatgcggcactatagtaattggttataaagaagaatgtagaacagcaggtgtacaatagaaattgctctttgtagtttaaataaatttctaagagctaccatatatttaattcttattccatgataggtacaaggacttagatttcttaaatctcatgcaaataagtacttttaaaaccaattttca

SEQ ID NO: 297618 - DNA, 167 bp, Homo Sapiens
attttgaaaggaatctttttttctgagcagtaggtctcaacagtaggcttaaaacattcagtaaactgtgccgtcaacttggatgtgctgtcatccaggcttccaggctttgttgttccatttacagacgcaggcagaatagatttagcataattctcaagggcctt

SEQ ID NO: 297619 - DNA, 689 bp, Homo Sapiens
  misc_feature (661)..(661): n is a, c, g, or t
ggatggacccagctatcctttacacaagtgctgctggacaaaacacctaagtggaaaaggataaactaggataattaaagatcttaaagtaagtagaggagctttatctcccaaaacaatagtcttaaattttcctctaggaaagaatcccttgtttaaatatgcagacatcctggccctgtcctcatgatatctgattcagtaattcccaagtactctcgtgcagatgacaatggaccaaacttggagaagcactgcttcaaatattgggagaggaaatattttcagtaaaccacacagaagaaaaaaacctgttactatcattttataatttggtatgaaagaaaaatttcatctagctaagatatgacaatgtaataacaatttaggaaagcacattcagaacttcttgttgtatcttaacgttggtcttcttgtaactatgagcaacattggtcacttttatgtaaaaatcactttataaagaataatgcagctcttcccttggctctttgcttatggaaaggttaaacagtgttgcttagttctctgagtggaagcttgccttattaatatgtttctatcctcctgtgtcataatctgctttcaactaataaaatcttctattctagggtttttctttcacttgggttcttctttncaatccaaacatgtgggagaatatatgg

SEQ ID NO: 297620 - DNA, 537 bp, Homo Sapiens
gagaagagacatgaaaatgtatctgaccttgagagttgcaacaaatattcccagccaaaccagtctgtttaatgtgctttcatgcatgcaagtttatctgtttgactcaaactgtttaaacttataattccatcatggccactttaaatgtttttggaaacaaatacacatactttcacgtatttaagaaaatcaccactctccaatgtttctgttgaatcagacttttacatgatgttgtttaataaaatatggtaggttttgacatgtatgattttatcatataagtagcgtaactcctcagccaaaaatttagcatttgactctatagtagaaggctgagtcctgtacgttatgttctaaagatagacaaaaatctagagattttcttctttcaaagtaaaagcagatgaggcctcccaccaccctctgagccattaaattgttttgccaaagtcacacttttaatttatttgacaaatttgatgtatttatctggtaattgatgtaattcagcaatatgtaattgtatcttcc

SEQ ID NO: 297621 - DNA, 601 bp, Homo Sapiens
gaaggctgatttttaaaaattataggctggaaatggtgcaaatatgctatatatgtttatatgctgtatgggaagactgatttttttaaaattataggctagaaatggtgcaggtatgcttatataactaagataactaagttgatgtgcaagacaggaaagaatggttgaaattaaaaaccataatttaatattgattttgcactaataaccagacccaattttggaaattccaacttgttcataatgtgcatatacaacaggagttttgcagagttttggcaaagtatgtggcagccacatgtcttcacagaacactgaaataatccttagtaaactctggtaactctaacttgtgaacaccaaattaataactcttaataatttaacgtatttgttattggtagtttgctttcagcttcagacaattggaactggctgaaatacaaaggagtttgcgtggctaatctgattgagaaaccagaagcttcaaggacaatagggcagggctgtgtttggactctgcacttctgtgttttgctttaccctcatggttgcaaaataactgccagcagcagccagggaaatatgcttccttgtt

SEQ ID NO: 297622 - DNA, 341 bp, Homo Sapiens
  misc_feature (160)..(160): n is a, c, g, or t
gagaaatggcaaatattagagtaaatataaagcacaaattataacattgtcctgtggggtgtataaaatatatagatgtttgacacctttagtgtaaagaatggcaggggagtaatggaattcctatacatttgcaaagtttctacattttatgtgaagnggcatattaacttaggtagaatgaaaagttaaggatgcatattttaactctcagagcaactaattaaaaaaaggaaacccaagagataaacccaactacaacttctaaaacatatccaaatgacctgaagaaggcaagaaaaagggaacacaggaacgaaaaaccaggaggagacagattg

SEQ ID NO: 297623 - DNA, 424 bp, Homo Sapiens
aaatggcctggcagcagctgttcagccatccataattatccagcaattgcccatggcctgttcctttatttgctcaaatgaccactgagcctggagttgttctggtgttctgggaaaattcctctctttggaaaatctctttctcctgttgcaagtgttttagtttagttgaagtttcacaatcagtttgtttccatttgtgttttgtctttcagaaattcttcgttgttttagtcttctgccatgaaaatttcttctgcctttccttcggctgtagatttgtgttccccttttttctttcttgagttatttcagtggtgtttttggagagaaaataaaatataagtgatatatctgccacattgaaccacaagtctccttgggttcgtttacaaatgagaaaacaaaggtccagagaaaaggg

SEQ ID NO: 297624 - DNA, 365 bp, Homo Sapiens
  misc_feature (48)..(48): n is a, c, g, or t
  misc_feature (223)..(223): n is a, c, g, or t
gtgtcgacagctttagattcttctgaggcctctctgcttggcttgcanatggctgccttcttactgtgtccttgtatggtgccctctgtctgggtgtctgtgtcctaatcttctcttttaataaggataccactcaggttggattagggcccatcctaacaatcccattttaacttagttacctcttcagggcctatcttcaaatatactcacattttgaggnacaggtagatggttagggcttcaacatgaatttttgtggggacataattcaaccctccacacataattaccaattttctgaatgtcctttctggttaagttgcataaaaacgtttatctacttgaactctaggatgatagtt

SEQ ID NO: 297625 - DNA, 421 bp, Homo Sapiens
gtaccagaaggaaaactgaatttagcagtaaaacagtcctggtcattctaactacctgtatgatcttgaacaaagtcacttagtttccctgggccttggtgtctttcgtctataaaatattgtaccagattatctctgaaatcacttcaaggtttaatatatataattatcaatattttaaaattcaagcaatattcactttagaaattattataacattctataatagtaaaggttgaatttattaatataataaacacgttcaacttcttcaagcagataattgatatttggttcatattcttacaacctaatgcatgtcattttcaccaaatgcaggcagaatttatatttaggtttgcatctggaactagattatctggcactttatggccattatttttgggttgatggaccttct

SEQ ID NO: 297626 - DNA, 171 bp, Homo Sapiens
gaaaagagaaagccagatgaagctacccactgctttgtcttagaatagtggcatatggctaatataatggtattacacaaattatttaactgtctgtggctcctatgggttcagttacgtatcacttactacgttccatacacattgctaggttctgggaatatataattc

SEQ ID NO: 297627 - DNA, 618 bp, Homo Sapiens
  misc_feature (305)..(305): n is a, c, g, or t
  misc_feature (382)..(382): n is a, c, g, or t
  misc_feature (418)..(418): n is a, c, g, or t
  misc_feature (457)..(457): n is a, c, g, or t
  misc_feature (586)..(586): n is a, c, g, or t
cggccagaatttggcagggctccccagcagtccttgtgaatccctgtggtaggatgtttcagttctcctgagtcaggctgaagtgaaagctcctaagagatattcagaaagaaggagtggtcaagttctagaacaacaatagttggcccagtaattttaaagattgtcattctacctaagccttcatcctccagatagcactgttatgggcttaaaataagcttcaagggaaataatgaatttctttgacaccgccaaaaatcggctgtatataagaataacttgagaatggcttacaatgaggnagtcaaaagcccagctcagtgctcaggaatgtatttgtaattcctcttagacttgtcgaatggactgcaatttgatncctaagagtaataaaaaatgagaccatattttatgntaatgttcccttctcttcctttgcccacaaaagtgaggncagggaaggggagagaaacttatcctaagcactccttatgagttgcttgtgacatgatagctctctctaaagttcatgcaatcctcatcgcaaccccatgagggagatggtattgtctccatcttatanatgagggaaactgaagacaagaccttgtcaaa

SEQ ID NO: 297628 - DNA, 422 bp, Homo Sapiens
  misc_feature (336)..(336): n is a, c, g, or t
  misc_feature (397)..(397): n is a, c, g, or t
acaaaccaacccagctaatttgttgagcatcttctttgtgctaatcagatgtgctaatcagtctaattgcacaatttgcattctagcaggtgaagcaaataaagaactgaaaagtcagataaggaatctgcaaaagcaaaatagggttaagagaccagctactagactggtagacagagaaagcccctgaggaggacacactgacattgaatctagaagacaagatcagtggaaagagtttagggagaccacatacctagggtaaaggtcaagaacaaaaaaaggtcagtgaggctgaagcatagcaggtatggggaacagttgtagaaacagacnagcagattaggtgacctagggctttgttacaacaattaatcttttcatgaaaagacaaacntaaaagcaaactagggtcaaattca

SEQ ID NO: 297629 - DNA, 364 bp, Homo Sapiens
  misc_feature (106)..(162): n is a, c, g, or t
  misc_feature (173)..(173): n is a, c, g, or t
gatttgatgttatagtgagctatgatcatgctactgcaccccaccctgggcaacagactgagatcctgtgtctaaataaataaataaataaatattcaggggaagnnnnnnnnnnnnnnnnnnnnnnnnnnnnnnnnnnnnnnnnnnnnnnnnnnnnnnnnnactctttgtgntcactgagtcataactagccatttttgaggatctagtttgtcaaactaaagtcatgaataattgctgtatcactgtcagtaactttgatccctgtctttccatcatcttcaactttttcctctctactttcttttcatcaccattcaaaacatgcttaaaactctggtcttaaaagacagactgaaaacac

SEQ ID NO: 297630 - DNA, 435 bp, Homo Sapiens
  misc_feature (244)..(364): n is a, c, g, or t
taccaaattaagagttaacttttataatataatgtattgctgtgttggtgattatctatatttagtagcatttaatatttactaatactagcagaaaacattattttctctcagagtattggtttaagtattaaatactgtaatatatatgaaagtattttgttaactgctatacaaatgtaagagattaaataaacagacatgcaaccagatatcaagagttctgtgtgactgtattaaactnnnnnnnnnnnnnnnnnnnnnnnnnnnnnnnnnnnnnnnnnnnnnnnnnnnnnnnnnnnnnnnnnnnnnnnnnnnnnnnnnnnnnnnnnnnnnnnnnnnnnnnnnnnnnnnnnnnnnnnnnttataggaaaactaagtaaattgttattccgagtcttaatttctatattcctcgccctttgttattacttt

SEQ ID NO: 297631 - DNA, 601 bp, Homo Sapiens
  misc_feature (93)..(101): n is a, c, g, or t
gattttttaaaaacattaaattgaaggacagtattgatacagacaaatagttgaagaaaagggtctccagacccagttataccccacagtacnnnnnnnnncttagagatgtggtcacagcatacttttagccctctgagaaatctcagagatgggattgctctcacaacatcaaaggctgccaacatattagtttggtggtttttaggagacaaactaattctcaataatattcaacaatttctataaatattccagaatagatgattgaaagttggtttttgaagacctggaaaagaaatcattgatcatccagaatcctcatgtgttcttaaaatacaccctccactttctttattaatagaagatagggttcttctatcaattttgcagtaacctaggaactaatcagcatgttaattcaggaccctctttgatttcagcagagtgataagctctgtaagttacttaagagcattctcagacaacatgttaagcttcaaaataagtaattccaaactttatattaatataatggtacatgtgcttcgtttttcttcccctggcagttcagctttggaaacgtggggtagagaatgac

SEQ ID NO: 297632 - DNA, 470 bp, Homo Sapiens
catcagattcttcctcattaaacaaatgaatcacaatcctaattaatttgagcaacagaatttatgtaactactcccagcaggatgtctgctctcagtcagcagagagattacttcctctctctgggaaattccagccttgctggtcaataaaccttaatgatgactgaaatctcccatctgtctctgctcagggcaggtaacccctactaagcagacacccagttggctcgaggcagtaccccgggcaccggcaggacaaggacaacgatctcccagcctagatgtgtcctgagccacatggagcacacagtaggtgtttacttaaggacaggggctgccccttccagggaagttctgaaccacttaaaacccacaggaagtgttcaatgtctacttatggaataatgaaagggaggatgtgtcactcagatacttataaaatggtctcaagatcctaaactccaagca

SEQ ID NO: 297633 - DNA, 539 bp, Homo Sapiens
  misc_feature (72)..(177): n is a, c, g, or t
  misc_feature (184)..(255): n is a, c, g, or t
aatgtggaagacaaaaaagctgaagatacatgaaactcaatgctgtgtgtggatcttgattggttcctggtnnnnnnnnnnnnnnnnnnnnnnnnnnnnnnnnnnnnnnnnnnnnnnnnnnnnnnnnnnnnnnnnnnnnnnnnnnnnnnnnnnnnnnnnnnnnnnnnnnnnnnnnnntgtaagnnnnnnnnnnnnnnnnnnnnnnnnnnnnnnnnnnnnnnnnnnnnnnnnnnnnnnnnnnnnnnnnnnnnnnnngaaaacctcagaaagatattatattcatcatagaagcaggaaggtagtgaaaaaatgtgggattgagttctgtttgacagcaaatcagggaaatcgagaaacactggttggaatttagaaagaattggcagggaaaaaccaagaagaaggcctgtcctggcagcctgttgtgggggcaggggggtagatgacccaaaaggaagctcaggactaaaatgttgcttttgccatttatattgtaggaagtccctaacttactcattagtattctttagttgctgttg

SEQ ID NO: 297634 - DNA, 415 bp, Homo Sapiens
  misc_feature (200)..(200): n is a, c, g, or t
  misc_feature (209)..(209): n is a, c, g, or t
  misc_feature (322)..(322): n is a, c, g, or t
  misc_feature (339)..(350): n is a, c, g, or t
  misc_feature (398)..(398): n is a, c, g, or t
caaagaagtcatgactaaattgagttgtgaagggaaagcttattaagcaagtgagagaaggataccattctaagcagatggaatagcttgtgcaaatgccttgtggcagcaagagaaaatgggcatccaagggaccaaaagaaaactcattaggctgaatgctaagagtgagggatgactaatgcatgatgaggttgcanaggtacganaggtaagagaagaggcctgaacaaggagaattttatagttcagtttaagaattttgtcttaaaatcttcaaagcattggtaatcactggagtattttaagcaaagggtacctngatcagaattgtgtggnnnnnnnnnnnnaaagccattctcattacaatatggagaacgggtaggaggaaagagaancatgtggatgttgacta

SEQ ID NO: 297635 - DNA, 203 bp, Homo Sapiens
aggggccccctgcggtgataagacctttgtggatcatatacagatctctatctttagttcaagtatattcctccattttgatagccaagtcacagggtgggctacccatcattttactgctgttttctggtgctgaattttgttgaggggtgggttggggatgtcaccttgaggggaagtattttttaagaagtgtctagacc

SEQ ID NO: 297636 - DNA, 209 bp, Homo Sapiens
gagcattagtgtcatactacaatcagccactccccaaatgttgcatcactgaaactccaggtttcacagagaatttcctaaggtattaggtttgagtttcttccttcgtgggatgctatggattctttaaccaaaccaacctaatctttctcctgccatagtaccaccttctcctgccatgcaaaaagaagcagtttgcaaaagtcagt

SEQ ID NO: 297637 - DNA, 635 bp, Homo Sapiens
ggaaatacaaagtattaggaaaatattatgatggaagaaaaacgtttatagtctagaatattgaagccaatattattagggtaatcagttttcagcatataccttgttgtacagttatgagaatttctccttcttattagacatgaactactcaaacagagaagatgaccagatggattgatgctaagttgtctcatcttgaaaagacagttgacaacagttataaagataattattgctagtgtaatgtagtgtggccatgagtttaggtgatgagttcttctatttatattataaattctgcttgggtttcttataaataactccaacaggcattcatgtgtttttcctcttcccatgtttcaccaggtaaggtgctagcacacttgtgactgtggctggaagaggagaacagacactcctgtggggatgctttactctcttttctggtaggaaggctgagtaacatcacgggctcgattattttcttcatgtatttcaaatgctgtcagttatagcactaaattgtgaaaatcagccttctggcattcacattattctggtatgaactttgaggagttgagtgacatcttcccacttaacttgcacattaattctcaattacccctccctaa

SEQ ID NO: 297638 - DNA, 325 bp, Homo Sapiens
ctacaaactgagctgcctgtcctggaacagagcttgctttcatccgtggtcataatgaaccatgttgacatggaactttctagcaagataaaccacagtgctgaaccagatgcgttatttccactgttcaagcaggtttccatattagggatgctgactcctgaatttggggactggagatttgttctgtgttgccaggtggcctgggtgtctaagtgcctttttgtaccttgtctcctcctgcatagtgactgttgggtctcctgcctatgcagaggacgctggaggtttgattttgatcttaaggataaaaagttcggtctgt

SEQ ID NO: 297639 - DNA, 269 bp, Homo Sapiens
acggggctcagagatgttcagtagcttgcctaaggttgcataagctagtgagtggcagagcccagattcaaaccagatacacttcaaaagcaagcgctctcagctactgtgccggatataccattcattcagaatagcgtgggctaagcccactctgtgttgtgagacagagaacattcagactaagacatgcatgacctgtcctgtgggagccactcttcaccagaggcacttctgcacacacccacgtctcatgcattttccctggg

SEQ ID NO: 297640 - DNA, 226 bp, Homo Sapiens
atggtgaagggaaatgagttcagtaattacttattactaatgaaatgcaaagtgttttaatcccagtataaggttataatatttttctttacattctttttttagtaagaaaaatgtagttttgaaccatcatataatactagaactaattaggagaaatttaaatcctctttgctttatataagtatagtatatatttatttagcagaataaatgtttatggttg

SEQ ID NO: 297641 - DNA, 433 bp, Homo Sapiens
  misc_feature (47)..(312): n is a, c, g, or t
ggaaacagcagcagctggaagtcaagaggagtgctctgtggaggaannnnnnnnnnnnnnnnnnnnnnnnnnnnnnnnnnnnnnnnnnnnnnnnnnnnnnnnnnnnnnnnnnnnnnnnnnnnnnnnnnnnnnnnnnnnnnnnnnnnnnnnnnnnnnnnnnnnnnnnnnnnnnnnnnnnnnnnnnnnnnnnnnnnnnnnnnnnnnnnnnnnnnnnnnnnnnnnnnnnnnnnnnnnnnnnnnnnnnnnnnnnnnnnnnnnnnnnnnnnnnnnnnnnnnnnnnnnnnnnnnnnnnnnnnnnnnnnnnnnnnnnnnccctcccctctgcttctcactggtcctgagtgtgtcctggaataacatgtgggctttgctatccggtgttgtgtgtgtcacagatgcaattcaaaatcctaaggctggaaaaccattactt

SEQ ID NO: 297642 - DNA, 421 bp, Homo Sapiens
gcagaatgggattactgttttgccatgcatctgtatttagcagatgattactagataatatttataattttggatgttataaaaaagaaagtatatgaactcaaaaaagctcacttttttgtctaaattgtttttgctcttatacaacaatagaatacatatttaagttgtatttttatttgcatttaataatttattaattaaatgtatttctttgtcagatttcaaatgattgaggtgacttgtaagaatttgttttatgccctgttgctgatcaaatcattggtcttccctatagctccttacaaaattatgcaatcagtgttccatttggagtaaacatttagtgtcttatcttgatagagtaattggctacatttctctttctatgcatgaagttgtgtaaaaggaccaattcaca

SEQ ID NO: 297643 - DNA, 583 bp, Homo Sapiens
ggggtacatctgtgtgtctggtgcatctggggccccatagtgtctctggtttgtggcaggttccctgtgtgactcaagccctgtatttagagtttttaaaaaactcatgaccaagattagaatccagaaataccaccagtccacatcctctgctggaaaggcgggaccctttaatccagtctactggatgctcccccattgccatgaaccgccttctcagctccggacccatgtgtcgtaagggcaagattattgtcacggtacgagtagtcttctccagttgagtggggtgttcctgttactgtcattgcttttcccattttagacacatgcctcactcctgtcagcagttccaccttttcatggttgaggagcacatgtggtcgccagcctcccatctccagagtcccctaaggcaaggtgactcaccctcctacttcacagagttcttggtcctccccagacagcctttgaaggttcctttcaatcctgcgatttcatgacctggtttctagatccccagtggattagaaaggactgaaggacttttacaggctaacagcaagaagaacaaagtaactgc

SEQ ID NO: 297644 - DNA, 542 bp, Homo Sapiens
cagcattataaattaacttgatgcacatactaccatcgctaccactcctaccttccgaatctgtagatagtaacatttgttgtatttttcaaagactgacttgtaactcattttaatctaatcggatccttactagactagttgaaatgtcccagataatgataatcattaaagtcttaaagaagtatagaagtatgttaatatggtttctttaaaacctttcgtttgccatttttcttgcctacagactaatttctttcaggtttggggcatgtattcatttgcatgacagtgttttggatatatgaaattaaaactcatttcatggactgctctaaagtatattggggccaatgtgattggtttctgggaattcttggagattattgaaaacggtggttaagcagagctaatattccatgttcataccctgatatacttctacattttgcaaagatggtattttgggcagcagcaacctatgctaaagggttattgtcctctggcagtaagttagcaggccttttgtactatacagctgg

SEQ ID NO: 297645 - DNA, 736 bp, Homo Sapiens
  misc_feature (678)..(678): n is a, c, g, or t
ggtgaccatagaactgaagagcgatgtactttgcttcatgttttcaggaaggggagtcctgagcctggctactaggcgctgattataaaatacattataatgattaataattatgcattacatgatccaattaaacacaattatagcttcatttggtagtaagaatttcttcacgtggtgaggagagtgtgtctaatcagaaaagtctgccttagaagttgcatttttgataggagagaaggatgtgattcagtggagagtaagggaggaggcccttgtaaaggacaggaatggaaaaggaacagactgctggggtaaaagggagagtcacctcacttcacaagctatccatcacctgttcgcagagctcacatttaaactgtcaaggcctgaccttttacttagatacttttataattcttactaaactagatgtcttagtccatttggattgctataacaaaaatatcttaaactgggtggcttataaacaacaaacatttacttctgacagttctggaggctgggaattcccagatcaaggtgccagcaggttctgtgtctagtgaaggttatttccttgcagatggtgccttctcactgtgcccttacatgcgggtaatatgctccctggagcctcttttataagggcattaatcccgttcatgaaggtggggncccttatgacctaatcatctcccaaaggccccacttcttaataccatcttattgggtg

SEQ ID NO: 297646 - DNA, 616 bp, Homo Sapiens
ccttctgctagagggttttcttcttctttctaccttgaattcaaatctttgaacttattgggcctccctagctttactcaattagtttttacgaggaatcttcccctttccctagccattttcaattgacctaatgtttgggtagtatgtttaatctgattcagcttctttcctaggtgctatgtcaaagaccgactctgacagcatgtgccacagtccatagataaaaatgagatgtcacttagttacttaaactccctaaaccttggttttccattcttcatttgtaaaacagaaatattaatagcatctaactcatgaggtggttgttagaattaaatcagataaagcatactgctgacactatagttggtacatagaaaactctcagtaataagcactaccacctccatcgccaaagataaccaaataagatgatccagcaaacacaaaggagatatttacagggaggatcttgtagaagaggtgagtctgggatgagacaggcctatgcctgcaacagatagaagtgtccaagagaagtgaggctggaatagtctgcaacttaagcagcaggcatggaagaaggaaaggattacaaagggagacaggagcc

SEQ ID NO: 297647 - DNA, 541 bp, Homo Sapiens
aggaatataacaaaatccatcaacaaacaacataacactcataattaccaacattcagtaaaaaattgctggaaacagagaaatataaattatggcccataattaggaaaaaagggtaatcattagaagtagaaccagaagtgacagatatgaagaaattagcagcttgaattatgtgatgtggcagatcttatgtattggaggtagggggaaagaagatgcagtgtggaatagatgacaaggcccaatgagagaatcacagtgcaggtccctggggccctgaaggaaggtggttctaaccacaggagaggatcatatgctttttgaaaaacagcctctgctgtgctactgggccctggtagacacggaactttgagacccagtgatgctgtatccagaactgctcatcttaactaggtcctgtgggaggcactaagtcataagctagtaggatcggcagcagcccattggaagatggaaatgatatgtacaggagcagttccaagccagaccagaggacataagcaaactgcaagagcaa

SEQ ID NO: 297648 - DNA, 618 bp, Homo Sapiens
tgcccaaagtggcccctgtccaggcccatctctaaatacaacccacggcccctgcccctgctctcctgcccgttctcccgcctggcctaggagaagtcacagcaaaccccacgttccccgccacaaagagaaggaagtccagagtcagtgccaggctgccacggctcaggggcccagcccaccacagcctttcatgcccccccacacactcctgcccaggagctgaaagagccccacactgccgccagcccctacccagccctaagactcttggcagcgcatcttgctgccgggaagcctctgacacggatcgtcagtgcacgtccagctcctccaccaaaatcgaagcttctcgtgggcagagacgccacccggcatagcagcgcatccccatcacccatcaacctgcacttggcaagcacctccaaacagagagagcacacacactccgccggcagccgaaggagctgcaggatggtgctgagagtgggagcaggccagaacgaagctctaacacagaagagccgggtgctggggagagacggggaggacaggtgggaggactcaggcccctccccaggcaggatggggaggccacgacacttgggccagcttgga

SEQ ID NO: 297649 - DNA, 260 bp, Homo Sapiens
  misc_feature (202)..(202): n is a, c, g, or t
attcaatcctgactgaaagagaagtccatgtgatttagaacagactgtgcaaaatattcagcgaggagctgagacggtctcttcccctggcatgtctcagctatccttgcctctgaatcgcatatgatgtgcacaagtacaatgaggagggctcagacaaccactgcgcttctcacctgcggggacaacaagccaccttctnccgataaatgaatgggctttcaaagatcatctttcagcagtgagaaggtagtgtgaac

SEQ ID NO: 297650 - DNA, 703 bp, Homo Sapiens
ataacggaaaacaattaaacgtttaggagaataaaggtcttatactcctggtttcaagcatttcttctgcctcaacctcccaaagtgctggtgtcacaggatccttagggtgtttctttaccagctggaacctctgtggccagtggtgcctctgcttgggttttgcttgctcccactgggcttatttcgcccacatggcccggcaggctgtgcttggtttgcactaccgtcccagatcccacacctgccaagggcaagccaggtgcaggaggccagggttgtgtgagcaagtgagtgtggggtccagccactgtgtgtagccaggcatgctggctggggtggggtgggctgctccaggtgctggcacaggtgccagctccatgtgaggctgtggctggatcagacctactgcaagtggcttctgctgtgggcaccagtatctggacaaggagaatgcaatggtgccaaaagctcagagatgccaggaactgcagagccccaaggagggtgttacagcatgtcacagccctggctcagggagcccccaagggccactgctcttctctccttgttgcctgcaatgtggtgagtggggggcatgtttccagcctgtttgtgttacaactctttcggtcctgccaggtcccaagttctagtccagcgtctgggaagaatgaggtatgcagataactggtgggtgagt

SEQ ID NO: 297651 - DNA, 713 bp, Homo Sapiens
gtaaaaataaattcaactctgtatgcattataatatcaccactatcctatatgacacgtttatgtgagacagaaaacagtgccctctggcagatgctgttctttaatttcatgacttgagtgagtgtcccatggcctggttttcagcccccacttgcttgcttagctgtattcctttgtacagggcaagaattacacaagtgcacatggataggccctaggtgcaaagtgatagaatctaggaattgttttaaagattttctacaaaatagcaataattaagctgactgtagatgtttttattactgacaatatatgctaggaggtaatagaataaaatttttaaatgccaaggaaaaaactcaacctcagattatacaatacaaagctattatttaaaagagagaatgaaacaaattttgaacaaagactaatagaatttacctcttacagattcttgctgagagaactacaaaaggatggactccagcaagaggaaaaatgaatctaaggaatggagtgggatataagcaatagcagtgagtaaaaatagtagtaaaatatgtacatttagttctaatataaataagtgattttattgaaaacaaaagttaggtcagctgaatttatttcaactaaactatctgcctatagtttaaactattttcaatttagtgattcattcttttttatgtattacctgcctatttctct

SEQ ID NO: 297652 - DNA, 340 bp, Homo Sapiens
  misc_feature (84)..(100): n is a, c, g, or t
aacgttaaagcctctattataaatatttcaaggacttagtggaaaagtagtcatcatgagtaaagaaatggggaatctcagccnnnnnnnnnnnnnnnnngggaatcaaatggaaattctagaattgaaaagcacgatacctgacatcaaaaatctgatgggcttaacaacagattggttcactgaacttgaagatcgatcagtagaaatgaaccaatctagaacacagaaaagacttgggggaaatgaacaaaacctcagtgaccctttagtacaatatcaggtagtctaacatatgcatggttggtgtcctagaaggagagtagagaaagaattggac

SEQ ID NO: 297653 - DNA, 680 bp, Homo Sapiens
  misc_feature (473)..(505): n is a, c, g, or t
  misc_feature (524)..(583): n is a, c, g, or t
  misc_feature (611)..(611): n is a, c, g, or t
gattatctactgctttaattgcttttaaaaattgatttccatggaaaagaggtcactgattattgattgttggctagttttgtcctccatgggtacaggtctttaagtcattttgtcctcattgtttttactagcttggccatgccagttggcattgtcttgtgctaaaaggcattttgtagtagagactttggggaaaagacattcaagagaaggataataaaagtctgtacagtggaactatagtattacacaaatattattgtctataagccctattacctacaaaagataaatatgacattttccttctcttattagcttcatgatgaaacaccttgctattctgccttcagtttgcttttcacttccaagtaagtatattctagccatgggagagaggtatttaggagtttttcttgtagttagatgggaatcctagactctctactcagactgctctgagcctaagnnnnnnnnnnnnnnnnnnnnnnnnnnnnnnnnngagatggagtctcgctctnnnnnnnnnnnnnnnnnnnnnnnnnnnnnnnnnnnnnnnnnnnnnnnnnnnnnnnnnnnngttcaagcgattctcgttactcagcctnccaagtagctggaattacaggcactcgcgaccatgcctagctgatatttgtatttttattagagatggg

SEQ ID NO: 297654 - DNA, 449 bp, Homo Sapiens
  misc_feature (129)..(143): n is a, c, g, or t
taccaataatccttaagactatttttatttcttaaagattaaagtcatgtgaactaaaaaaatatttaagtgcttatttttcattaagccgatcaattagagctctttttataggcattacacacaacnnnnnnnnnnnnnnngcaatatagacagaagattcagcacttgtaaggtttttcatttgccagtttcttaattagatcactgccttcaggatggaacccttggaggaacagggtcacgatagcacccatttttagggcctaataagcagacacagctgaaggcaaagacagatcccaaaattaaagatgccattttttactggattctggatccccaaaaggagagagatactataggagtcccaaaggcaggtcagtgcttctaccatgcgtttcattgtaaggcaacccaaagccaaatcagcccattctgcaattagc

SEQ ID NO: 297655 - DNA, 602 bp, Homo Sapiens
acagtgcacaacgataatgccattcccacccttaagtactttgcggcgtaggatataacatggttgttattatgacagcatggtttccagtgtctttctccattaactcactgcataatctaaccctagttcaatctctggcttgggtggaacacacattttgttttgagcacagctggcatctttcctagcttgactggctccaagtcactaccaagattgttcccatatccctgacaagatactggctcctctgctttcctaagttctaaagggtgggaaggaaccctccacacagaaggagagaccaaggcccactctgatttcatcttgagttgcctagtgccttctccattggcatatctgccatctcatcccatagatcctttctccccaggtccacaccagtagtcgtgggccatgagctaagaccccagatcacaagaatctctccccatgaatggcagtaaaacatttctcttaaatctagagactactgacctttcaagcttgaattcctgttctgttccaactattcatgattccctttgatctcctctgacctgtagaaagggaagcacccaaatccatagcccctatgg

SEQ ID NO: 297656 - DNA, 704 bp, Homo Sapiens
  misc_feature (679)..(679): n is a, c, g, or t
gaaaactgcctcatttcttcctatcttatagtgtattatgattttattatttcttatatataatctacaggttctggattattctctgctcatgatgtaagtgcctccactcatctagccctacacgcctgggtacttatatgtattcctgtctgtcctttctctcctctgaccctgtttcccagttctcccttccctgctatactttccactatgctctctggaattccttttccatggtggaaaggttccctacattctctttcattgaatatttcttttagctattgtcgtcaactgaactttggctctctcaagaggattctgcttcccctgcaccttctctttcctgcagatctcaagctgccattccaggctcaggactccttcatccctgtggaaaatctccagctcctttggggcctgggcttaacccactctcctgattgctttcaggtactccctgcttctcacactcccatatttcaactctagcgtcccccaacttcattgggttcttcatccattaatgcctctgcttctcactgttaccacctccacatctcaactttctcacatctctctatgcccagtgtagattctatggcccaggccaataatcattctctttcaaactctttaatatccttgtatctctcccatgttgtacccatatccnagcaattgaacatctctggagaaaa

SEQ ID NO: 297657 - DNA, 595 bp, Homo Sapiens
atcacgaagtctgtgtaccaagatgcaagcattgtacttctgtgtgtaaagagacagtatctgcacaccttacttagatccttttccctcttactctgagacacaatatcaacaaaattggtaatctttatatcccatgtctcagtatgtgaagagtattaactaggagaatttcaagtagaggccagctggtaactaccagctacatgaaaggctgatggagaggagggatcagaacttgaactcccaaaaggtagtagtctgggatgatgtgttctgggtatgatctgctatacctcacagttggtcctgggatatcatcttgtcacagacatcaccaagcattggtatttttaagaacgagctagactcagtaataaaagattcgaagatatcagttaagaatgtaggaagcagaatgatttgtttgagaaacctttttcatccaaggttaaaataatgtaactgaacacagtagtaaaatttaaaggatgaagttccatttatctggatacctgtacacaataaatgcttcatgtcctaatcaacccaatcctgagtgccttttctggatcattttcaggagagggctcta

SEQ ID NO: 297658 - DNA, 430 bp, Homo Sapiens
  misc_feature (69)..(92): n is a, c, g, or t
  misc_feature (118)..(173): n is a, c, g, or t
gattttgattatgaaaactagataggaagagcaaaatttggtgttgttaaatgaaaaaggcagaacacnnnnnnnnnnnnnnnnnnnnnnnngagacagggtcccacgccatcactcnnnnnnnnnnnnnnnnnnnnnnnnnnnnnnnnnnnnnnnnnnnnnnnnnnnnnnnnaagcgatcctgtcacctcagcctcccaactaactgggagtataggttcatgccaccatgcccagctaatttaaaaatttttttgtacagatggggatctcactttgttgcccaggctgattttaaactcctgagctcaagcgatcctcccacctcaacctcccaaaatgcttcgattacaggcatgagccatagtgctcagccagaaccccaaatttatgtttctgaaattttgtttatatttaaaataggaaagtt

SEQ ID NO: 297659 - DNA, 481 bp, Homo Sapiens
cacgctgtcatctgcagagccgtgtagctgcacctttaccacacgcgtgtgagtttaacatgcacatacgtggcctcccacgctgtggtctgcagagccgtgtagctgcacctttaccacacgcgtgtgggtttaacatgcacatacgtggtggcccacgctgtggtctgcagagccgtgtagctgcacctttaccacacgcgtgtgggtttaacatgcacatacgtggcctcccacgctgtggtctgcagagccgtgtagctgcacctttaccacacgcgtgtgggtttaacatgcacatacgtggcctcccacgctgtggtctgcagagccgtgtagctgcacctttaccacacgcgtgtgagtttaacatgcacatatgtggcctcccatgctgtggtctgcagagccgtgtagccgcacctttaccacacgcatgtgaatttaacgtctacatacgtagcctcccatgctgtggtct

SEQ ID NO: 297660 - DNA, 541 bp, Homo Sapiens
ctgtgtgaaagatggtacaaatggtacaaagatttaagaccttgagttaaaagggggaagaaactgagctatatgagttaaaagatccaggagactctctcccgtttggttgctcattcttgtgtattaatttttaataaggaagtgaaccccagatgacagaactgattttcttttattgggtgacggttgagatctcctattgcttaaatcaggttaaataagagagaatgctgctctgtaagtctggcctctgggtctctggtatatttacaaagatttaaacgtaatacctattcctgtttctcaggcatcctcatgatcccatcttccagtataggagaccaaaatggataagatgaaagcaaaacatcttgtgtaatgcaatcaaagcaactttaattttttggtttctggcaaggaggatatgggcttaagtaaaataccccattgcaccgtttctggggatttatgtttttaaaccaagtataataatattccatgtacatccactaccagtgatattagctattcccagtcc

SEQ ID NO: 297661 - DNA, 698 bp, Homo Sapiens
gagattcaggagctaacatgccccaggtctcacgaggatcagagactccagaggccagggaaggagatcaaggtagtcaagcgggggtcgtctcagatctggttgtgctcgagctatgcaaatgcctctcacggagatgcgaggacctatctattatgatgaccagggccacatccggagggggcaacagactttcatctatcagcccttttcaaccactgatctactaaactggaaacactctgaaccctgccatcttgctcctggtatcagagagccctgtcgtgcataactgtgtagaagtgttggactcggtttactccagcagacctgatctccgggaccagccttgggcatcagtagactggaagctatatgtggacaggagcagcttcatcaacccacaaggagagagatgtgcgggatatgtggtggaaccctggacactgtcgttgaagccagatcgttgctccaaggcacttcagcccagaaagatgagctcattgctttaatttgggccttagaactcagttaaggccttctacggtcccaggctttctgctgcatacactgaagggccacgaagtacagtcatctggacttggcacctggaatacaaggatggaaagcatcatttctgccagcttcttatggtcctgaggcgagacagtcatgagagaggaaaactgcaatgactt

SEQ ID NO: 297662 - DNA, 714 bp, Homo Sapiens
gtctcaaatttaagggttcaggaattggaaaagaaatatttgattgtaattgaaatcctcaaattaattgtctgatttgtccctacacatgtaaatatacaatgatcattgaaataaaaagtacaattccaatatatacatgagcaaaccatgtacctctccatttccaaaaggtattatttaaaaaacaaattttaaggtacagagtaatatagtgagaatggagtaggcttccaaataggcttggcatgcatttgcatcccaatctgaccataatgtacaaacaaatcatgtaacttcactgacctgagtttctacatttgtaaggtaatgctcttctcacaaacaagttaatttatataaattacctagaataaagtggatcctcagtaaatgctgtctgtaaaagcctgagacctatttttcttggaatacacagtaaaggttttatgtgttagcacaaccgattacatgattctggagctcttcaccatatttggtttgttacagatgaagtggtattttatagtcagtcttacactcttttgacatcactgaattttatgagggaaaataaataaggtacaatggagctaacgatctcatctgtaaaaatgtttgtatggtgcataacaaacattttcccaagtaacgagaagccattcgtcattttgtctaatgtcctagggagtggatctcaagtcaggattgtct

SEQ ID NO: 297663 - DNA, 593 bp, Homo Sapiens
atagtactctaaaattatccttgcctatgtgcagaaatgggtaagggccacttaaaccaaaatggagttagttatgttagctcttgtgctgtttcactgttacactgctgctgtgctgacactaagcagagtttcagcttcactaatataatttgggtgagagtgagaaatggtttaacagttaaatcacatcagttgattgagaaagtaaatctgagaaaaaaatgcattgggatgcgagtccatttgtcaagtcctggttggattgccaccatatgttggctacggataaaagttgaccataaaaatcagtgaaagaattctgtgagaatcaattgacctaatataatttacaatagagagtattgtatgttttattatttgtaaattgttactcatcttttatatcagtaaattcttaatttatgtacgtaaatacaggcacacgttatttccccacagagcaggttgttaaacattggccaacacatcaccaactgggtgtatgaaggcattaaaggactaatgattttggtgacaataacaggcagaatgggagtaagggaaagatagaataggaggttgagggaggt

SEQ ID NO: 297664 - DNA, 312 bp, Homo Sapiens
  misc_feature (74)..(74): n is a, c, g, or t
  misc_feature (190)..(190): n is a, c, g, or t
  misc_feature (209)..(209): n is a, c, g, or t
gatgacagacaacgattgttgcaaggcaggagcagaacttaaaaagctttcttgcggaactgctatcttccagnttgtccgcactgctacctactgtggccattccctccctaagttgttggttaccctgtacagttaaacacaacctccagtcttacctgaaattgcttatggtgtgtgtgtgcctcantagttgcttcattcttgtnctaaagtttctgggattagctttttgggggagcaagaaaagccagaagcccatgccagttcaccaccttggcagaatagtgcttttcacttaaaattaacaga

SEQ ID NO: 297665 - DNA, 412 bp, Homo Sapiens
tatttaatttttaagaatatatgttttctaattatgaaaatttttaaacataaaattaatcatgatcccctaatatatttgtcagtaattttaaagcctaatctagtttttaatctttactgatgattcagaggaaaacaagcatagcaggctactagaaagacaggggatgtaaaaaccaggagagaaggcaaacacttggagtgggacactggccaatgttgctgcaatgtaatagaaaagggagaagtcataacacataagatagagaggtggcatgagtccaatcccatatggctttgtaaagcacccttaattgagtatgaagctattggaggtccttcaggagagaaatgaccttatctgttttacgttttaaatactcactctgacctagtattagggttctccc

SEQ ID NO: 297666 - DNA, 573 bp, Homo Sapiens
  misc_feature (509)..(509): n is a, c, g, or t
tctcattttctattttatctggtttctctcttgtggaaaatcatctatatttcctaattaatatgtgtttaccacattgcgttaaatcaggagacacattatatatggttgtcccattcttagtaatgttcagactgacccatgaattagagtgataaaagcctggtccctcctttgtacaaatgtgtcttctaattgaatcatgaaagtaatcaatggagtgttactttttcactacatatatgtcagttctccaccaattgttcacctaatggtcttaattataatcgataatccttaattaacgtgctgtctgttatgtgatacttacttgctagcattctcctggaatgtagaagcataaatttaagtcacctatttggttatctttaagtacagtttttattgaaaaatcaggataaatagttaatttctcatttattcaattttcaaaatatgaatttggcttaataaatacctcaaatattagcagctaaattttctggggntatcttcctattatattggatccatgaagtcccaggaaattcatgtggcttatttaattagaac

SEQ ID NO: 297667 - DNA, 729 bp, Homo Sapiens
ggggggggatatgttgcttattttagtattggaaaagactgtaaaaatgctacaaagcttgcatctagtgattgttggagttgagatcataacttgctgctggaaaggatgtatcaaactgatctggggtataaggatttcctgttcatcttgtatccagcatcgttctgcttcttgactcacttgtctatgtgtagtgcttctacctcaggcagacacctctgatgcccacttccctgcttcgaaatagtagggggaaggggattgacctgactgagtatacctaatggcattaccctgaggattgctccaggcttttcccctgcccatgacagctgctttatactaaacatggaatatccctggaattgccctctatggtttgtggttttcttctgcctttcattttgggccctggtttcttcaatttcattttttctcatttgtctcagaaattataatttctttttctataaggccatattcttgttttatagtgctgctatggtttattctctttatatttttagtgctattatagtttaaagccaatgtttttagggttgcaggattttgggcaattctggtgagtgtaccgtttcttccattttgatgttatcttctgtcagcagttcttaatcttttgagatttatgaacttctttatagccctctaccacctggaccccagcaatggctaaatgttattttgaacattactagttttgta

SEQ ID NO: 297668 - DNA, 322 bp, Homo Sapiens
agccccaatagccttttaaggggatactttggaattaactcttcagtggaataaaaatgaatgtcagcataatcagtagaaagtatctataaaactgtttgcaacaatatccactttttctgaccttttcagatgaaggtgtctaaaactcactgattctcactttttacattatattgtattacaagtttctaagtagctgaaggtaaaacctagtcagcatttaattttcaacactatttataaaatgtccatgtctggaagaattctgagatcatctagtgtaaccctttaattttacaaatcaagaaactgaggtctg

SEQ ID NO: 297669 - DNA, 555 bp, Homo Sapiens
  misc_feature (378)..(390): n is a, c, g, or t
aaccataaaaatatagcaaatgtatgtatgagcaaactaatgctaaaaatgtctaattttcttggctagtctttcaaggaccagattcatgagtgttatttgaagggaaaaagtgaaatacttggaattattttgagtgatgtgctcctgagcttgttcttaaaatctaccagtggtagcttttggaaagaatgtgtttcataccgatgtgcaggcctcactggaagagcttcaagaggagtttgtgaaactcaaagtctaatggttttgattagaaacttccaggcaaatactccagagaaacttgggtgtaaaatgactaaacagatgaaaaggctttatccactattccatttgctccttacaccttaaaaagcnnnnnnnnnnnnnaatgttttgatatatctagctttggggagaaagcagtgcaagagtgttattaaaagcagcttgtgttttcttgcacctttcacaccacccaggaaagaaaagttcaggcttaacagtgacatggctatcacatcatctgaataaattttttccttctaaaattaa

SEQ ID NO: 297670 - DNA, 664 bp, Homo Sapiens
  misc_feature (593)..(593): n is a, c, g, or t
aaatgaggacttactgtgcagtgttttcttggtatattcacagggttctgcaaccactgctacagaatacttctgtatccatcttggaacacttttgtacccattagcagtggtcactcctcattcccccagagtcttgcaacctgtccctaaacaacctttaatatatattctgtctctatagatttgtctatgccagacatttcatacatattgacttgtataatatgtagtcttttgtggctagcttctttcacttgccataatgtttttcaggttcatccatgtcgtagcatgtattggtattatttatttttattgccaaatgatagtctgttgtattgatatactatatttatttatcagttgatttgggttttctacttttagtttattatgcataatgtttcatagtgttgaaacgtcatttacaagctttcgtgtggacattttttttccttagatatgtagatatatagctaggagtgaaattgctgggtcatatgataattctgtgcttaatcttttgaaggactgccacactgttttccaatttggctgcaccctcaaaaattccactagcattccactantgtgtgaaggttccagtttcagcatatctttaccagtgtaacatattatctgctctttgattgtagtcatt

SEQ ID NO: 297671 - DNA, 661 bp, Homo Sapiens
tggtaaatacacataagatttagcatcttaaaaatttttaagttcacaattcagtggtattaaatatattaataacactgtgcaatcatcaccaccttccatcatcataactcttttcatcttgtaaaactaaggctctattcccattaaacaacaactctccattctcttatcccctcaagccctgaaaacagccattctactttctgtgtctaattttgactaagtatctcgtataagtggagttatacagtatttgtcgttatgtgattggcttagttaacttagcagaaagtccaccgtggacatgttgttcatccattttgtagcatgtgtcataatccccctcctctttaaggctaaataataatccatcatatgcatatactacattttgcttattcattcatccataattggacacttgggttgcttccatgtttcagttattgtgaataatgctgctatgaacatgggtgtacaaatacctcttaaataccctgctttcaattcttttgggtgtatccccagaagtggaattgctaaaccatatggtaattatatttttaatttttaaggaactgtctcactcttttccacagcagctgtatcatttcacattcccatcaacaatgcacaagggttccagtttctccacatc

SEQ ID NO: 297672 - DNA, 361 bp, Homo Sapiens
  misc_feature (87)..(102): n is a, c, g, or t
cccacctctttagggagattcacctgaaaatgggatttcagctgttcatttttctcccaagagcttagttgcaggataacagctgcnnnnnnnnnnnnnnnnaaagtactttgtagctccaccaaacaggtgatgctattatagtgggcaggggcctctgcagcagttctggaacatgaaaagcccttctgacacttcagggattaggccgtgcaaatgtgtaatacatcagttcttattatagaattgaatatgggagctgctaccacaacaccacattgaataagcccagagggcacctttacaaggctagttcacctcccctttcccactgggaagcactaaaccccattagtagagt

SEQ ID NO: 297673 - DNA, 541 bp, Homo Sapiens
  misc_feature (473)..(473): n is a, c, g, or t
gggagtaacaataatgaggaacttcagacttagaagcaccatattttatatataattcccaaggaactcctcattttggggctgaaaagtggctagggcttaggtaggaaatcagctcccctgagaaaacttgagtttgagcctccagaagcatagggggtctgattttctcctgtgactagtccagcagtcaccaagagtcttttctctgtaagcgaaaggccacgtatcccttcccaaccctaatttcatagttaagctagtcagcatgaaaattgtaatgggcattgttccctggaaattttgaactgccgtgactttaaattttcagatagtagttacataagcacttatgatacaggtggaacctgacacattgaaggtctgagtgtagaagggttagaaggtcggatatatgaaatcagagaagtgtatactgacctccttgcatctttagacatcataatgctgtnggaaactggccttttccctcagtgaggcctgatgaagaaaaattgtttctaccatcctgtgcacacat

SEQ ID NO: 297674 - DNA, 541 bp, Homo Sapiens
ccactccactattttttttcattattacttcatcatttagtttttctatttaagtgatgtttatgcaccacatttacagtgttatattagtctgtgttttctgtctccttactattacccgtacgttttatagcttcaagtgattacttattgcccattaatgtccttttctttctgactgaagtaatccgtttgaaatttttctaggacagatctggtgctgatgaaatcactcagcttttgttggtctggaaaagtctttatttctctttcacgtttgaaggatattttctccagttacactattctaggctgaaagttttcttccttcagcacttttaatatgtcataccactctctgcacttttaatatgtcataccactctctcctggcctttttccactgaaaagtctgctgccacatgtagtggagctccattgtacattatttgttccttttcttttgctgctttcagaatcctttctttatccttgagcttagggaaattgattattaaattctttgaggtagtcttcttca

SEQ ID NO: 297675 - DNA, 515 bp, Homo Sapiens
  misc_feature (168)..(222): n is a, c, g, or t
tataaatttagggtagtctaaagatacaatgttcataaagtctatagtagtgtacagtaagagtcctagagccttcacattcactcaccattcactcaccgaatcatccagagcaacgtccagtcctttaagctctgttcatggtaaagtgccctatacagatgtacnnnnnnnnnnnnnnnnnnnnnnnnnnnnnnnnnnnnnnnnnnnnnnnnnnnnnnngatatataaatgcttaccgttttgttacctttgcctgcagtattcagtacagttacatgttgtacagtttgaagcccagagcaattggctgtatcgtacagcctaggtgtatagggggctatgccatccaggtttatgtaagtgcactctatgatgtctgcgtaattactacatcacttaacgatgcatttctcagaacacatcactgtcgttaagagacacatgtctgtacaaatgactttggagaatatgctttcagttcacttggagcattcctgggtgtggatttgctg

SEQ ID NO: 297676 - DNA, 450 bp, Homo Sapiens
  misc_feature (258)..(271): n is a, c, g, or t
catgttcttaaggccatcttctgttggctttctccatgggagttcttttctagaatcatttcaataatattacaactatctataacaagtgttccataaattgttgccttaaataaagaatagggtcattgtgttctattaattgcagaaatgcttgctgaaagcacatgcaatgtctttcctctttaaggggctggccatccatttgatttatataacatatagacatagctcaaattatttccaaacccccataannnnnnnnnnnnnncctagtgttgaaatttagattaaaatagaaaaattagtaggagagacaagcttattgcttacagcagatcaagcaattatattgaaccaatatttgaatctcctctggcaaattcttatgtacttttctgttgtccttcttgtcttttacctcctggtcctttgactcccaattgcagg

SEQ ID NO: 297677 - DNA, 517 bp, Homo Sapiens
  misc_feature (47)..(64): n is a, c, g, or t
catagcacaaagtctggcaactaaaaggtgctaaataaatgacggcnnnnnnnnnnnnnnnnnngttaaaaagatcactgcccagtcaataccaaactagaaacattgtcttctctgaattctcagactccactcccttctcttctgtgtggcaggcccttctctgtggtgtctgaccaataagttcccattaatcctccatggtttcccttgaagttattgcactcaaacacacctagttagagtgaaccaatccttatctatatttctagaacacttcaggaaaattcacatcatagcacttattacattgcacttttatttcttgctcacattcctgtctgtcctattaaaatgtgatttctgggacagcgggttaggtcttgctcattttagtttctgttgttcctagcatgcttcatggtatatagtatgtgctaaatgagtattattgaattaaattacacaaatattttcaaggaaagaaattctatattatttctctttatttaatttt

SEQ ID NO: 297678 - DNA, 157 bp, Homo Sapiens
ccattcaacctacattttcttgccgggcatacagagtcttgtaaaggatccaaaagaaagagggagcaaaggttctgacatccagccaactagcgtggtaagtattcacaggctccctgaaggtatgagccagggaggggcatgagggtgtggtctg

SEQ ID NO: 297679 - DNA, 321 bp, Homo Sapiens
gatccatcaagtgcaaggtgtctcaacactgatcttaggaacagtatagggagggtcagaatcttgtagcctccagctgcatgacttctaaaccataatttccaatcttgtggctaatgttagtcctacaaaggcaatctagtctccaggcaagatggaggtcttctttgggaaaaggagtgtcactgtctttgtttaaactctaaactgagtttctcccaaagttagtttagcctccgcccaggaatgaacaaggacagcttggaggttagaagcaagatggagtcagttaagttagatctctttcaccgtctcagtcat

SEQ ID NO: 297680 - DNA, 453 bp, Homo Sapiens
agggtgaatggcagggaaaaaaaagaggagagggagagaagagacagattcagttggcctcatgctatcttcatcgagtcttgtttggaaagctaagtctcctctaacagagtaaaagtttttctttataaaaaaattttttggagttatcattttggctaaacgaatgacttatggtgacctgggattctattttgtgatatccagtgttttaaacctttgatatttgacaaactttccaaaatccaattaaaaattatgtctctttctaaccttttagatattaggtcctctaaagcccaaaaatgatttggcttatctgatacaaaatcatacaggaggcattgtcaaatatgaaatggtgtttggctttctttggtctatatttgtataaatgttattggtatatgttccaaaattacataaaacttctataattctaatatgacttag

SEQ ID NO: 297681 - DNA, 364 bp, Homo Sapiens
  misc_feature (69)..(157): n is a, c, g, or t
tgattttactgttctactcattacaagaaggcatacccttatgtgatggcacccacccagtgaaagtcnnnnnnnnnnnnnnnnnnnnnnnnnnnnnnnnnnnnnnnnnnnnnnnnnnnnnnnnnnnnnnnnnnnnnnnnnnnnnnnnnnnnnnnnntcctgaggaatgatccatcactcacattaggaagtactctggggagtgggcatcagtatgtgagaagttacgtcccggtttcagaaaatcaaatgaaaaattcaaaggccatggtttaggaagaaataaatgggttgtagaaactgttatcagctaggcagttttgaaatcaattgtgccgataatgtgtggattcgggtaggggga

SEQ ID NO: 297682 - DNA, 751 bp, Homo Sapiens
ggagcaggcaaaagagagctgtcaatttgcttgctgttgaaatgtacatatttatgcataatttataatcatgctaatgtattatctagaagtaagttgtgaaagaaaaaagagaaacccaatctcaagttgcccaactgattagaaatgccatctccttcccctaatacactccctctccctggggagtttgagtttcttctgttggctcctttgctgtttgtgtaaatgctacagtataattgtcccctccaatgattcatgcagcaatcaagagactaccagcaaggaaactctaaaaggaatcctggaagtggaacaagtcactcgtaaaggtgtttccattctaccagtcaatgctaactgggccacagctaacttgatcttcaatgccaacatcacagagcccctttcgccacctcaaaaactgcacaaacatggacaacccagaaacccaaaactttattgattaaaacagattttggattctcctaggacctgctccaaattccatcaagaaaagctccctgcgaagagaagttaacaagataacatatgatggatgctaaatatttaaatatatgccggcagcggttacataaggcctggctcagttctgagatctataattgggagggtctaactaggacaggggaaaatataaaataaaagtaatcttccagagtggaacaaaaaagaaatatattcatcccacagtcgtagcaccattcatgtgcagtgatttttttat

SEQ ID NO: 297683 - DNA, 496 bp, Homo Sapiens
  misc_feature (216)..(260): n is a, c, g, or t
  misc_feature (328)..(328): n is a, c, g, or t
  misc_feature (334)..(334): n is a, c, g, or t
  misc_feature (356)..(356): n is a, c, g, or t
  misc_feature (365)..(365): n is a, c, g, or t
  misc_feature (472)..(472): n is a, c, g, or t
gaagaaattgattttggctagttgatatgtattgtttttgtttaattctgtctgcctccactattaccatatactactcaaggtgataaagttattcccttgacttttttttaaacagccattcaatagtactttaaattcaggaatacacaaaagtgtttgttcacaaaagtattcctgaatttaaagtactactgaatggcagttggaaaaaannnnnnnnnnnnnnnnnnnnnnnnnnnnnnnnnnnnnnnnnnnnntgcacatgtgtgtgtataactttcaaaacttgatactcattcctagaaccaattatttgctttgctgntaatgntacctgaaagggtcttctctgncctctctgntctctagtttttaccagtttaatatcttatatacaacctttccctcaatctctgcagcccatgttgaccttatccgactttgggcttcttacatatacactttttgncttattcaaaggtatcctggctca

SEQ ID NO: 297684 - DNA, 731 bp, Homo Sapiens
  misc_feature (244)..(448): n is a, c, g, or t
gggagtatatggaggtaagcccaatgagccacaatatgtgtgagttaagatctttttgagaaatgtaacaggcaagctgcttattaaaaatgaacagtaattctgattgagcaataatgtagttaaattgagcagaatgagtttcctatattcctacctggttggaatgtaagcaattggcaatgggtccctggttctactgtgagacctgtagcctcaggaaaatcacagatcattctagagnnnnnnnnnnnnnnnnnnnnnnnnnnnnnnnnnnnnnnnnnnnnnnnnnnnnnnnnnnnnnnnnnnnnnnnnnnnnnnnnnnnnnnnnnnnnnnnnnnnnnnnnnnnnnnnnnnnnnnnnnnnnnnnnnnnnnnnnnnnnnnnnnnnnnnnnnnnnnnnnnnnnnnnnnnnnnnnnnnnnnnnnnnnnnnnnnnnnnnnnnnnnnaatctagggcatttcttttagctcttaagatagaaccatgtagtctccagctagggaactgttagtgtttgccctgactcccaggggggtatgacagggtcccaacagccttatgcctgaggaaggatcctgagtcatttccactcaccactaccatttccaaccccatcaccaacaaaataaaactaagccagctcagctctttgagcttctggaaatatttgcctgtgtcctggcacatcgtttttggaattttagacctgtgctttgtttggcttcagga

SEQ ID NO: 297685 - DNA, 441 bp, Homo Sapiens
tagccaaaagccaatacataataaacactcaataaagattaaccataaggagagtcatgatctggttccaggaatacattgttagatgactgaaaaattgtattacttcaatgaaaatactataaataataacattttcatatattagttgattctcatgcatacataatctaattttatttgatcctcacaactgtttaagttttattaaatatacattatccctatttgtataaatagaatcatacaatacctgcctgctttcattcaacaaaattatcatgagatttttccatgttgtgtacatcaatagttcatctattttattgctcagtaatattccattgtgtggatgtatcactatttgtttacacattcaccactgatgtataagttgcttccagtgtgaggctgttttaaataaagctgctatgaatattc

SEQ ID NO: 297686 - DNA, 230 bp, Homo Sapiens
ggccggggacagcttcaaccaatttcctgtaccataaaataaaaatagcttaatgaaaaacttaccttattatacagaggttttcagggctcctagtgactttggaaacgtggcccagaccaactgactggtacttaaatcctgctgcaggtgggttatcactgcaattgcctaaagtttgtttcgtaccttttaatttccaaaggctacctcttaccactatggccaag

SEQ ID NO: 297687 - DNA, 516 bp, Homo Sapiens
cggccggggtactttccccagttgggactgaactttctcatcagagaatgggcctcagaagcaatgttcccaaacttgtggttgggtcactcgtggaaaagaaacctcaaataagaaaaataattacaataagaaatggattttcttttttcccacaacagttatacattataaagaacagactgtcgtagaaaactgtctttgcttccaaatcagcagaggaccattgtatgtattgtcaggtctttatataagagtgaaacctttatttatgcttcttgtgagtagagaataaattttaaaactaattagatgaaattaagaacagagtattggaacatctctgtgttttccggaatgtttactcaggtccatgaatgctgtgatgctgggaacttagggaagattcaccaaaatttgagagtgataaaaatggcctaaaatgggaaatggtgagcactcttattattagtgagattggtcaatcagcccatttgaaatgggtaaaaaatactt

SEQ ID NO: 297688 - DNA, 176 bp, Homo Sapiens
  misc_feature (58)..(58): n is a, c, g, or t
  misc_feature (125)..(125): n is a, c, g, or t
  misc_feature (128)..(128): n is a, c, g, or t
  misc_feature (165)..(165): n is a, c, g, or t
gactggcacttagcataccaaggacctgcaccagcactggtctccgagttccctcagnttttattgattattattttcattatctcagcacaaggaatgcggtaggagagcagggtgattataanganaaggtcagcaaaaaaacctgtgagcaaaggaatctgngtcataattaa

SEQ ID NO: 297689 - DNA, 433 bp, Homo Sapiens
  misc_feature (337)..(337): n is a, c, g, or t
  misc_feature (406)..(406): n is a, c, g, or t
  misc_feature (412)..(412): n is a, c, g, or t
ggctaaatgaggaggaggaaaatgagatatccctcattataaatgtgaaaggcctaaacagacttagtaattctatggatcactgggttcacatctatggttttcacccaaagggaatggttctgtcatggtgcccttgtgccttgtttgtatccacattggcaaaggcttgaaccacacctaacctgggttttagaagagtgccttatgatcctcctggaacacaagagaatgggaagcctataagaagctgctgtaaggcgatctcttaccttcctagttccccgggaggctgtcatgagacagtttcccatctacttcctggttctgaggaggnaataggctttctgtcccatcctcttcaaaatagggctgcaagatatagaatcacttaactgctatctanatttanctcctcagtaacaaagtactg

SEQ ID NO: 297690 - DNA, 545 bp, Homo Sapiens
gaagctagaatgtccatatttaatcaagggatgagtgaacaggaaaagctggcttcagagacataaaaagaaaacaaaagcgatgcaaagatacacagtcataaaaggctatgtggcttcagaaagaggaacagaaggcaagacaaactttggtttcttttggcttgccaggccccactcccggagcttgtgcagcctggatgtatctcttgcactggaactttgtgctcttatgtccttataattaactccctttttgcctgagaaattgtggtgggtttctgtttcttgcaactacaccatctctgaacaaggcagcacattggaacgtctcctccaagcagatacacaggctcggcacctgctggtccaccttggttcctgatgtgtctctgaggccaactttgcgagcccttatctgtagctgtgggaagggcgtaagtcagtgtacacatgtcagcatctatatgcccgtgagtattaatgcctgtgtatgtgtgatgccctatttgctgcatctgtgtcgagtgctttgaagtactcat

SEQ ID NO: 297691 - DNA, 466 bp, Homo Sapiens
  misc_feature (58)..(141): n is a, c, g, or t
  misc_feature (299)..(312): n is a, c, g, or t
atgaacaaatgaataatttccttcttggttttctcttgaaaggaaatatatagtcacnnnnnnnnnnnnnnnnnnnnnnnnnnnnnnnnnnnnnnnnnnnnnnnnnnnnnnnnnnnnnnnnnnnnnnnnnnnnnnnnnnnncgtttgcatacaccctatgcacatactccgttatactttaaatcatctctggactacgtataatacctaacgctatgtaaatagttgttgtgttacattgtttagggaataatgatgagaaaaaagcctgcacatgttcagtacagatgcaaccatcnnnnnnnnnnnnnngtaatatttcttattcacagtggttgaatccagggatgctgattccagatttggagggccaactgcactccatggttagcacatatgcagagagctgcatgaagctgggtctagatctcagccctatcattgaccttgggcatattgcatggcc

SEQ ID NO: 297692 - DNA, 707 bp, Homo Sapiens
ctaagcagtaggtctcaacagtgggtttaaaatattcagttaaccatggtgtaaaccagatatgcagccgtccaggtgtcgttgttccatttacagagcacaggcagagttgatttagcagagttcttaactgccctgggactttggaaatagtaaatgagtgttggcttcaacttaaagtcaccacctgcattagttcctaacaagagagtcagcctgtcctttgaagctttgaagccgggcattgacttctcctctctagctaagaaggtcctagatggcatcttcttacaatggaaggctgttttgtctacactgaaaatctgttgtctagaactgccaccttcatcaataatcctagctagatcttttggataatttgctgcagcttctacatcagcacttgctacctcaccttgcacttttatgttatgaagatggcttctttccttaatcctcaagaaccaacatttgctagcctccaacttttcttctgcagcttccttacctccttcaggcttctaactctggaattaaagagaattggggcctccctctggattaggctttggcttaagggaatattttgccttgtttgatcttctatccaggtcactaaacctttctccacatcagcaataaggctctttcattttcttatcatttatgtgttcactgaagtagcactttaaatttccttcaacaac

SEQ ID NO: 297693 - DNA, 541 bp, Homo Sapiens
  misc_feature (304)..(334): n is a, c, g, or t
taatgctgagagtcatgatctgggacataacaaataagagtgaaagaagttaatcagtggtttaaaaatctgttaagtcccttatttcttcttgtacaaatagtctgtacctccactttcttaagtgaaatatactgtccttaatgttgttacatcctagaattaagtcaataaaaaattttgtcagaagtgtttatacatatacataagttttctctaagatgtttttggcaaactaccaagtttgttcatttaagataaatacattagaaagtatatttagagaagtacttttgtcagccgnnnnnnnnnnnnnnnnnnnnnnnnnnnnnnnctctaagaatttcacaaactggtaacacataatctcttctcttgctgtggcctacccaggaccaccaaatggctacctatgtacttttttaaaactaaacttctgggattgaaatttgctttgtagcaaaatagcaatatttgcttttcctttaaattataatccaagtgcaaaaagcatttattgactcctgctttattattttgt

SEQ ID NO: 297694 - DNA, 366 bp, Homo Sapiens
  misc_feature (241)..(252): n is a, c, g, or t
  misc_feature (322)..(322): n is a, c, g, or t
  misc_feature (345)..(345): n is a, c, g, or t
tcatacatatactacggtacatggcattttcccccctctaaaatcacctcccatttctatctttctatgactgctaattgcaactaacatttctctgccttccaacctctgaagagtcaagctaccaacaaatattctattaaattattttatttgcatagaccttatcttgagctttttatctcattgggttagtgtttctgatatgtcccaattcctgctatttcttaatctttaggannnnnnnnnnnngtctagaatcagcacccattttattcctttctcatagctaccacatgaattcttttatctcatttcttcntttataagtggagatagtaatanaaaatcctccactagcatcgg

SEQ ID NO: 297695 - DNA, 579 bp, Homo Sapiens
agagtgaattctaatttagtgaatgtatagctcaacacatcaaggtgttgacagtgaacattatgcatgattattctgtattgtgttttaaggaataatgttttaatacagtgtgccctgtttttcactcccgtaatctattctctgaattaggagacatttcttctttacataatataagaaatgtgaagaggaaaactgaaaaaaattcaaaatccctatgatcatagttaattatttgtttatttgatgaagttactttgacaaaccatcaataaattcttcttttatcctccccccgtgttccttctgttataaaacaagagtatccttgttgtccttctcccacctggacgcagacagctgtttatcagtgacctttgttatttagctattgaacctgagaggtgtcagggatagtgacaaagcagacactttcttgtgctcaaacatactactatttggagaaggatagacgtccattctcatggtgacaagtgaccaagcctacatggaagaacttcttatagagcctgaaaatgggttctagcctgatgtcctgcagtatgagcacagaga

SEQ ID NO: 297696 - DNA, 489 bp, Homo Sapiens
  misc_feature (15)..(15): n is a, c, g, or t
  misc_feature (335)..(394): n is a, c, g, or t
tacgaagtcgggtcnttttattaaacaatcaaacagaaaagttgcaagtatggaagatgtggttccaaagaccctctctctcatgtctgcaagcattggtcaggaaactactgggcacctactacaaagaccaccagactgggcatgaaatagggcagccaaaaacatggcaactacagtggaaagagctgcctccactgttttctatgaaaagaattactctttcaaatgacctcgtgcttccagactagaatcaagtgtgagtaccgaggaatagtgcgaagtgcatgacagggttttagctagggtccgcaaacttggacttcagtcatgcnnnnnnnnnnnnnnnnnnnnnnnnnnnnnnnnnnnnnnnnnnnnnnnnnnnnnnnnnnnngtttaccttgcatcatcgtgacaagtgaagtgcagttggggaagtatttggtacgcagctgtctttattgaattatatgtaaatgaagtaatgaa

SEQ ID NO: 297697 - DNA, 718 bp, Homo Sapiens
  misc_feature (411)..(411): n is a, c, g, or t
  misc_feature (687)..(687): n is a, c, g, or t
agaattggtaaggtgaggtttggcaaatgggagattttggtaaagaaaagactaaccaaacatcttaagcatctagaagacattattcagtaattatgtggaaggcaattttgaagatggtattcaggatggctaggtagggtagaaaaatcagcattcaatataaaagacaaaatttgtctgcaatttttttcaaagcaataatatgtatagtcaactctcagttacggaatcataaaatctactgtctctaaacatttatgctagactttaattcccttcaccttacatttataaaacaaccaaaaactaagcatacatgacttatatagctttttcatttgttcctttcactcttatcctcaaaggaatgttctaataaaatgtgaaatatgttttttaaatggaacnaagaaggaaaaagacagcaacagtacggtcaatatattgctcgtttccggataaacagaggtttacaaatactcagaattcggtagttgtagttttaaaacctttctacaatcgttttcagtatcttttactataataagttagggtaactgtttacagaatgatggaatatatcttgaacaattcactactctcttttcagaggataatgcttcacaagaaaggggtatgtgtgtatgtttgtgccccagtgtaatagagagagagagatagaanggagaagacatttgggtgacacatccaaata

SEQ ID NO: 297698 - DNA, 554 bp, Homo Sapiens
gctaatgacaagagttgggacaataacaggaaatgatatattctcacaacctttggttctttggtgagccctctattgatccttggtatctggtttgtatcctgaaaccaagagaggacctatagtatgaaaagcattcttttcctgtttgaaaagctgcatgatgctgagattggactggctgcagaaatctcttctaatgttaaaacaaagccaggacattcagtttatttcactggggttcatggtttgggaggccttgcttatatatggctataatgaaaggctctgatggcagcctttgtggaagtgagccccattctctccagggaaaaacatacttctgctacctcctgtgtcttgaggagcatttcctttgctggacacttgctaggtggtcgagtagtgacattctgtcctgtattcagggacatgtggaatagaggagcccctcatagtccccttaataaaagatgtgggtgcagtcttctctaaaacgcaagcctccagccactctacatttccactttcctactcaagaagaaaggagtgaa

SEQ ID NO: 297699 - DNA, 479 bp, Homo Sapiens
  misc_feature (66)..(75): n is a, c, g, or t
gttttggtatcagggtgatgctggctttgtagaattagttagggaggagtccttcctccttgattnnnnnnnnnntagtttcagtagaattggtataagcactttgtacatcttgtagaatttgactgaatcaatctggtctagggattttttggttggtaggttttttgatactgattgaatgtcagaacttgatattggtctgttctgagtttcaatttctacctgatttgatcttgggagattgtatgtttccaggaattcatccatttcctctagattttatcctttgtgtgcatagaggtagtcataatagtctctgagcatcttttgtatttctgtgggatcgtttgtaataaccattgtcatttctgattgtgcttatttggatcttctcctttttttcttcgctaatctagctaatggtttatcaattttgcttatccttcgaaaaaccaacctttcgttttgttgactcc

SEQ ID NO: 297700 - DNA, 588 bp, Homo Sapiens
cgggagcattgacttctcatatgagcttcaatctcataaatccagttgcttgataagcatctccaagcttgattcgccataagtactcagacctaacatcttcattatttaggagcattatcatctgtcccaatgtggtcttcctgttgtattccccaaatcaattaatatcacctagtcacccaagcaagaaacacaggagccattctatgctgcttccccttcatccttcccaaaagtaatcaccagcttttgctaattttagctgcagtttctcaaatctgcctctcctcccacccttacagacaccctggtagttcagacgctcatcatttctcctgtaacctgtgcagcagttgatctgtagctgatcctagctgatctctgttcctccagctttgcccatcttaaatccttttccctcactactaacaaagcagtctacataaaacaaaactgatcatgttattcccctccttaaagtccttcagtgaggccatacttcctacgtatggtatacaaagccctctatctcctgatatgctacttcttcagcttctcttgctctttcctgctctgcatttatta

SEQ ID NO: 297701 - DNA, 517 bp, Homo Sapiens
  misc_feature (166)..(197): n is a, c, g, or t
atggtctatagaaaagcaattcactcttgtatattaactttgtatcctgcaacctgctcaactcccttattagttctaggaattcgttgttttttataaattccttgggattttctatgtacataattgtgtcatctataagtagggacagttgttatttattccnnnnnnnnnnnnnnnnnnnnnnnnnnnnnnnnatctgtatggcttttatttacttttcttgccttattgccctgactagaacttccaggactatgttgtgtaagagtggtgagagtaaatattctttccttcttcccaatcttaagaggaaagcattccatctttcaccgttaagtataaaaacagctgtaggtttttgtagaagtttttaagctgaggtaactcccactctgttcttatttttctgaaagtttttaaaaatcataaatgagtgttaaatttactcaaatgtttttctgcatcaattaatatgaacatatggtttttcttccttagcctgttaaaatggtag

SEQ ID NO: 297702 - DNA, 695 bp, Homo Sapiens
  misc_feature (636)..(636): n is a, c, g, or t
  misc_feature (647)..(647): n is a, c, g, or t
  misc_feature (681)..(681): n is a, c, g, or t
gaggcgtgggaggatctgaggcctgcggtgggccttggtcccttctctccccgccccgaagccgcctgctcaacctgagggccaccggcctctatccgtcggtgccgatgctccttgcttcccagccagggcgtctcatctctgggcccggagccccaggctcgttctcctcagcccctgccggcggcggcgctcttgcagccattcctgtgaggtcgtttttcggagcagccgggccggccgaggagtaagtaggcgccagagttctagctcgggcatctgcctcggggccctgtcgccgccgcgccccggatcctgcgttggtcctgtccgataaagcggaggtcggccctgcttgctgacgagaccgtaaaaaccacggcgcttggcgccctgccgccgccacaccacaccaaagtgtacctgcccgaggctggcttcgggcgcgagcttgcatttgtgactttctcttaccgtctttgtttgcttcgttttaagtattacttccagataagggacacattctcgaaatactttgaaaacagttttgaattttgttcctcccgttgaaacggattaaatttggacctttcaagctacactgtgcaatcatcaatctcaataagctcttaatangctcattcttncgtaggctacaaacaaaataaagatcataacatnctgcggaggaagcc

SEQ ID NO: 297703 - DNA, 785 bp, Homo Sapiens
aatttttatttgaaatccttaagtcatccatacatttttcataaagctttttataaacatctttaaccattctagcttttccaggtagaattaacagtaacaagttatttgattataatcacagtctgcataatgtaaataagttgaaattagttggcaagtaattgatattcacaaatgaaagcgttggttgtcccgtagtaatcaatgcatagctacagctggttgaaggggaccaaatccattgaagaggcgatttggttccattttaccagctctagcaaagcattgtagtgctgctagtttggaatccaaaacagttaaatgcttttcattggtaaaattacagtcatggaccttctacaagtgttagaaattatcataccaatgcttcagtcactgaatgtcaaattttccattttgaagtcactttcctactgttttcctgcgcttaatggtttaaaaatcttttccttttaacacattactgcattaaggaatgatcaatgtacgtctttgttttcaacatctttgcttctttttctttttctaatcttgtccacagccgaagtctttgcttaattcttacatgtagacaataagctatttcaaaaccaatagtatttaaaggaacaaatagaccttgatgtattttagagtaatgttttccatttatctctaggcagcaaaccagataaatagttaagctaaaaggttggggaagagttcagttagtcacccccttctactgccactgcttcttttagcattatagctgagggcta

SEQ ID NO: 297704 - DNA, 283 bp, Homo Sapiens
ctcaatggaatcctagaaaaagacaccacaaattaactagtaatccacagaaaagactcagcctgaagaggaactggagggatctgagccgcctcaaccaggtggcaaagagactgccccagcagcagaagaaaagaagaaagatgcaggtgtagagacagagatcgagtctatacaagggcatgccgaagctcaacctataagactagaggccacaggcaggcatcagtcaatcatggtaccacggacctctctacacgcagtacgggtgcagcggctgaaa

SEQ ID NO: 297705 - DNA, 191 bp, Homo Sapiens
tgtccatcgcacagaagaggggccaaacctactgatggatcgtcattattgtgcgctagtggcatagaggtagacccaatagaactcctgccccaaacagggcaacagccaagctcagtcatccaagccccctgaacagaccttccaacatccccatgggaagctgtcgccgttaggctacttggtgttag

SEQ ID NO: 297706 - DNA, 228 bp, Homo Sapiens
  misc_feature (120)..(145): n is a, c, g, or t
ccatttataaattaattgaagcacagagaaaagggggaaaatgattaaagaaatttatgttttttaaacagaggattttgggttttacaccaacgaaaaagaaaaaccagatgaataagnnnnnnnnnnnnnnnnnnnnnnnnnnattctacatggtaggtctcgaagatgtctttaaatgtgattttataagctctaaggacagtcttgatcttgacagacaaacaa

SEQ ID NO: 297707 - DNA, 192 bp, Homo Sapiens
  misc_feature (101)..(121): n is a, c, g, or t
ccagtctcaagcccttcctgtaatattcagccagggggggaggccaagagaaatggaaggggaaggggattgaagggaagcagaagaaggaccaggtttannnnnnnnnnnnnnnnnnnnnatatttaacaccccaacttttttttcccccatattaaaagaaagggggaggaagacacttttggggaatat

SEQ ID NO: 297708 - DNA, 159 bp, Homo Sapiens
ccaaagtgggaatacataataaggatgttactgaaattgggaaactctcatatattaaataccacttaacagctagtacttaagggaatgagtcaaaatttcctgaaaaccaggttagcatagtatagtatgagacatctaacataaaatatacagctg

SEQ ID NO: 297709 - DNA, 151 bp, Homo Sapiens
cgggcttttctgctgcccaggcttggagttcacagttgggcggggattctcaatttacacggccaaccatctgacattcctgggtttaaagcatatttcttccttgccaccagtcgtgggggaccaccgggcaacagtgccaccataaggc

SEQ ID NO: 297710 - DNA, 106 bp, Homo Sapiens
tttttttaagaccctcatcatttaatgtggggggacatacaggaaatagtcaaaaccaaatcttacaaaaatcgccagtatcaaggcgggcgggttttgaagccaa

SEQ ID NO: 297711 - DNA, 128 bp, Homo Sapiens
actttttaaaacatatcacagcagtccagtaaaggggtttttataaaaccctctcctggtgccaaaaggtttccacacagcgcaccaggggttaagggggcgggaaaagcattggataggaagtaaga

SEQ ID NO: 297712 - DNA, 115 bp, Homo Sapiens
ctcgcgcgcgcacgcgtgggcgcccaggccacgcactcatctgtccacgaaggcccctccacatgtgtgacgcacatgcgcgcagagaaagcacatcatatctgctgtgtctttt

SEQ ID NO: 297713 - DNA, 147 bp, Homo Sapiens
ggttgggacccggggcccttatattgagaggcatatcattagaaaaagggggcggggctccccataggtgtcccccgattctccgctctctttatacaaggtggtgtcttcatatacatagtggcacacacactgtgtgtgtatgga

SEQ ID NO: 297714 - DNA, 118 bp, Homo Sapiens
gtagggggtttagagggttggtcctaaggaaacaaggtaacattatggaaaaaccctggtgaagaatgggaagggttaaaaaacaggactaaaagacccagacccttttaattgaaaa

SEQ ID NO: 297715 - DNA, 127 bp, Homo Sapiens
tagctaaagggttaaggagaacatagtaaccccaaatagaaattgaaacctgggagccaatagactctagtaccgcaagggaaagttaaaaattataatccaagcataatattagcaaggactaaac

SEQ ID NO: 297716 - DNA, 194 bp, Homo Sapiens
ggaattccgagattgtatagggcctcatgcagttttaaaaataattaactctgagatgggaaagtattggaaggttttgagcagagtaatgacaagatctgatgtgccttctaaaatgactgttgtggctgccatgttgggtagactatatcagggcaggggtagaggcaagaggaccagttaggggagctctt

SEQ ID NO: 297717 - DNA, 181 bp, Homo Sapiens
ggtgagaaccagatggttagtattgatgaaatgtgcactgacttttcatgtacaatgcaagctagcgagcaatctctctgtcgcgacacacagacgatcaacctctcgataaatcgcaaaattgcgcacaagagatgtagatctacatgacacatcatagtcaacatatattactaatggc

SEQ ID NO: 297718 - DNA, 172 bp, Homo Sapiens
tgtacagtgggaccagcacactgaagtggctgcccagaggccaccccagagaagggactacagtcaaagaatgcagcatagacagtggggcacagagttttggtatttttaaaactccaaaatcaagatgatgactcaattattcaaaatatgtgattaaaacacttcctga

SEQ ID NO: 297719 - DNA, 108 bp, Homo Sapiens
ggcgtgccttccccccggcattcttcatttctcttgcatcaatatgccccctctattatctatctctcttatttccccccttgtgtcatgttctagtgtgctcccacg

SEQ ID NO: 297720 - DNA, 177 bp, Homo Sapiens
agagaggagagaggagtcgttactgtggccagagcttacagagtagttttatcagacctggcccccgggcgaggatgaggaactactgtgtggttcacactataataatgtgcttgtttggccagtaggtgtatttctggttattttggccggacaagaggagggaggtatcagcta

SEQ ID NO: 297721 - DNA, 101 bp, Homo Sapiens
ccaatatcacttgtgccaactgtatatccgcaaatatatccacttttccacttcaattttgcactttccggaggaaatgatcacctcaccaccgaacaagc

SEQ ID NO: 297722 - DNA, 139 bp, Homo Sapiens
ggcctattggccaccttccttcccttgcctcttccatttttgcaagtgccgctaccaccatggcccctctttttaaggttccctaaaagaccacttgaagtcaacgcagagcaggatgaaagggctggggaaagggtgg

SEQ ID NO: 297723 - DNA, 232 bp, Homo Sapiens
gttgagaaactcattgaaaggcaagtgttgaagatgttgtagtatatagctacatagtgtgttttcacagagtgaagttttttgtaactaaattaaaggggggtaaaaagtgtaacatatttgacattaatgtaggtattttctgcaaatcaaaacaatccctgagaactctctacctctacaatggatagaaggagcgatagatctaaaaacgctaggtgacagcagagac

SEQ ID NO: 297724 - DNA, 323 bp, Homo Sapiens
ataatggataattaacccttgaacaatggaaagttaactctccatagaaatgccaaaaactgaaatgttttgttattgaatttattctcctttgggagttaacactaatggagaacatctccattagtacaaacctggcaccaaacaacctgttcatccttaagctatgaatgctgcactcaccttccagttcattctggcaggattttggaacacaaggtgcgctccctcggggtgacgtgcaatggtagcaaaagcgcattgtgagggggaaaatctaataagttggggcgccgtaaattcacgtttgtcaaaatcgaaaa

SEQ ID NO: 297725 - DNA, 259 bp, Homo Sapiens
tgtgtggagctatttgttgtcaactgaacatccctgccaccagttctaatgtctccctgctccatggaagagaaatcaggactgtagttgtaatttgcagaattctcttctctgtgaggttcaggagagaccatccaggaatcgcacttgtatgaggaaggaggaaggcaaggccagtattctccagtggcattgtaggcacacgcatggagagatgtaaggttcaaagcagctttcagatgaacttttggagaattgc

SEQ ID NO: 297726 - DNA, 175 bp, Homo Sapiens
atcctcactaagtagagatcttgtaactcttcgcagggcacaatcttacttctttctgaacagagtaccaggctggagatgcagctgagttggtatatgccttccctgcctcatgccaaccacaggctgcatctacagcactgtaaaactaggcatgacagacctagaatcccag

SEQ ID NO: 297727 - DNA, 153 bp, Homo Sapiens
tcccccacacagtttcctcgagctgacacaggagtgtcctcttcagtcaggtcagagaagtcaccttgagttcctgcctcacttcagcaatacctcacgccctgcggtagagctacaccagagagaagtcgaagatttgtaaatttggttaac

SEQ ID NO: 297728 - DNA, 312 bp, Homo Sapiens
aaggaggaagtaagcatgacggtcactaatcacctgaccaactgcatcagccaggcactcatcgatgcctggaggagcgccatgcacgaggcccctcccatgggagaacctttggcgctaatgagaagcgacacagaactgggcctattgcaacttattcacagctcttcacctcgcaagcacactacaccatgacctcttttaagactcctaacagaacactagaagtcaacacagagcaggatgaagggctgacgaagcgcaagtcaaactcaactcaaaagaacaggagcatgatgacaagatgaacct

SEQ ID NO: 297729 - DNA, 217 bp, Homo Sapiens
tgacacaaatgtcatcatcatccccactgagcatctccaccgccttgattttcctgtctttggaggcccataataccaccacgacagagattctcaaaggcctcaagtctaacctcacggaaacttctgagacaaaaatataccagagcttccaacatctaccgtgcaccttaaataaatacaacggtgagctgtagctgagcctggaaaatgacat

SEQ ID NO: 297730 - DNA, 208 bp, Homo Sapiens
  misc_feature (101)..(101): n is a, c, g, or t
agacatgacggcagcagggaggagaacggcgaaccgccgcgcatggctggcagggctagagaccgccaagacaggggggatggagggcccgggctgtcggncgggtctccaggggtaggctcaatatcgaattctggtgacttctgttttgctttgagcagggcgagtctgggcggtggcttggtgggggggcgcgtagaggggtctg

SEQ ID NO: 297731 - DNA, 293 bp, Homo Sapiens
  misc_feature (235)..(235): n is a, c, g, or t
cactggaatccctttcagcgaacctcatcactcccatctaattccataataggaacatttcacgcgaaaacgaaacaaacctgaaccaaatcaccccgggaaggactttggagccagaccaaggtatggggggcggattcacggggcattctgccgggaggagccttgaagattttttaatttgtcgcgggatgattttcgacttctcgaggctgggttttgttagactaggcgnacgtctgcaccatggcttttaaccggtccctttataggtcgggacaaaaagtatagac

SEQ ID NO: 297732 - DNA, 219 bp, Homo Sapiens
agcgaccgacgctaaatgggatgaaccggatcagcgaaggaggcacctgtagaaggtgaccgtcgtcaaggggctgggtgtctcaaattcgctctcacacagccgttgcttaaagcagtctccccgactgctgggtgtttaagatggctgtggggactcgatcagctttataacgtcggtgatagatcttttatgtttgctatatactcactttgtgaa

SEQ ID NO: 297733 - DNA, 278 bp, Homo Sapiens
  misc_feature (211)..(211): n is a, c, g, or t
acagatattgacgcgctacggggccactagctaaacgtcaaaaccacatgagatctattgttgctggcgcaaggcttttacggtcttactgcggggtatctcatagtgggtgacacgtaaggattctctacagtggcttcgcttaaatcgcgctgtctttttacggtgacgaaagctaatatcggcggccttacacggctatcaggtatgntcgaatagcgcggtctagcggtcccaaacgatgggagatacacaagagaggcttagtcagagggccc

SEQ ID NO: 297734 - DNA, 241 bp, Homo Sapiens
  misc_feature (180)..(180): n is a, c, g, or t
ggaattccaaaaaaacccgatcagccacaagtgctgatgagctaaataacaacgtggaagctgtttcccagacctactctaattgatttagtacatgcatttgctgacagccttgtgccaaaagaggcagacgcaagtaaaagataatgcaaacgcagtccatgagtgctcctaagcatngagaaggtgtcgatcacacgcagatcagattgtgattcttactccaacaccaggccgcaaa

SEQ ID NO: 297735 - DNA, 429 bp, Homo Sapiens
  misc_feature (70)..(70): n is a, c, g, or t
aactactaccgcaactaccaataaacaccactgaaatactcaactgtgtgaagaagtgaataaatgatgnaaaggtgaacaacactccaacctatagactttatggtctcacctcttttgctgaatttaagttcctggtagcgtgatgaacatgcctatcagccgtatccgccttcctgccttttgaatttgataaattaatactataacgattgttccatttcattcgtggtattaagaaataactcctaataaggaaaagactggaggcccctattcagagtatgtatgtttatgcctaaatggaaaatacatagcgcatcattaacaaagagaaactagtgcacctccacatggggcatgctttttggacgtcgttgctcagtgtccagaagcttgatgtccaattaatacagaaattgctacatg

SEQ ID NO: 297736 - DNA, 128 bp, Homo Sapiens
ggcgctcaatggaattcctttctcactgaagattttcccaacttttaatcaatagaagcacagagaaaagaggcaaaacgatcaaagaaatttacgtttttcagacagggcgtcgacttcacaccaac

SEQ ID NO: 297737 - DNA, 251 bp, Homo Sapiens
acaataatacttaataatgtactcctatcactcttgatgtcttatagaaattctcgccatcaacttctcacggtggcgtctcaaaaccacaccccatatccgacgactcaagatttcataatagacattgcttgaccactctctctatctaacgacagtgcgactcacccaccttatcgaaaggctcgacacccacgcaagtctaatcttattttaactatgtcccgattaatatacataggcctttcagc

SEQ ID NO: 297738 - DNA, 169 bp, Homo Sapiens
  misc_feature (56)..(75): n is a, c, g, or t
  misc_feature (124)..(124): n is a, c, g, or t
agtgatctttattgactgtactctttatcctgctattacctgatttaattgataannnnnnnnnnnnnnnnnnnnaggacgactataccataggttggcattggaattgcgacatgcagaaccngtggagattaatgtgctaaaatttgatatggtgcctgtttatgct

SEQ ID NO: 297739 - DNA, 239 bp, Homo Sapiens
  misc_feature (103)..(103): n is a, c, g, or t
tctgctgctgcctatgggtcctgatgtcccccaggcgaaccaagatgttcattactttctgacctacatctacactgggctgtccaagcatgttgaagacgcncccgcatttaaggtccttgctcacttaacgacttccgattctttgatacagtagtaaagacaaacggtatcagccaatagggctttatggacacgcgacggctatgtagcctcgtgcgtcagctcgtcagcccgca

SEQ ID NO: 297740 - DNA, 189 bp, Homo Sapiens
aagttatcactgaagctcttaccatcatctttcagttagtctcgtagattaaatagggaatctatctaagtgatggtatctagcaaataagagtgattagagttgacatttatgtgatgcgtctcggtcttgttgtacgtgactatatctgggcatcaaccctcagcacttgaccttttctccattacc

SEQ ID NO: 297741 - DNA, 170 bp, Homo Sapiens
aacactactgtctaccacctctaaaactacaactgtcctcgtaattcaatacccaaacatcactcacccaatatcccatgctgtcactccagttcctgcccaactctcgcttctcggccttccggaccttgcgaagggtccacctctaacgccttaaatcaagtattctt

SEQ ID NO: 297742 - DNA, 282 bp, Homo Sapiens
caaatacaacagactccaagagaagaagaaaaccgaagatagcaacgggaacggagacatataacacaagtaacgctgggaagaaaagcaggaggtcttttgacgggaggagaacgagtggcgtacggaagactaggaacaatgccgtccaaattcacaagaacggggagaccagaggcaaggctttggagacaaaatgcaaagagtagggtagggggagggtgcctaccatgtcgttcccgggagggtggcagcggagagagggctcataatagtgacgtt

SEQ ID NO: 297743 - DNA, 251 bp, Homo Sapiens
  misc_feature (128)..(136): n is a, c, g, or t
cgcccgtcaaaaccaaactgcgctgataataaagtaggtatagcaagtcagctcacccctgatctgtactaactactctagacccctctttctgcatttatttgaacttccctcccatgttgctcagnnnnnnnnntagaaactcccccagtctcttactatacataggtctcacagctaggcttgacccctgctatgtgtattgcaaagtaattgccctcccctaatctaacccattctaacatataatg

SEQ ID NO: 297744 - DNA, 423 bp, Homo Sapiens
ggcgctcaatggaattccatacctctaacaagccccacgaaaccacaagacaagggctgagcggcctcatcctcacattcagcagagtctctcacaggcctctgctttgttaatgccctccaaaccccatgcattttctaaggcccagaaagatcttcaacttactcagtggtcatgtatcttccctaaggctgtgagcctaatccatccacttatgccttgtgttactgctacgttagctgtaacctgcagctgatggcagttttgatacataaagaagtggctgctttcctcttaatggagacgcaaagtctatcttgcccctgctcttgcatattgactgccctttgactgcctttttgaagtaatagaccttaccgtaaatatgtttgttacaatgagctggaacggatttaattgtaa

SEQ ID NO: 297745 - DNA, 234 bp, Homo Sapiens
  misc_feature (118)..(118): n is a, c, g, or t
tttataacaccgaaaccaattttgaaatgtcagtcgtccagcttgccaaagaactaatgcacctgataaaagcgaccaataacagtttaaaatgaaaaatagggctaataatgttaangatgaacccaccaatgatatgaaatgcaggatgaggttgaaccacataatgaattttatactgcagtcctaaatagccttggaaaaacagaaactgaccttaaaaccaagaacccc

SEQ ID NO: 297746 - DNA, 230 bp, Homo Sapiens
  misc_feature (59)..(144): n is a, c, g, or t
atcaacgaatggacaacaccaacaccgacacactaaaagggcacacactaccaaatcgnnnnnnnnnnnnnnnnnnnnnnnnnnnnnnnnnnnnnnnnnnnnnnnnnnnnnnnnnnnnnnnnnnnnnnnnnnnnnnnnnnnnnntaagtcatttctcggtaaatccgactcttgaaaacaaatcaagtgttaatttataatgtacgtgacacagaaacatatctacgtaa

SEQ ID NO: 297747 - DNA, 165 bp, Homo Sapiens
aaagcccctgatgctggaggctgtattcacgctgacccagacctggggatgccgagtcctacaggatgctaatcgtaagaggcttttatacaacaggaaaggccgatcagaaataatgctgatgagtcagacaacacagcgaggctgttttccagacctcctatg

SEQ ID NO: 297748 - DNA, 275 bp, Homo Sapiens
caggactgcaaattttttatcaaaacaattgttttttctaatagtaaaactttgacccctccaatctaaaaaataatcaccccccataatcataccaaatttttttcctaaccagcctcttaagcgttttaactccaattttttcaatctaaaaatacagggaaaactcgataaataccaggtaagagaaagctctttttaggtacttattaggctccttcgaaaaaagtgagtactgcgaacatttaaaatatcataataccaagataatgttt

SEQ ID NO: 297749 - DNA, 145 bp, Homo Sapiens
ggcgctcaatggaattcgcctagaaattttgattccattcgtgaaaatttttctatatcctgaacagtccacttattactactgcggcctattgggaactaaccgaattcaccaatttctttattcggctcaacaaactttgaaa

SEQ ID NO: 297750 - DNA, 305 bp, Homo Sapiens
  misc_feature (143)..(143): n is a, c, g, or t
cttagtgaagcccctcgaaaacggcccaggcgctgggggcgacgaataggggtgaaattttccaccgcaaccactgacctccagttaccctacttggcgccgtcgtaagccttcccgaggaacacaacaaaaaaccctattcngccatctcacattatgtcttaaacacggccggcctggcccacaatgaggaaggatatttgaactaatccaccgaagacgacgcaatattgactaactataaaattcgactgaccgcagagtccttccgacccttagcccagcggctagtcgggctttacccc

SEQ ID NO: 297751 - DNA, 313 bp, Homo Sapiens
ggcgttcaatgtaattccatcaccactgaccaactccgaaagctcatcccccacaatatctaataaaatgcagtaagactaagattctgaaactcagactatgtcttaagaagccttataacatatctgtgggccttttagaatacttttttttgaaatgtttgttttgagcgtagccagctgctatataagaagtaaggttaccttgtttccattatgtgtggctagagagccatgttgttagcccccagaagttataactattccagctcagggaatgaacctgtgagtgagggcgtcatttcggatattt

SEQ ID NO: 297752 - DNA, 301 bp, Homo Sapiens
gcggtagtcctgtaacggctgcactccttttttcttgtgtcgggctctctttaaatcttacgttttttaatcatgggtagatccttgatcttaaacttagactcgcagggaagtctaatctgcctgttctttatctcctaacaacaaaagggcactttcttaatcgttttttactacagatcagactaagggggtttacccttaggcattaatcgaagacgttgttttagaggctacctttttgtcttttatagtttggctatatggaggtcgacctttcttactagactgagactgacta

SEQ ID NO: 297753 - DNA, 163 bp, Homo Sapiens
gaactccagaaatcatcaccacaaaactccactgatgtctaattatttctagagatccgctgcaattttaatacaagcctatgacttgacatctgaagtacacctttcgtgggtccgtcaaagcgaagccccattagaaatgcaaaacataactcgtaccaaa

SEQ ID NO: 297754 - DNA, 200 bp, Homo Sapiens
tccccatacccttaagggctgtcaccttagttccaaaaactcatccacaaaggcatttttgcgtagatcaggagaaaaaccactcaaacaattcacacgaaacccagggaccctattattcggcttaggaactttgacgaacggaccaaaactcagcgccggggaccggcaccccaaaaggcggataggaaaaaggggtc

SEQ ID NO: 297755 - DNA, 223 bp, Homo Sapiens
  misc_feature (77)..(77): n is a, c, g, or t
aactgtgtgctttaggagtcattgaacaaaaaacatagctctgagacactaggtttctggggtagacaactacaaanctacagctgctgcgtgctgggatcgacatttgtggctataccaacctggtaccgtcgtctcgtttagctgtgcgcgataacactctgaggccaagtctctgattaaccacattccccggtaacacgttcaagaccacatttctttt

SEQ ID NO: 297756 - DNA, 158 bp, Homo Sapiens
atctttttcgaaacccaaaacatcctctttacacaggttttgcaaccaatctaccccctaactacaacaccatctctcctaaatccaaacccgaaacaaacacttcaaaccacaccccacctggaccccgcgaccactcttttcatcactccgtggtc

SEQ ID NO: 297757 - DNA, 241 bp, Homo Sapiens
  misc_feature (133)..(133): n is a, c, g, or t
atacacccctcgttactacacagcatcatgataggggtagacgattaggcagctaattaaacactgcgaagtactggcacgaccaatacactcaagataaaaatttgaaacctattcctacggtacggcaacngaacatagagtctattacaatgaggcacgtgcgccactgatacttttccaaccggtaaaatgtactagacccaccgtaaatgccgacgtagatgaagacgtcgcatca

SEQ ID NO: 297758 - DNA, 260 bp, Homo Sapiens
  misc_feature (153)..(153): n is a, c, g, or t
taactattgaaaggctcgtagtccaaggtcaaagcacaggctacaaggaaccaaggtgtgacacttacccccgagagtgtctcctcagttaggatttgacgttggcggatctgtatttcacgagtgcatgtttagaaagtaagcaccattcangcagacctcttccatttactaaaagtccacaacagcaactttttttgggctctggattccgtaaatccaggacttttgaagcactccgtgtgcgctctcttcgcgag

SEQ ID NO: 297759 - DNA, 263 bp, Homo Sapiens
ggaggcaaattcgggggagtggtaaccgacacgagggcaacagcgcgagggggggttttctaattgtgccgattaggcgacgagaacccgaagcccctagatttaggaccacaaattagatcaatcaattctggctcatttaagcccgttacgtctttttccggaccggaacatagtgctaggaaaaagatctccggtggaccttgttccagctttcgcttgcgggcttttcgcttcggggttctggcagagggtacctttag

SEQ ID NO: 297760 - DNA, 330 bp, Homo Sapiens
  misc_feature (246)..(246): n is a, c, g, or t
gtaacaaccaacgccccctggacccacgccaatactaaccgcccctcaggagtactaaacataaacacactttcagtgcaccatctgcaaaaaagcttttctgcagagtccagactttgggaagcatcagagacctcaaacaggagagcagctctacaaacaaaattactgcagaaaaactttagtgactcctcaggactgggataccacaagaaaatccacacagaagagaaaccctataaatgnctatctccgagaaaagtctcatccaaagatccaactacagcagacatcacagggctcgcactgaagagaaactttatgcaagtc

SEQ ID NO: 297761 - DNA, 115 bp, Homo Sapiens
agcaaccgtgcaatcactgaactcccaacaacaccaacaaacctcagggagtcactcgctacgaaatggaaaaaataagctcaatatcacaaccgaaaagtgacacaagatccat

SEQ ID NO: 297762 - DNA, 187 bp, Homo Sapiens
agtgaccatactaatggactaccttttaagctcaccaaaattttttacatcacatacgacgaaaagcacagggtgaagaagcaaaatcagtaaagaactctcttcccccaggatcaagaccgtgtttttcaccacctaaaaaaagactaccatggcctcgtttccctccttcggctgcgtagtgagc

SEQ ID NO: 297763 - DNA, 270 bp, Homo Sapiens
  misc_feature (77)..(77): n is a, c, g, or t
cgcaactgatgcttcagaggtttgtgcgatgctgtggtgtgggtcggaacatgtccgtctaaatgtgcttttcagancgactctgtgcgcgggcgtgaagatgtggcctctacggaaatgattggaatgaggtaagaaatcgagcgagaccaatacgtgtttagtgtgctataaagccggacctgtggtgcgttatgataatggatgtaacgcaggggcctggcgggaacaaactacatactttaaccagtgcggagatgctgttatcta

SEQ ID NO: 297764 - DNA, 141 bp, Homo Sapiens
agagaccaataagcgaccctcgcaagggtgaaactgcaggtagaccacgcaacgcaaaaatctaaagggtacttagccaaagacgtacaggcaagtatgtgactatataggtggtgcagcggcacggctaacctgctagga

SEQ ID NO: 297765 - DNA, 280 bp, Homo Sapiens
taatgaataacgaaatcccatcataacactttgaacccatctacttagaggacacaagcagcaacaacatgaagaaacgtacgtaaccactatgtcactgatgaacctgcgacgatgttccacactgtgcaaagcccaattaaccactccgacaacatcgccacaaccgctaagtacgctaacccgttaagcacccgcgctttgtcacgtcgccgtaccgacgtagcccacgttgagaacattgctataatgggcatacccagagagagcctgacagcta

SEQ ID NO: 297766 - DNA, 168 bp, Homo Sapiens
ttagtaaatgaatttgctccagttaataaagaagcccgattgctgtggaatgatgctttggccacatctgactggtttctgcaggtattttctatatcgtcattgtttgcagttaggacactgtattttctcttaactaagtgactagcagctgtgattttaatcccc

SEQ ID NO: 297767 - DNA, 235 bp, Homo Sapiens
tgttttaaccccctgggtcaccagaactacaagcgcacaccataacattccatccatctccggataactaacaaacacagaatctccccaagcaagtttcaaactcctattcctgatgatctggttgcatccgccttaacccatcatgtagacccaaccgtaagcagttcgtgcccgccaaccctgccctccccgggactcgatgagaatacagggtctttcccacacattcggg

SEQ ID NO: 297768 - DNA, 327 bp, Homo Sapiens
tggaattctcctcccagtcgtgagcagtggcttgtgatgctgctaatagcttcagaacagccttcactctgctaggagtaccagagtgcccacaggactcagggacctatttgcttgtttactccatctcgatccaggcactccaagtacatagcttcaggagtaaaaatggctactgacaatgagattaaaaaacacctctcaccctgtaaggatctcatatccacatgagactgttataacccttacagaagagaggacaccagttgggttatcagatagtcgctgttcacattgcaggctatcccatgacagggcacattatca

SEQ ID NO: 297769 - DNA, 211 bp, Homo Sapiens
tagcaaccggcgttcaatggaattcctttttaccaaaaacccagacgttttattccgcaaagcacatacgcacatacttcaaacacggaaaattaattcggaagtgaatgccataacaaatcaactactgaccatcacgtagcaggaggtgacatggaccaactggctttcaggtccctcataccgcctgtcggtggggcggaagaaccgg

SEQ ID NO: 297770 - DNA, 213 bp, Homo Sapiens
agcgaccgacctcactgaaatccacgttaaataattaattcctcatggaggaacctctttcaaggggattcctagcttagctctcagccctctctgcgccgcccgcctaaacacaagcacgttattttcctcaagctcagatgaatcacttactacatgactacagcatgccgttcctaaaacaatctggaaaactaatctcagccgcttaat

SEQ ID NO: 297771 - DNA, 177 bp, Homo Sapiens
gattccattcgtgaaaattttcctataccctgaacagtccacttatcaccactgcgacctattgggaactaaccgaattcaccatgttactcagattcgctacaccaaattccgataaatctctagaagtacacatattacaagagcctgctactgagaactaactgaatcccaccg

SEQ ID NO: 297772 - DNA, 120 bp, Homo Sapiens
gtcgactcgcgcacaaatgcactgaactagaagaacacccgctaaacccacaaactaagccaataaacgaactaaacagacccgtacgaagcaaacagggacaagttatcccactcagaa

SEQ ID NO: 297773 - DNA, 229 bp, Homo Sapiens
tggaatcccctggtttgaaggcatacattttcctaccatgcgttcagatctgaaacttcaagaaaagtacatgatgagtttgtgataaggggtgaagatgtgataatatcgacttaccccaaatcaggcctaaattagctggctgagattatctgtctgatgggttctaagggggatgataggtgagtttaatctatgccaatttaggcgcgattgccccgggtagaaa

SEQ ID NO: 297774 - DNA, 329 bp, Homo Sapiens
ggaattccacccatcacaacttcattcaggaaccataaaacagtcctgcgtgggcctgtacgcccaaaccccgactgactggtgtgtctgataggcgacacagatattaattaagtagctgccgcaaaacctttccgcctggcacccgtgtgacccgtgcctttatcacccatgctgcttcccatggagtttatggaagcatgtgcaatgtccttaccatgatgatgatgcccttgctttttgatcaaatgggcgatgtgaatcgcatgaaaactaagcgagctgaagtggctctaaatgatttgaagatggctttggggctttggatc

SEQ ID NO: 297775 - DNA, 310 bp, Homo Sapiens
  misc_feature (274)..(274): n is a, c, g, or t
cacatatgtgtgccctgcagagcacagcaagtgttaccatagccctgagaaaagaaaggatgatttgaactggagagacagacaaagacctcatgataatagttgtttatgtagtccctttcataaatctcttcacagatcatacagtccctccacagatcactggcccacacactcttgcatcccattctcacagtagccctatgggagataataccatgatgtctctacttcatatggaagaagttaaagttcagaggagtgaggtaacttncccaagggtataacttaccaggggccagatcttggg

SEQ ID NO: 297776 - DNA, 308 bp, Homo Sapiens
tttcagtaacatggtcttgggatgacagggctcaccctgcagagacccaaatggaggtattcagggcccattgaaaagccatctgctgccaaggctctgctgctgatctcatgcaacagaaaccagagtctgtcgcagctctgctactcactgggtgactctgggcgagtggcaggctctctggtcctgtcttttctgatgtggagaatgactagctggtgcccgaggttttcctaaagctatggaattccatcattttataaatgactccaatgacggaatcctactggcataacatcttatggttt

SEQ ID NO: 297777 - DNA, 340 bp, Homo Sapiens
  misc_feature (175)..(175): n is a, c, g, or t
  misc_feature (180)..(180): n is a, c, g, or t
  misc_feature (258)..(258): n is a, c, g, or t
  misc_feature (273)..(273): n is a, c, g, or t
ttcttttcccagccatgccccttggtaaaagggataaatgtgggcacctcctgtaacgtctccaagcttccctttcctctctaattgagcaaggatgttataaggctctaaccacaaccttcttgggaagattcagtgagataaagcatgcaaagttcttagtcccatgccaggnatgtnattagctctttggatttagacccgagtttttttctcttggctgtgattctctttgtgccacccacacagccccctggngctttggggaccttnaagagcccagagggtagtgttagacccagataacccatcccgatggtggatacccggatgcctgggg

SEQ ID NO: 297778 - DNA, 358 bp, Homo Sapiens
  misc_feature (103)..(103): n is a, c, g, or t
  misc_feature (122)..(191): n is a, c, g, or t
  misc_feature (247)..(247): n is a, c, g, or t
  misc_feature (287)..(288): n is a, c, g, or t
  misc_feature (311)..(311): n is a, c, g, or t
  misc_feature (325)..(325): n is a, c, g, or t
  misc_feature (347)..(347): n is a, c, g, or t
gcaagtgtgacacagagcacagccacttctgcagggaggagccagaagccacttgggcagccctcctgggagggggctgtgggtgaggctggcccgggaacgngtcctggcttccctgcagnnnnnnnnnnnnnnnnnnnnnnnnnnnnnnnnnnnnnnnnnnnnnnnnnnnnnnnnnnnnnnnnnnnnnnactgcgcccagctctgattggataaaattccgtgccaggctgtctcaggtgttggnctctcttgcttctagcctaaatgttggtccccttggcctnnggtattgatccccgggttcaganagctgttggctganatgggcttgtatttggttaagntttcccaaggg

SEQ ID NO: 297779 - DNA, 262 bp, Homo Sapiens
  misc_feature (50)..(50): n is a, c, g, or t
  misc_feature (56)..(56): n is a, c, g, or t
  misc_feature (92)..(93): n is a, c, g, or t
  misc_feature (95)..(95): n is a, c, g, or t
  misc_feature (196)..(196): n is a, c, g, or t
  misc_feature (199)..(199): n is a, c, g, or t
cttttccgtttccacatagacaatcacataatctgtaaataatgactctnactttnccactttagtcgttaggttatacctatatatatatnncntggctttactggactaatttcaacctccagcacaccaccaatgaatagcagtaataccagcataattgtctgcagttctgctgagatacgtgctctatttnatnggcttggctgtaggttttaattttattttttgaagaggctaatctcttacaggaaaggtttct

SEQ ID NO: 297780 - DNA, 280 bp, Homo Sapiens
  misc_feature (25)..(25): n is a, c, g, or t
  misc_feature (76)..(76): n is a, c, g, or t
  misc_feature (111)..(111): n is a, c, g, or t
  misc_feature (138)..(138): n is a, c, g, or t
  misc_feature (214)..(214): n is a, c, g, or t
gaagggtttgatataagtatctttnatattctgtaatttaaaaacataataccctgtaaaggagtggctgaaaatnactgaagaagttgtaatcaggaatacaggtaaatncacttagaggaaccattataacaagtncatttctataaaaggtggatggctcatgaaaaaatggtttcattaatttgtattgtaaatgtatcatacttttgtnagtacgtggatttcttttaaagaaaggggtggatagtggtgatggtatttggggttgaagataaga

SEQ ID NO: 297781 - DNA, 644 bp, Homo Sapiens
gctcatctaagcctaagttggtctgcaggcgtttgaatgagttgtggttgccaagtaaagtggtgaacttacgtggtgattaatgaaattatcttaaatattaggaagagttgattgaagttttttgcctatgtgtgttgggaataaaaccaacacgttgctgatggggaggttaattgccgagggatgaatgaggtgtacattttaccagtattccagtcaggcttgcagaatacggggggtccgcagactccgtgggcatctcagatgtgccagtgaaagggtctctgtttgcttcattgctgacagcttgttactttttggaagctaggggtttctgttgcttgttcttggggagaatttttgaaacaggaaaagagagaccattaaaacatctagcggccccaggactttccctggaagtctgtgtgtcgagtgtacagtaggagttaggaagtactctggtgcagttcaggcctttctcttacttctcgtattctatttccgatctggatgtgtcccagatggcatttggtaagaatatctctgttaagactgattaatttttagtaatatttcttgttctttgtttctgttatgatccttgtctcgtcttcaaagtttaattagaaaatgattcggag

SEQ ID NO: 297782 - DNA, 536 bp, Homo Sapiens
cgagactgggggctagaatgtatgttagagactgatatgtccataggtccttgctatcacagtgaggtctcagggacagtcgtttggtatcatttgggatctataagcagactctctctttggcctgacaaatcagagtatgtgttttaacaggttcagtgagtgacttacatgcacattggagtttgggaagctccactgtaggtgcttagaccttacctttgttgttgctaataacaatgcaagcatttgggaggaagacctgtgttgctcatatgtgtccaggtgtagctgaggtggccttgcttatctgctgtagggccgttgagcatttctgtagctgtgatgagtgagctgaggtgagctgcggagagctcccagccattggtagtgggactcgcttagatgaactggaaggaccctttcatctgagcagccactatggagaaaaacaaccgaatgaggggatatacaatgtgcaattttatttagggcacaaaggagagctgtggttagaaggtgacatttgagtggaa

SEQ ID NO: 297783 - DNA, 432 bp, Homo Sapiens
cgagactggcccacaactgtttgccatctcctgatctaaatgatccccacttggagcaagagctaaccaaagacacactttaatggcccttatcagatagatagatgcttatatcatactttaaaattcttaattatataagatgcagtttttatgtaacttcccttcacaatttgttagtaccacactcataacttaagatgatacttaagcatccacagaagcattatgcttttacaaaattcttgtatctactcctgcctgttttattacttagctatatgtcaatacatacgtcatgttcccagaaaaactatgttagaattttgactaaaattgcaaagcaatttctgtataactcatgtatttgaaatagtgatttatcattcaggaacatggcttctatctgtatttcgttctcataaaattttt

SEQ ID NO: 297784 - DNA, 168 bp, Homo Sapiens
  misc_feature (34)..(34): n is a, c, g, or t
ccatcaactcagcttggctatattgtaaacaggngcagacctctaaacccagtccctgtgagtgacccgactcaggagacgtggagtagccaagcatgatgaagtgcaacttccagagctggcggttgtcgaagtcaggaacattcacccaaagatgtaacgtgatct

SEQ ID NO: 297785 - DNA, 240 bp, Homo Sapiens
cctgcttagtggtttctttctctttgctttctaaatccatattttgaaacaattttaaataatctccaaactagacaaaattactctttttttcaataaagaacacatttttattcctctcataatttttctcatcagaaacataccttacttttcgtatacttgtatactgaaaatatatatatgtaagactttaactcttagttactgcaattttagtgaaacttggaatcagtattt

SEQ ID NO: 297786 - DNA, 764 bp, Homo Sapiens
gcdgtgggtttttgtatatttatgtttacctagccaccttatcaaggtacatattagtaagaggttgctcaagtaagcattcctgggtattcccaagaggatacttgtgaaaaatgtgtagtccctacctactcaaacagaatgcagaagtatgtttgggaaaaaggacagtgaggtgccttcattactgtatttttaacaaattttccagatgattttgattgctcatccatacttaggaaccagtaacttagaccactttagagagcttaaagcagacaacattttcacaatatacatgaagttttaaatgacttcctacattgaaaacgtcagaagctgccatttatataacctcattagagacaaaaattagtctagcacaaaagctataaaaaagttccaaaagtttaattatattttaggagagttaacaggaaacagcgatgagcaataagtttccataaaacatatttacataaaatatcaccttcagctatatactctgaaatccctaaaaagtatagagtgtatcctatgaaaccaagaagaacctctctgactccaaaaactccttttaacatgctcttctgtagaacaagcataatgaactctcagcattactccataaaaacaagagacagactaatgtgaaaaccattaacagctattattttgatttaatatggcatatagaaccacaaatcaatcttaagatgtctcaacatactttactaatttatgaatataagccaacattccat

SEQ ID NO: 297787 - DNA, 357 bp, Homo Sapiens
  misc_feature (228)..(228): n is a, c, g, or t
  misc_feature (283)..(283): n is a, c, g, or t
  misc_feature (319)..(319): n is a, c, g, or t
ggaccgtgactttataagtccaccaatgatataactgtaaagtaactctctcagaacgtggactacgctattgaatcagaacaccaatttcactcgttatacaaacccacaaagcttcaactagcagaagttttgcatttttatccactttgagacaaaagaagtaattcatagaaaaggaaaactgttgctttaaatgaaagctctgacacaaatatgcaaacacancaaactgctttccactgcgcacacactgagtttatccaggggctgggtgactcgnctgtcctctaccacccatacccactcggacatgggncatgggtgcaagacatgatgtgcaagagccgcagactt

SEQ ID NO: 297788 - DNA, 143 bp, Homo Sapiens
agccagttttgcaggtatcctagtcataaaaacaatataggcagagcaaagggacttaggccagccatcaaccacttctttgagcaggcagatggggaaatccaatctgccctctgccgataccaagctccaacacagggagc

SEQ ID NO: 297789 - DNA, 533 bp, Homo Sapiens
  misc_feature (77)..(419): n is a, c, g, or t
ccttgtcggccgcttgggcccagccgattttagactggggcaggtttatgcttgcggccgaatttggggctcattgnnnnnnnnnnnnnnnnnnnnnnnnnnnnnnnnnnnnnnnnnnnnnnnnnnnnnnnnnnnnnnnnnnnnnnnnnnnnnnnnnnnnnnnnnnnnnnnnnnnnnnnnnnnnnnnnnnnnnnnnnnnnnnnnnnnnnnnnnnnnnnnnnnnnnnnnnnnnnnnnnnnnnnnnnnnnnnnnnnnnnnnnnnnnnnnnnnnnnnnnnnnnnnnnnnnnnnnnnnnnnnnnnnnnnnnnnnnnnnnnnnnnnnnnnnnnnnnnnnnnnnnnnnnnnnnnnnnnnnnnnnnnnnnnnnnnnnnnnnnnnnnnnnnnnnnnnnnnnnnnnnnnnnnnnnnnnnnnnnnnnnnggatgccctttttaaagaccggggcttccaacgtcaaggggcgatttttggggccggggtcccgaaaggcctaaatgggacccttagggggccccccgtttaggactttgcggg

SEQ ID NO: 297790 - DNA, 294 bp, Homo Sapiens
gaccccggaaattcggccataatggccgggaaggtaattgaaaaaggcagggaattagttgcaggtcccgtggtggtaatggttgcccgttcgttaaacccaaccagggggactttaagggccaacaggcttttctgggttttaataaaaaaagttcttttgaccattataattttaatggccaaagtacccaaccttggggttaagtaaaaggtcctaatttttggaaccttttccaattttgggttggggaccagaagtaaaattaattccaaattacttccatttaacatt

SEQ ID NO: 297791 - DNA, 404 bp, Homo Sapiens
  misc_feature (109)..(118): n is a, c, g, or t
ggtccccggaaattcggccattatggccggaaattaaaaattccgccattttaggttttttattggccaacccaaccaaaattttaggttttaactttaaggggaaggnnnnnnnnnnaagttgatctaaaattgaaggcaaattttctaatgtggaaatatttggttattattttaccggggggctttccaaggttttaaggcctaaggttcttttgttgcgttaatgtaggttgcccaggacctttaactaattggtaatggggcctaaaactttttgaaggtttaccttttaaatggccccgacgatttaaattttacaggtaaccatgggttaatcctggggcttccggaattttacagccaattttgaggataatgattccattgggttaaactaagcc

SEQ ID NO: 297792 - DNA, 401 bp, Homo Sapiens
ccggaaattcggccttaatggccggggaaggttgatggaaagactgggggttaggaaaggccgaatgggattaacggggccttggttgaaggccaaaagggaacctgaaggttctttaaacgggttttgtccggggggaagggatcaagttgggcttgccaggaggttaagggggccttaacgttttttggttttttaacctgccaataaaactgttccaggacaccaccttgatttggcttggccatatccaatttagaattaaggtttaattcaggataaggttgggggtttaggaaatggggacctggttggcataattttaggactttaatggccggttttacattgggcttttaaggaagttggccagaagttcccggttggaaaggacagttcct

SEQ ID NO: 297793 - DNA, 528 bp, Homo Sapiens
tggtccaagtggcataattatctccctaaatgcttgggcagcatcagctttcagtagctgtgccccatgggaggcacattaagctagtggcaagttgagactgcagacctcagcttaatatcagttgttgcccaagacagatctcaccccacatcttcatgactggcctaacaacaaggcactttgcccttaatcctctactactgcctgctcttcattttgggccaactgtacagctcattttgagatagtagctgatcatttttctgatcagttaactttgtcttattaagcaaaatggagaatataatgttgggaaataagtgtgttgattaaaagaaagtatccccttctaccatcttccatttgtgtctgggttgtgctgggtaaagttctagacttactaacgcagacttcattttggtccggtttccacagcatgcctcgggcatcagtgtccaggagtagctgtatttgaggtttccttcactctggtaggttcctgattcctgatgaaaataacttgaa

SEQ ID NO: 297794 - DNA, 408 bp, Homo Sapiens
cggccattatggccgggggtcaggcctttaaattaggtagccagaggcttggccatcggttaaaccactttccttccttttggctgaaggcattatgttaaccaaaggaaccctataatcaggccccattggacgttaaactttttaaatacctataagggaatattctccattcgttacactgttaattagggtagaaggaggcaccttttcccctataactatgccatggttaacatccagccttcttggatatcatacccgaattttggcggttaagcctcctacctgaccatcttaatatatgcataaggctgtccagttaataatctagcacttctgagaagggtattacaaaggcattactgagttgggaaaaattaaatttaggataggggtctggtagaa

SEQ ID NO: 297795 - DNA, 666 bp, Homo Sapiens
aaccgccttcgtcggaagctgccttggatccgcgtctccccaaggaaaactgcgactggcgactccccaagtgctattagccgttggttaattcggggattgcacaaactaatgctggggtactaaggtcaaacgtgaacggagcacgtatattatctaggctgcaaggctttaaatagttactactacacacgtcttaacatacgcacctgctaacccgtgcgcagatgtcaaaacccatttggctaagcaactggtcaaactctaagttcaggtatgaaatgctaaaccccaatgctctgctactacctatatgtgcatgagaaactttggtaggctgacaaggatgtactggacagcgctactggtagaagccaacaattggcaacgtacatcagtgaccctatgaagaccttatggcatgctaggaagtactggtataccgccagtaaaggagactggacttaacaatgcgttgcggtaatcagcgaatgccgtttgacaataagttgtatgaccattcagatgcattcaactctaaaacatggtgaacaatgctatacaatgcttagatctgcatacataagtacctaacgtagtcaaggaatactcgcgaattgacaataaagtgagagaaagcaatcctattggccaggaggaggccct

SEQ ID NO: 297796 - DNA, 552 bp, Homo Sapiens
  misc_feature (42)..(105): n is a, c, g, or t
  misc_feature (270)..(328): n is a, c, g, or t
ccgtgtttcccctttggccccaagatctttaaacttgggccnnnnnnnnnnnnnnnnnnnnnnnnnnnnnnnnnnnnnnnnnnnnnnnnnnnnnnnnnnnnnnnnaaaatcccgggccgggtttataaaaagtcccctggggaaaaacccgttttgccccccatttaattcccttgagaaaacctcccctttttcccctttgggaaaatttccaaagggccccccccaaagggtctttccacaaggtttggcacccctataaaggtccannnnnnnnnnnnnnnnnnnnnnnnnnnnnnnnnnnnnnnnnnnnnnnnnnnnnnnnnnncccccttttttctccaccaaaaggccccaaatttgggaatacccctcttttaacccaataggataccccccggcactgtgttaaaggtcgtggccccctttgggcacagagggccacattttaaaaaaaccgggtctttcccccctatagggggaaataaccccctattagagggctattgcgccacttggtgacccatatcccctagaccccccttttaaact

SEQ ID NO: 297797 - DNA, 425 bp, Homo Sapiens
gccattatggccggacctttaggaaaggtaatgggaaaggttaaggaagggcttgggggccaaaggaaggagaggaggtaaattttccggatgggggggaaaatttaatttcccagttaatttcaatattccttaacggggtaattcctggaacctttaaggtttaaaacctctttattaaaattcatggccaactcctagaatccaatccttttaaaaggttacctaatttccaagggggttgaaaatatggttaaccattccaggattatgaatggactgtgaagattttaaaattaaccttagggcctaaattagccactgcctggttaacttggctgaaattttttaaaccgcctggtttttaatatagcaacctatttaaatactgcctggattaggttaaataaggaattttaatgtcc

SEQ ID NO: 297798 - DNA, 391 bp, Homo Sapiens
aaggcctgaaggaggaattcttagggattcaggttaaggaagagtctgaggaaaaggaggaccagggggttgaatttaagaggcaaaaggaggggctacggccctaattggatgagaaacgccttgaccatttccttagtaaaggggaaggacggttgccttccagagcacttaagggagcatggatgatatattttaccggggattaactgttgaccaatgggggatttaaccatgtgtccatggggcccagaaggctggccagcaaagttgccaccgggggttcctaaggttataactacctgcgaccaactgtgagtgttaggtccagggtattggtggattaattaaatctttcaccatacctgattcccggacactggttcccgag

SEQ ID NO: 297799 - DNA, 554 bp, Homo Sapiens
ccttggggccggcctgggccaggcggcctttggattggggcaggttttggctggcggccgaatttggggctcattggcccatttccccttatggggggcggaataccatttaatggcccgaggtttaacacggccgggctgggaaaaccctgggggttccccacttaatcggcttggcggaaaatccccttttccccggcgggggaatttgcaaaggggccggaccggatggcctttccaaccagttggcaaccctgaagggcaatggaaattggaaggcgttaatatttggttaaattcggggtaaaactttggttaatcaagctaatttttaacccaatggcccgaatcgggtaaattcctttataatccaagggattagccggggatggggtggagggttgtccaggttggaaccaggaaccccttattaaggaacgggggctcaaacggcaaggggccttttgggggcccggttccggaaggcccttaattggaaccccttaggggggcccccctttaagagtttgcccggaaaggcccggtaaccgtct

SEQ ID NO: 297800 - DNA, 676 bp, Homo Sapiens
taactggcgatcattttacggctcccatcgttttaaatacaaagattgggcaccccaacgcccgggattgccagcaaccaatgaacattactataacattataaacttgatttaccgtaaatgcgtcccgaattacattacctattacagtatccaacgttatcactgactaactccctaatacacaccactccattatcgacctccgtacgtttatacttcgatcagcggactaaacacttgctcacgcgccattcactgaagctcttcatggcatctatatctgcatacggccattctcaggttcctcaactttccgaatagtttcgcaatccctacttgattcaatttgtcgattcgaaccagatatacggcgcgatgcggctgctctacagaatgcctggtgagccctattgcgcttgtacccaatctgccttattctgtgactctatagaatggtaggttatgccattggctcattccttactgggatgcctgtagcgcgctgcacttctgtataactagggactttcctcgctcattgccaacttttcacccttcactttgccctgcttagtccatatcgcctctggtatgcattccccccatctctgctctaataccttttcgcatccacttttcttggtcaccgtgtcttctcccaggaaccctgcca

SEQ ID NO: 297801 - DNA, 370 bp, Homo Sapiens
gggaacccctggatcatgactttggggtggaaaggattagaagggttggaaatcggccttaattgtggggggtggccaaggggccggccaccatgtccagactggttaattttcctccattcctttattatcaaggtcagaacctgcccaagggttttgtcaagggggttccagttcttactcccacttttttggaggtttaaggtccaccagatcctccagaggaggtggatcttaagcctaaaactttgaaggttggttaagggggaaaagggttatggttttaatttaaaggcgattcggggtttgccaggttaattcttcaaggaggtccaagtgaatgggtggaatgtgctaaatgaaccttatg

SEQ ID NO: 297802 - DNA, 428 bp, Homo Sapiens
tccccggaaattcggcctttatggccggggggtggcttgagaaaccgccagtatttgccagagccaccaaaggctgaccagaatcctgggggaccaggcaaccttgcttttaagttttggaggccgttgaaccttacgttcccaaggggttaaaggctgaaccattaaccttccttgcggatttttgcccactttttgagaaggggggccaattcaggaaccaacctgcactggttgagctcgtgaaccacaggcccagggcaccaaaggagcacctgaaagctgtaatggttgattccgcagttttggtaaagaagtgctgcagggttgccgataaggaaacctgttttgccaaggagggtaaaaaactggttgttgcaagtcaagctgccttaggctaataccatcccattttaattcatttgttt

SEQ ID NO: 297803 - DNA, 208 bp, Homo Sapiens
ctttatggccgggttgtggggaaggagcccaaaattcctgccaattgaacttttgccaattaaaagggggtggggttaggttccatcgggttacggccctgggaaaataattttaatggaaatggccttccagggggttttaaaattaactgaagtttttaggccaattatgaatgtggcctaaatttccaattaaactggttaatcc

SEQ ID NO: 297804 - DNA, 331 bp, Homo Sapiens
cttattggccgggggtaggtgttccggccaagtggggttggttggctaaaaggggggaattaatttattccccaccaccagttgaggggaaattttggccaccgaaggagtttgcccaaaaaccaggggcagaaaatggtaaagggggttaagccttcggaaaaaagtagggggccagggcttttccaaaaaaagggaaattaaaggtaccgattgtagaactgtaagtagggaagggttgggaagcgaaaatttctggggtgaacctttaaaggcctcctttgaatggctgaataaccaatttttaaattaaccggtttttttaaccggg

SEQ ID NO: 297805 - DNA, 198 bp, Homo Sapiens
atatttgacatggttaattcttattaatttgttggaattgtttattgttaataatgcaaatagataatttttaattatccacaagtaacatttcactgttaatggtttgaaataggtgataagcaaaccaatttgaaataaaatataaacatgtgccattgtattataacactatacactttcttgacagttaaattt

SEQ ID NO: 297806 - DNA, 400 bp, Homo Sapiens
agaacggtgccggcgtttatcaaagtttagggaaacctccaggaaacggttataatggcaaaaaagcccaggttcaattacttaaaggcacggggcaaaagggagtcaacccgggggttccgggttgaagttgaagtaaagtttgaggggaaattattaaaatctgcaaaaaatttggccaggttaaaaaaggagggttatttgaggttccagcaggggccaagggttgaaattgagggaataaacttgttgcaaaccaaagccattttaaattacattgccagcaaatccaacctttatgggaaagccttaaaggaaagagccctgatggatatgattttagaaggtttagcaaatttgggggaaaggatcctccttttgcccgaatgtccacctgagg

SEQ ID NO: 297807 - DNA, 306 bp, Homo Sapiens
attcggccataatggccgggggtccgggttggaacttaatcaatgttccaaattggacctgttccagggatgtgaaaaaactgattgcagccaaggcctttcggaaacccaaaatggtgaccagcttctggggttgaattaattgaggggccttttgacatgagtttggcttggcccaacttcttagttcttaatattaaagacggatggttttttggtttttaattgaggggccttttgacatgagtttggcttggcccaacttcccaagtttttaatattaaagccggatggttttttaattgg

SEQ ID NO: 297808 - DNA, 376 bp, Homo Sapiens
aaggagggggaaaggggattatttccgttggaggttgaaagctgggaaacccattaaaggacctcctttggttaattccaccaggaggacgttgggatccaggagattccttttttctggggccaaaccatttttaaaaacttacctggtcaggtcaaaattggttttagacccggtttacccattagaaatatttaatgtcaggggggaaaccattagggaaaccaaaatggttttaaggccttccggggttatatggaaaggaatggggctaatatggaaattaatggttccaattaacaggttccatgaaaataggaagtccattgccagtttcagacctgtttggcaaatactcagcatacttgggatccat

SEQ ID NO: 297809 - DNA, 447 bp, Homo Sapiens
attcggccataagggccggggataaaggtttcggccatccggttccaggcaatcctttaactgggctaagtttccaaataatgcttaatggcggattaaccatggggataatatccatctactaagaaatggtttaattttaaaataaattggctaacctgttggtttggaggctaaaataatgtccggtaaagggaaattaaccatattaaggaacccattattaaaaaggtgggcctaggttttttcccttaccatatattaccaggcttaacggaatttaattcagcctaaaaggtaataaaattttgggataccggttataaatccttggaaaccttggaatagcctataaaaggtatggaaaaggttggaatttaaggggattaaaagcaccattatcagaaccttcgggttaatacggaacctgggtggtggatgtcaagg

SEQ ID NO: 297810 - DNA, 324 bp, Homo Sapiens
gaccccggaaattcggccataatggccggtaggagattgccggcaccgtggcttttgccatttaaaccttgaccctaatttaacggtccaatcaatataatcggggggccaaaattttccaacattcttttttgtgggggccaccatttttgggcctccatggcctgttgacctgccaagccaatggccagttaagaattcgaatttaattgggcctttcggaatgggttccttaataagcatttcaaaaggttttggggtttaatccataatggattaaagttggaacttgggattaaagaatggtttaaaggcaccaccagc

SEQ ID NO: 297811 - DNA, 443 bp, Homo Sapiens
aaattcggccatattggccggccattcgaattaggcttaatggggattttacctttaataaatggtggcagttccctaaggtaaatcctttaccattaaggtaccaggccttattcttcccttaaaggggaccccaggttcccatatgggttggaaaaatgggcctgggggggtttggtttaatccttaaaatttggttccaataagttttgtgggaatgggaatcctggtttaataagcttggggggggtccttttccccaaaaccccttttgggtgaaaccatccctttgccagttgcagccttttgacctcggttaccattagaagagttaatctaattttaacttttgaccgttggccttacaatcaaaggtaagtattatatattggacctgatgaaaattaataaccggttttaccaaaattaaaggtccatggtag

SEQ ID NO: 297812 - DNA, 377 bp, Homo Sapiens
caccacacatgggcaacacaattgctgtctctcatacgagtgttatcacattccaggacttaatttttctggttctcatgagttgagccagtggctacttggtgattttccttcacagacaccagaaaaataatccacatcttcacaacaacagctgttcctctatagcctcccatgagaccggaaccatcacgactgcgctgctgcttatgatttgcttcgttgtatttaatgtgagcaactcgtgccacagcatttacctaagtacggtgaagaaaagggatcagttgtggaccatctcagatttgatttcctcatgttaccccattttttggtccatttttgctcattggtagagaaagtcttatcctgaattc

SEQ ID NO: 297813 - DNA, 532 bp, Homo Sapiens
  misc_feature (123)..(471): n is a, c, g, or t
ccatgtgggccgcctgggcccagccgactttagactcgggcaagtttttgcatgcggcccaaattggggctaattgggccaattccccctatggggggccgttttccaattaacgggccgggnnnnnnnnnnnnnnnnnnnnnnnnnnnnnnnnnnnnnnnnnnnnnnnnnnnnnnnnnnnnnnnnnnnnnnnnnnnnnnnnnnnnnnnnnnnnnnnnnnnnnnnnnnnnnnnnnnnnnnnnnnnnnnnnnnnnnnnnnnnnnnnnnnnnnnnnnnnnnnnnnnnnnnnnnnnnnnnnnnnnnnnnnnnnnnnnnnnnnnnnnnnnnnnnnnnnnnnnnnnnnnnnnnnnnnnnnnnnnnnnnnnnnnnnnnnnnnnnnnnnnnnnnnnnnnnnnnnnnnnnnnnnnnnnnnnnnnnnnnnnnnnnnnnnnnnnnnnnnnnnnnnnnnnnnnnnnnnnnnnnnnnnnnnnnttatagggcaaggcccattccgggacccttcccctaaaaagttttttggggccaagtcccc

SEQ ID NO: 297814 - DNA, 677 bp, Homo Sapiens
  misc_feature (558)..(558): n is a, c, g, or t
  misc_feature (581)..(581): n is a, c, g, or t
acatataaatgattctaaggccttctgacctgtctttcaataggatggtattacccaacaattatgacgtctacacatacttttcattttcaatcacattgggacaaatttttatctttatctcatttctgctttctcctgtatgtataagtgctgatattttactgctctctacaaagagtaaagtctattacggtcttacaacttaaatttgattccaagacaaaggttaattggtaaagattatttcccaagcgttaatattgtacatgaatcaaaaggtcagatggcatttctggatctgacagctcttatcataatgaaggtttgaaagaaatgtcatcttgcgtactaattaatggttttagccctagtgagagatcttttatttaacgccagtaagttaatcacagttgatgtctgtgaactgtcaactctcaagctatgcatctatttgaggtcattgctgacaaaacccctattttacaggcaacatcactgaatatacatcacttgccaatgtatcatagacatttgaaaacttatagaattcagcanatattgttcattttatttactcnatttttaatagtaattacaaactatgaatggaaaaagctataatttaatcattggactacatacattcaatttttaaaaaagactctgctaaatag

SEQ ID NO: 297815 - DNA, 136 bp, Homo Sapiens
tatggccggggaatggtccttttttaagactcattcttgacttctttactaccactggttagttatataatctaatatcctaatatcaggtttaaaaattttaaattagaatttaagaatctaattattaagattt

SEQ ID NO: 297816 - DNA, 685 bp, Homo Sapiens
  misc_feature (577)..(640): n is a, c, g, or t
agagggaacgcagctgaaagcgttaactgtggttgcacatttcccctctgccttcctgtggggtgtcatcatagcctggtcaatgagaagttgggtaacttcccagagggtcacggagggagtgggtggccaaggcaggaagaacagaagccaaccccgcccacagtgggaacccaggcgttaggagatgcttttgacaagttataataagggagagatggtagtaaaggaagtgaagaagcgacgtgaaattgaaggaaaagaaaatgacctgccttcttaccgcggttggaatacacacccaaacgagaggtagcagagaagcaagcagtgcattctgttaaaaattattgtgtcctcatttgagagaggagggatcctcaaataatacaactatgtgcaaagcaggaagtgaaatccttctcagtcctctccccagttgtaatccaagccttccacatctttcctgtatgtgcataaccatgttattttgctttcttatgaaaatgagattatgcatactggtcgataatctgtttcagattaaatatatatatatggtggaaacaaataatcnnnnnnnnnnnnnnnnnnnnnnnnnnnnnnnnnnnnnnnnnnnnnnnnnnnnnnnnnnnnnnnnactctacacctatatccgggtatccctcccttctaccacaaaaat

SEQ ID NO: 297817 - DNA, 400 bp, Homo Sapiens
cccggaaattcggccattttggccggaattttccccagcaccatttaacctgttgttggcttaaccaccagggtttcttagcccagcaaatttgcctcataaattaatggatcacccaatgggtaattttaaatccagccagaagcttccatttggggtccacagggcaatgtttagatgttggcccagcttcccatggccggtgcctggtaattggtttccttttggttaagccacatcccttgagggtttggttaatgctaatggctccggtaatttaattaactggactttgccaggcctaattcccaatgcatgggccagtcattttcaaatccacactgtagttaacagagaaaggcagtggttaccagattttaaggggaaagttcaaagtttt

SEQ ID NO: 297818 - DNA, 443 bp, Homo Sapiens
ccgggaaattcggcctttatggccggaaccagagtttttggttatggaagttgggaaaaccacccttattttaaaatctgattctgagaaggagaaggcttggtttaataagttaagcccatttaatccgggaaatattccttaatttaagcatggttccatattggatggaaggctttaatttggttaccagagcaaattggattaattccttgattaaccggttggattacctggttactaagggcaggattaggaggtaccagattctttcttataaggggcctggttctgatccttaattcggaatgggactattaatttaccattggttatttaattggggggccttaattggagggtttttaatggaaaagccttctaatatctgaggatggaataaatccaatcccttacttgccaattcaatcttccttgttgaa

SEQ ID NO: 297819 - DNA, 407 bp, Homo Sapiens
gggtccccggaaattcggccattatggccggttggttttaaaggtttttgccaggtttttggaatttaaacctggattagccggatttaaggtttttattaaaacggggcattccgatttatgcattcccattccattggtggttcccgagggtcctagggaagggcacttttttgaagctggggggttaatcctatgtattaaagggttaactttaaaaggaggctgttgccatcctttggggaggctgtttttggttaggggcagtagggcctccgtttcctagggataaggctccaggtttatgaccggttaaatcagcattcattttaggaaaggcacctttagtttcaaggatccttttaagcttttaaatggaccatttaacctattcctttaaataggac

SEQ ID NO: 297820 - DNA, 416 bp, Homo Sapiens
cagataattttaagctaagggcctgtgggttaggccggttctttcctttccagccggggacctttgccgaaaccatgctcggccggatcatgggccaggccaggaggcatccgacctggatcccctttttggaattaatgggaactggagctacgggagcaccactgaatctttggcgtctggcatggttaaatccaaaggttggtgggaccagaattaccccaaagccttggaccaaacggggtcccaaggatcattccaggttttactcagggaagggggataccagcaggctgaaggaaggttttccagaggccacatccgaccaattttccacttaaccaggaaatattcctcctttaaaggcatgaaatcatgttgaagacctttatgggaacctctatggaagattccaa

SEQ ID NO: 297821 - DNA, 342 bp, Homo Sapiens
cattagtaattaataatttaattaatcgagtgctttcagcagaccaggtctctaataggttctttatggaaattattgattcatggaaccctaacagcaatcttatgtggtaggtaccactgtttctaagatgaaggaattgaggcacagaaaagttcttgcctgagtttgtgcagctagggaatggcaaagccaggattctggccctagaacacacattcttaacactatgttgctctgggtcagttgagaatgtaacataggcggtctgcttcctcccatccacctaaggtcttagcataaagcatatgtcatatagcattaaagctgtcattaaaaggt

SEQ ID NO: 297822 - DNA, 100 bp, Homo Sapiens
gtgtgggaccccggaaattcggccataatgcccggaaattttaggaataattgggccggataaggtttaccttaaaataaaggccaatggaaagggctgg

SEQ ID NO: 297823 - DNA, 207 bp, Homo Sapiens
gaaattcggccataatggccgggaaattcaatcggattagccggtgggttggaagctaagttattccaattggatggtaaggtccagttttggaaatgggccgtttccgattaccaaaggtaaaatggcagttaatagcggtggcaacttttaaaggggtaataatggcccttgcatggggggaattaaaggtttaaccactggggt

SEQ ID NO: 297824 - DNA, 454 bp, Homo Sapiens
ttcggccattatggccgggaatctacatgcaatattaactaaatcagatagcttttacagtttcacatgtgtacataggttccttcccggtcctttccatatccattagttattgaactttctaaactggcattgaaacattacaacaatgttttgttgcaccaattttataaacttaagcagtgcaatacgtgttacttttctgaggcaaaccaaaggtaaatttctcaaggttcttgctgccttctttagcagcatttgatggaagatcttttatacattggtaatagataaaattaaaccagattgcaaatccttttttaaaatcctaaaccatgtaccaagtttttggtccaaattatgtaggataagttaaacttaaattgcattctattaaccaatatgagtgtatttctgtaagcatagttatgttgaaataaagttttaaaaacct

SEQ ID NO: 297825 - DNA, 343 bp, Homo Sapiens
tgatgtaggttgaaaagcagcagcctcgaagcctcatgccaactctgggcagcagcagcctgtggtttcctggaagatggatgggcagagaatagggaaggaagatcatgcttttccctactaacttctgtaactgcatgtatgatacattattgcagaggtaagagatagtttaatggatttttaaaaacaaattactataatttatctgatgttctctagttgcattttgctgaaatgtagtgctgttctaaattctgtaaattgattgctgttgaattatctttctgttgagaagagtctattcatgcatcctgaccttaataaatactatgttcagttt

SEQ ID NO: 297826 - DNA, 387 bp, Homo Sapiens
atacaagagcgatgcacaagaatgacttagagaattatgtaatgctggccaagcaatgtaaaggatgcaccattttgggagaaaacccgtcaagttgaaatcactgggcgtatgtgaagaatataggcttaaacggtgctactgaggtgaaacatgaggttcccatgaagacccagtgagatactcagggactcaagtttgaatcaccttgggagaataaaccaggccctgtgccccctgtgcccccactaaaaatcaactgattgccaactcaatcctctagactcaggaaatatgaaaataagcactttgattaaagttgaaagatctatgaagaaggtttaaatataatattcctttaagtattgtaattattatttttgcata

SEQ ID NO: 297827 - DNA, 410 bp, Homo Sapiens
ggccttaaggcccgggaaccgccgaagccggaagggacgttgccgtttccttgaggaaaagtgagggttccaactttccggctaatctggaaggtgttggccccggccagtcaaaatgccagagaaaaaccagccggtggactaaggccggttagaggaagacgaccagtttgaaaagttccctgccgaaaactggcctgctttaaatgaagatgaagatgcccatgtttggaaggataatgggaatgatgccattgtaaaggatgacttctttaataagttccgacctgacctagggaaccttggttataagagggagacttcttagcatccaaaagaagtgttgaagtaccctaaactggaccggcttaatccattctaggccagagaccccagaatgggacactaaa

SEQ ID NO: 297828 - DNA, 457 bp, Homo Sapiens
aattcggcctttatggccggaagggaaaccatttttattacccagttttgggaatggcagaccaagggctggtttgggtggtttttcttttttaggaaaaccttgcctaaaaggttaacctggcaaaaggcttgtattgggaatttcctacgttttagtcgagtattttaaagccaaattttaaatttttttcaaattgggagtttaggatttagctgtaaagggggtttaaattcctttagaggcctcataaaaggagacttttaatatgttaaggtttattaaacctgaaccaggattattttccatttgaaattttggaatagtttaaaagggcttccgaattcttggttggaattgggccattgcaaaactttagggcagagtttatatttagctaacctgtaatgttaattaagaaaggcttaaatcttcaattcttaatattggtaattct

SEQ ID NO: 297829 - DNA, 252 bp, Homo Sapiens
cggaaattcggccattatggccggaaggatggcttaatttttaaattaatggcctaaccaattttaccatccgatttagggttccctttttaacaaaattttggccaacattggtaatctttggcctggctgataatacccattttaaggggggtaaggggaaatctaatggggcttttaattggaattcccctgataattaggaaggttgagtccctttttaggaccggtttttaatctgggggtcttttg

SEQ ID NO: 297830 - DNA, 373 bp, Homo Sapiens
caatttggaatttaaaaaggtaacccattttaacttaagttaatccaaaagcggccggaaaaccggtggactgaaaccggcctggggttgggggcccttgggggacccgttgttttttgggaaaggggggacctgaagggacattttttcaacatttaacccaagtggggtaaatacttaaggtttgtttccaaaacccagaaggttttccgggaccacaggtttaacacctttttggattcaaagttggaatggaattaatagttaaggggaatcgggaacttggctggtggaataaggcactttaaaccagggaaccgtttaaggccagcatgggggttaatgcctgaaatccaagcatttgggaaggtta

SEQ ID NO: 297831 - DNA, 301 bp, Homo Sapiens
attgcaaatgtgaataattttttttctgttaataactaacattattcctcaataatctgtttagactgactctcacgctcacgaacattgctctttgttatctattgatggattttatgattagcccataaaatggtatttttagtagtatatattggcaagtaaatcttcctgatgtgactgctgataataggtactagccgatttggacgtgtattgttataaatttcatgctgttagtaaaagatgaaaagccaagggaagaataaaaagaaatccttttaaataaaacaagataact

SEQ ID NO: 297832 - DNA, 421 bp, Homo Sapiens
cggaaattcggccattatggccgggggccagaccggggggccgtaccggaggcaggttgaagccgttgccgtggccttgaccgggggtaacaagcgtgggttggccggccagaggattttgaaaaggcaaagcgattgggttaaggaaaagcgccaaaatgacgggttttttgttgccgcccgaaggcaaagggactggaaaataatgcagaaaaagcagaaccttttggcctttggcttgggtgcttgaagccagtccaacaaggttggggtttcttcctgtagggttaacaggtccaagaaccgttggaattcctttggccttgagtttgaacgggttccctttggggcttccttcccttaaggaagcctttttccccttgggccattcccggggttaagggggttaccctttccaagt

SEQ ID NO: 297833 - DNA, 441 bp, Homo Sapiens
ggaaattcggccttattggccggggaccttaccggtatttaaggccggttttggtttccaaatggcggggcttaaaatggccttggcttaaatccaatttttaggaggtggaatggttagtggggttttcctggatttttaccagggaattattcaggaattttttctttaggttaatctgcaaggccagcttgggtcctgtaaagggtttttaacagcatttccggttaaccggaaaccggtattcagggaaacctaagtcccagaccagggattttttggaaaattatggccggccttaattcaggtcagccttctgggtagaagcagttttaatcccccaattgcccaatggtaattttggaccacctaatttttcttccggaaggatcctgttaaaaggcttgcactttcaatggattggccactggttcctggttc

SEQ ID NO: 297834 - DNA, 655 bp, Homo Sapiens
  misc_feature (583)..(583): n is a, c, g, or t
ttgctgaattttgtgaaattttactttttccaagtgtttccaactttaaaaagagaagtgaagacaaataggttggaatggtgaagacaaatggattggaatttcacaggctgtgaataattccttaggatctggcaaaccgtgaagtcttatttgaagaccttatctcctgagagttcttttggagtaggaaaaagaaccctatttgaaatagaccgtttttctcttgtttttaatctgtttaatatttctgatttttaagcagctttcaaaacaagtgtggtggaaaaaaagaaatagtagtaggaagatgtttagggcagcagaactctgggtctaaataagtacatgttcccacttgttgccgatttttgagagtactagggccatctttctcaattttgtattatttgtgtgcatgtttatatcaaagatgcccattttgttaaaatgctatttcctttattaccttggaaactgactcagcctcatgttgctcctaattagtgtttaaggctcccatgagttgcagataaaatgatttattttaacaagtagaaggaggtgattcaccttttggatngtaaatatatgaaaatgtctacaaggtctttatctgctttctgtcagcatttatattaaaggataaataatc

SEQ ID NO: 297835 - DNA, 174 bp, Homo Sapiens
ttgcggcccccctggcccaatgaaatttaaacccaaaaaagtttaataaatgggcccaaatttaggcttaattggcaaaatcgccctaaaagggggcgtaataaaaataaatggccggcttttaaaaaactttgaactggaaaaaccctgggtttacccaaataaaacgccttt

SEQ ID NO: 297836 - DNA, 373 bp, Homo Sapiens
ttggaatggtggtttcgttttaaggaataagcatgttggggaaagatgatgaaaatgtactactgaaagttatacacttccataggcaaatgggattatgtgttgaagcatagtcctcatgcttaataaactgactgaaatcgtagaaattacacctaggaactgagctaggccaaattgccatttttgtttagagagttttggaggtagtagtgaggggacagagccttcatcaaagttgggtatttcaatgtgccaagtttgggtgaactaggttcggtttgcctctttcataacaatgtaaacacaatggtgtagttaattaaattctgggtggataggagcaggactgattactatgtcttgcccttcg

SEQ ID NO: 297837 - DNA, 419 bp, Homo Sapiens
ggaaattcggccattatggccggattgagccaggctggggaggtaccgtttgcggttgcccaccgccctaaattaatggaagggggggttgagttggcctttaagggggacttaagaaaggctttggaaaaactttttggatatcttggaaaatgtggcccaccaaggggttgttgaaacctaatggatttaaaggcctttggataagccttttgttaacattttggggaaggcctgaagtttttagttggggattatggccagagttttttattacctaaggcaaatttaattttttggtcctagaaaaaaatttgaccatttaagttctgggttttaaaatggttatttcagaattagttaaaggccttaattaacctaattaatagctttggccatttggccaggggtgtcctccc

SEQ ID NO: 297838 - DNA, 224 bp, Homo Sapiens
  misc_feature (116)..(155): n is a, c, g, or t
agagaggattaaaatattccaggagggggtccgtaggtaacgtgcaaccgtttggccatggccaataaggaactggggcatcttaaaaggtcggggtttgagggttgaggttgaannnnnnnnnnnnnnnnnnnnnnnnnnnnnnnnnnnnnnnnacctgggggttttaacttggttttaaaacttacaactggaaggggaccgattccattaaaggttttttt

SEQ ID NO: 297839 - DNA, 515 bp, Homo Sapiens
cacttgtggcccccttggcccaaaccgtttttaactggggccagttttttcctggggcccaattttggggtcatttggcccattcccccttttgggggggattttaaaattccagggccggtgttttaaaaccgcgggactgggaaaaccctgggggtcccccatttaaacccctttggaaaaattccccttttgcccgggggggtaattgcaaaaggcccccacccggaggccctttccaaatggtggccacccctaatgggaaagggaaatttgagggggttaattttggcgaaaattcccggcaaatttttgttaaactcccccattttttaccccaagggccgaaatttggaaaacccctttattataaaaagaatttccccgtatagggttcggcggtttctccaatttggacccaagggcccctttttaaaagccggggctcttcaacgctaaagggcaaaaaccgcttttttagggcggtggcccctctcgtggaccccttcccctta

SEQ ID NO: 297840 - DNA, 369 bp, Homo Sapiens
agggggttttttaaacctttaggtgggaattttaatgaggccactgggtaattggaagaatggggtgaaatggccatgatttaaatcccttttagggcctgttaattggatggaaaggtttccaggtggttaaaacttccccaggtcagtttccttttaattcctgtttaattggggttaataggcttacggaagagcaccgtggttaaaaggctacggggagcttcctgtccggggttagaaggtacctagttaaaggttcatttttgagacccaattttaatatttccccattattgggaaggaaattcatatgtccttgaaccttttaggccaaacccaaccaggtaaggagggacctgttgcaaa

SEQ ID NO: 297841 - DNA, 372 bp, Homo Sapiens
ataccagggaacttttggaagggtcaggttccttaggctggggaattaatccagaggtggatttatattttaaattctttacggattttcccgaaaggaagttttggggaatttattggaaaatggggtttttaagggttacgttttccagatggagatgatggttgggccaggacagttgaataatactatgggcaaggtttgcaactgaggttaaatagggggcaaggttcctggtaaaggagcagtagggtttagaattttaatattaaaaggttaaactttaataactgttaaatggtggaggccttttagtggttaagattattaatgcccaaggggtattcttttttaaatatttaaaggttccgg

SEQ ID NO: 297842 - DNA, 160 bp, Homo Sapiens
ggaaattcggcctttatggccggaatggtggtaataatttggaattaggattaagggttaaccattcttaattggtttggagggctggattttaattggtaaaaatggttaattttcattccttctttaatttaaaattaaggttaatttttaaaaggtc

SEQ ID NO: 297843 - DNA, 473 bp, Homo Sapiens
aaggtaaagatctgtctttgtaaccagcgatcatttttacgaaatcaacatggggaactattaaatcagggataattttaaaagatataggggacatccaatgaaccttactacgacattttaaaccccaaatacagaaaatctgttgactatgaaaatacccaaaaaattgccaactattacaactgtcgaacaaaataatactcattacacacttaacccgtagccaaacttaaaagtgacccgagtctctggtcaccatttcctcacaacttcatcagtctcttacccaaatacatcttgccattaataatgtcttccatttagggctaaccgttgaatatattatccaccatcctactaccaacgggatgaaccactctacccaaatgtcctctccaaacacgagttctaatctgacaattgcgagacataaatatcacttgccaaatatctatcctatcataactcag

SEQ ID NO: 297844 - DNA, 371 bp, Homo Sapiens
aaccgggccagtacctttttatggaggtatggccatggggttaaatcaaggccttggccttggcgggccattcagggaaaccatcccattaaacctttattaaggaccaatttaattaatccggtggaggaaggttccgggccactattaatttcaggagggctaattaatcctgaacctaattaaattcggagccttaattttaatcggaattttaccttttttcagataaaccattaattaagcggccaggtcaaaccagacctttggttgggtggccggattaacctgagggaaccaccatttcggtttccatataataaggcccgggtcccagcccttaaattggcattaaccatttgggaattaaa

SEQ ID NO: 297845 - DNA, 439 bp, Homo Sapiens
aattcggccataagggccggggcctttggaggccgggccaaaagggtttccaaaggctgccggatcccggttctttggattcaaaggctttaaggctcttcttcgggccggaattcaaaagccggttgaaccccaagccggccaaggccgggtagaacaatccaaactggaaccatatggaccaaggggtttaaaaccatggcaatgcagaagttgaaattaacatcctaaaggcagaaaagaaccgacttgccaggcaaattttaagaattaatttaaagaacggaaaattggccagaaagcgattagaacggtttggaccggattttcaaattattaggaattccttagggccctgggattatcagttaaggaccatcaaactcattaggaggtccagacctgcttattgggggacctaaagggtccagaccactat

SEQ ID NO: 297846 - DNA, 440 bp, Homo Sapiens
ccattatggccggccaggtagggattggtccattaatttaatcggcaaaggatattaaatccttggtaataataacggtccaaaagtggggcctatgaataatcggaccagcctatggccccagtaaaggtaaggatccaggaaccacagtttgtaaatgaccaactttccttggttaagttttagttttagcaaccaccacaaatatgttttaggtaccatcgttcaggtttaagtaccatcgttcaagtggataatctctggataggctctgttgttgccattttgcagggatccaccagttccattcatagattaaacctttaattttaactaatctgggccataagtggccattctttaacattccacatgatttaaaggcctacgtttggaaattttcctttcctaaatggcccagagttatcagccggattata

SEQ ID NO: 297847 - DNA, 409 bp, Homo Sapiens
acccgggaaattgggccattagggccggaattaagggttaattaaaaggaccttttccggggggaggggcggttttttaaagggagttggaagcctttttaaaactataatccaagggaagcggagtcctaagggaccagttactcattagggcattccatattaatgggctttttctttaaagccttaatcttttttttggttaaattccggaaccgaaaataacttaagggaaattaaaaggctggaattggaccttaatccaggatacttttggaggttcctttaaattttggaaggatgaacggtttcttttaaataaataaaaaccaattaatactttcctttggattggggccaagaggttggaccatgagggcttggaggggaatggggaataggggatttt

SEQ ID NO: 297848 - DNA, 458 bp, Homo Sapiens
atttgggccttattggccggccggtttattaggattcaagggtggtttaaaattgggaaaacggcctttggattattccttagaatttggcggttaaggcaaggagggcccattgttatttccaactttttaaaggaattgggagcacccccaaaggggttaaattacccattttaattggccccagtccttaggccacccccttggtggttgttataacttttaacttcctttaaccccttaatttgaggttgagtttaatgacagtttgtatttgagggaaggttggaagttttaagcttaaatcctggttaagggttccatggaattagggaattcaattaatttaagccattagaaaaggtttagattaccgaaggtttaactgttggggtttaaggaccagtttttttaaggatcagccttggaactgtttcttttaaagcctggtggaagtt

SEQ ID NO: 297849 - DNA, 227 bp, Homo Sapiens
tgggaaggaaaaataaatttcacctaagaaattgaaatgttgttcttgcgcctcgtaaaaggttgaagttggagtgtatactccccaaagtctaggaattcctaagccaaggttgaaacatcagtattggtcccagagtgatgacactgctatggtagccagccagagcaaatgcagaaccacactggaagaagtgtgccacaacttgggcttcaggggattcttac

SEQ ID NO: 297850 - DNA, 182 bp, Homo Sapiens
attttagaatatttaattatgtttttactagctctggttcatttacgcctcactgaggtggtactccagaagaagaaatctaatggagcaatgaatgatagccaagatggggtggggtgtccgagtggttacccccgggtacagacgataaaggagtacactgtctatacgattgccattta

SEQ ID NO: 297851 - DNA, 452 bp, Homo Sapiens
  misc_feature (346)..(346): n is a, c, g, or t
ccttgtggccccctttggcccggttttttttaaattggttcaggttttggcaaggcggtccgatattgtgggcgcttaattgtggcgctattttggcctctaatgtggggcctctatttgtagaattcctattggccacttcttttgccacggttttaaccgggaaaaccctgggaatccccgagttatcccccttgtgaacactttcctttttgcccctttgggaaattcggaaaagccccgaacggtccgccttttaaaacttttgccaactttgatggcccctggaaactgaagggcttttttttgggtaaaatttggggatactttttggtaaattgggcgnatttctaacccattgtgccccaattgggcaaattccgttaaaactcctttgaattccccggattgcgccagaatggggttccagtttgaaccaggggcccctttta

SEQ ID NO: 297852 - DNA, 574 bp, Homo Sapiens
  misc_feature (129)..(191): n is a, c, g, or t
  misc_feature (397)..(533): n is a, c, g, or t
cggttgggtgtgttttttttgcggtgtgggccgtgtttttgctctggtagtgggtcgtttttcccccgcaatttatttgtgttggcgccttattttgcccccgggtctttcctttttttgttcccgctnnnnnnnnnnnnnnnnnnnnnnnnnnnnnnnnnnnnnnnnnnnnnnnnnnnnnnnnnnnnnnnaaggcggggttttttggggtggtttagagggaatcatgttggcgctagcttgtccttgcgagggtggtggggttatccagaaataggggttgagttttattcaacagattcgccggtggtggttttaacggttgtctccctttgggattttactggggttttttggttggaaacgaggggccaaattttgaagagcctgtagcggnnnnnnnnnnnnnnnnnnnnnnnnnnnnnnnnnnnnnnnnnnnnnnnnnnnnnnnnnnnnnnnnnnnnnnnnnnnnnnnnnnnnnnnnnnnnnnnnnnnnnnnnnnnnnnnnnnnnnnnnnnnnnnnnnnnnnnnnnacggggttaattgaaaaaatttaatttaaagtattttattt

SEQ ID NO: 297853 - DNA, 569 bp, Homo Sapiens
  misc_feature (80)..(89): n is a, c, g, or t
  misc_feature (301)..(311): n is a, c, g, or t
gcgccccctaaacgggtttatttcccggccctatgcacagatttcccgggccccaacacaacggcgcccttccccggagnnnnnnnnnngctcccccacaccttccggcttgggctacccatggccctcgctgctccctgcgccaaattggtgccccctcaccactccccgggcacttttcatttttcgggccccgtttttctcccaaaacccccccgcactttccacccgggtaaccccgggttaatccttcccccggggatctgctcaatataactctaccccctctttcgcctttatnnnnnnnnnnnttgcctctcaaactccggcgctcctttcggctcttcttacggcgccccctaaacaccttggcgcatccactgcgcctgcccttcccctcgggcgaaatgtttttccttccccactccccccaactaaccccccgcccgccatatggcgaagccccgcggcctctaactgggggcccaccccccactatattgcgggcgccccttccccgctctcacgtggtaacacctccggccccccgcctattaccacccgcccct

SEQ ID NO: 297854 - DNA, 538 bp, Homo Sapiens
attcattctccatttatagcagtataggaaggagaagggcgagggtcccagcgctggcaaacggggggcacagagctagacccaggcccgggagaaacctcatcgccccaccgaccttcacaagactagatcaaagtttcagcaacaaaaagcagacacacgatcccccgccctacgcactgtgtttccccacaccctttatacactctatggcaaggaacagacactccgtcaaaactcgctcacagccctccgtcagaatatcacgccactgcaacagcggcaaccccctacactccacctcctccaaccgtcatataccccacgacaaacacttctcaaaggtcagcacaggacccggagcaacagcccgctcgctacactcggaaacccacacaggctcgtaacaccaccaccttgtcgcattccatccttcccgaaaccgggaccatccaccgcgccccccaccaactcttcttcaccgtaacaaaacagtccaggactctcctggaacactagctaactggtaacagtatac

SEQ ID NO: 297855 - DNA, 548 bp, Homo Sapiens
  misc_feature (222)..(245): n is a, c, g, or t
aagtgaagttgcaaggaagtgtgtggaaatagtgggaggatgagggggcaatgggaaagagaggttagaaaaagaagagtgggggagtaggaagaggctttatatttgtgaaggcgggtggttggccggacgggtgagagtgggaagagtgcgaccgtgataatagttgaggatggtgaacgggaaaatttgtgcgcgagtgaggagggggaggaaatgaannnnnnnnnnnnnnnnnnnnnnnnaagtggtagcgagacggaagtgcggcggtagacattggcagtggtgcgggaagggagaggagagaagtgcaagtgaggtggatgagttagtccggttgaggataggggagtagggatactttttagagcgaaggggcgttcaggttttgataaggaaggtcctacttgacagatgttattttcttgggcaaagtaagccaacccttgtgttaagtaaaatgttcttattcgtgtgcaccgcttcgaatatttggattggggaccgaagtaaaaataaatacaaactacttccatttcgcgttt

SEQ ID NO: 297856 - DNA, 639 bp, Homo Sapiens
  misc_feature (402)..(436): n is a, c, g, or t
gcacacggtttgattggggtgtggttccctctttgggccccccggggctttctgttttagtgttcgggcggggttttgttgtgggaacttttaagcggtatacggttttgtccaggagatcatttttggccgtgtttcgccaacttattgtgggtctagtttaaatttccctggctggccgtgactttctatgccagggggtggagctttattccagagatatcgggtgagttttattttgaccagttccccggtttgaggttttacccgggtatttttgttgggaatttcggtggcggttgttgggattgtttccggggccgaaaaatgttgaaagtactttaccacttgtgacgggttatccattttgcacagggaacacctgtgtccggggttgctccnnnnnnnnnnnnnnnnnnnnnnnnnnnnnnnnnnnctcgggaagcgcccccttgtgttggtacccggggattcgccctttatgtccgtgccatgaaaagccgtctctttgctcattttccgcaggcccagttcaggggatttgggtgaaagcattttagaagctgggggaggccggatcttttgggccatcctgattagtgccctgtgtgtacctcctaataaactcacctactcacc

SEQ ID NO: 297857 - DNA, 241 bp, Homo Sapiens
  misc_feature (85)..(110): n is a, c, g, or t
cgaaataggagaagagaatataggaggaataggagagagggatgaagaagaagtgaagagtgataaatggtaggagagatgatannnnnnnnnnnnnnnnnnnnnnnnnngagatgggagggaagagatatgtatataaagagaaggaagagataggaatatgaaaatataaggatgagaggttgggagaatgggttttaaggaaaaataaatgagagggaagaaaggtagtaatgtgaaa

SEQ ID NO: 297858 - DNA, 658 bp, Homo Sapiens
  misc_feature (290)..(361): n is a, c, g, or t
  misc_feature (476)..(487): n is a, c, g, or t
  misc_feature (503)..(514): n is a, c, g, or t
  misc_feature (535)..(558): n is a, c, g, or t
ggggagtcatcggagcgttatgtggggttgggtggggctcgtttagatagccgcgggggtgtcgcgtggtgtgtcgctgatgggtggtggtgtggtggtttttgggagtgtggttgccgtttgtctgtggaggtggcctctggtgtgaggtttgagccgctgagtcgtttgggtttaagatggagcaattgcgtgggcgggagctttggtgtgggggacgcgggtggggggcgcgcagagcatggtttgttttggggagcggatggtgtggatggaggtttgatcgtggnnnnnnnnnnnnnnnnnnnnnnnnnnnnnnnnnnnnnnnnnnnnnnnnnnnnnnnnnnnnnnnnnnnnnnnncacgtgatttgtggggttctttggctgcgtcgcctgggcgggggcaaggatgtccttgtgttgtacggtggggaccatttcgcccgtggagccggatattttttcggggggtggnnnnnnnnnnnngtggtacagggctttnnnnnnnnnnnncggctcgcgctcttttggacnnnnnnnnnnnnnnnnnnnnnnnnccctcgcccccgctgtttcggctctcgccgggttctcggcccccctctgagaggggcctcccggacacggagaaaaaaagtataacaagagtgtgaatat

SEQ ID NO: 297859 - DNA, 495 bp, Homo Sapiens
  misc_feature (78)..(92): n is a, c, g, or t
  misc_feature (96)..(104): n is a, c, g, or t
  misc_feature (121)..(195): n is a, c, g, or t
  misc_feature (245)..(253): n is a, c, g, or t
  misc_feature (294)..(303): n is a, c, g, or t
  misc_feature (318)..(386): n is a, c, g, or t
agtttttcccccggaggacagcgtgtcgccagttttgcgcccgccttttttgggcgcccaattagaaatccgaggggnnnnnnnnnnnnnnncgannnnnnnnncgtatacccaagatacnnnnnnnnnnnnnnnnnnnnnnnnnnnnnnnnnnnnnnnnnnnnnnnnnnnnnnnnnnnnnnnnnnnnnnnnnnntttgtgggggaaaccgcgggcccaaaaaataagagggtctttgccgtgtnnnnnnnnnccagttttttccccggggacgcgtttttgccttattttcgnnnnnnnnnngggttggggggaggnnnnnnnnnnnnnnnnnnnnnnnnnnnnnnnnnnnnnnnnnnnnnnnnnnnnnnnnnnnnnnnnnnnnnctggtaaatttaggggccttttgcccttttttttggaaatgggtttttgggcgccaggttttcccctaggggcccctttcgattgttcctttttttccgaaaaacctgg

SEQ ID NO: 297860 - DNA, 608 bp, Homo Sapiens
  misc_feature (57)..(67): n is a, c, g, or t
  misc_feature (470)..(494): n is a, c, g, or t
gaaaaagaaattgcgccccccattttgtaaaaatggttaaacccattttttcttccnnnnnnnnnnnccgggcataggaccagttttccctccaaatatatgggttttgaataaaaggaaagttgttttaatccagtattggccattatccagttttttaatccccccataagttttttccattattaatttttgcgcttggcatatttattcccttaggcttttaacccctaacaatttttacttaaaagaataaaactatgctaaataaattgtattgtatatggaatatgcctgcccttataagaaacagctggggatacccttatttcaagtaataaatctgaattctattagtttaaaaattgtaaaattcaagttaaatgacgtgtatgatatataagctgaacatattttctaaagcccctaatttagttgtgttaatttttcaaggtgatggatcaacagcnnnnnnnnnnnnnnnnnnnnnnnnncaatgggtttacattgtataaattgagctttttgcccccaaattcttgatttgtagttgtttggcaggatttttctttgtgaaaaaaacccttctataaaaaatatgatgggcc

SEQ ID NO: 297861 - DNA, 537 bp, Homo Sapiens
atgggtgccccgcgtggtgtggggtgtgcgcccctcgtgcggggccccgcggcgcgcccccgtatgggctggcgtctgggtggggtgggcgcggttgggcggcgtccgcccatagttccgcgcgtgcccggtgttcgccgcgggcttgcgcccggtcccttgtggtgggcccttggcggctcccgcgcgcgcgctccgtggccgtcgccgaggcgcgggggtgggcgcggaagtcgcgttcgcgtggttgtccccggtggccgctgcgcggggttcccgcgtgttgcccgtcgggctcttcgcgcggtgtgttggcgtagagcacggcgccgtgttttacgagttctccgcggtttgcatgcgtcccgcatgttcgcccgggcccccggttgcccgggtgtccgtccacgcgcgctctttgcgggctgtttttttgtttgtccccggtgccgtgtcttccgtgggcgtctcccctagtgggcccgttgggcccggggttctcttcccctttctacccccccaatctgaggggcaccc

SEQ ID NO: 297862 - DNA, 628 bp, Homo Sapiens
cccctcccatgctttttaatccaggaggtgaaatccgccaaaattaacaagccaacaaagttttatgttgtggccctgtctccctcccaggtattaaagtaacccttttaggactggtagctaagtaagggccttatgtatgcttggatgtgatttttagcactcccttaaccttgggtccccctcacttatttgggtattaagtaaaacacaggaattttctctttaaattcatgaacaagttctaggtcctaaagctacttacctcaaggcataagttgactctcagagtgaagccctcattcattcctcattagataggagattagctctgtgtctctctaaagtctgtgtgaatttgagcataactgggatgcagaaacccccattctagaggatcagaactatacacaagatgtaaaaagtatggagtgtttggctgtaatttatggattcctcatacttagggaagaatataatgtttcatatgagaataaatagagataatgtgtatttagccaaaagttttggcagtctgataaattattcctgatcaactagaattagaactcatttctgcaaggtatagtatttaatgtagtatgtcatgatttgtccctctctcccc

SEQ ID NO: 297863 - DNA, 593 bp, Homo Sapiens
  misc_feature (66)..(77): n is a, c, g, or t
  misc_feature (356)..(366): n is a, c, g, or t
cggtttttttccgggataacggttttgccctgtttccgcctgcgcccgggattgggcgggctttannnnnnnnnnnnggggagggtcccttttttttgttccgcgattttgggcatttgtgggggggcgagaacccggggtaatgaacctttgttgggcgccctctccctgttttccaatgagtgttttttggacctttttgttttccccacttttgaacctttaagaattttgtttggtcacggtaaaggaccttttggggagaggttggtttcaggttattccccccgtgtggtggtttgggaagggcttttgtgaaagggtcaaagtcccagagtttagggccggggccaggnnnnnnnnnnnaaagttaagggggccgttgcccccccttttcttgaagggtggaggggaccgggttaactttttaggatttttgttgggacttgggagccgcccttccccccatttttggttccgatccgtttttttccaaccccaggggggctttagaacacccctgggccagtcctaaggtgcctgttcctaccccctttttgctgcaataaaggtggggtggctccccataaatt

SEQ ID NO: 297864 - DNA, 178 bp, Homo Sapiens
  misc_feature (120)..(129): n is a, c, g, or t
ggtccacaataaaaggaggggggggcccaactgtgttggggaagtacagagagggcgccgggggttattatttattcacgccttattggagggcgaggtgggacaaagactttccccgcnnnnnnnnnntgtttagtgtccgccccattgggggggcccaagggaagcaccggagcgc

SEQ ID NO: 297865 - DNA, 609 bp, Homo Sapiens
  misc_feature (515)..(528): n is a, c, g, or t
  misc_feature (544)..(552): n is a, c, g, or t
gggtgttccgccccctttaacttaccctcgggatttttttcctccctgcggtggggcggagactttatttaaaaaccgccaagaggggggacctttttaggggtatccggcccttttggcggccctttttgcggcaatttgttttttgggggactccccggattcctgggatatcccgggtaccccccttttagtagggaaaacccgcttcgcccccctgaaggacctggccctccttgtcagttatcgaagaaccgaaaaagcgaccaatttacaaacggcctttcccagcgggttggccgatttattaatacagctggcacgttgggtttttcgtttgtaaagcgggcagtaagggcttcccaattaatgtgggttaagtcacccattaggccccccggggttttacctttattcttagggctcttatgttttttggttttttgagcgggcacctattttgtgcgggagggtctatgcccattatttcccccagctcccagttttggccgggnnnnnnnnnnnnnnctcgggaagcgccccnnnnnnnnngttcccgggaattcgccccttttggccgggaatctaatggtaaatttttttccccag

SEQ ID NO: 297866 - DNA, 610 bp, Homo Sapiens
  misc_feature (550)..(558): n is a, c, g, or t
agatttctttgggtaatgggcggggttgctcttcctcgaaagggggactcttggcgttgggcccttttattgttccagccctggtattgtctcataagtggagacagctgttcccttgggaatgaatggcccagttccgcttccttttcccctgggggacctgcacttctttccaaaagccactccctcttctcggcggtgacccccagtatgtctccaagtgttccccttgttgtagagtattaaaatccggatatgggacacttaagatcctacttggctcccaaggtctggggttaaggaggatcttaggcgttcttaaaattcgagaaaattgaactaagctcttttagacctgcttctcagatgccagcatatacttgagtcttttctggcccccaatttgtacctctaagtacttatgtaccttgtgtcttctgtaaataccccctttttttctcgcgttctgcagtttgttttaggaataaagtcccaagtcaggtctggtctagttaacctagaagtatttttgtctcttaggaagccgtgnnnnnnnnngatccaaagggtcttgcctctaaatgcagttttaaaaaatgtttataaaatt

SEQ ID NO: 297867 - DNA, 156 bp, Homo Sapiens
gggaaataagacctgaaaataaaaagggtttaaatataaagtgttcttaagtcaaataaaaggccaagttgaaagtttctaaaaccaataatttaagagctggtatcttcttgacttacctttataaaagccccagttctttaatctataaaataa

SEQ ID NO: 297868 - DNA, 378 bp, Homo Sapiens
  misc_feature (165)..(220): n is a, c, g, or t
  misc_feature (258)..(267): n is a, c, g, or t
cggcggtttttaaaacaacgggggccccagagtttcccccccgtaaaggcgggcggggtgggcgcccccacaaaatggggagtggcgccccccttaggcgcgcccgcggggtttccccttttttcccccggcgcgtttttgggtgggaatgtgggcggggaaccnnnnnnnnnnnnnnnnnnnnnnnnnnnnnnnnnnnnnnnnnnnnnnnnnnnnnnnntaaagaaaccccaggggggcttgggttttatttgccannnnnnnnnnctaaacccaaaaaatcggggggggtttttttggccggtccccccggggaggggtttaacggggtttcccggtgggaaaatcccggggggttttgggggaaaaccgggggcc

SEQ ID NO: 297869 - DNA, 488 bp, Homo Sapiens
  misc_feature (92)..(102): n is a, c, g, or t
  misc_feature (302)..(326): n is a, c, g, or t
  misc_feature (328)..(384): n is a, c, g, or t
gggtgttgttaggggaaggattagcgctggattgggggaggcatttttatatagggagaggattcccaagttagttatgctgtggtttggannnnnnnnnnnttgaggcaagtatttcgttagggttttttggcgtattgcctcgggggggtatttgatgggggttttccgtggaaatattagggcgggggttttggttggtagcagggcgcggacaattgtttagtgttttggctttttgtttgtggcggggattttctttcggggggggcctatgcctttgttttggtcaggggccggcnnnnnnnnnnnnnnnnnnnnnnnnncnnnnnnnnnnnnnnnnnnnnnnnnnnnnnnnnnnnnnnnnnnnnnnnnnnnnnnnnnggttcttggttctaattgtgggagggcatgcttgtgtctataggttgtgtagtggatgggcctgtgcttgcgcttgtgttgcgcgttggcttttttgtccggcc

SEQ ID NO: 297870 - DNA, 338 bp, Homo Sapiens
cgtttttaaagcggggtatgttgggcccccattttttttggtgttgtccccccttttgagccccccagggtttacatttttattttcgcggctgtatttttgttgggatttgtggcggggaacctttttccgaggagaacgcttgtttccgtttttccgccggctttttttgggggcccttataatatccagagggtgcttggtttttattccgaagggtggtgggctaaacgcaaaaattcgggggggtgttttttttcccagtccccccgggaaagaatttaccgggttttccccgttggaaattcaaggggggtttttggtttaaacccggggcc

SEQ ID NO: 297871 - DNA, 536 bp, Homo Sapiens
  misc_feature (113)..(185): n is a, c, g, or t
  misc_feature (382)..(479): n is a, c, g, or t
cggttgtgatggggaggggccccttatgggacgagcaggttaaagtttgttgtctgtcgttaattttttgggaattgaggtggcaactttttttggggggggagtgtatggannnnnnnnnnnnnnnnnnnnnnnnnnnnnnnnnnnnnnnnnnnnnnnnnnnnnnnnnnnnnnnnnnnnnnnnnacggaataattttgtgaggtattttttagcatggccccgggttaggagttctttgttgttttccttagaaaatttcagaggtgtttttgttttcgtggcgagggagaagaaaaaacgttcgttttgtttgggggagttgtttgtttccacgagtatgatttttatgcttgttttcccattgaaattttctgggggannnnnnnnnnnnnnnnnnnnnnnnnnnnnnnnnnnnnnnnnnnnnnnnnnnnnnnnnnnnnnnnnnnnnnnnnnnnnnnnnnnnnnnnnnnnnnnnnnggtcggtgttgtataatttttggagggtgattataagaaaagatacatttttgttag

SEQ ID NO: 297872 - DNA, 464 bp, Homo Sapiens
  misc_feature (70)..(124): n is a, c, g, or t
  misc_feature (130)..(138): n is a, c, g, or t
  misc_feature (176)..(186): n is a, c, g, or t
ggtgccgcctccggggagttggttgggtcgcctttgggggcggcgggttttggttattgcgagggcgtgnnnnnnnnnnnnnnnnnnnnnnnnnnnnnnnnnnnnnnnnnnnnnnnnnnnnnnnccgggnnnnnnnnngtgggctaggatgaaggtggtcttgcttgcctctaaannnnnnnnnnntgggacaacggttttgtcgggtgggtgttgtggggtcctccccgggtgagctttgagcggtgtgaccgcggcaaaaggtccgggtgctttggtggcttttcgggggccctaatatttttggctggggaccgtttggggtggaaggtctttgcgtggggccagttttcctttcttagtcctggccagggggcggaacctcggggggctgtttcttgttttttttggaagcgggctccatttcgcgctgtgaatgtattccttcttaattgcgggggggg

SEQ ID NO: 297873 - DNA, 629 bp, Homo Sapiens
  misc_feature (247)..(258): n is a, c, g, or t
cggtgttccaaggggaggggggttcggccaaaaaccgaggaatcgggtgaagtttttttatcccccgtctccccggttaaggcttttaccccgtgtttcccggtggaaaagtccaagggggttttgggtggagccccaagcccccaaaagataaagggcctccaggcgattgtgaggcgggcctccctttctcaccaggaaccacattgtcccttctttccgccaggccccggatctgggccagccnnnnnnnnnnnnctccgggaccgcccccttgttttggggacccgggacttggcccttatgggccggggtaagtggcacgggccaatggggccggttaacctatatgtgtggttttttttcctcccccacccccggtggaggggaattttttaccacggaagaggttgccccaaaacccggggcccgagaatgtagataaagtttcgccctcgttaaaaaggagggggccgcgcctttcccaaaaaaagggaaattaaagttacggatgttgggcttttaataaggaatggattgggaacccaaattttctggggaggacctttaaaggcgtcccggggtggccggttttcccaatttttaaatcaacgggtggttttagcgtg

SEQ ID NO: 297874 - DNA, 516 bp, Homo Sapiens
  misc_feature (202)..(269): n is a, c, g, or t
  misc_feature (368)..(417): n is a, c, g, or t
agtatgaggaatatttttgtagaaaaaaggtttggatttttttgtttgtggagttgtggggtgggcttttggccgaatttttttaaaagagataaatttatgagtaattgttttgagcttttttaatggggtattttgaatatataagttggtaatttttttgtaataggggatgtggtaaatgtgaataataggtgaaaannnnnnnnnnnnnnnnnnnnnnnnnnnnnnnnnnnnnnnnnnnnnnnnnnnnnnnnnnnnnnnnnnnnggttaaaatgtagggaataaaagaatttgatttgagatttgtatgggggagattttatgtagttggaattattaatgatattaaaggaaaagaatatgnnnnnnnnnnnnnnnnnnnnnnnnnnnnnnnnnnnnnnnnnnnnnnnnnnatgagattttgggcatttgggtggggagttattagaaatttatatgggaaggaaattgtggagtgggattttaatagttttgaaagttttggtgaaaaa

SEQ ID NO: 297875 - DNA, 426 bp, Homo Sapiens
  misc_feature (236)..(379): n is a, c, g, or t
ggttgagggtgtttgttttttggaattaggaatttccattttgtgatggatttgtttatgtatatatgccctggtttttggttttgttttagttagatggtgtgttttattttattgttaatgggtgtttgttttgacggagttattgtcgttgttattttgtggttgttcggcgaatatattttatttattttttagtgtataattcataagggttattttgatatgagatgatnnnnnnnnnnnnnnnnnnnnnnnnnnnnnnnnnnnnnnnnnnnnnnnnnnnnnnnnnnnnnnnnnnnnnnnnnnnnnnnnnnnnnnnnnnnnnnnnnnnnnnnnnnnnnnnnnnnnnnnnnnnnnnnnnnnnnnnnnnnnnnnnagaattattttgtaggtggtaattgaaatttgtactattctctgata

SEQ ID NO: 297876 - DNA, 614 bp, Homo Sapiens
  misc_feature (84)..(93): n is a, c, g, or t
aaaatttattttggggcttgttaaagtaaaatttaaaccaggggtaaagtaaaacctaatatataattgggggatttttttatnnnnnnnnnnttttaaaaccctaagcctgaatgagtccataaaggaattaataatatttattaagaggttcaaagacttaccctgtggccattcccaatattaaagattggttagattaggacccagtaaaaagcttaggagaaaccctattgtgctagaggaaaagcagagtatagtatggtttccccttttgtgggaaattatttacccattacttaaatttcttgaatcacaagatccacccgccaatcattttaatcatgtaagtcatcataagtaagaacccagtaccttctattttaaaattgtgatttatgtattttcccaaagaagttgtatattcctgcataatggcccacaaaatgattgggttagtcatattagaaaccaggttaaagaaaactccaatacatcatatcatagcatctaaaactataattaatctgtacttccagcactatatataccactgtttggtaggctgtcaagataacggctgctgaatgatcaaggggaagttaaatgtaagc

SEQ ID NO: 297877 - DNA, 546 bp, Homo Sapiens
  misc_feature (289)..(365): n is a, c, g, or t
  misc_feature (420)..(482): n is a, c, g, or t
cgggcattgtgtggggagggttggagagaagaactgttttggcgggaggacaactttgtagcggtgttgccgccgcctttttggtgtgcctattataatatggcgggcggtccgtgttttgtgcaggagagtgggggccgagcacagaagtttgggcggaagtttattttggcgcgccccccgggtagagagtgtaaccgggttgcccgggtggataattgcggcggggttttgggggaccggggcggcaaagaattgggtagggcctgacctgtttgggtggggggtnnnnnnnnnnnnnnnnnnnnnnnnnnnnnnnnnnnnnnnnnnnnnnnnnnnnnnnnnnnnnnnnnnnnnnnnnnnnngggagggcgccccttttttttggcgcggggttttcggccttttgggggggccccnnnnnnnnnnnnnnnnnnnnnnnnnnnnnnnnnnnnnnnnnnnnnnnnnnnnnnnnnnnnnnnggggggccccctgtcccaaattttgtggcggtatttttggaccccttttataaggttttgtggg

SEQ ID NO: 297878 - DNA, 237 bp, Homo Sapiens
  misc_feature (154)..(186): n is a, c, g, or t
aattcgcaatcctgcgccgcgcttaaaccccatcccttttttgccctcggggctctcttcaagggccccgagaaggctctttccccctcccatggactgaaagcggccaggccaaaactgggcgggcgggccaaggaactaaagggcaattttnnnnnnnnnnnnnnnnnnnnnnnnnnnnnnnnnggcctaaagggccgaattcccgggacccaacaaaagggcgcgcttcccggg

SEQ ID NO: 297879 - DNA, 585 bp, Homo Sapiens
  misc_feature (77)..(77): n is a, c, g, or t
  misc_feature (161)..(172): n is a, c, g, or t
cgggaatcgcgagtgttactgtaaaaattattgtggtgttttgggagcagaggaggggcaaaggagaatgatcgccntggtatgtgtgaagtgggcgaatttttaccaaggagagattatattgttgtgttggggccggaaggatatttgtgccggtttcnnnnnnnnnnnnggagaaagcccatttttttgtgtgaccgaaattttagccatattgtgcgggaataagattctaacccgtgttggtgttggtttttaaatggagaacgcgatttagtttgatctcaaatatttggggagaaaattttgccgccattccgtttgttgttgggccattttttgggcgccttgggtgtgagcctccaagggaatggggtaggaaagagcgggttttttttgggtccgggaagtggtgtctttatgacgttttaagaaagggtttttgtttttaccgattgtattaaaatgttgagctggggaaataagatttgtttagaagcggtcggccggtggataataaaaaggggttggagagaaggaggaaagagttaggaagaaaggggaagaggaaaatataagaagaat

SEQ ID NO: 297880 - DNA, 543 bp, Homo Sapiens
  misc_feature (76)..(88): n is a, c, g, or t
  misc_feature (332)..(372): n is a, c, g, or t
ggtttgggggggcttattttgctcccaaaagaaagtgtttgttctttggcgcgcgggccggaaatgtgttgcgtcnnnnnnnnnnnnngtgggagaagccccttttggtggagcgaagaaattcttcattttgtgggggggacggaaaatattctcttaaagaagatttattttttaatttgggggcggctccctgatgtttttccttttcaccagagggggcgtgggcaatttctccccccaaagggaagcccgggcgccccccagtggtgtgtaaatggggcctcgggggggttgtattacccccccaaaattttgtccccgaatttgtnnnnnnnnnnnnnnnnnnnnnnnnnnnnnnnnnnnnnnnnncccttcccccaaaacccctttggtgggagaagacccccttagaggagagagctcttttcccctggggtacataaaaaaaggcgcccccggtgtttttttgaaggggggccccggcccacaaaggggggtgtagatttttttgctcgcagaaatttttatttccgtttcccc

SEQ ID NO: 297881 - DNA, 543 bp, Homo Sapiens
  misc_feature (449)..(459): n is a, c, g, or t
gtagtaatgattgtaagtgatttgagaggtagtaaaaaaaagaaatgggtaatagagagagtaagggatgttgtgagatggcgggactaaagtgagatagagtatattttgagtagaggtatacaggataggaatataagatatgaaggagttagacgctctttatatggtaatatatagatatttgggtaggggtgaagggttaatatagaagaagggaaaagtttaaaaggtgaaaatagagtgataaaataaatgagagagatatagagaaagtgtgtgtacataaattaaagtagtttatttaaaagttatagtgagagacaggtaagtgaaatatgtgtcagatgataagcacggggtaatatagtgcagaagtataggtgggagagagttaagttaattaaagaattttaatataattattgaaagatgatctaaaagaagannnnnnnnnnntatattaggaggagtggaaaatttataaggggggaatggtgttatgttgttttttcgggaagtgaaaaattgtgaaagaataat

SEQ ID NO: 297882 - DNA, 725 bp, Homo Sapiens
  misc_feature (107)..(181): n is a, c, g, or t
  misc_feature (208)..(473): n is a, c, g, or t
tctagagtcgactgggccgaggcggacgacatgttaccagttcttacgcccatgctcgaggttactaaggtgtggtagaaacttatcctcggctggtcacgggaggnnnnnnnnnnnnnnnnnnnnnnnnnnnnnnnnnnnnnnnnnnnnnnnnnnnnnnnnnnnnnnnnnnnnnnnnnnngcgggcgttcgagccctatagagagtnnnnnnnnnnnnnnnnnnnnnnnnnnnnnnnnnnnnnnnnnnnnnnnnnnnnnnnnnnnnnnnnnnnnnnnnnnnnnnnnnnnnnnnnnnnnnnnnnnnnnnnnnnnnnnnnnnnnnnnnnnnnnnnnnnnnnnnnnnnnnnnnnnnnnnnnnnnnnnnnnnnnnnnnnnnnnnnnnnnnnnnnnnnnnnnnnnnnnnnnnnnnnnnnnnnnnnnnnnnnnnnnnnnnnnnnnnnnnnnnnnnnnnnnnnnnnnnnnnnnnnnnnngccgggccgctgcattaaagaaacccccaaccccccgggagaagcccgtttgcgtattgggcgcttttcaaattctctcttactgaatatctgccaccaaacccttgcggtgggccaagcggtttaacccacttaaagcaggaatttcgttatccccacaaattgggggataccccacggacacaccatttagaaaaaagcctgccaagggccggaacccttaaaagccccccttcctcgggtggtgccacg

SEQ ID NO: 297883 - DNA, 361 bp, Homo Sapiens
ctgtaggtaaacctgcactggtacaaaatgacagaaatatacacagtcatttattatagcattgttatattgttatattgttattatagcattgttgcatgaatacaggattggaaataaatcaaggatctagtaataagggactggttgaataaaccatggaacacacgcaaacacccacacacatatacaaaatagagctgtatatactggtatggagagatatacagaatgtattaagctggtggggtgaagggaaacaatatatagagcagtgtttattgtttgttaccttttgtaggaagagtggaaaagtaagagtatatatttgtattttcttgtatttttgtaaaaaaactgg

SEQ ID NO: 297884 - DNA, 581 bp, Homo Sapiens
  misc_feature (42)..(42): n is a, c, g, or t
aaaaagctcttaagttctttatagtaggaagaaaacaaccanctgcttttcaaattatggggttggtcccatgttttgaaagttaccatcccagttgatctcttaatgagatgtctgtgtacatgagacaaaggtcgataagaacttgagggcttctcatctatcccttctcagttaacaatccagtagcttcagaagacaaatttaggacccttgcctttgtccactgggtgaagcattcatcatcctaaagctgcactggaaacttcctggaggtttgtcttctttttggaggaatgttctgatatgggattcactttgtttttctccttttgctttctggtgcatacatgttttccctcttatgttcatttcttaatcattatctgtaacattttggcttccttttcccgcgctttgatttccaagtatggaattgaaccttcttgtctgaataccattatgtaagtactgacaacatcacatctttttattactgacactgaaggatgtattttttgtgggtaaaaatggggtaaagatgggataggtataattcttattaaacttatttttaatct

SEQ ID NO: 297885 - DNA, 379 bp, Homo Sapiens
  misc_feature (102)..(117): n is a, c, g, or t
  misc_feature (153)..(161): n is a, c, g, or t
  misc_feature (233)..(243): n is a, c, g, or t
  misc_feature (278)..(287): n is a, c, g, or t
ggttgtggggtcctatatacaccatttttttgcgttggggggaatattttttctagaggaaataattagaatgttttctgccgagcacgaatgtggaggggnnnnnnnnnnnnnnnngaaagaggcccatttgtgtggtgcgaggttatggcnnnnnnnnnggaaaaagtgttgtgattattttcgtaggccttcagggcaagttatagagtgaaataagatggtttaaacannnnnnnnnnnccagagaaggcttgggcccccaaaaagggggggannnnnnnnnngaaaagtaaaaaggggggcccacagtgtagggaggggtttttccctcgaggtgtgttttttaaagggagaagacccagtttctcctttgggg

SEQ ID NO: 297886 - DNA, 582 bp, Homo Sapiens
  misc_feature (457)..(469): n is a, c, g, or t
gtatttatatgatgggacagcgggtttttcggctgggaaagggggagtaggcggcaccgaatttttgtgagtgcctgccctcttagcggcccgagactttatttatgtttttggggtgatatttttggggaattttggggagttaaaatttttgccgagggaaagttattactatgtttggcaaggtgttttagggacgggtataaaaaccaaagtaggtcatgctttactcgcaagggtgttgggataaaacgaaaaagtcgggatggtttttttgggaagttgcgcgggttaaggatttaaccgggttatctggttggaatattcagggggtattttggttaagagcggggcgcaaaaaattaaagggtctctaggcattgtgacgggacagcgatttcacccaggagaacagttatgcgcttgattacgccaaggtgctagttctgggggagcnnnnnnnnnnnnncgggggaaggggaccattgtgttggttccgaggaattcggccattatgggcgggtgaaaaagaaggttctggctacaggggtgaatttaactttttgtaaaattttggttaat

SEQ ID NO: 297887 - DNA, 265 bp, Homo Sapiens
  misc_feature (188)..(196): n is a, c, g, or t
agcacgcgccctatattttttgtgaatttgtttaggagaaaaacatattcccacaagaaaacactttgttcctgattttccgccccccatttttgggggcccctttaagtaatctaacgtgaggtttgtttttattatcgaggagggtggggcgctaaagcaaaaatacggggagggttttatttcgnnnnnnnnngcggaaagaatttccccgcgttttccggttggaaattatcggggggttttgttttaaacacggcgcccc

SEQ ID NO: 297888 - DNA, 580 bp, Homo Sapiens
  misc_feature (452)..(509): n is a, c, g, or t
ttcttttgtgagatcttctcttcctctcataaactcccgccccccaatccttctcacacaacgctgtcgtcggcaaataaatttcttctcgtccccctccttacaatacacatcctcctccccccaatctccctccctcttatcttaactctgtttctccgcgctcccatactctttttttctcctcctaaatacaaccctcctcctatatatggttctttctcttccctctacaaatactccgcttcttctctccgaaaacaaaaacaatactcttcccaatccttcctccctgcgccattcatctcctctacgtgccgttcctctttccacaacctttcctcctccccctcttcacgtctgctctccctttatttccgcgcccgtcttctcctccctttccccttccttttctttcccccctaacttccggtttactttcacccccgggnnnnnnnnnnnnnnnnnnnnnnnnnnnnnnnnnnnnnnnnnnnnnnnnnnnnnnnnnnacacctacctagccttccccgtcccgtatctcaccgctccctcacaatctctgcgctgactccagctcccg

SEQ ID NO: 297889 - DNA, 196 bp, Homo Sapiens
  misc_feature (75)..(84): n is a, c, g, or t
gttagtgttgtttagcgcgagtgtttgtggtgcgctaaataaataaaagagaagtatgttttgtttatgtgagannnnnnnnnntataacaaagaaagaggggaggatatttttagcaaacccccggcgagagagatataaaggggtattttctgtgggaaaatttaagggggatttttgttattaaaagagcgcc

SEQ ID NO: 297890 - DNA, 201 bp, Homo Sapiens
  misc_feature (116)..(126): n is a, c, g, or t
gaaaattttatttgtgtgcctcctgaaagaccccccaattttacctttgtatttttaatgtttttatttggtgggtattggcggtttaatatattttacacagaaagaaatgttannnnnnnnnnngcgcggagtttgtgttgggccataaaaaatagaaagtaggtttatgttttttagtgaaagagggtttgttgattg

SEQ ID NO: 297891 - DNA, 530 bp, Homo Sapiens
  misc_feature (239)..(248): n is a, c, g, or t
  misc_feature (383)..(448): n is a, c, g, or t
gtttgttgggtcccggatatgcgctatatgggcggggggaaaatacactctttcttttttttgacccgggggcgcaaagaattttaaaggtttttataacacaagaggggcggcgggttcttttaatttttaaaccccgcctgtgggttttttttaaaagtagagaaactcttctagagggtgtgtgccaaaaacgccttttttaatattaagggacccacaaaggggcttttaccccnnnnnnnnnnattgggaaaatccccccggagggagggtgggcattttttttgaaaagggggccctttccgtccaaagctttttgggccttttgttaaattaagggggccattttggggggaaattcccaaaaacacccaaaaaannnnnnnnnnnnnnnnnnnnnnnnnnnnnnnnnnnnnnnnnnnnnnnnnnnnnnnnnnnnnnnnnntaagttggtttcccaaaaggggttccagtcctttaaggggagggggaaaaatccccttgttgatttgcaaaaattttagaaa

SEQ ID NO: 297892 - DNA, 344 bp, Homo Sapiens
  misc_feature (238)..(246): n is a, c, g, or t
caaacacccaaattttttgggtaccgggaatttcgcccatatatcccggggggctatgaaaaattttaaaagggcacatgtgtggggccttttttttgtaagggtcccccattgcaaacgcccaattttttccccattgtccttgtgtttctttgggggcccaatgtggggaccaattgggctttaccaccggtgaaaaaaatatttttcttgaatattaagcctatcgagaaaatannnnnnnnngtggggcttattccaaatacttcccccagccttcccaagggtggtgaccagggataaccttctgtccctaaaaaatttcccattatttcatcaagcct

SEQ ID NO: 297893 - DNA, 162 bp, Homo Sapiens
cgcccctttttggaaaaaacccgccccgttgtaaccccccggggggtttttagaaaatttggtcttcccggggggtacttgtgtgaaaccaaggttgtccctcaaaagcccctttgagtcctccggggcccacgtgttttttccccctggagaaataaacgc

SEQ ID NO: 297894 - DNA, 564 bp, Homo Sapiens
  misc_feature (355)..(396): n is a, c, g, or t
  misc_feature (503)..(515): n is a, c, g, or t
gggggagggtgcattgttgtagaggggttggatgtggttgtatgagagaattgggtgagcggtttattgggggaaatgtggtgtttatggtgtggcaagtaaggtttatatttgtgagttgtgttggcgggcagatgttttttttcttggatatatgattggtgtttttgggaggttgttaggggagaccctgttaactttatttttttgtggggaatttgtttctaagagtgttttgtgtatgcttaatatagtggtgagaagtgtatggtgtttaacggaggggggggagtgttaagggttattgtgggttgagtgttttggtggggggtgggggagttgaggggtagtagannnnnnnnnnnnnnnnnnnnnnnnnnnnnnnnnnnnnnnnnnacagggttgaagagtttgggagggggttttacgttgttagaggatggaaattttgtgggttggtttagatgggggaaatgtttgttttgggttttggaggggggtgnnnnnnnnnnnnngtttggagatgtatattatatttttaatatctatttataaaaaaattat

SEQ ID NO: 297895 - DNA, 532 bp, Homo Sapiens
  misc_feature (161)..(222): n is a, c, g, or t
  misc_feature (417)..(480): n is a, c, g, or t
cggttattgggatggagagttatagagagagtaggtggtgatgtagataggaaatagtgggtgggtaggagtgaatgttgaggagaagtgataggttttggggaggtctagaggggaagatgagtagggtatgggagagtgaattgaaaaggggggagtgnnnnnnnnnnnnnnnnnnnnnnnnnnnnnnnnnnnnnnnnnnnnnnnnnnnnnnnnnnnnnntagtattgaaggagtgtagtgtgtgttattagggagttgggagggaggagatagaaggaaagagttgggttggtaggagatgaggttgatgtttgagagaggaaggggggggtattagaattgagtggatgagcgtaggttatgttagagtaggtaggtatgaggtagatgatggggtggtattgacagagttannnnnnnnnnnnnnnnnnnnnnnnnnnnnnnnnnnnnnnnnnnnnnnnnnnnnnnnnnnnnnnntatgattgtgtttgtgcgctgtgtgggtgtaatatagaggtggggtgttgtg

SEQ ID NO: 297896 - DNA, 160 bp, Homo Sapiens
  misc_feature (68)..(80): n is a, c, g, or t
caagttatatttccccggtcataaagacaaaattcccgggaacaaacacaaaggccagctcccccagnnnnnnnnnnnnngcccgcccacatttcggagcttggcttcatcagggaaaaaggcggcacctgtgcgaaaatgaaccccggtcacaactgcc

SEQ ID NO: 297897 - DNA, 516 bp, Homo Sapiens
  misc_feature (132)..(251): n is a, c, g, or t
  misc_feature (257)..(470): n is a, c, g, or t
gtttttgtcttctactgtgggttgtttctacgagatttctttttacttaggagcaggtgtttattttatttttatgggcctttattgctgctcttcttgttgaggttaagctcctttccagatttttatggnnnnnnnnnnnnnnnnnnnnnnnnnnnnnnnnnnnnnnnnnnnnnnnnnnnnnnnnnnnnnnnnnnnnnnnnnnnnnnnnnnnnnnnnnnnnnnnnnnnnnnnnnnnnnnnnnnnnnnnncaaagnnnnnnnnnnnnnnnnnnnnnnnnnnnnnnnnnnnnnnnnnnnnnnnnnnnnnnnnnnnnnnnnnnnnnnnnnnnnnnnnnnnnnnnnnnnnnnnnnnnnnnnnnnnnnnnnnnnnnnnnnnnnnnnnnnnnnnnnnnnnnnnnnnnnnnnnnnnnnnnnnnnnnnnnnnnnnnnnnnnnnnnnnnnnnnnnnnnnnnnnnnnnnnnnnnnnnngagttggctttatatttttgcctcccccctctattaataaataatt

SEQ ID NO: 297898 - DNA, 613 bp, Homo Sapiens
  misc_feature (190)..(203): n is a, c, g, or t
  misc_feature (234)..(307): n is a, c, g, or t
  misc_feature (414)..(429): n is a, c, g, or t
  misc_feature (472)..(483): n is a, c, g, or t
cgcgcccatttatgtgggtagggtctcggttggcgcacggagggtttaacttttattttcccgccccatttttagggtgggggttttacggggaaaaaattgttcccgtaggattggggtattcccttgtttaaggctatactctttgggggccgggtgggaaatccagagggagtttgggttttaactnnnnnnnnnnnnnnataaggccaagacaaggtgggaggggtttgnnnnnnnnnnnnnnnnnnnnnnnnnnnnnnnnnnnnnnnnnnnnnnnnnnnnnnnnnnnnnnnnnnnnnnnnnnctggggcaaagattttaatggtttggtcccggtgtatagggcaacattttttgggggtgtagcccggttttccttgttagtccaaaatttgtgaatgtgggggggcnnnnnnnnnnnnnnnngggagagggcccttttttttgggttgggggattgggccattannnnnnnnnnnntctttttccaaggaggcaagggccaagtaattggaccccgcctgttggcgggggatggtggcccctgtgttttcattgcacgccctttgtaattatgccggccttgggaaacaaaagaagaaaaaacgtt

SEQ ID NO: 297899 - DNA, 300 bp, Homo Sapiens
cggcgggggccctttctattatagacatgtgggcgggaggtgttttcccgcttgaaaagccgcgcagggagcccaacccccatttaaggaggtgggcccaccccctgggcgcccccggggtttcacatttttttgttccggccccggttttttggtggaattgtgagggaataccacttttcccacagagaccaacttttgccctttttcccccgaactatttaggtggcccattagaaaacccaccctgctgctgcttttacatgaaaagggggcggcataaccagagagtccgggggg

SEQ ID NO: 297900 - DNA, 613 bp, Homo Sapiens
  misc_feature (231)..(241): n is a, c, g, or t
  misc_feature (453)..(473): n is a, c, g, or t
cgtctttgtaagagtgggcggtggtggcccacggccatttaggtggggagggccttcctctgtgggaggccccgggggttgaccatatggtgctggagctagtttgtttgtggggatttgggagcggggtaaaatttttccgcaggggaccgtgttatgacggattattgcgccaaggctatttggggggccattataggaagttcgagggtgttttagcttttcctgccnnnnnnnnnnncataacggaaagtcgggtagggttttattgagcaggacccccgggaagggatttacccgggttttcccggggggattttcatggggtgttttggttgggccgcgggcgcggaaaatctaaagggctttagcaattgggagggggccaattgtttccccgggaggaggctttgcccttttttgggccagggttcgaattttggacgagcatgnnnnnnnnnnnnnnnnnnnnncccccctgggtagggcgccgggatttcggcccttagggccgggggcacccaggttatttcgcactcgcgttttttaggagtttacattttagctttggtccttaatatatggtaataaaatgtttgacttttttgtgagt

SEQ ID NO: 297901 - DNA, 520 bp, Homo Sapiens
  misc_feature (129)..(144): n is a, c, g, or t
  misc_feature (309)..(361): n is a, c, g, or t
cgcccccgcgcgggtgggggtggtgtttgggtgggggagcgcggggtccccgggtgttcggcgcggggacgcccgggctgtgaggggtgtggccggccgtgggccccccggggtgcgcctggtgtgccnnnnnnnnnnnnnnnnagttggagggagaaagattggccccgggaccactgggtcggtggttccgccgggtttttcggggggttttggagaaggtgaggggccgcggcttttcctcgccaggggtgggcaattgtgaaagatatccggggggttttggttgggtgtctcgcggtgaaggcnnnnnnnnnnnnnnnnnnnnnnnnnnnnnnnnnnnnnnnnnnnnnnnnnnnnncgccaagaaggggagagtgctctagcgagtgtgtggggcgggtgtttggcccagggtcgggccgtggccgggtgtgggcagggtttgggcttgtgggcaggcgtgttttttttctcgggtggcgcgccacggtggtgtgtccggtgggccccccggaat

SEQ ID NO: 297902 - DNA, 614 bp, Homo Sapiens
  misc_feature (59)..(79): n is a, c, g, or t
  misc_feature (446)..(457): n is a, c, g, or t
gctcccaagggtttcccgactgaaatgtgacggtgaggaccccaataaagtggaatggnnnnnnnnnnnnnnnnnnnnngttttccctttttccccagggccgcccatttgttggagtgcggggaaaaaacctttaccccgggaaccctccatcccaaggtgcgccccatattgtgaggcccccattagaataccaaaaaaagttcccactttaacggaaaggggggtgccaataagcaaggaaaacgggggggttttttttaccgcagccccccgggcaaaattttaacgcgccggtttcctcggggaactcccagcggggtttttcgatgaaaaccgggggccaaaaaaggacaaaaaccccaacagtttggggcggggccccattttctcccggaaaaccccatcgccctgtttgccccccggtcccaaatctttgggagcgnnnnnnnnnnnncccgtggagtggccccttggtgtgggaccccgcattacgccccataagggcgggggacagctcttgtaacttcaaaaaatctctgtataaccccgggcgcccatcgtgaccctttttgagacaattttttctttggttttgaaattgcagcatgggg

SEQ ID NO: 297903 - DNA, 570 bp, Homo Sapiens
  misc_feature (432)..(443): n is a, c, g, or t
ccgggaagtccccctttggtgtggtcgcgaagccgcccttttgaggggctggggccaggtattggggcgctttgttttgcggttttgaaaaacccgaatttgttagttttttaaggaaaccctttttggcgggcattggcttttacaaagtgccacaattgtatttgttttccaagtggataccccaaggggctggtgtgggcaaagaaaagggtgtcaggatagaggaaaagaaatcggggggttattgtcgaatgttccccccgttgtaggatttggcgggggtccctggaagaaaaaaacaggtgggaccgggggatggggcctggcccctgtaataggaagagctttgagaggtgtgggggcgggaacttttggccgcaggaggcatttttttcctttgttagcccgatcccgggtttgggggcgggnnnnnnnnnnnnaaagggaggcgctccccttgtgttggtgcgggccaatacggcgttaggggtgtgtatccatttgtccccctgttccaggtttgggtacggatttggcttgtttttaaggttccctaaataaataggt

SEQ ID NO: 297904 - DNA, 576 bp, Homo Sapiens
  misc_feature (78)..(87): n is a, c, g, or t
  misc_feature (99)..(187): n is a, c, g, or t
  misc_feature (281)..(320): n is a, c, g, or t
  misc_feature (365)..(379): n is a, c, g, or t
  misc_feature (387)..(396): n is a, c, g, or t
  misc_feature (417)..(483): n is a, c, g, or t
gtaccgacccattggtacccgggtttgccgttttttttgggggccgttttaggggaaggtggggcgttttcttctacnnnnnnnnnnagaaaccaaggnnnnnnnnnnnnnnnnnnnnnnnnnnnnnnnnnnnnnnnnnnnnnnnnnnnnnnnnnnnnnnnnnnnnnnnnnnnnnnnnnnnnnnnnncaaaaattaagcgccccccccggggtgttggcggggtttttcgcggggaaatccggggggttttttttgccccgcgggccaaattagaggaagnnnnnnnnnnnnnnnnnnnnnnnnnnnnnnnnnnnnnnnnaccggatattccccttttttgcgcgggggaaaccttttggggagnnnnnnnnnnnnnnncccaggannnnnnnnnntgtttggtgcggggaattttnnnnnnnnnnnnnnnnnnnnnnnnnnnnnnnnnnnnnnnnnnnnnnnnnnnnnnnnnnnnnnnnnnntttttgtgggaaaaaatggtttcaagccccccccggctttaagaaataaaaatggggtggcaaaagaggaaggttaatttccacccatttgaa

SEQ ID NO: 297905 - DNA, 337 bp, Homo Sapiens
ctcgaaaacccccctttgttgtggtcccgggaatcggcctttaatgcgccggggcatgaatatctgtaaagggccaagtgtggggccttttcttttacaggttcccaaatccaaggcccatttttcccaacgtggcctggttcttggaggccccattttggaccatatgggctttcacacggggaaaaaaatattttggctggaaaataaaactatccaagaaaaaagccccccccgtggggattaatccagaacaatccccccagcctctccagggggggtgaccagggcattaccttttgttccttataatattcccattatttcctcatggctg

SEQ ID NO: 297906 - DNA, 577 bp, Homo Sapiens
  misc_feature (80)..(90): n is a, c, g, or t
  misc_feature (174)..(220): n is a, c, g, or t
  misc_feature (289)..(377): n is a, c, g, or t
  misc_feature (386)..(446): n is a, c, g, or t
gggccccctccagtgggggggcgccattttccccgggaacctttttgccctttttcccccgcgccgagtttggggaggcnnnnnnnnnnncccgagaagcggccctgtggtggggcccggaattgggcccatgggcgggggaaaacccacccaaaaacggcttcccgagaaacnnnnnnnnnnnnnnnnnnnnnnnnnnnnnnnnnnnnnnnnnnnnnnnaaaaaggcaaaaaaatgtttggccccctccaagggtgggtttaaaaaaacccgggcccccctgccttgnnnnnnnnnnnnnnnnnnnnnnnnnnnnnnnnnnnnnnnnnnnnnnnnnnnnnnnnnnnnnnnnnnnnnnnnnnnnnnnnnnnnnnnnnaacttaggnnnnnnnnnnnnnnnnnnnnnnnnnnnnnnnnnnnnnnnnnnnnnnnnnnnnnnnnnnnnntttgggggggttcaacccgcccctggaccaaaaccctgggaaaggccctggtcctaaaaaacccctttcaaccgcttttgggttcctggcccccaaaaacggggggaaaaaggacaaccccccggtttttt

SEQ ID NO: 297907 - DNA, 415 bp, Homo Sapiens
  misc_feature (181)..(194): n is a, c, g, or t
  misc_feature (243)..(251): n is a, c, g, or t
cgggaagattgtagagggtattttacgtgtggtaagaagagtggggtgtattgttgatttatggagggcgggaaaatataaagaatgatttatgattgttgttgaggggagaactatatgtgtcacggagagtaaacattttttctcatgtgttgccagagtggcggaatttgggggaggnnnnnnnnnnnnnngtccggggagcgcagcattattttggggccgggagatttgcgcatattnnnnnnnnnttgcccgcctttgtagagaggggggtggattcagagagaatgcctctgtggtataagaaagtctttttttccggaagggggtaaaatttgttgtgggaaggaaaaacgcctttgggtttaaacctgcgatttaaaaagatggccgcccccccttttttttaagg

SEQ ID NO: 297908 - DNA, 441 bp, Homo Sapiens
  misc_feature (100)..(163): n is a, c, g, or t
  misc_feature (169)..(257): n is a, c, g, or t
  misc_feature (327)..(388): n is a, c, g, or t
tagttggttatggtgattgagaggagtgttgggttgattagggtgttttggggtgttgtgtggtgattgtttttgtgttgtaggtgttggagtagtgatnnnnnnnnnnnnnnnnnnnnnnnnnnnnnnnnnnnnnnnnnnnnnnnnnnnnnnnnnnnnnnnnttaggnnnnnnnnnnnnnnnnnnnnnnnnnnnnnnnnnnnnnnnnnnnnnnnnnnnnnnnnnnnnnnnnnnnnnnnnnnnnnnnnnnnnnnnnntgatttgggtgtggggtggtgggatgagtgttttggaggtaggtgtattttaggtgtatagggtgattannnnnnnnnnnnnnnnnnnnnnnnnnnnnnnnnnnnnnnnnnnnnnnnnnnnnnnnnnnnnnggtgtgtattatatgggatggtaggggaaatgtgagaggtaaatatgtttaag

SEQ ID NO: 297909 - DNA, 573 bp, Homo Sapiens
  misc_feature (332)..(383): n is a, c, g, or t
  misc_feature (399)..(410): n is a, c, g, or t
cgggggggtggccccccccttgggcccccgaggctttccccttttttcttccggcccgtattttgtgtggaattgtgaccggaaacccatttcccccgggaacagccttggcccttgttccccccaccttttggggggccctatagaatccccaagctggccctagctttctctccaaggggggccgccctaaccccaaaaattcgggagagttattttacccgatccccccggggaggatttaaccgcgttctcccggtgggaaattcccgggggattttgggtgataccgaggcgccaaaaattaaaaggtccctaccctttgtgagcgnnnnnnnnnnnnnnnnnnnnnnnnnnnnnnnnnnnnnnnnnnnnnnnnnnnnagatttgggccagccnnnnnnnnnnnncccgggaagcgcccccttgtgttgggacccgggaattcggcccttatggccggggggatgtccttattttgaattaaaaaatagggtttacccctcccaaattgttttgagggcctgattataatttggaaaaaaggttttttttccaaacttccttaaattt

SEQ ID NO: 297910 - DNA, 523 bp, Homo Sapiens
  misc_feature (145)..(153): n is a, c, g, or t
  misc_feature (257)..(306): n is a, c, g, or t
aggaaagaggtgaggtggatatgaggtagtagatagattgagttagagagggtaggggaatgaagagtatgtggtggtaggtgggaggagatgaggggagtgaggggaaagagaggagatggagtggtgatgtagtagggtgttnnnnnnnnnatagagggtgggggaagtgaggaaggtggggtgtaggaggtttggatagaggggaggtataatgaggtgaagtagtaggataagggtggtgagttaaagagagnnnnnnnnnnnnnnnnnnnnnnnnnnnnnnnnnnnnnnnnnnnnnnnnnnaatattaatagagaaagggtggagtggagggggttaggttttgtggttggggagtgaaagttggtggggatttgagggtgggagaagagaatatggaggtgtgaaatttagggtaggggaaagaagggggtaggggaggagtgaagagagagagaaaggagtgagaattggataatggaggggggggagaagataaataagtggggtgtggcgcggt

SEQ ID NO: 297911 - DNA, 548 bp, Homo Sapiens
  misc_feature (149)..(159): n is a, c, g, or t
  misc_feature (321)..(381): n is a, c, g, or t
cgatgagttggggtgttttctgatgtgaggggtgtttttgtttgtgggttgaagttttggaggagcgggtatgtttagggtgtagggccgtttggtatgtattgtatggtgggtgtgtacgaagttttttcccgcactttttagtgggnnnnnnnnnnngtgtgaggcagtaatttctggggtgttgcggggtgatttgtgtggtttttggagttgtgggaatgacgttgcgttttttgttttggggtgtagatgtgcggggttgtggagggttaggaaagatttttttggttggtgggggtgttgtggggtggagattannnnnnnnnnnnnnnnnnnnnnnnnnnnnnnnnnnnnnnnnnnnnnnnnnnnnnnnnnnnnactgtgaatgtgttttataggtttttaaggggggagtttgtggaaaaattttttatttttattagaaggaggggggggagtcgatttaggatttttacatggtttttgaggggatgggacgtgtttttaccccttttatattggggtgtttttttcccccctaaatt

SEQ ID NO: 297912 - DNA, 606 bp, Homo Sapiens
  misc_feature (87)..(87): n is a, c, g, or t
cgggggtatgttgcgaattattgttagttggttatggtggtttgttaggtggagatggaatggggttttttgtatttgtggtttttngagtggaggtgtatgagtgtatttaggggtttttgttaaaaatggggtttgttgtggggttttggcaggtttttgggtaagatgggagatgttgtatgtttgagcgttgggagggttttggggtgggatttttggtgttttgttttaggtgagttggcgagttgtgtggttgtgtttataggacgtttttggttggggtttttgagtattaaagggtggattggtggttggtggccttttgtggttgtttgggaagtttggttatggtggttaagtggggtgggttagtatgtttggtgtttttgttttaagataagtttgtgaggtttgtttaagttgtgggtgttggtttattttattggaatgtatagttttttttagtggtggtagtgttttgttgggagtatgttgttgtggtatttagaggtatttgggtttatttgttttggattagtggtttatgttgtggtggtatttgggtatatttgtaatatatgtgaatgaataaaaaaaggtgtg

SEQ ID NO: 297913 - DNA, 610 bp, Homo Sapiens
tgaaggaagggttgaaggtgtgtgatgagtatttgtgaaaagagttgtgttaagtatatgttagaggttggggttggtgagtggtgaataaggtgtgaggttgtgagaggtagtgaggtggtgtggaggggtttgtgtagtgtgataggtatggatgtttgaggtgggaggatgagtgtgttagtgggggtgatgaagtggtgaatgttggaaggagtgaggaaattggtggggttgtgggttagatggtgatatggagtggtttatgtggaagtgttgtatttattgataaggtttgtgagggtggttggtggtagggatgtttattatattgaagtggtagtggtgagatgttggtggggtatggggatgggggaggtagaagtgagggggagagggagggtgttggttgttgatggaggaggtggaagatattaagtgttgagtgtgggatgagggatagttggagatgtgtgtttttgtagggtggtaagaagttaggtttgaggagtgttgtgtaatttgatagattagaatagttattgtgagagtcgagaaatgaatattaggtagtatgggatgattaaaatatagaaagaagaaggatgag

SEQ ID NO: 297914 - DNA, 640 bp, Homo Sapiens
gagtcgactgggccgaggcggccgacatgttcctgagaaaatgtccaatttctcttcatctaaaacgattcaattttgttttcaaagcggcatgccccctttattaatactcctgcgtaaatcaagtattgtccaaaggaaatgggtcgtaatgcgagatcttttggagcatacttagtgtgaggttttcagactaacgacttacatttattaatatttggcaccagcctagagttaggtgaagcttttctgaaaactgaagataaatcaaaactggtgccgactgatacaagcgcgctatgtttagccttatggaccataggtacttggtgtgaacagtgtaaacgtggttgtgaaagaaattggatactccttgggaaacaaatctgcgcgttggtcaatgttttgtggcggagggaaaggggttcactttacttaataattttgaaaggcaggctctggggccttgctggattttgggccaaggctcaagagaattgcccctcttgtaaatataaaactgggccgggggggttatccgttcgtgaattgttcccgctcttattggacactgtggctcgccaacccccaacaatgggtccttctacactcgaaataaaaaggaccacctgtccccgcg

SEQ ID NO: 297915 - DNA, 560 bp, Homo Sapiens
  misc_feature (78)..(86): n is a, c, g, or t
  misc_feature (481)..(496): n is a, c, g, or t
cgggacggggagaggctgttgttttgttcgaggaagaccgaccagtggtgggggcccggagagtgggccgaataagcnnnnnnnnncgagagcaacaaagacaaaaacgcggggaagaggcgccgccacccggaggggaaacaaaaaacgacgcgacaacaaatgggaggcacccaacagtttcaaacctagaaagaacttggggggaaacaagacaaaaaaacccgtggtgaaaagccgggtttcaagaagcctccaaaccgtggctgactatggcaaggcccggatgaaaaagggcaaaagcccaaagcttcaggccggggccaagccttcccttaaaaaagcaaaagaacagctgacacccccgaacaaaaagggctggagcggaacgggttaaccccctgaacaaattcgggaaacctggaacacaacccgccccccagtaaaggggccaagccattggcttccaaccccaatgggnnnnnnnnnnnnnnnngggccagtccaaaaggccctggccccacccactctttgatacactaactcgcggaaggagcccc

SEQ ID NO: 297916 - DNA, 695 bp, Homo Sapiens
tttgatggaactgctgtattagtggagttttttgtaccagtcgagtgggaacacacaaatggagttcttggcttcaaaacatgtaggcacgccttgagccaagggcggcagtgggatagacgggactgtgacataggcctccctgacacatgttcctacgatgtgctgctgatgaaccttgatgacgaccgcctctacctatgtgttggccccaactccattctaaccaaccccctgccgactacaaatggcttaaaccattcaaatggtgaatggtaggtgacaatataggaactgtctactcccacgcacccgaactggagtgcctccacgaattacatggccttgactatatcctaggcgaacacatacggagccagtccatacctggtgtcgttggcattctcaaccaccttgtaaaccttcttgcaattgaacaggtgctgctcatgccacacaaacagagctttggcaatcttgatgaggagcagctcgtccccttaaacagtgggcttgataaataaaccaagcttccaaaaacggctttgtgcccctgaggaaatgggagaccaacgttcgggaaagctggtcgatatctaagactattttaaactgtgttcagcggaattctgaagcccgtaagatcacgcaggcctggaaccgatttccccctcagaggtagctccagcttttgc

SEQ ID NO: 297917 - DNA, 224 bp, Homo Sapiens
gggcccccccactattttaagagggggaaattttttttcccggggggaagaaatagcccccctttcccgtgttgggcccaacccgcactgtttttctcttttggggggaacagcaataactttttaaatgggccagttggcaaccccccacaaatgttttccccgggtggtattttccccgcaaaattttggagatttttaaacagcctttaggggggggcacc

SEQ ID NO: 297918 - DNA, 578 bp, Homo Sapiens
  misc_feature (51)..(87): n is a, c, g, or t
  misc_feature (257)..(318): n is a, c, g, or t
  misc_feature (399)..(437): n is a, c, g, or t
  misc_feature (449)..(511): n is a, c, g, or t
gtttttgcgcggggtttggtagggggttttcttgtttgtggcgcccgggannnnnnnnnnnnnnnnnnnnnnnnnnnnnnnnnnnnnattgtgtgccgattttgttttctgctcgggggccgtgtttttggtgtggctgcctgttgtttgtgcggggcttttttgtgtttgaagggtgcgcggtggtttgccctttgggtgggtgcggtattttgttcaaatttttggtggtgtttgtttactggacccggggtggnnnnnnnnnnnnnnnnnnnnnnnnnnnnnnnnnnnnnnnnnnnnnnnnnnnnnnnnnnnnnntctatttttgagaattgctgtttgtgtttttgtggggaattgtgtttgtggcagtgtcccgctgttgcgcgtgatggcggnnnnnnnnnnnnnnnnnnnnnnnnnnnnnnnnnnnnnnngagttgggctgnnnnnnnnnnnnnnnnnnnnnnnnnnnnnnnnnnnnnnnnnnnnnnnnnnnnnnnnnnnnnnngtgattgtcccttctgttttgtggtttttaggggtttgcttaattttctaagctttggaggtgagat

SEQ ID NO: 297919 - DNA, 571 bp, Homo Sapiens
  misc_feature (142)..(156): n is a, c, g, or t
  misc_feature (324)..(405): n is a, c, g, or t
gggtatataaaagagagggcagggcaggattacgggcgggagatagggcgggtgggcggagaaaagatgattggggaggagagccgcccagtaggacgcacagagggttagccgtgtaggttggcaggaggtaagagtggtnnnnnnnnnnnnnnnagaaaagatttccacggaggaacggcagttatgggcagtaaagtggggggactgtatggggagacgcagaaaaagagaccgagggtaggccacaagaatttggctgggaagagagggcggggattaaagggaagaaattggtggtggggattttttgcggagaagagnnnnnnnnnnnnnnnnnnnnnnnnnnnnnnnnnnnnnnnnnnnnnnnnnnnnnnnnnnnnnnnnnnnnnnnnnnnnnnnnnntataaagatgtggtccggaatgtgaagggtcaccaaattttcccaaggaaacgaggttaccaatgcttggggatggggccagggatgtggggccttttggtgggggtaacaagttggggggaaattggggaggatgccggtaatgggcccgtaggggcgggggagg

SEQ ID NO: 297920 - DNA, 487 bp, Homo Sapiens
  misc_feature (55)..(192): n is a, c, g, or t
  misc_feature (356)..(407): n is a, c, g, or t
  misc_feature (415)..(429): n is a, c, g, or t
cgcccgctgtattgtggtgaggcccgttttatttgggggccgcgggggtatctcnnnnnnnnnnnnnnnnnnnnnnnnnnnnnnnnnnnnnnnnnnnnnnnnnnnnnnnnnnnnnnnnnnnnnnnnnnnnnnnnnnnnnnnnnnnnnnnnnnnnnnnnnnnnnnnnnnnnnnnnnnnnnnnnnnnnnnnnnncaaagggtgtgtggttatcccaaaaatatgggttagtgttttttacccgctccccccgggggaggtttaaccgggtttctcgggtggaaaattctggcgggtttttgggtttttcccgggggccaaaaattaaaatgcctctcccttttgttggggggccccannnnnnnnnnnnnnnnnnnnnnnnnnnnnnnnnnnnnnnnnnnnnnnnnnnnggccgccnnnnnnnnnnnnnnncgggaagcgcccccttttttttgttccccggaatttggcccttttggccggggtaaaa

SEQ ID NO: 297921 - DNA, 226 bp, Homo Sapiens
  misc_feature (133)..(166): n is a, c, g, or t
ggcgtgagaaccaccgtgcctgacactgaggtgtgcactttagacattgagagaggccaagttcacattttggtggtgagacagaaatctatagctggcctccttttgggtcaggagtgtttatgaattttannnnnnnnnnnnnnnnnnnnnnnnnnnnnnnnnnacccccactggccctggattctctcctgtgctcggtcgagagagatcttaacttgcagtg

SEQ ID NO: 297922 - DNA, 563 bp, Homo Sapiens
  misc_feature (45)..(131): n is a, c, g, or t
  misc_feature (362)..(362): n is a, c, g, or t
cgaaactaacaaaaaagttaacacttttaagaagcattcttacgnnnnnnnnnnnnnnnnnnnnnnnnnnnnnnnnnnnnnnnnnnnnnnnnnnnnnnnnnnnnnnnnnnnnnnnnnnnnnnnnnnnnnnngaagggagggaatgatgacaatgtctaggatgactggtataatgaacaacgaactgaactagataaacatggttataacatggagactctctagtatccagaacaagagttgatgtgacctaaactagatttgctaaatacgttatatggcaaagaatccagtatgggacgctaatacaatgagtggataagcttaactggtaaaaggcaaatgtcgagctgtaagacagnagtgaaatgagcggatattaaagggaaatgaagctaatttatgtgggaatgggtggaaagttgcaacttccgtgattagtattatcaccggatataggttaaagcttgctcaatgttaaacaagagcgaatttaaagaatggggacttaagggatatggggtataagggggaatgggccatgtaaatcttgcggccttggg

SEQ ID NO: 297923 - DNA, 294 bp, Homo Sapiens
gggcctaagcaggggggctgcgggcgcgcccaagcgagcgtaccataaattgggcaaatttacccggaagagaagtcggatgccgtggacgcaatggacttttgcagaaggtggcggaggaaagctgaagagcagtagagcgagaggcggtaattttgtgaaagggaggggtaagtgctctagacgtcagcttaacaatatcacgcagatgcaattagcatagcccactatcatatgcctggagtatcaggctaggcagggcccactctgatgacacgtatcggcgggtccctc

SEQ ID NO: 297924 - DNA, 428 bp, Homo Sapiens
ctcattttacaggcttagagtctttctcttctgccagaggcttctgagtgggctctgagatacagtcctgagggacttcttcagtcatgaagttggggaggagcatgcagatcagaaacagactgagtcaacagcgaactccacctgtccctttgggaaggggagtggcctttctcagactgtgaatgcagcccatgtgtaggggcaccatgctggtgtgggaggtgaaggctccatggctgcccagctgggagtccgtggtagcaggagggcctggcgttgcagaacggctcaccccgtgtacggccctctctcagagttccttgcctgcatgagtcccttctaccgcctgcaagtcccacgttgggaagcaagtgggctggagctccatccacccatgggttgactgtccttgggcaggttcgctt

SEQ ID NO: 297925 - DNA, 399 bp, Homo Sapiens
gtaacctttattatactcctatatctgtttagcgcgcttaatctcacgggtgtgggaagtcgagacgcacactcgatagagggtgattataggtttaaagaattgagcgaagagaatgtcatagccttggagcagaatggctgagctcactatcacaagcagtgtgcatgtgaagatcacgttccattagcgaatgaagtaactgacactgcaagaacatggcatgctgatgagacagctgaggaacgtgacaagagactttatacgactctatggagacattactatgcacagatgctactctgcgtgaaacctatggtgaaagggctgactgctaggcataacacgatccagagagatatgtgctgcttgcagcacgactgacagccatcctcttct

SEQ ID NO: 297926 - DNA, 417 bp, Homo Sapiens
gcacgagagggagactgagaagatagcgctgtgagagaagatgatgggtacacgcgacagactgtgcaccatatttctgtgagatagagcgcgagaaaccagatgcccagagacgcaggagccgacacggtaggcctggcgcggtaaggaggcttgcggagcaagaacggcctttcttcacacgagctattccgcgggtttcagaattccatatggcggacttctcttcctctctcttctcctacatttgggtcttctatactcggggtccttggatgcgctatattcctttgtggcttggaacctcttaagcctggcacaaggtactcttttccttgggaggtctgaactttaaataaggtgatggctgtaagaatggcattgcgcaatttgtcatctgggattatatttcatcgg

SEQ ID NO: 297927 - DNA, 619 bp, Homo Sapiens
  misc_feature (529)..(529): n is a, c, g, or t
gaaaactataccatctgggtcattttatgtttgcatttgcttattgttttttcctttgaaagttggtcacatttttctagttctttgtgtgtcaagtaattcttgtaccctggacatttatcctgaccatatgttataagactctgatcctgttggccaatattccctggagaatatctatgtttttgtcttagtagacaaccacacttcagatattacaagttctttgtcatcttgtgtggctgttggttccactgtcagttcagttttcaagacctttgctgtgttgctttgggtctgtcccatgcatgtcctgcttaagggttaatctggggcttgggcagtggtttatatcattgttcagttctcaaagccttttctgtgctgctttgaatctaccctgtgcatgcatagctcaagagggaacctaagatgtatgccaattcacatacagaattaggagatcctcttgttcagctcattcctttgcagttctcctcccatattctttggccttcagagtcctctnttcccagtcctcaggccagaaagatggggtttctctgagttttacattcacataccaccactgcaacagttcaccacaagagtagaagtt

SEQ ID NO: 297928 - DNA, 633 bp, Homo Sapiens
aggagctgtcgttttgatcataacagcgtcaataggagctatgttgcagttttatttaatttcttctctctggttttaaatgatttgaggctgaagtcaattcacactatcggtgcattgggagtcaagcactgcagtaccacagagtcattttctgcttttcagccctgcccccagctggctcttacacagcttccctgtgtgggctaattagtatatgaagagaattgcttttgtgtttggagggcttccagattcactctctcataccagcccacacaatcaataaagatttggctgatctttccttatctcaggtggattagctcttctccaagtccatacccagaccaggcaacatggtcctcaagcatgaaggggctgacaatctctgctcactttagaagggattgtccttctttagagcttggtttcattgagattcgttaatccatagctctttaaacaagagtcttctctaaccatgtacatcttagaacactttgcattggtttgaagtggctttttcccattttgtttgattgtgttttgggaggtggatatgggttgtactttcctcttcttactcatgttgctctgtgcttttttatggtgtgacctttggttttttgg

SEQ ID NO: 297929 - DNA, 362 bp, Homo Sapiens
gtaatcttagccttccaaagtgatgggaatataggcctgagctactgcgcctgcacgatattcgttatcttactccattttaactaatatgcatgtgagcgagactagactttttatattcctaacattgtatttcatagaacagacgttataaatagctttcttttatgcatcatggatcatgctttatgatgccattttattgatgaaattgatactaatatttctagagacagggtctaacttagtgtccaatgtatggtgcacatggacaaacatggctgactacaagtctaatctactgggttcaatgattccttccatgctaacccatggtgctgggacttcaactgtggcaccat

SEQ ID NO: 297930 - DNA, 207 bp, Homo Sapiens
ttatcctgcttgcgatatagtgatactactgacctactacaatgaatcagtacgtcttccttatacagtggtcggatatatgctcgaagagctcgtgcagttttggcgttactactctctggttctgtgcgtaactttggatggatgtccattacttcatacgattgtctacttggtatcggtgactccagattctctggccttcgt

SEQ ID NO: 297931 - DNA, 623 bp, Homo Sapiens
cgcaacttgatctgaagtctatacatcagacccaactaaacccctagctctacttagatcaacaaatatttcggctcctgtaggcctgcgtcttccatctgagactagttaactgcatgcacaggaccacactcagaaatgagcacataaacgcgggcccaacaccagaatagagccagtacgacccacagttgaccaagaatgaacattgactaccacaccacacgtcagcatgagatcctgtatggcatcaaattgcaacttgagcagtaatgagcagcctcactatcaactcaagcactcagggcacacaagatgcagtaacacaacatgactagaccagctctggagtccagtaactcactgtcagcacggtttcgcgatatagctcaagaaggtctaaacagagccaggcacagtaccaaggcatgctcaagggagctattgcaggcttctaagatacgagagttattccattctgagagcacggattcgacctcccagaggcctaaactcatcaccgtatcaaacgatttcccgaggtacctcaggtattgcccagctgacctccgcagcctgcctattcatgggatgactgcatcctcctactggattctcctctc

SEQ ID NO: 297932 - DNA, 689 bp, Homo Sapiens
  misc_feature (559)..(559): n is a, c, g, or t
  misc_feature (632)..(632): n is a, c, g, or t
agccggtggaccttcagatgctagacctggtacagagcatatactgacgcagccgcacccatagacagtgactgcctcagaacctgacatgtaggagatcagcccatgactggaagagaccgctggcactgagccaacgacacacgacgccatgctggcgcaggaagacgacaatagactatgaaccatatagtaaggcaaaccacatgcgcatcgaatagacctgaccctgggttatgaccatcctggacagtaggacagttacagcagctactactagtcagtgatcgctacatgtaagagtaatcactatgacctgacctagccagatgaatgcaggagccctgctgacgatacttgcttagttgatggcagagcctggagcgaagattgattatagcaagcacaactggcacatgatgatagagtcataggtcatggagacgatgtatgatgcattcacgattacactgagcatgaaactgatcacgcgtagagtgaccagcattactgccatgctacacgtgccgaacgtggcatagaataggtcatgtgacangcttcagagtcgatgagcaagggcaggcccagccctgaagaccacctgttcagcatttgtgaccgcagatatngtaagccttgaaggctttgatcactagcctcttaccctgaccattcttgagtgcttt

SEQ ID NO: 297933 - DNA, 636 bp, Homo Sapiens
cctacgtggttgagaaggcaactcagtacgtagctcatgcggatttgctatagctgatcatagtcatctgattacgcttgctgtagttcgcacactaggtggattaaggagcctatcatctgatgcgtgaccatgaaggcatagcagtcaacgattcccatggatgatcgcaagatcagagctccttcgagtattgtcgatccctctgcgtctccagctcatctggtatgctacagactgcatgccacactcaaagctatgtcccgtcagccgccagagctgagccactctaatgctagctttacacacttctgatcagcacagtgtcgtagttttagcgcagctcctgagtcgaatgattcatgtgatagatatccccgagactggtcctattgcctcgaaagcgaagagtggtacctgcgctgggcctgtagatgggctgttcgaatctttcagatatgctggggatacccccatgtacttgctagattaatggctctgtccttgaatgcctagcttttatgcattgaggcgcaggactgccattgttgataagctctcaggcctccaatctctcagagtgctcgggtaccttccctcaactaagttctttaatatcccgtttttctctagctt

SEQ ID NO: 297934 - DNA, 610 bp, Homo Sapiens
gtgacactctgtctcagatacacctagctccgctgtttgtcaaccctacgctggattgggcgctggggacgatgctgggcgagcagttccctgagctgtgcagctcaccctgcccacctgtggaagtcacaattgaggagccaggtaccatggatatgggcaagcatatgtcgaatgagtactacatgcgctatgacactgcataggccggcttcagtgacgatgatgaagatgtcaacagcagaggaatgaagagtacgtgtcgtatgcaccctgtcaagcagactgatctggaggactccgttgatatcactccttaccttggccagttggatgagtacctgacgcacatagcacttcaattccagttggccagtcataccgaagctcgagctaagtcctacacgaaatcgtggccaagatgtgcaggacgactttactaggatgagctggccgtctggttcctgcttactggtgctctttagcccagtttcaggtcaggcctgctgaagaggttacggaggcctcttgaccgaatcgcctaaagcatcgcacttttacggccccacctagatcctgcagacttcggaactctcttttctcccttttc

SEQ ID NO: 297935 - DNA, 253 bp, Homo Sapiens
ttgcacgagatctgagtcacatactctgaacatcaatgtcactgatagggaggagacctgtgatatatactagagaatatacaccgctggtgttccattagagtgcgagagaccaaaccaagctttgggctaaccttaaatatgaaaggtggttctcaaggttcgcttaggtctttgttgctgccatatgatgagagtggggcctgagtgataaggagaacgtggatgtggttcacaagttcttggcatgttg

SEQ ID NO: 297936 - DNA, 545 bp, Homo Sapiens
  misc_feature (458)..(458): n is a, c, g, or t
gcacgaggggatatactcttcaaatcagagccgcgggaagagcgcgcgcgtgtggctctcctgtgtctgtgacaacactgtgacatcgagaccagagcttggagccgcagctgtgagccaggcaatgaaagggtggcagaattctgtgtaagaactgtagaaaatgagcaagtttcacagaatcaatggcatttcacagaaggggctgtggatattaatggagaggaatggcaactggttgaatgggctcagagaaccctggattgggaagggaaggtggagaactcttgaaacctcaatttagagggaagtgcaattaccaaaacacaagtgagcctcaaggtggagcaagggcaagaaccatggatggtggaaggagccaattcacacgagagctcttcacaatctgagtacccacttggtgatgaaccacagaagcattggggccaagacaattntttgaaggcaggtttgctcacatatcaattattgactatggagagagaacaccactttaatatgagcgcacaggttaattctgagag

SEQ ID NO: 297937 - DNA, 520 bp, Homo Sapiens
  misc_feature (446)..(446): n is a, c, g, or t
cacgagctcgtggtctgtacacaccgccggcgggagcgtgaacgcgcctctagagctctgagacgttcttgcgcttttagggccagaggaggatccccattaacacagggcaccaagggacccacatggctggttatataccattaacaaagaagaacacacactgtgaaacattattaaatcacaacttctaaaagacaccgcaagggctaattgctggctacaaaggcccccacacccttggagcacaagagcattattcgagtgcagaccacaccggactacaggccccaagaaggctttaccaacggcattacacgagctcataagagagctgtgcctgtttgaagaacgctcttgggtgggcatgacacagccgaaggtgagtaagggcccgctctaaggaccacacacgaggagagcgcgcgcgcccagacatgggccgncttgtggccaacccttaactgagaccgacctggtgtgccccttacactgagaccgacatgtgctgtgcataggt

SEQ ID NO: 297938 - DNA, 502 bp, Homo Sapiens
ggcacgaggagagcagagcgctgtctgagccgagcgctgtgctctgcgccgaaccctgtggcatgtagagaggtgagaacacttggcgcggggcacgctgtatatcggagccaggccgaggacctgagaggtggaaggcttcttttccgtgagcatgctttcgggagaacgtgtggggcctgagctgatgcacgccgtcaaggaagtgtgtcaagggtgtcgctgtgccagaggagtttcaggagcaccacctgagtgaagtgcacaaaggtgccattaatgggagtataccccgaaggagtataagggggagctaggctcctatgagatgccgctgaagcgtaagttggacttaatgccaacgtaatccatgtgaagtgacttcctggtatatgaattggacaacaattatacctgggagcatttagagccacacaagggagtacagattttgggacatggaagcaagggggtgaatggagtttaagtggacacgagccag

SEQ ID NO: 297939 - DNA, 314 bp, Homo Sapiens
gaaccgcggtgcatgtctcacaggcactgagcccctaacccacgcaaggttgacctaaaccgctatgcaatggcatgagagccttggctaacggggcatacctgggtccctacaaaggcatagatgtggggcttgtagattacccccagctcctgacatacccgcacatgacaatggaacaaaggtgccacacgctcggtcttttttacaaccagtgcctctgacatagtccccatgggccggtgtccaaagctcttttcattggccaaggagggaagggtctgtgcaacagaggttctttgatcaatcaaaaa

SEQ ID NO: 297940 - DNA, 716 bp, Homo Sapiens
  misc_feature (61)..(237): n is a, c, g, or t
  misc_feature (507)..(507): n is a, c, g, or t
tgaaatcataggtggagcagcatgaaggtgcaggttagcacattgatgatacagggtcaannnnnnnnnnnnnnnnnnnnnnnnnnnnnnnnnnnnnnnnnnnnnnnnnnnnnnnnnnnnnnnnnnnnnnnnnnnnnnnnnnnnnnnnnnnnnnnnnnnnnnnnnnnnnnnnnnnnnnnnnnnnnnnnnnnnnnnnnnnnnnnnnnnnnnnnnnnnnnnnnnnnnnnnnnnnnnnnngcatattaatacggtgctttatataggtaactcaatacatgtttatattgctaactgaaaagtcttaccagaggtcatgccattgttgtcctttataaccagattgacagcaatcttcctaatcttttcctttccaattaataggcttttatatagcctagatcttcaaaagtccacctgctttagcccttttcctgagggagataaagtggtatctctatttttcaattatgaaaaaaatttattgagcacttgggctaagcactgcanggtgagaggatgaggaagataagaagaggctcataagttttgtgggggagctccatgagcagatatataaggtaataagtgctgtgatagaagactgacaaggtactgatctagtctggggcagaagagtggggagtattgaagggtttttttgtaggataaactgtgctgctgctggcttttttgagatgagattggccatccacctt

SEQ ID NO: 297941 - DNA, 301 bp, Homo Sapiens
ggtcaagagactgccagtcagtacgagccagatgtatccagatgaggtacacatgttagggataggcgacggaacgcgggccatgccacaatctgagataggcgccttgagtacttactgtggcctttaacactgcttagaatctattggtggaaccggtatacgacatgggtcatgcatgaactctatgtatctcatgaaggctatccgaagctgaaatccttgcgacccgacgagctacctgtgtatactgatgctccacggatatgtatgaccacagtgatatgatgcttagggaggg

SEQ ID NO: 297942 - DNA, 441 bp, Homo Sapiens
  misc_feature (23)..(23): n is a, c, g, or t
gatagggggaggggaggccctcncggcgattgtcggaagcgccaacacaagacccccgttcaccctcacgccagactaccggagggtcgggcggacgccgcccattgtctccgatatccccgacgtcaccgtgacccccgcgaggctgcttttcttcgcgcccacccgccgaacggtgccgcttgaggatatggccccggccgctgacgccatcatgtcaaccgaagaggaactggacgggtacgatccgcagcctctcgggaagcggtcgaatgtactgccgatgatggagctgctcagggaatttggtaataacaccagtactgacggctcaataccctcgactgcggcgccagcagacgatggaggacgagctgtaccggatgacgatggagattatttctcagtaccctccggagcagtccacacagccccaggacc

SEQ ID NO: 297943 - DNA, 655 bp, Homo Sapiens
  misc_feature (638)..(638): n is a, c, g, or t
gctgtggccacagtgataaccaaagcgtatagtaccatcgatctgcgataaagcactggtagcttcaggtcccggtttcctttgtaggctaacaggatctaggcctcatagtagctccgagtagatggtataggaattttaatcgtgcaagctgtggccgtattaacgaagatcttacagcagcgtccattggaacatcatgtgccatattagaacgaactaactcgaaactcctacacatgaacacatgcacagttatttgatgaaggtgactattcacttgacacagtgctcgtcaacttcatacgatcagcctaaacgctataactctgctacttgctataactttagtgctatgtctgacactatgatgctataagtgatatgatgttgcaagacggcaaagacatcgcatacctttgccgattgccatgactatatactgatgtgacgtaccttgctctttatgacagttaagtgcagtgatggatgcatagagaacctatatagagctaggccatgcttacctatatgccgcgtactacttagactattgatagtgggattacgagcaattaactgatggttgcaagcttatagtgctacgttcacgtggcagaccacggagacgtcagctntacagttgcttatgccc

SEQ ID NO: 297944 - DNA, 581 bp, Homo Sapiens
  misc_feature (142)..(150): n is a, c, g, or t
  misc_feature (181)..(234): n is a, c, g, or t
  misc_feature (433)..(433): n is a, c, g, or t
  misc_feature (445)..(445): n is a, c, g, or t
  misc_feature (458)..(459): n is a, c, g, or t
  misc_feature (521)..(521): n is a, c, g, or t
ccgcccctgttaataatggcgaggggggcctcccccccaaatttgtttttccataaaaaaccgggggcccacataaacccccttttagaagggaaaatttggggccaaaaaaagtttcctcccttttaaccccgggggtggnnnnnnnnntgtggcccccctttttttattaagggccccnnnnnnnnnnnnnnnnnnnnnnnnnnnnnnnnnnnnnnnnnnnnnnnnnnnnnnggggggcccctacaaaaagggaacagagtttccggggaaacctttattgcccccggagattgggcctccccccttacccggaaccttccaaaaaagggagaggcttggcctaagagtttgagagtggacgcccctgggaattctaccaggggggaagttttacgaggttcctcacaaggaaagagttgggcccaccttntgcccacacaancaccagacctggnnctggctcaccaaccgaatatccagctaaaaggcggattggtgtggtgacgttctcaacccanttcagtgaaaatgtgagagatagtctttgcgcatgatgtaactacaagccaaaaaacctt

SEQ ID NO: 297945 - DNA, 287 bp, Homo Sapiens
ataacctctgcgattgcaacctccgcagaccatcttgtcaagcatctcctgcttctgggacctgccagcaccgttattgaggctagctccttattgtcaaccaaccatgacctcccagagacggcacaatcatttcatcgacgtagatgcatccgacgacagcctgatcacttcgtccctgcacgccttctacacctacctgtctatgagattctatatgcaccgacatgatctgactctataaggcgtgagccagttcttacacgttgaccgagagccgcgtggct

SEQ ID NO: 297946 - DNA, 367 bp, Homo Sapiens
gaaaggagatcctacaggggcccagagccgagagactcgaaagaaggcaaaagaaacatcagcaaagtatgctattgatctgtgacccagtgaaggacagactccttcacttcggggtcaccctttctcccttcaagggcaaagaggaagtcataagaatccatttcatttcattctaggtttatttgtagaaataatcccccatacttctagaaaagattcatggaagattacagttaaaggcagggtaaacaagagcagaagaactaatggtaaataaagaaaatgaaacaataggcacaccagcccaggccaagaatagctacaacaattgatgatgttagttctgagcttctttgtcttggtt

SEQ ID NO: 297947 - DNA, 756 bp, Homo Sapiens
  misc_feature (463)..(463): n is a, c, g, or t
  misc_feature (501)..(501): n is a, c, g, or t
gagagtgagagagatacgagacaaattagacaaccatttacccagatagagagtgagcgatagatatagagacactagcgcagagatatagtaccgcaagggatagatgactatgttacccaagcattctttaggagagactaacacccatacgctctgcataatgatgtaactccatattactctctgtggagagccaaagctgacaccccggtaaccagacgagcatcctaagaacacgtttctgagcacacccgtctatatatctaaatagtgcgaagagttataggtagaggctacacacctatcctgcctggtgatatctgcctgtccaagatagaatactagttcaactttaaatctgcgcacaaaacactctaaatgcgcttgtagatttatctgctagtccacagaggaacagctctttgagcactacgacaaaaccttgtgtagagagagatanattgatcacccatagagagcctatatgcagacaccatntaagaaagcgctctagctcatcacccactacctaaaagaatccgaaacatatatactgactcctaacacccaattggaccaatctctcaccctatagaggaactaatgtgtgcataagacacatgataacatctttctacgcataagcctgcgtcagatgcactgaactgactatttacagcccatatctacatgatccaacacgtcttattacactgactgtgtaccacacatgtctgctctatggagggtgtt

SEQ ID NO: 297948 - DNA, 345 bp, Homo Sapiens
cagagatagagagccacagcaaactctcatatagcgctccgacgttacggagcgactattctttgcccttcgtggcacacatgtaccgtataacgccatgttacctagcgcactctgacaactgacttcttacctaacactttgacacgctaactccaatgtgcaccacagaaggagacacctgcctcacttatgaaggcttggaccgccaacttatatcctttcgggcacccgctacggacaggcacgcctatacacaccgtaagtatctcccagaagacttttgtaacggccttgagcactgaggttttttgggttcgaccttccggctgtgagcacagaccc

SEQ ID NO: 297949 - DNA, 263 bp, Homo Sapiens
tttggtcctatttttaatttaggggtaaacaaatttgggaccctttaaaattttgcccacgggggaaaaaggaacacaaaaggaaggtggggtccaaaaaactcttgggctttgggggggcaacccaccccccccactctttttgtgtggggggcgcgttataagacgcccccgcgggtgaaaaccaggaccccccgggaagtgtttgggggggaaaaccccccttttccacaccagtttttaaagaagagggtgtttttttt

SEQ ID NO: 297950 - DNA, 302 bp, Homo Sapiens
  misc_feature (133)..(133): n is a, c, g, or t
gactcctggtcgctatcggcgaggttatttcgcttgttaaagtgtttaccgagtgcagggcatattggggaattacctgggtggggcggaacggtcagcgttaccagtagtgtgattacgggggcaatttatnaatttcattcggatccacggtgcgccctcaactagtacccgctgagaattgccgggactttagaaacctggggccagaaaaattttccacaaagttggggaaaattggtttttgccacaagtgtggagaaaattccccctttgggggcccccaaggggggggaaacccc

SEQ ID NO: 297951 - DNA, 415 bp, Homo Sapiens
  misc_feature (306)..(317): n is a, c, g, or t
  misc_feature (357)..(370): n is a, c, g, or t
aggacgggaagcggccggggaaatgtccggcgccaaatttggctttaccaggggttttgtgtataaaaccttccccttacaggtgggggccaaaaaaacccaaatccctcgggggcccccccggcccctccggagaactaacccctgtgggaggaaatgcccaacccctccccccgggaaaaggggtttttagcggggaaaaaggggtccccctaaaaccaagggcccccaaaaagggggtgggaaaaatcccgccccgtttcttttggggtgcaagcgccccccaggggaagggtccaccagggnnnnnnnnnnnnttggggcaaaaaaccctaggaaacccctttttaagttttnnnnnnnnnnnnnngggggaggggtttggggcccctcttttgggtcccccccttttttt

SEQ ID NO: 297952 - DNA, 299 bp, Homo Sapiens
tagtgcgagatagtgagtgcccatagccatgtgcagcctctgttccctgctcttgctgctgaccccctgccttcctttcagcccttgccctgtgccaacgctgcccgccctcatccttctgcacttccgccttccatctcctctccgttctttgctatgtctcttctccctgtccatcgctttcccctctgttcctgtctctcccctttctatcacttgtcttaccgcttctcttctcctcttcctgttacgcctccgcttctcgcgcctctgtatcattttctccctctcctcccttc

SEQ ID NO: 297953 - DNA, 402 bp, Homo Sapiens
ggcacgagctgacctgagacagagagtctatattgcctgtcttctgtctcgtgctccatcctactgttggcacgcctgtgctgcctggtccctgtctacctggctgaggatccacagcgagatgctgcctagaccacagacacattgcaccatgatcaggagcactcatcctgcaacaagatcaccaccaactctggttcagtccgactttaacctgatcacggagctgtatacacgactacgacagcatcattatcatcatctaatcactgagcatagctactgcctttgcgatgctctccatgtagaccaaggctgacactcacgatgagattatgtagagatcgaatatccctcacggcgatgacggaggctcagatccatgcaggctacaggagcatc

SEQ ID NO: 297954 - DNA, 360 bp, Homo Sapiens
tgcaggaattcggcccaagggtcattctctagaacaccagatgcacaagctgaaagggggcgacagagcatatgtgacctcatacatgcgcctgaacctaacattatgaactataaattttttgagcctgcccacagaccagatgttatcatcttctgaacagcatttaccgaaacctgctgcaatgacggaagtggaacaactggattggctgagagatccaattcagaacgtaggctaggtcagccgatttggatgccatcaacactccttttacctaatcatgagccagatgcctaagaaggcatttcaacaggatcctgaggaccagcggttgcccatgtctagactgcgctgctg

SEQ ID NO: 297955 - DNA, 341 bp, Homo Sapiens
gtcaccatgggtgatcacgcttgcagctttctaaaggacttcctggccggggacgtcatcgctgacgactccaagaccgcgagcatcctcatccagagggtcaaactgctgctgcaagtccatcatgccgttcagatcaatgctgtattactatcattgtggtagggtaacctggacaacgtgatgcggaacttatccaaccaagctcacaactctaggttctaggactacttccagcccttctgactaagatgatccaatatgtattagccctgatgacgctatactggacagaacctatctttcggtcgatcctgtgatgccctgccttagctgtggct

SEQ ID NO: 297956 - DNA, 300 bp, Homo Sapiens
gctgaggcgatgcgctgcgcatgcgggagtgcgcgcgctcgagcggaggctacgtctttgtacagagcatggctgcaggacaagctgataaggacagtgagagagacaatgctaacgcccatctctctcacagagagctgggctacagactgctgtgacccgtatacacagacactttacgactaccgccacaagccatggacagcaggttgtcaatgctgacgggttcagtggttttattctcgagaaccttactgccaatgtgctgaagataggcacgaatgcgtttcggctcgtgtg

SEQ ID NO: 297957 - DNA, 137 bp, Homo Sapiens
gcgagaactagactcgagggagctgtaacgctgtccgctcaccatctgttatctatgcgaggcccatggaacagacgctgagatgaagagcaagagcatactctctggatctacattaccggactcttacactgcgg

SEQ ID NO: 297958 - DNA, 394 bp, Homo Sapiens
ctcgacgtcgcctagaacgtcgtgctggctctggccgagaccgggtgacagcagacaggagactccaggacatgctgctgagcaatgctgggagctccgatattacatcagccactaaggctggctggactcagaaacccaagagaagaggacaggccaaggaggttgtcaaagcccaaatactggcgaatggctgaacctaaattcatgcaccagcatgtgactctatcccctgactaacgacgccataacgtatcactaaggctcagcttcaggactgataaccaccacgacgctaaggagccagtgcttgacactgatgtcgaaatggcgcgatggcgcatgaccgagactctgggaatcaaatacctcaggccctgcatcttcaggttgc

SEQ ID NO: 297959 - DNA, 375 bp, Homo Sapiens
ccggagaaatgcataggcatggcggctaagggaagaaggcataagaaggcagattgaggattgttaagaagactccgcccttgcccccagctctgcctaccatagtattgctcccttttggtcactgatgcacatgactaagaagagttctctcctgagtaactacatgactttggagatctttgtcattctcttcactgcttatcttccagaactcatgattacccacacatgcctttttaccaggcagtaagaaatgcagcccccctaggtagtagcatggtcccctccttggcccactccactcttgccctcaacctctttcaaccaaacattatcacccaccttaagttaaggatcttgggcttggctggg

SEQ ID NO: 297960 - DNA, 589 bp, Homo Sapiens
  misc_feature (50)..(195): n is a, c, g, or t
  misc_feature (213)..(437): n is a, c, g, or t
  misc_feature (439)..(466): n is a, c, g, or t
  misc_feature (544)..(544): n is a, c, g, or t
  misc_feature (552)..(552): n is a, c, g, or t
ttttcatagatggagcgctttgtcaacatggcataatagaagcattagannnnnnnnnnnnnnnnnnnnnnnnnnnnnnnnnnnnnnnnnnnnnnnnnnnnnnnnnnnnnnnnnnnnnnnnnnnnnnnnnnnnnnnnnnnnnnnnnnnnnnnnnnnnnnnnnnnnnnnnnnnnnnnnnnnnnnnnnnnnnnnnnntcacatatatgtagtcgnnnnnnnnnnnnnnnnnnnnnnnnnnnnnnnnnnnnnnnnnnnnnnnnnnnnnnnnnnnnnnnnnnnnnnnnnnnnnnnnnnnnnnnnnnnnnnnnnnnnnnnnnnnnnnnnnnnnnnnnnnnnnnnnnnnnnnnnnnnnnnnnnnnnnnnnnnnnnnnnnnnnnnnnnnnnnnnnnnnnnnnnnnnnnnnnnnnnnnnnnnnnnnnnnnnnnnnnnnnnnnnnntnnnnnnnnnnnnnnnnnnnnnnnnnnnncgactgagtgattaatattatgatagtagcattagagagtatgatcacagtggacgctaggcgggcgcggaggctacncctgtatnccacactttgtgaggcgggatagaggtgcactgaggt

SEQ ID NO: 297961 - DNA, 178 bp, Homo Sapiens
ctaagaacagcatcgtgtaatgtgagacttgtttatgtgcggagatttgtggtgaacatgttatctgtaattttgtagcctgactaacgtgcttcatcggatgcatgacatgtgctacatgagcaactactgtgcttcttgtgctttggcggcttgactagtgctctatctacagttg

SEQ ID NO: 297962 - DNA, 742 bp, Homo Sapiens
  misc_feature (456)..(456): n is a, c, g, or t
agctttatactacgatgattccgtaggctcatatccatgaatgctcacaagaactgctacttaacctcatagacccatacaggcaggtgcagctgaccacatgctctggcccgctactcatcgagggtctgtggctatgggttaatctagcgggaggatgtctaataggagtaccacacagaggccttctatgtcaagttcactggacaacctttgatggcatgtcacagatcatctgtctcacatgacaatggatctcaacgggttgccgctgggagcaaggcactcagcagacactgatgacttggtctgaagaattacatcttctgtaaaggcacatgggagacacccttctgagtcaatgacaccgtagaataggactctcactgggaccacgtgcacacggtcattgtgcatattatcaagccgatatgcatgttaacatccattactgtntgaagcacttcagctgtttcatggtgatgtatgaactatgccacgacacctgcatatttatactgactgatcaagagagaccacatcggctggactatgaacatacccaggatagtatcacctatgttgtggataatgatgacagtaaggctgcctgctgacacttatccctgtgcataactgctacctattattccaagagctgcctgagttcactggacatcactaatgcctctcaggacctgataatgctgggcgggtcatcaacagactaggactgggctct

SEQ ID NO: 297963 - DNA, 439 bp, Homo Sapiens
  misc_feature (424)..(424): n is a, c, g, or t
ctcaaatccctgaggttggtggcaagcagtccaggccctcgatgcagcttgggctcttgactgtcacatgagtgcctgctcccaggccagcagggccaagaaagcgtgtcgggagccacctgaactcccagatacactttgcagggtcaatctttatttgggcctgccttagagggcccagcttccagcacagctggtttcaggagtgggtggactcaagtctgaggacctctctccctgtgctgcttcctcctcccaggcctccgtttcccctccggatgggcggtcctgtacaggccttcacagatgcccctgtggagttctggtccagtggggtagatgaggccagggtggtgagaggcagccagcatcagggcctgagcgactgagtgcacctgtggcctcagagacccctgcacactgngtgggctgtgggggg

SEQ ID NO: 297964 - DNA, 374 bp, Homo Sapiens
  misc_feature (171)..(184): n is a, c, g, or t
gagaactcggatcctgagtcggccgaggttttgatccactctggcttctaagtgtgggggcctcatgatgtgacccgaggacgaaaacctgaaggtgacttggagttattgtccgatttgcaccatgagaaaggccccagatggaatctggcacgtatcggcggttcacannnnnnnnnnnnnncttagcgcgtgacttacactgttgactgactcgcactctaccgtatatgaacagacttatcctgagctaaatatgagtgaccaatggccagtggcccagccctcatgagatccttgagaacctgtgcccagtgtggactgaatatatctggcattataccttttagggcatgagacatgtccatgactgt

SEQ ID NO: 297965 - DNA, 352 bp, Homo Sapiens
cctagacgacctctataggacagcctacgcagaggagagcgcatcggtgagtctagcctggcagtatatcggaacatggctctgcaacacactacagaagtaacactaactcagtactgtatgcacaacccgaggacctgactgagaggcctgacagtgctacagagagtgtagtactaagctcatgcgctggaggctcgtagtagcggtgcgtcatggcctggacaggagcaagaagcaggaatcagcactacggaggcataggtcacgctcacggaatgcagtatggtctgagcagtatagtggtacacttgcgtaactggtacatagcagttgattgctcacggacggt

SEQ ID NO: 297966 - DNA, 410 bp, Homo Sapiens
gcactattgatcagggtcagctaatcgacaatgccgatttatagctggcgcttgatcctacaactgacaggccagagcgacctgggccctggctcactggctgaggaatcacacggagacactgccacagagacagatacatgctaccatgatcagtataactcaaccattagcatgatcatctaccacctggctgacttgacttcagaatatagcgtaagctgtctaactagaacataaggaccactaacatattctgcagaaggagcatcggtacagccttttattgctatccatggggaccaaggctgacagttaggaagaaacactgagaggcccgaaccgctagcttacggccataccattggctcttcatcggcttccacagcctcctacgtacccttagccgg

SEQ ID NO: 297967 - DNA, 255 bp, Homo Sapiens
tgtctaacgagccccacagagagacagcctagacgacagatacatggaaccatgatcaggatcacccaagcttggacaggatcagactcgaacgggatgagtgcgacatgagcctatacagacaggtggcacactagtccaacagaaccaatatcatgcactcaccaatgagcatcggtacaggcgttgcaacgctatccctgatgaccaaggctgatactcacgatgatgacggcttccaagcttctccgtccg

SEQ ID NO: 297968 - DNA, 290 bp, Homo Sapiens
tcaataagatttctggtcaattaggggctctgttattcacagccagttcattgagtgatcaattttctgagtgttttgttcttcttattcttgactggttgacttgtcagagtgtagagtgctgtgggaagccaggtgtctgggtttcttggaccctcccattctcgtcttgcccttccccacgagtttgcttcttccttaactttctccccctctccgccccttagtctcccttccattatgcccctcagtctctgtgtgttctatttttcttccagcgtgggtcccct

SEQ ID NO: 297969 - DNA, 361 bp, Homo Sapiens
agcactcccactcgagattattagatctcaaccgtagagaatcacattaccccataaagcactcggctttaggcagagggaacccggctcatacgaaatagtatcgtatgagaaggataagttattatgaccacacgtagcatatggaggattatacgactataacttgtgcatagtggattaactactctgacctggttaaagctgacacgcgtacatgtcagttagcatatgtgaagagccatgtggtagcaggacagaatctagcgcgcctagcgatatgtggatgaacctgatagactagtaccaggactcttgcttgtccagagcaccctgtggataccctggcattcacctagtc

SEQ ID NO: 297970 - DNA, 364 bp, Homo Sapiens
agatactttgatgtgaagactgtatatatttaagataggtataggataatgtgtaatatggtgaccttacagcaaatatttgccaagcatactttttatactgtgcttgtggaggactgattaggtcgagggaatcattgtatgcattatatccttattctatgactggattatgaccatgtatgaggctatgatttttctaatgggatgactattagtgaaagtcaggttgccatgactcatcataggctttctaacctactccttgaatgcgactactcattgcgaaatgcatgccatacgtttgatacgtaactgtgtgatcaacagctaactctagtcgtgatgtggatcagacttttgg

SEQ ID NO: 297971 - DNA, 338 bp, Homo Sapiens
gagagaactaggctagggcaaatcaattacgattatatataaaggggtgaatggtatggaacgggaatgatctattccatttgaaaagcaaactgtcctgtggtgataggcctgaaacaggaaactggagaagccaagtggagctttaccctactcatggagaacagggcctgagagaaagctgacagcttttagaacgcgatgagcctctgggcacccttcaaggcagagactgaccctatggagcctgatgttagcataggaccagggcatgtgctcacagcaccacagtcatgcccagatcatggtattaacccaccttgaggctgctcaggctt

SEQ ID NO: 297972 - DNA, 417 bp, Homo Sapiens
ctaatgacctctgacttatcgggctaacttctgtctgatctaaggtatcagactcgacaattgacttgcccacttagacgtctcttgaccatccatagctatgtgactgacagaggcctctcgctgctgatgctgtgtgcctgaccatccttgtgattcaagggtctccattgacgagctgtaagtacaacgcactctgcttctatgtaacagcgattcgacgtgatgatgcccgcacatacgctgtcatggtagagcagatgtctagtagcccttcgagcccttcagtcgctactgctgcacaagctcgtgcgacgaaggcctgtgtgctgtccattgatgcactgatgattctgagccaataacgactgagacccatccgtgttcgccttgtgactgccccatgagcactgggct

SEQ ID NO: 297973 - DNA, 405 bp, Homo Sapiens
cagagtctgaactctggacactatgggcgcacgactattccaagatttgtgtcttgtcctcctgacattgcgatatgagagccatatgacccaacagacgcagctggatcagatgcctagcccgagctttctcacccatgtgaaggaatctctctctcaggtactggcagtcagcgaagacaggcgcccactaacctgtacgagaagacatacctgaccgctgtagatgagcttatggacttgtacagccacagcgcaacatacatgagcacttacacaggcattcttactggccaaggtctttctgtgctgaagggacagtggtaacaggcataccccgcattagtggacacggggagagtgccctaatggcctgattccccgctcagactgagcttccctttc

SEQ ID NO: 297974 - DNA, 460 bp, Homo Sapiens
  misc_feature (416)..(416): n is a, c, g, or t
gttcctgcccaacaagctctgccagaccatttaccctattaaaggatactcgatagtaaatgtaacctgtcgcactaacatttgctcctcttgggaacgatgtattatcatgaccatgcacaatctatgacgtactacatccctgtaccttatgcataaggactctactggtattaactcatcttggcaagtcaaagctaatacccccgaaaccagtctagctacctaagaacagcttatggagcacactgcgctatgtcacgaactcatgtgaagatttataggtagtggctacaaacctaccgtgcatggttatagcgtgatagacaagatagcatcttagctcaaactttgtgtgcacaattccctctatatcccctttgagatttaactggtaggccatagaggcacaggtntctagacactatgcatagaccttagtttgagagtaatacattcc

SEQ ID NO: 297975 - DNA, 257 bp, Homo Sapiens
actgactcctaccaaagagtacagttccaactgagctgtccagcctttgctaccatacctatgggctgtatacaccatggccttggacaccctgtgaccctatcacttcctcagcctctagtattgtacactttacagagacatggtgctgtatagcctgtatctaggtagcgcatgataagtaaggctgacacgaatgcatgaagaggcgtggtaagcacttgataacctgtaggaccatagcttgattgttctgt

SEQ ID NO: 297976 - DNA, 661 bp, Homo Sapiens
agagatagagagatagcgagtgatatacctatattcctttgttgataaatgcctgacatactcctctctttaacctattctcccctctagtcccgcctatatctacatcttcatttcttttcttctaacctttttctgggctacttctatccttaccttctttcctgtactcttccccactctgattactaccttctctcttactgcttctttcttcacatgatctcactcttctatcaccacactcagattggtcagaatgcttactctcctttagctattcacaatgcctcttccaacctcttttatcacccccttagcttcctcagccttcccttaacttttacgtacacacgttacatatccttctctctactctgatacactacctacattattatcttttacattctatattcgcctgtgcacatcgtctcacacctgcactcccttccttttctgccgctcatattacatgattcctttacgcctgtccttgcactacatgccttgccttcatccttcgaccttcactatccctcttctccctttcacctttcccgctgctttgccctaccccctctataccttgccttttgcatcgtttcccttcatccctctcccttgtctctactccaccccttatccctcttttttctct

SEQ ID NO: 297977 - DNA, 354 bp, Homo Sapiens
tgcacgtgaagccatgagcagtagaacctgttgcgacaccctatactaacaggctctcaaagctctgctcgctaaccagataacgctccgctagacactgtagacagtccagttgaataccagcatgcagaactattatcctgaaaatgtcaagcgcttttggaatacctgagtttaaaaccagtttgcggccttggtgctttgtggcagccaaggggtacagcccttactgggctaatgctaagcctgaaatattcgcctaatggacatggcaggacttgactgaacaaggagtagctacttttaaagcttccaccaagtcttggaccaagttttaagaatgcatgtttgcct

SEQ ID NO: 297978 - DNA, 403 bp, Homo Sapiens
ctcattcatgaactctaccagcccagagacggcttccagctgagccttggctctgaccttttcaccgacctggcggtctacctgcgggacacctctgtcagtgccttgacgacgctgtacttggcctactctgtacctacctactctagggcctctgacggggccatgaagcacatcaatgatcatgcggcagaccacacacagggcctgatcgtggacttgcttaagacccttgatgctatgcggacgtgagcatggtgaatctcatcttgtttgctaaccttgagacacgctctactcgcagatgcacccaagatcgtgacttattcgtgacctaagagactgaggtgcggtgacccatgatgagccgcgctgatcagcatgtctccttctgggccggcct

SEQ ID NO: 297979 - DNA, 421 bp, Homo Sapiens
gttggaggccatgattacggaatactgtttattgaagatgaccacgcgggcggagaacatctggttttcggtagagcatccgtcgacttcgctggccagctagagcaacgccggcagctcacagatgaagcgatccatcaagcggtgcgcgctcaagagtcgatcagcctggagcgctgtttgcgcaaccgagctggtgaggccgcttatccaggacgagctattctgcgtgcgacataggcgctgagtgacgagacccgcatagcgcaacgcgcaacacactgcattcgtgcggtccagagccatatgcgcctggatgacgcattcaggctaacccatatccagcgatgcgcacacctgtgccgtgcaatggctgcaatgccataacgctgcttcctacaagtcggccagcactgtgccc

SEQ ID NO: 297980 - DNA, 498 bp, Homo Sapiens
ccggccctgagcagtccatctaaaacacaagcccaacctgggtgttgccttgttttaaagcttcctgggactttcccatccctctatgggggttggggagggcaagctcttcagctggcaacgaagccttgcgtgttctagtgccttcttgcttgaccagtcccatttcctgcctcagtccacagcatcatactgcatttagttcggtgaatcccctgtgcattcttaaacctttccaccttgctggcaagtcagtctagaatccctttctcagcctcttgtttgctcgtggcctccagttctgtcttgaaaatcctgctgataacaccatctctttgaagccttcactgaacttccccttcctgacagagctaattactcactacccttttctgcttcggtatcttgattaggcttccattattacaagtagattatagtggggtaattacacatttaaccatctgatcacctactaggccctgagatccattcatc

SEQ ID NO: 297981 - DNA, 414 bp, Homo Sapiens
cccaagctcatctgaaccactataactcctgtgtgtgcccctgctgagctggtgtggacagctctggcacactcagtgctctggacaactataggacgcgaaataccaacagatatgacgattgaacatctggcattggcattagagggccagtgtagcgctcaggcccttcatgatgcaatgcgctgcgcggcctcaataagccatgggaaggaatgtttgtccagccactggctgcaccaatagactgcccacgaacacctgcccaagactacctacacacgctctggagatgagctcatggtctacagcagcatatgcacacatcccatgatctctcacacatgcatttgtactgaccaatgtattgctgtgctgactgttgacgaatatcaatacgaccctccatcccgg

SEQ ID NO: 297982 - DNA, 629 bp, Homo Sapiens
  misc_feature (402)..(524): n is a, c, g, or t
tgtgagcttgtgctcctgcgcctcagctcctctcgcatcttctcctgtttgtgctttcctctttcccttcttaccctcctgcaccagccccattctcctgtgctctccaggcctatggctatgtatgtgctcatattacacgtatcatgatttccattttctatgcactcgtacctgtcttcatgtcccttccttggtgacagactcttcttctccttattattctgtgctctctgtctctgtgcatcctcatctcctgtaatctgtgtcttgttaacttgtcttttacttcccacacctcatctcatactcccctgttattccatctcccagcttatcatcccctgtccttcattctcctttacgcctgctttaccatcctcacttctctgagtttttctnnnnnnnnnnnnnnnnnnnnnnnnnnnnnnnnnnnnnnnnnnnnnnnnnnnnnnnnnnnnnnnnnnnnnnnnnnnnnnnnnnnnnnnnnnnnnnnnnnnnnnnnnnnnnnnnnnnnnnnnnnncctgcctctctcttgcttccttatctttgctcctctttgaccctctttttcctttttgtcttccctctacctgccggtttctttcatgtccttgttttctttctt

SEQ ID NO: 297983 - DNA, 803 bp, Homo Sapiens
  misc_feature (732)..(754): n is a, c, g, or t
gagcgcacgccattcatgtcgcccgcgcagaaatgcttcaggttatccacagtctttcgaccagatgagacaggagtgcgcgatactggatcctcatctcagtcgggctgatggccaagatgtaaaattaggagcagattcccgagccttaatgttctctgggtagttcgtacctacttaaccgatgctgtggacgtcacgactggggcccctccggtaagaacatatgatgattgagcagaggaacgtgcgatgctcccaaagtaacaaatgactggggtgacagtaggaatctacccgactcttttgctattaaccttgcacataggatctaaacgagtactataatgtatgccagtcactacaccatgaagaaacctggtggctgtgctactatccactgtctacttgatacctggctctcgtcctaataaccgaaggaggcgactcgagaccattacagtgctaggtgcattaatcgcccaggaccatcacgagaggcgctgatgtatgctgttgatacatgtaatggccgacctaacacacaggctaaactgtgacaacccctggaaactgcacaggagccgacaatctgcggcgacacataccgccccactccccgcgcacgcaacgtggaccacgcgcctcgccctcgagcacacccgcgcaagtcccgactggggccagacgcaggcaagccccgcgagaccgcacgtaacggccgcagccagnnnnnnnnnnnnnnnnnnnnnnnactacacgagctgacccgccgcaccctaaggcaggagcgccccggcggg

SEQ ID NO: 297984 - DNA, 218 bp, Homo Sapiens
cgttaagtacctaagcactgtgacgtgatgcaccatcgcgcaatgctcctgacgcgagcactactactcacacatagacaaccagagacacgctcaatgtatccaggaacgatgcccgacatgacgtcagaggccggaggctggcgctccccgcgtctgattacttacccaccaactggcgctagttactcggcgatcagctcatctcatcattgtgg

SEQ ID NO: 297985 - DNA, 606 bp, Homo Sapiens
gggtgttgtatgtactggacacactgtggcaccttcactgtgcgcccacgtattgggatggcctcaggcgacatagggtatgtcttcgagtccggccgacaatagacttgccgggcctcttacaatctctctctctggggtcaactttactttgtgtaaggcacagactcctgcttatctcatagtgcctctcagttgaagaagtttccgtagcacgtgtttttggctctgaactcaacgtatgctgagaataagtgtcctagacagactgcacctgctgaactgcgctaatacggatatatcaagtcctcgtggaagactctctcattgcgcttaacgcaccgtacagtcttcctacttaagataagacactcgttccatagacactggcacttctgtgagttctcgcgggaactgcctggacacctgagctcctaggctaagtaccctgttgtacactatacgggcgcttatatagaacctgcctaatacagggcagatgcagattcctatacacgcacacactatcacacactcgcgcatagcctattggttggcgtcagagccctattgtataccgtcccaggctctgggccccttaccgcg

SEQ ID NO: 297986 - DNA, 195 bp, Homo Sapiens
gggttctctagcctttgtacacatagtttgaaaatgtcacaaatggatggctgcagctggaaacaagcaaaatctcccagagtgagagaataagatttctagaggtaccacattacaatactcagaaaggtctgactacaacaaaaaattacaaagcactcaaagaaacagcaaagtatggcccatttacaggag

SEQ ID NO: 297987 - DNA, 598 bp, Homo Sapiens
ggtatgttccctgtgtggcatatcatacactcgcagctctggagattatgtgagggccctatatgtggatggcctgtggtcagaatttatttatgaacaggccttttgaaagtgtcccacaatcaaagtacccaactgcaccatggaagtggggaaggagggcaccccaaaggacagcgccttattctctttcacccatgcacggtcttgggtgaaggacgctgatttcctgtggatgcgtggatcccatatgatccagcccttctttgtgatgaagcaatgttgtgaatcttcactcttcccttactctggactttctttgtggaatccctactggtcttcttagaaccaggttatgcccgaggcttttatccagactctttttgcgatttgtgcctgagaagaggggggcttcagtggccccagattcataccagcataaccagcatgatcctcctggtctctcacatgccttgctccacacttggtttctatactcaggggtcgaagctcagagcgttttataggccacgagtgggactttgctctctatatgggtaatctattctccatttttcaccccgggctttcctgggct

SEQ ID NO: 297988 - DNA, 587 bp, Homo Sapiens
  misc_feature (292)..(292): n is a, c, g, or t
cagcgcgaggtgcgtggaaggcgcacctgtggtgtgcatgtcgtgcgtgcggggacatgtcggacggcgtgctcaaggagggcttgctgttcaagaggggccacattgtgcacaactggaaggcgcgatggttcattcttcggcagaacacagctgtggtactacaagcttgaggggggtctggagagttagcccctctcaagggccggatcctcctggatggctgcaccatgatctgccactgactggaatatgctggaggaccgtgctctgagaggagcgggatgactgngcctttgagataacacgggctattcatgcacggcaaccggggaaagttcaggagctgcacaggctgagaaactcctttaaggtgtcccgcacataagactggtcgcattgtggacaagatggaccgtggaacaccgggattccttaaagtccaacattgagcatggtagcacctatatgagctttcttggctactacctgtgggactggctcatattcaacagatttacgggcaggcgtctggaagggagacactggactccatgctcatggaggagcttctcggcctgtggggg

SEQ ID NO: 297989 - DNA, 607 bp, Homo Sapiens
ggccataatcgtgtcttgtaccaagccgtgtctcagagctctgtcaccctggagtatgtgaagggcgtagacaacggatttgggccagattaccagctggccatgaaggctggtcccatctagagtgcagaagatgtcgcgtcccatctacaagcgcgtgcttgaccgggaattcaacgatggcatcttagagaatcgttgcactcggggccaatgtcacgggaccctggatgtgtgaccactgtgtagctggcaatgcctgcggtttatatcaacgtatgcctggagcgggataccgttcaagacaaggtgcgcgaagctgagcgctgagtacatcttgcagtgctttaggcggaattacaccatggacaacggtgtggccacatccagggtgcagctccatggcccttaagctcactgatcgggtatgcccccatgttagactagggtggagacccgagggattgcataccgtttagatcagtagcgagggcttcttgggggccaattgtttgggaacttgggtaaagttgtccacagaaatttttttatccgaaggcccccttgtttccggcattgctttgtccccctattttggtccttccgg

SEQ ID NO: 297990 - DNA, 416 bp, Homo Sapiens
gcttctgcgggtcgcgtgtcggtgaccagcctgatcccactgatcatatgatctaactgctgacaactctgtcgaactgccatcaagacctgattgtgctacagcatgagtatgcagatgtgtgcataacgctcattgtgcaatctatcacgcgggctgagcagcatgatcctcagtgtccagcaatatggctcacacctagtggcagactctagcctggacaaggagcattataacgatgcacaacacctgcgtgactggtacaggacctacgcgaacagtatcgagcttgggtctcttgtcgcgtctggcatcattacacctatccatgaacatggtgaagaggctaatgtatgcagtcgctaccgcgagtcgctctgctaccaccatagaggtggactcactccagatgactc

SEQ ID NO: 297991 - DNA, 367 bp, Homo Sapiens
gatgactgctggcgtacagcagatgagacatctcggattgatacctggagtcatcactaagcacctcgtcatgcggctgggacaactccggcgaaagagttgtacctgagcgataacattgagggatgatagcatcgagcctgtagtgctgtgcaattcatcacctatcttaatctcttgctacaccgaacagcagatgctcagacgacttgtcgatggagctccacgaatacctgtgctcgtcatccattcatcattgcacacgagctagccgtgtgagacgcccttggtccggctagcagcacatagacggttgactgcggacctacgagatacttagagcgacgctgctcctgatgatcttgtc

SEQ ID NO: 297992 - DNA, 422 bp, Homo Sapiens
gagccactctcatcgaggagatgcacggtccgatgcctaggacgctctctagagcaccagggctactggacagcagccgatgagagctgctatagacccggaatcacgcggaacagaaggtctgcacgagccagcacatcttgcacggccgattacgccataccatcttgtgcttgctgaccatgcatgcggagtaatccgtagcgagacatacatccggtatggtgctgatagcagaatgccacagtactgtacactcacgggtcatatgggactggagtgatacatgctgttggagatgatgcatctgcgacactactggtgacatgattttcattagcggctcgagctctgagggttatcctgagcctgctcactgcaatacgcctcactgtttacgacactacctgctcgaggacttt

SEQ ID NO: 297993 - DNA, 287 bp, Homo Sapiens
cagactgctctaacagaccctattcaatatgcctgcaaagactgattgaaagacggagtgatccagacagtgtactaacatctgataagccattcccttcacagtcacatctgtgtactgcatgtagccaaactatgccatggtcttctctgaccatcactggccactatcgaacactctctatctgcctatgcctatataagctacacagaacatcacacagactttagcttactgtagattactacaaatatggacaattaggacagatgggtcccggctcccgc

SEQ ID NO: 297994 - DNA, 637 bp, Homo Sapiens
  misc_feature (187)..(242): n is a, c, g, or t
  misc_feature (290)..(290): n is a, c, g, or t
  misc_feature (553)..(553): n is a, c, g, or t
gcaagactgtgtggccttgacatgggccagggaacagggcccgtccccaggcatagtcccggctgaggacaccactgtcagcacagacagtgcagctgagccactagcacatggagtcacctctggccttcaaggcccaggtctttagataataacttaactcttttgaccaattgtcaattggccnnnnnnnnnnnnnnnnnnnnnnnnnnnnnnnnnnnnnnnnnnnnnnnnnnnnnnnngctgcaccccaaccctctcgggccacacatgttctcaggatctcctgngacggcatcatgggccttccgtcactcatatttggctcagaatcactctccaagtattttacagggtttcactcttttcctcgacaacccccagcgggcagctactgttgggggctctgagaccgccggcctgcagggtatggttctcccgaagctgcatgttcagacacaattggaggccgtgcttccagggggtggagtgagggccctcaagggccaactcaggaatttccaacgtgacccacagcgtctgagctattgangaggggtcacccgaagaagccgctgggcttgggtgagaacagatgttcctttgccctcttgcctgggctgttcctgccccttgc

SEQ ID NO: 297995 - DNA, 243 bp, Homo Sapiens
tgattgtggtttaacacacctcatttattgtcacataactttctaggcctctccaattataattttccacatttatatattttttcagatgtttattagacatatccgttgagacctaattaggattttgaagtaatgccatatgatgtttgagggcacgaagtctatttagtttttgtatacacttgccagagtgccttactcagtatatagcatttgggaggatcggttgttgtttttctt

SEQ ID NO: 297996 - DNA, 530 bp, Homo Sapiens
  misc_feature (343)..(352): n is a, c, g, or t
ccccacaaagggaaagcccccctagaatgcaaaatttgccccaaactttttatgtcccccaaagcccccccaggtttcaaatttccctaagtgtcagttcccacgggaacccctttgcctccaaaatggcgatcgtttattttaaaatggtctctgggttcattctcccttaaacccacagtgaaaatcctttaaaaatttaacccttttaaccggccaaaagtcaccaaccaccatttttttatttccccttaaaaggtgtcaaatcaaaccctgagcttttttttcccggttttgcaaaatttccccgtaaaaaattttaaaccccccctagttaaaatcnnnnnnnnnncccaaacggattaattttcaatttctaaggccaatgcccccttcaacaaaaatttttgaaaagctttaaaaccccaaggtttaaaaatgcttttctgaaatcctgttttcaaaaccccccaaaaaacccgtgtttttggatccttaaaaactttatgaattaaccctttttttgggcc

SEQ ID NO: 297997 - DNA, 422 bp, Homo Sapiens
ctgctgcgagtaacttggacgcagagtagtgcgactagatatcatagtggtgatagtgtgcgacagacacatgtggagagtacgctatgagttgtgagagaagaggagagagcacagcgcagagaagacacactcgtgagagacacaatatacacaacaccacagaatactcgtgtgtggaaggttcttaacacactataaaggcgcgaggactgggttccaatacacacgggccaaggacgttagcttgacacatatcaccatggtcaaaggttccggccatatttgcatttgggctatattttggagggacacggtatccattccccgtgtgcctgagatttctctcttctgtgcacgcgccatcggtgtgtttcacactgtgttaaggaagttaacgcgaggattctgagtgcggctct

SEQ ID NO: 297998 - DNA, 228 bp, Homo Sapiens
atctggcgttacttaatcaagaccgtcactcccatagagtctgtgtgttccctgtagtactgtgacacacaatatatggtaccggagtctcaggcttgatatattaagcactacataatcataaggacagtgatgaccatgaacccagaaggctcgaacatctagctgacagtatacacgcgcgcactgtgcgcattgcacacagtgaggagctatctaggaccctct

SEQ ID NO: 297999 - DNA, 140 bp, Homo Sapiens
ctcgatactttctatgtatagagctcggctcattccaggcttgtgtgacgaacataggcgcacggtaagtgtgagatgcgctgatggacctaatatccagatgactgtttcgaagcctttgtgtgccgtgattgatgggg

SEQ ID NO: 298000 - DNA, 477 bp, Homo Sapiens
  misc_feature (52)..(52): n is a, c, g, or t
  misc_feature (54)..(54): n is a, c, g, or t
  misc_feature (56)..(56): n is a, c, g, or t
  misc_feature (297)..(310): n is a, c, g, or t
gaccgcggtagtctccgcggacagtgcgtcgccccaccagccgtcggctgcngncngtcgtgctgatcttctcactacccgcagtggccgctgtttctccgtcgctcgtcgtgtagtcgtcttgcgtctctgcggcgcgtcgtgcgtatcacgccgccgcacgctgcgggcactcgtgggtgtatactcgccgcacgagaggcgtctacacagtgtacagcgcgcgcgtggcgagagctcgagacacacgcgttggtgtagtcgccctctcagatgcccagagcagcggacatgtgnnnnnnnnnnnnnnacacacgtgtctctgtgagcgcacggacacattacacgtgacacaccctgtagagggtggccacacggccaaggtggagtcattaagagcacggggcccgaggcccgtgtgtagagcgcctcttgtgcgtgggactctgcgcagtggctctacctgttgttggcccc

SEQ ID NO: 298001 - DNA, 710 bp, Homo Sapiens
cggacatcgaggtcaagactgcacatgaggcactgtcaggcgagaccttcagcagcgagcaaggacgttcagtgtgactcgaaagcatgccacgtatgctgagctgtctggccctgtgactggatgcgatgagcctggccgacgactagctcacggaagtgaagtgtcgtggcctgcatgtgatcctgcaggacttcagatgcacacgcaggcgcatagctgctactaggaaacctactatgcaaccgatgatgccacgcccagtcaaatacgaggataggtcaggctgcaatcaaagctcgagcagacaagctgacgtaagagggactgcaagacaccggatcgctaaggcaggcccaatgataggaaactgaaatgcctggtctgaatcaaactggtgtctgaggacaaagtactgaggcgaatgctcaactgccccatatagacccaagttactgcggaggctgagtagtaccatgagacccagtgcctgatggagcatcggactgatacggacctacacagcgtgtacgttcccagtacagatactcgtactcgatggccctgcccgcgcagtatagctcagcgcttgcgatgccgtgtatgcctgaaggcacgcgatgcacgtcgctaaccccagcagtaggtatctccagctcattcaaggctagtaggaaactccgctccaatcccccaagccgatgaatttt

SEQ ID NO: 298002 - DNA, 436 bp, Homo Sapiens
ctgctactattcaaccaatggtgcactgacaatttattcaccagggagcttttgaccctagccatgagtcaggcagagatcatagtgcatgtgatacgttagcgaacaaaccagacaatggctccctgacgatgcgcagctgatcattgaatgcgagtcatgagtggacagaagctactgtcccgactcgaactgtggcagtgaacgctgagacgcgaaacatgagttagtgaagaggggtactatatggtaacatgatagatgatgatgacaggggcttgcgagatgaacggaatgaccttagatgctcgccagactgatatactagccattgcaagaactgtatgtagagagagagcatgctaacccctatggtaagcctcgcagagacatgctgtgtacaatactttaagggcatttgctgagattgtctccc

SEQ ID NO: 298003 - DNA, 675 bp, Homo Sapiens
ctctggtggaagacaagccaggtcatgacccccaacataggccctgttggaactcctaacgacctaactccttgcacttggagtagactgcctatcggttacgctgatcatagtactgctgctaaccgacctgttaggcatatacgaatgatgatgcactgagccaggatatgagtaatgcgatgatgactagacaacagctgtttacgaaggcccttgtggtatcatactaactatttgccatgaacaagttattgacgcaggagattccaggcccgaatatgagtccagcataggctataccgcgtaactagcgctacgctggaacccagcaggtgtcaccttgatgaataccctgggctcatcaacacgtctgacatgcttagatcgttgcataatgcgcttcaagaacccgtgctggctaataccgagaacggaccaaccgtcaccacagaatcgacgcactgtttattgccatttacagggtgacgatggtagcttgagacatgcctcagagtaacttcagttttggtacaagctatatcgacgggcatttgctactcaacatttttttgaggacagaggcctatgatgcacttcaaggcaagtatggaacaagtcttcctgcattatctgagttggccggccatttaagttgtgattgacttccccccg

SEQ ID NO: 298004 - DNA, 606 bp, Homo Sapiens
gtatagtagatgatacatgaaatcacaggataaaacatacatcttcctgaagtgtcagtatacttattttttcagagttggattaaatattataactggtaatttaaagtttgcttttaactttaaatatttttatggaatgaatgataaattagcatgaattcttgagataaagtgagaaagcatcaaataagttacaggattatagcaggccctttgacttctaccccagggtgggtctggcatcgtcagacctctgacatttttaagagcagctagaaatctaagttttttgtgagatctgattttgaatgttggcagttaactcagaggtttttaagtaaatttttacatatcagacataaacatattcttgggcctaaacatctgcttgtgacctatgagatctgtcagtgatatctcctattctgagtctggctccttcagatttgaaactaaccatacgcagtagtggaacgaataaagcttgagacttgattagaacaaattcccacattaatcatcctctgtaggaaacagcttttataactcacaggctaccatatcccttttcgtggactcccttgttttgcagtgctgggtccc

SEQ ID NO: 298005 - DNA, 674 bp, Homo Sapiens
  misc_feature (81)..(185): n is a, c, g, or t
ctcttattctgttactcacgctgcactgtgcagtgacgaaagtggctcactgcaatgtgcttctacggtggttaagctttnnnnnnnnnnnnnnnnnnnnnnnnnnnnnnnnnnnnnnnnnnnnnnnnnnnnnnnnnnnnnnnnnnnnnnnnnnnnnnnnnnnnnnnnnnnnnnnnnnnnnnnnntggctctgatgaacactctggcgtcagacatatgacatgaggagagcctcctttcagcctctgaaagcgctgtgatgacaggtatgagacgatggaacatgggttcatgtgagagatgagagagtaatcgtatacaggtgttatgaacgacatgtttacaggccatattgtattgagccttatctagttcactgatcatgttgccttgagagaaacatcattctggcttacatgcacgttcagtcatagaaccttacgttggactccattacgacatagaatctattgctcacatgttagcagtgacgtccgatgttcacactggccacccatgacctttgcgtagacctaatagatacagtagtcaattaatacccctttagctaagattttagatagcgatcagtccccaattggctctattgtcaaacctattaccatcaaacttgggtgaactttacaaatgtagtgactgtaatccctttcccc

SEQ ID NO: 298006 - DNA, 338 bp, Homo Sapiens
aacaaataaataaattagaaatcaataataattaagatatctagaaaatgtcccaatatttggaaattaaagactacatttctaaataacctacacttcaaagaaaaaatcattaggtaaattagaaaatattttagtaaatgataaaaagcacaacataacaacgtttgtgagatgcaatgaaagacatattaggggaaaatttgcagttttaatgttagaaaaggataaaaatcagttatctaagcttctatcttaacaagctagcaaagaagggtaaatgaagcccaaagtaaacaaagaccaaatgatagtaacaataaaaatataaaccaatg

SEQ ID NO: 298007 - DNA, 403 bp, Homo Sapiens
ggcccagagaccgagaggccggtacctgacaagtcacaacaaacccagacctcctcgcctgttcatgtctcagaccgcaaacctaccatgcatactgtctgctggcgataattacccgagctctgatgctccccgctgctcctggattatcgggccataagtcatggaacaactgaaagaacatggctcgatacagagagtatacgtgtaacgggcaccaaagctgatgtcgctttaactcacagttatgctgcctgatgccgatgaacacacagacattctccgatgttcaaggaaagttcacgtgccattgatgatagatttggaaagcgatgatcatcgaaggctttgccaacagtgattgtgatgtactctgacgtactgcagagatacgcgtctgtgt

SEQ ID NO: 298008 - DNA, 355 bp, Homo Sapiens
agatcattgtgtgtgtataccacattttctttattcatttgtccactgatgggcagttacattgatcccatgttttggctattgtgaatagcacttgcaaataaacatggcaatgcagatgtctgtttgatatcttgatttcttttcttttggctatatacccagtagtagaattcctgggtcatatggtaggtctatttttaatttttaaaggaacctccgtggtttccatagaggctgtactaatttacatttctacccagtatacattccctttcttcacattcttcccagcatgttattccctgtctttttgatttctctgatgattagtgatattgagcatattttcatt

SEQ ID NO: 298009 - DNA, 506 bp, Homo Sapiens
  misc_feature (183)..(183): n is a, c, g, or t
  misc_feature (219)..(219): n is a, c, g, or t
  misc_feature (228)..(229): n is a, c, g, or t
  misc_feature (355)..(355): n is a, c, g, or t
  misc_feature (369)..(369): n is a, c, g, or t
  misc_feature (412)..(412): n is a, c, g, or t
ttacagtttttcataagccattttctcccaagttacattgttgtgtggcatttcatgtaggtttgtgctctgtgtgtgttattagattgtcttccagtcagaattcctggctgttaaactatttcatcagcaggagttacatccctatgttgtaagggtgatgtccaaaagatacagtaattnttaaaaataatgattaaaggactttgttagatacanagagctatnntgtatttagtatttgctgtgaagtaggtgataagtcgaattttttagcttctctctgagaaaatgaagtgtaagtgaagcgttacttttcgacattttctacatggtagttcccttttggctattntttaactttttttnctctattacactgaaatacatatttaatctgataaattctaancaagggccaattccaattatccaaaaggatttaaatcttccctggctcttaccacttaggatccccccttataggctttgcccttcaaaacgtt

SEQ ID NO: 298010 - DNA, 480 bp, Homo Sapiens
agaatttttacaaagacatttcttaccgccaagatggccggaacatgtctaccaggggcgcgtgtcttgtcatgacacgctcatgagctacacacttatcaccctatccatccactatgcactcaccaaactcttttcctagaccggaaccgatcaaaacatctcacacaatcggaggctagacaccccgagaacttcctcttatcacatatgtaacccccctgaatacctactctgctatatcttctagaggcacagaattcccatgagccacttttccccttattagatcaacctatactcccaaacatttgattatatactatgtctagactcaacaccatcactgcaccgtacatcctcacaaatgtaatcaatcataccctccaacacccccctttgatacacttaactattactcctcttcacacccttactcctttgctctacccttgcacccattctttttccttcctctct

SEQ ID NO: 298011 - DNA, 482 bp, Homo Sapiens
aagagaactcctgtcgctggacaggttcacttgctatctggccccaaccccgtaaggcctctgttcgttctgcgcctcctcgtaccttgcctaggttgaccccgaggcctcgtctcttcatgaggtcgcgcttgtccagcctcatctctctctagatgcgagtgctcgctcaagctaatcattgccaggtaattaactgtcggaaatcgttgctctcggacatttagcatccataccctcggaactccctaactgattgcagctcagctctcaagcgctatagattcaggggtgcatcccaatccggttgccaacactctgcttcatgcttgtcactcaacttcatctgtagagccagactgctatactgcgtcctcatatatgctcaatttccgtctcactactccagactgcatatatttcactttgtgcaatctcgcgtagtcctctcgattcctgctcatcactaccatgtcctcctc

SEQ ID NO: 298012 - DNA, 349 bp, Homo Sapiens
tgcatgaccaaccgactacttcacagaatacaaatgttcattgatgtacttaatctctgcaaggccacagcgcctcatacagaaattccgtaaacactagtctaaatgtacacagaccacactcggatgtcatctatgcattcggattcatatctcatttcggtggtggcatgactactggctctggcatgatccatgattccctgcattatgcatagtctaatgaacccatacatacacttgccagacatggcctgtctagacaatataactacctcaatattgcaacgaaaggaacgcacgaccacaatgaagatagtcatggggactgcggcctgttggtgctggc

SEQ ID NO: 298013 - DNA, 393 bp, Homo Sapiens
cgtactttgcgtagattcatgagcactggccacgaggtgataaacagtcatttagacctctctgtcatttaatatcacatatagtcacatatgctcagcattactctggactatatatggctggctctatcaaattggactaacacaaagatggtatcatacattcgtgacagaaatggtacgagacattaaatgaattactggatggaagatactttacaaagcgctttaaggactataagccatgaggtggctcttattaatggtcaatctgagagactaaatttaaagggtcaggcgtttgaaacacaagtgcttattgatatctaggggaattggaaattcttgactaaaggcctataacaaccagatgagcgggtgcacatgtgacct

SEQ ID NO: 298014 - DNA, 650 bp, Homo Sapiens
gagtaatacgcagtcacatcaggtcataacaacagtagtaaggacttactatgtgcccagtactgtgctttgcaggttacagatcatatcatataacctataacctaacatgaggaaagagcttttgttattcccttcagagagatgagcaacttgcccaaggccacacagccagtgctaagaggctagtgcctggtgatgaatccacatctctattgtaccaggaacagggcaaggacattgccttggtcatgactgtacatcattcctgcagagcctacttcattggtggcacatggtaggcacccacatgtgttagtttagaacctgattaggcaccttgagatgacatgctggtcactggtagacagaaactgacaaagaatgctctgagatgtatgattcttcatggcatctactgatcactcagagccattaggcacaccagtcatgcttgctatcttggacctcaggatcgccaagctgaagatgcagctgaccaagcttgacagtgaggccatgcctggggagctggactcagacagggaccgaatgatgcttatcaacgggagaatgagctgctgatgcaatgcgcttattagcccccgcagtgtactcgtgcttggagcttgacaggacccgtagccgtg

SEQ ID NO: 298015 - DNA, 335 bp, Homo Sapiens
ctttatgtgctattgcttcatcaggtacatgccaataggctactgagttaaaatttttctcctttggacccatatctttatcacccttaaatcttgcctccttgacttaatgtggtgtattctgggtggctcctttaagggcagttgagaatagtgttgggggatatgtttgtagtgatttaagtataagggttctctactgtcagagatatgtaagtgaggaaaggatacatggtaggtgaaaggatatctttgttgtatggaattgagatcatcagtagagacttatgttactgcattttgtcctgttctgtctgcattatatattctcatgt

SEQ ID NO: 298016 - DNA, 446 bp, Homo Sapiens
ccagaactgcctttcagactttacatttgcatgcggatggatcccaatacgtattcattgatgacttgcgtgcgctcatgtgcggatccatagttcctgaactacaatggatgtccaaagacctagaaatggtgattatgtagccatagcgccttcaactccttgtatgtatggtcttgcagatcagagctgcatgctttgctgctgtgggagatgatcagtgtatcggcagacttgactcagcacgatatgaagtgacactgttatggtcactggaagcatatggaattgctgatctgcaccaactgggtatttgttgatgggacgatttctgatcatgttaggcataccgatcacatggatgacgtcccaatgtggaacgtactctttgaagctaactgatgtcgagattacagtttgcctacacatggactgtgtattacctc

SEQ ID NO: 298017 - DNA, 385 bp, Homo Sapiens
agaaaggtcatgtcgagactttctatgtgaatgcgtgacgatccatatatgcaatccatgatgtgcaagggacgcccatgtttcgatatcaggtcactgaaaggcaacatcttgttccactggctgtgctcgatgagtaggataactctgtgcgatacatcatccttataggcgaccttagacccgtcggcacagcatgattatcaactgtgggataatgactgtgtacacgcagactttatccagatgcatctatttacatgcctttagtactggaacatctagcgagttctctcgactaaacctcatgcatgtagtcgtctgattcattatactccattttgagggatttctttcgagtctgctgtcttacagatagcttgtt

SEQ ID NO: 298018 - DNA, 345 bp, Homo Sapiens
ggcatactgatagctccacaggtgtccttgactctggacatattggctgtgaccctgtaagatgtcactgacagtccgcattgagaaacaggggataaatcacttggtcagtctctctgtatgataggatcatgagtgtgatgctttggcaattcagatcagcattagactctgggactaaatgaacgaaatgattgtcaactcgagtatgcacctcgattaagtagttgctactatctaatgaacgcggcacgagttctgggaagattcagactcgtgtcacgtcgttcagagaatatgggggatgggcacaggatgaactgatatatttgggaagattgccgc

SEQ ID NO: 298019 - DNA, 404 bp, Homo Sapiens
gagaaacactagctgtcgtgagcagaagccagtcgtgaatgaccagagcgaccttatctccagcaatgtgcaactgccacatgcatgagccggcgccctcgttagccgggagagcaagatgcagacgcggagccctgaacacaggctgttgcatgctggtgactgtggttgtcgatgaccaggtcaccatcgtctactacctgtaccaacagcagagacggatggacctactgacagtcaactgagataacctgcatatggagaacctgcgcatgaagcttcccaagccttgcaagcctgtgagcaagaagcacatgggcctcacgcgtgatgaagcaggcgctgtcaatgcgagctctgccgcagatgcacatgcagaatgcgaccaagtatgagcatgacac

SEQ ID NO: 298020 - DNA, 398 bp, Homo Sapiens
cgagacgcattgtgtgcacggagttgacgtggaggtaggagcagaacgccacagtcccagacctggaaccgctcagagaggagcacgcaccacctgtgatctactatgtccctgacttcatctccatagaagatgacgagtatttgcttcgacaggtttataatgcgccaaagccgcggacccagctctctgtgagacagtgacagaactggagtgggcttcctcatcgcacagggaaggatactgagcgggtgccaccatggctctcagcgctacgtggacacagtgacagacctgaacctctgtggaggcactcacagctaaccatgtgctacatgaaccagcatctgcctgtagagggcatcatgagccacacacactcgggccgtgtccgtccc

SEQ ID NO: 298021 - DNA, 349 bp, Homo Sapiens
gaaaaaacatattgacttgaatggagggcatagaatgctacctctgggtacctgcttggctagggttttggcctgtgagtacgaaaaactggtagcctaagttctcaagttacgacaacccttcttctgcatgacataccttatctctcttatacatgttggtatagcctgctactagtatgtatcggtttagggaaccagtcatcataaagtactcgtaaggattctacaaatgctacatgatttctgggaatgtggtccttgagatactttcagcatacttctgtgaccacatgttatcaacatgtggaagttcctcatagcttcatgaataacctctgcgcttgtt

SEQ ID NO: 298022 - DNA, 411 bp, Homo Sapiens
ggcacaaggtgatctccttgaaatggtcacacacctttcacctgccttttctcttaaactcggttgatgtcaggggtgtgcgagccagagacgagctctatcattgatgacgctctgttagctcacataatctccatgtgtagatggggccggaatggcgttgatagcatgtgcatagtgggtcagtattccggactacaggtacatgacgccggctccatgcagcagtcattgtggctacccgagtagcgctgaataactcacacaggctgtggtgctgggttactaggatcttaggtgcacgacgatgcatgtacgcagccccttagtagatgtatggcgactatcgtgtactggtgtaccttaccgtaagctgctggccatatggctcagctggtactagttcagagc

SEQ ID NO: 298023 - DNA, 424 bp, Homo Sapiens
cagattagctttcattcgttgaataaactgcttaaatatctagagcagtgtactcctcacttgtaaagtcctcccatatgagatctatagagaaaccatgatgcggtggtggaaatgaatagcatcctcacttctttggagcgaatcactgagaacagtccttaaatggctaagccttcgtgtggcagttaagaattcaacttgccaagtctatcattgctgtgacatctgacatgcacgtatggggtgtgcctttggctaaatcatatatgttgacaaactcgaggggggacacggtacccacttcgccctataccgaaccgattgctgactggccgacgtgcaacaccgactggactgggacaggactgtggcctcgccactttatgcttgcagcacattcgactttatccccgtggtgtgg

SEQ ID NO: 298024 - DNA, 419 bp, Homo Sapiens
ctttcaacttatgtgcgtgtactgcgtagctgcgtccgacgtctgtggtgacctcttgacctttgctgaccacagaaatgggcagggctgtatcctggaccactcactaggatatctctcaccccgactgaatcttgacgtgttgcgtcctcgtggagtccctgaacagagatgagcatgatggcctcttggtggatcaccctgatatgactgacaatttgcggtttctacaagtgggcctcctgggagcccctagtgccgggagggccactgtctgcccgcagctactgggccgaaaggggatccctgaatccgggaatgtgcctactacttctatgccaagatctgtaggtgatcacgattggaacccaggtgatgctacttgacacacatggcattataactcctggacacactgg

SEQ ID NO: 298025 - DNA, 615 bp, Homo Sapiens
  misc_feature (296)..(315): n is a, c, g, or t
  misc_feature (353)..(405): n is a, c, g, or t
  misc_feature (484)..(484): n is a, c, g, or t
  misc_feature (486)..(486): n is a, c, g, or t
  misc_feature (590)..(590): n is a, c, g, or t
  misc_feature (592)..(592): n is a, c, g, or t
cttggggacaggtctcagggagctttgggagcaggcatggcacccgatccctgagcttagcacccatccttcaccctccctctgcttcccatccagcccaggtttccctgcccctccccttggggtaaccacccaatgctattgtgccctcatcaggcaaagctctgaatacacaaggcagagggtgcccctggcctttacctgcttggtgcttgctctgccatacaggtaccctgcccccactgtttgccctccactcccaccctggacattcttagattggggtagcaagtgannnnnnnnnnnnnnnnnnnncctcctttctccccatttctctcccaattctccacctnnnnnnnnnnnnnnnnnnnnnnnnnnnnnnnnnnnnnnnnnnnnnnnnnnnnntattggtaccacattcacatagttggccagcagtgttacacagacattcagacacctgtgcactgatgtgtgtatactntntctggcacagacggtggcattcttggagcattctgcacattgggtttctacggtatttcttagaggtgtttccacagcagcacatacacttctagagcatgctngntcttctgcacagtggcctgtgtg

SEQ ID NO: 298026 - DNA, 620 bp, Homo Sapiens
  misc_feature (532)..(532): n is a, c, g, or t
  misc_feature (552)..(552): n is a, c, g, or t
  misc_feature (607)..(607): n is a, c, g, or t
gagatttgggtacatccatcatctgagcagtatacatcgtactcaatttgtagtcttttttctgtcaccctcctcccactgtttcccccaatcccccaaagtccattgtatcattcttatgcctttgcatcctcatagcttaggtcccactatgaatgagaaaatacaatgtttggtttcctgttcctgagttacttcacttggaataacggtctccaatttcatctaggttgctgtgaataccattagttcattccctttatggctgaatagtattccatgatatatatatataccacagtttctttatccactcattgattgatgggcatttgggctgattccatatcttttcatgagaattataaaggtttgaaagtggaataactcttagggcataatggatataaattgtatattgataaatgacgtgacgtgaagccaggatgagtaagtactactaagtcatgaaattgtgtcattaaaaagatactatgtcattatataagaaagtttttactttattacattnttatcatggtcaaatagcanattataatttaattatgtgaggtgaaagaaaatgaaaaagggttttcactagctnttttttttctgct

SEQ ID NO: 298027 - DNA, 276 bp, Homo Sapiens
ctaagaacagcagagtgtatgctgagacttgaatatgtccggagacttgtaatacagctgaggtctcaggcgacaacatgcaaacgactgaccgcactcagcacggataacacagttatacgtgcagttttcagcctgactaacgcgttaaaccatcaggatgcacgactgatccgatctgagcaactgctgtgtcttccagaatgccttggcggattgacaagtggactatccacagtctgcacccatctgtgcacgtcgagtctatccgtgctg

SEQ ID NO: 298028 - DNA, 187 bp, Homo Sapiens
agtggatgattatcgagaccactgtggcacactaagttaggatccggaagatgatagctgctgtaataaggctcaagatgagctgatcactgtagcgaaagcactgagaaggagctatcagtgataatgctgagacattgccgatgatctatctccgcgtgactatttccatgcctagcttggtcgg

SEQ ID NO: 298029 - DNA, 295 bp, Homo Sapiens
gtatgaataggatacagtccgctctggcacagtactctgcgtccagaaagagtaccgatgctatcataaggctctgtagtgagcatgatcactgagcatgcacgagttgcgagctatcagtgatattgccagtcagttggcaaggatctatctcagacgcatgaggactccccaacagccatacagctgacatacctgacctacagtcagaagagtataggtgcctagcactagcttggattgaatagctctaagcataactatagcacattgtagagtactctgtgacctgctg

SEQ ID NO: 298030 - DNA, 236 bp, Homo Sapiens
gtatgaataggatacagtccgctctgggacagttatctacggccagaaagagtaccgctgctatcatgaggctctgagtgagctgttcactgcgcataaagcacgagttgcgagctatcagtgactatgccagtaccttggcgaggatctatctcagacgcgtgaggactcccccagccatacagctgacatacctgacctacaggcagacgagtggggcctatctctagcttggt

SEQ ID NO: 298031 - DNA, 293 bp, Homo Sapiens
gaatgactatgatagagctcgctctgggacagtggtctatggtcaggaagagtacatatgctgtcaggaggctctgagtgagctcaccactgcgcagaaagcacgaatcgcgagctgtcagtgatattaccagtcagctggcgatgacctatctcaggcccctgacgactccccaacaggcatacaggtgacatacctaacctacagacagacgagtcgagcctagccctagcttggatcgaatagctctgagcatatctatagcacattggagagttatgtgacctagctgt

SEQ ID NO: 298032 - DNA, 727 bp, Homo Sapiens
cgtattcctgtggggggggagctcctaactcacgacgacttcataggctcatatccacgcatgctcacaattaactgccacttaacctcatagacccatacagccaggtgcagttgaccacatgctctggccctatatctcatcttgggtctgtggctatgagttattttgggcggaggatgtctatgatgagtacgacactgagtgccttcagtgtcaatactactctactacgatgatggcctgtcacaagatcattttcttcactctactatgctactcactgggaattttccgctgggagcaaggaactcgacagacactgatgatttggtctggagaattacatcttcagtaaaggcacttgatagagacgcttttgagacaatgactccgtagaataggactttcactgtgtccacgagcacatcctcatagtgcctattatcaaagctatatgcatgtacaccatccatcactaggcgaatcactccagctctttcctggtgatatataacctatgccacggcgacgaatcattgtactgactgaacaagggagacaaaacggctggaatatgacatacccacagtactgtcaacaggtcaaggataatgcattagggtgcctccttacattttgcaaactgtgcacaactgctaccatctatccaagagaggcctggttacctggtctcactatgcttttgagctggcggtcatcactg

SEQ ID NO: 298033 - DNA, 416 bp, Homo Sapiens
ccgaggtgtcctttgcagagcgccgtgatcactctgctgcacataaggctgtccagcagagctcgactctgaatagactggatagaagcagcttcacgattgtggccaatactggagtgtatgcttcgctatcgcatataccttagacgagtgtctatactatgacagagaagtttgatccgttaactcatatgctgctcttagctaactgccagagcgtattgataggactcagaccctgagagcatttgccacagttgcccacttacttcctctttgaccatgagtgttatgaattcagtgtccattttacgtgtcacacatgcctctacagtggatgctgtcatcatagtctgcgtaagctctgcagatcaggctatcttaacatcggcaatactagtagccatagaggtgcc

SEQ ID NO: 298034 - DNA, 187 bp, Homo Sapiens
gactgactatcctagagctggtactaggacacaggtctgcagtgcggaatattgccgatgctgtcccgcaagtctgtttggtgccatcactgggccggcacgccgtacaagcctctagtcatgttgaccaccgaactgtcggcgcactatgctcgagagcattatgactcccctcctactggtcctg

SEQ ID NO: 298035 - DNA, 688 bp, Homo Sapiens
agcactgcgaacatagtgctagctgtgctgcacgtggctgaccggaagatgctctgctgcatataggatggagcctgagggacaccattgaatacagggctgaagggttctatgactggatggaaggctcgatcacctatcataacaccctaatacgagtgagtggatgctcgagcagaagttgacatgaaggatctgcggacgcactttaagagactgtatggtagggctcatgactcgagcgtcaagggtgacacgtctgaggactacggtagagtactgctagaactgtgcctgggagatgattagaagattaccatccagaatgacacgaggattctagagactatgagtgtgaagaactgtacgtttgtacgctgttgtggtcattgtgtcaaagtgcttatttgcaatcacagcgtgtacagctgactactgaaatatagactgtcggtatgatagatacccatggtatgtcaagatgatgctgtaaagctggacttgcatgtgatagcttggaggatttaagtggacagtgtgcagtggagctgagtatggaatgcatgattttaccccgatgctcacgactgtgcgatttacacacgttgagtatagtgacttatggcatctaatcgtgtcagtgccttgttgtaatggcagacttgtctaagatgctttgttgccttcc

SEQ ID NO: 298036 - DNA, 406 bp, Homo Sapiens
cccagacagacaccgcgttccgagatgaatagaggcccgtaagacagagcgcacttcgtatgccaccttccaaccagcaaccagcaccccctattggcccccaggcccgatcgtcttggactccgtactggatgaatctgacctctatagcctgacccattcctacctcggaagttggaggccggataggacgctccaatagagaatctggtgtcaacacctaccggccttgccctggtggacacgagaggaacctggtgaccaatctgcagacatcagaaaggacgactcgggcacggttctgagacagagctggagatgaggccagaccatgcacactacagcccaccttagagacgggactgccgatgtgaggacctggtacaggatccaggcctgcttagct

SEQ ID NO: 298037 - DNA, 412 bp, Homo Sapiens
agagaactagatattagtcagtctgttcttgttagattcgtctccatgtgatattaattgaagcacagagaaaggaggcacattgctgaaggaaacctatgtcctttagacagggagatggctttacaccagccagagacaaactcagatgactaagctgttgatcttcatctgctctgtcttaatcttatggtaggctgctatgctgttaaatgtgatgctgtcagcctgcagattgactcgcctcatcctgttatataccctccttggctaagcaggcttgcttatgagcagccttgcagcactatgctacagaagctgctgaatcaggcctaccagcgttcagttgctcttttgttggcttgggctggagtatcacgctgagcttgagcactgtggctctagatatgtt

SEQ ID NO: 298038 - DNA, 402 bp, Homo Sapiens
ggtactggtacacagtgcatcagatacgtagtggctgcttaagtgccaccaagtatgggcaaatttgctctacttatatggtggtatccttaacatgatctaccagcgccctgagctctgtatactgacatgtctggacacctatgaagcggcgtcttgagaggttcatttgtggcagagcttcggtatcgcaaggacagctcctagcacggatgagatgatatctattgaccctgaggtcaacattgccttcaatcaggctgctggttctagtcccgtgcagctccaccttggctctaccatccgcttgcatgggctcagcgcgacccggaagtggatctaccacatgactgaagtgagcacagatgatccctgacagtccgcctgctttgcggctgggcg

SEQ ID NO: 298039 - DNA, 634 bp, Homo Sapiens
gatatctgagagcaaccttctgccaggatttgccctgcccacaggcgttagcatggacttgatgactgcggtgtggcttttactttctcaattttccagagctcatactcctcaaactccagaggaataagatggccagcagtcaggaaggagatttgaatgtggagcacagcagagtgagcacgagctgaaaccctccaagcatattttcatcactgtattgcctgtgaacatcttcagagtgtgatgactcctacttcctctgaatctcatgtgagttcctcttttggcagctctaactctaaccttacaggaaaggggaatatagaaaacacagttcccagaaagaactagttccaaccagtcgattgaaccactcagcacagcttctaaaagaggactccctggactgttagggtcttggaaaccatgtcacacaaaaattgtctcatgtaactgaagataatcattctggagagcagaggattaaaaagaggcatgccattaaatattagaaacacttctgtgtcgaagacaaaaattgacttacacctataaattcttcagattttctctcctaaattctatggaaatgtatcaatattttcactgattaaaatttttttcccacctg

SEQ ID NO: 298040 - DNA, 556 bp, Homo Sapiens
  misc_feature (429)..(429): n is a, c, g, or t
aggaaactgaagcatagtagaggtgaaatgcttttccaaaggttaataaacataacgtctacagtagagtcttcagttaacctcttacattcgttttatgagcaagcaggctttctccattaataccacattttcatggtattgaataactcaggttgaacagtctttcctgaagcctttctattcttcccactcctaatacgatggcctacttttttggggtttttgtggggaagggactggtgtatcattgtcagagaaaagagaaaccatatttaaccagggccttagcagggcatgagcacagtcacagccacttgctcttgaccttgtgctttgatttcagtttaacacttctaaatttttgtactgcttcctcattctcctcttttgccaggctctggggaagatatagttcatcgacctttntaagagtatctcgttttctttgtagcatcatttccctttctaatgtgcaggagaaaagaagtacctgctttcagacttgccctctagccagggcactaagcctttggtgcaaaggagaggaaactat

SEQ ID NO: 298041 - DNA, 415 bp, Homo Sapiens
gacacatggtactctatgatatgaagatatccgtaaaccatcctttccagtgacttaaggaattgttctcacatatgactatgttgaacacttcgagacctcttgaatatggtactgcattgcctcttacataaaagaacatagtatgatgtccgctgtagaactgcactgtgacaggttggtcatactgcaaaggatatcatataatattggaagcaggtgtttgcttggacagaccatgactagggtcgccagtctggctacgctgtagctaactcggatgccggagttccatgattagagacagactgatggcctactaccaagtgcattccaagctgaacgatgtacaaatctatcggtcgtgagtacgtacgactatccgcacatactattcatactactaggactggcg

SEQ ID NO: 298042 - DNA, 167 bp, Homo Sapiens
cgcagctgtatccatttactggaactctggtgagacagccgaccgttgcgtgtaacaagagacatacatgaacgatggctacttgcacagggacttgtacactaacctcaccggatcgatgagcccttacgcaggcgttatgactgacgatgttcatgcgttgtggg

SEQ ID NO: 298043 - DNA, 410 bp, Homo Sapiens
caagaaaataaattgttaatagacacattcctttgttccaaactgcagtttcctgaacttaagtcaagcatgagctagggctggggagaagatttaaatctgaagtgatgttgatattttgaaactagttcctaggttaagcttcatataaactaaaagagtaagctcataaggtccacagtggtggacatttttgatgcactaaaatgctcctcaagcaataaagtgagttttcagaaccatgagctttatagcaatcatactgtagccttttcaaagaaaggagcattccagaagaatggctctaacactgatgacttaaggactaactggagcaagccctgcttgttaaaagctgaaaatcttgagctcgtaaacaagtttgaagtcaagtgaacttttaagcagag

SEQ ID NO: 298044 - DNA, 710 bp, Homo Sapiens
agaaagttgtgcatcattgctggcagaatgtgcgctgagtcttaacatcggctgacttcatcggtatattatcctggtgaccggtcaatcgactgccagctgctgtgccttctgatgtcatagatgatgtgaccttattctgccaaccaagggcactggtctagatcttgatgtgtccttctttcttcatagttgctgtgtctgcattcatctgtatcgatgcacctgtggcgtgttacgtcaccgctcagctggactggactggagcccgagtagataccattgcagccggcctgttggacatgcttgacatatcagattaatcctcatgacttgtcattgaacagccgtgagacagtggtcactgtgactatcgtccacttgttgcacatgactgagatcctgataatcatgcctatgctcgagggagcacgatttgatgccagcctctatgtacatagtgacgacagtcgtgatgtgtgagatcaccactatgagtgcattgcaggcatacatgatctgatcatgactgcggagaatcgatatccctttctagtagcactggccgttgatgccgatgtggatgatgcagctgcatacagggatgatgctactccgaatgacaacgacataattgcttatgcccttggagacgccattacggtgctgaagcaggttaccctcctagtaatctcggggtgcttcttgtc

SEQ ID NO: 298045 - DNA, 346 bp, Homo Sapiens
gctagatagagttcaggtccacggaagtgagatgcgaacctgggactgctttagtaggagcctatgaaatggaatgcgatcagaactgtctgcttaagaacaccatggtgttgatcgccaggggaattatcccgaggagtgctcactttgggagcatatgcataactggaaggactgagagagatactcatgcagtaagtgaagaatagcgcattaacagtgacagatagcttatacgcactgatgcaccagcatgtacacactggcagcttgtttgaactacctactggaacaggctaactagtgagcactgcaagctcctgagatagaagtgcttctagcgact

SEQ ID NO: 298046 - DNA, 346 bp, Homo Sapiens
ctcgagctggagatgtgccgagatcactctcactattcctataacaggtgctgtgagtgcctgcacgcagcacgacattgcattgatggatgcacacaccggtgctcagatgactagcagagttcacatgcccgggcttgcacttggccaatacatgactgtcatccagtgttcacagacccttagtcttgaagatctacgagacattccattacaccttaatatatgggaagcttaagattcaggccaacctattgcgtgtgcacagcctgaaagtgaagaggccgctgacttgaggattgctgtgcaagtggtgccgattgccatcagcttgggcatgtggccc

SEQ ID NO: 298047 - DNA, 684 bp, Homo Sapiens
  misc_feature (614)..(614): n is a, c, g, or t
atattgagagatagaatgacctagcatcattgactcacacctgtggtccataagcgtgggaggatgatgcatgaggatcagctcgggcctaaaggtctgatacactgctgacatgcacagtggtgatctgtacatacacacaagtttcatgattacgtttatatggaggactgagcctgatatgcctgctagctggaaggctgctgctgcagtgatcgcgtgtacaccatagggtgaatcctgccatattcataggttgtgtcactcgtcttaagtcttaggcactccgtgcatgaccctatcttttattctatggagaaatgagatatctaggcatgtgacgtaaaggcgccaattatctgtagaggcccaatcatggactcagaaaccgatcaagatgccctgtaaggactgttagtgagaggtgactgttgacctgtaggctgcctactggacaggcttactataggcagacaagtgtactgaggcctgtatgacagagctttgcaggccatagcctgcgaatgaactgggtcctgatgttgagactagtctgttaacacggtgcaccatttgtctactcatgcgatagagtcgtacccatgcccgctgtngcacacgtgatgtcgccttgtgggacggtctaggcgcgtagactatcagtggtatcggggttgagagcac

SEQ ID NO: 298048 - DNA, 699 bp, Homo Sapiens
agactttgcgttagatacactatgtctcaaacatagaggacgcttacaagaaatcatgatacatgctctaatctgagcgcagcaggagaaccgttaagattaccaccttatgcctactacaaatgcaagcaccagttctcgaaatattacatcaccttcactataaacagctctgatacagctatctcctgctagctcttcgctatactgctgctcacggggatcacatgacacatctcgatagcggaagctcgaagcatgagtgcatgctcattaagtcaccccacgcagacaagcaagacgtgaatgatttatagggaaatgatcacatgctagattgagactttctgatgagcaagctccatgcctgtgtgaacctagattagaatgtcagtttgatatcaacggagaggactacctgtaggagagatcacttgtcacaagatgtgcgaacgagaccgggcactatgaccaactcactgccaagaggtacttgtacggagttaggcgacgcaaagcagccatggattgttcacggctctatcagtgcgaaacttgcccttgcaatcatcgacgacaatgtgactaggaaagagcctaatggtagtctctatgacccaacttgacaaagaatggtgagtttcaagccacacttggactggtcaccactgctattgctcggagcccaggagcattcgg

SEQ ID NO: 298049 - DNA, 628 bp, Homo Sapiens
ggacagagcactagataccctgtgtatctgtgagagactatgtctgcacacaggataattagaccaagcgtatgcatgcagtggaccttaaagaggaaagcataatctgtaaccgagtctcagtacttgctgtctatatagtgtataagcacatgcataaagatccatcacacaacaattgatatatgcttatgagtcatactctgtatcccacggatcacgtgcaatatcactatgcactaaacagatagctgcaccacgtctataatatgtgcccttagctgtccagcactacatccatgaatcttcaggcagaacaaagatccaagtcgatgatgttacagttggctcgctgcaacgactagttagagatcacatgtacatgaagatggatatgacacaggcataaggcgccactattgatacagcgagctcgtaagagagttactggcatagcattagcaatggacaggtctagcgtctatcatgaggaggatgccagatgtgctcatatacacacagtgagctgttacatagctctaagatggtatctaatttgagacctactacctgatgctcttggagacactctgcgtacatggataactcatgcttatcgggccagtgt

SEQ ID NO: 298050 - DNA, 323 bp, Homo Sapiens
  misc_feature (14)..(14): n is a, c, g, or t
gaaaagtcaagggnaggtgtcctcagggatgtcataactggacctcaagaccaatgcatcagttagaaaaacaaaggatgctcagcactgctatgtatcacagggtccctccataggacatacatacttgatctgctagcgttgtcatacgttagaatgaatgaatatgtgttggaatgtcttgacacagttaacctgaacacatacagctggaatccccctgttgcagttgttattatatgtaatataatagcaattgcagacagcttggattctttctcacagatattccttttgttcaattagaaattctacataattct

SEQ ID NO: 298051 - DNA, 630 bp, Homo Sapiens
ggtattggatctagagagagagagttattatcatagagtgcgcttgcaagagacgatatgcatgcgaaagctcgaagcaacgcatgtacttctatgacttgcaccttaagacattacattactgatgatatgatactcaaaacgcgacataacaatgactatatgcggctatcatagaactaagaggagaaattcttctctatactcaaactgaagcaagtcagacgtcacattacttattgtgaagtctaacactgaatgcctgatattaatacatgcaaggctgtataacaagaccagatagaactatagggatctcactcacatgttaaagaaacattatgcagtgttgtgccataccagtgagatcatagataaggttgctggtctagttatcacactgtgagaacagtcaggagcatatgtcattcacatactgtaggaatgagactggacataatgcactatccacaggccagatgagtctgttacgagtttgtgtgaggtactctatacactgtgacacattcagtgtctaatgctagacgttatgaccaatactgatcagtgtgtgtgacgtgccaaggattaccaagtcccaagtggaccacttgataagccacctgttat

SEQ ID NO: 298052 - DNA, 334 bp, Homo Sapiens
cagcgagctacacacagagagcgaccctgactgctgcgccacgcaggaacctgccagagctgcctgcttctcgcgacacacatttcactgcccacacctcccccccttgctgcttccatccgttcatctgatgacctccgctcttcattaccctgaagctacttttctttgctaatacttctatcactgctccaacagacagccttacttctattccccgccgctccttccctttgctcgctttatagcctgcttttacacactcgccgcctccttctcctaacgccttcctgcctgttccccctctcgatcatcttccctattactcttcccg

SEQ ID NO: 298053 - DNA, 353 bp, Homo Sapiens
catgatcaaacagcacccaaagactcgattatgccgagtagtgcttgatgccaagattcgtatactgtgaactgttgacggataaaggcagaaatggatgagagtgcactctgtggccacatggggtctgatgaatatgagcacctggcctctagaaccctggaggctgcccgaatttgcgccaatacgtacattgtatgaagttcttgcactggatcacatatgcgtgcgcggctatacacattacacggaatcctgattgacaagatgtagtcctgagcacaggctgacaggctgcagacaagcatgtgaggcgccttaggacagacatatgcactgcatcctgttcactt

SEQ ID NO: 298054 - DNA, 303 bp, Homo Sapiens
tctattaaaaagtggtctcccaaaacatgtaatgatttcccccaaaaatgtaatgatttcctctccttactttgaatgaaatgggctctaaatgctccactcccattctcctcacccaattatactggcaactatgtctatacaggtactctggcccgagctcccagttcctgaatattgagatcaaagatgtatatatgggaaagtagtagagcttgaaggtttgctagagaccagtatagcattttctatagatagctttacagaaacacagccaacattcagcattttaaaagcagctga

SEQ ID NO: 298055 - DNA, 1024 bp, Homo Sapiens
ggagtgcgtttagatttatatcagcttgattgcgactgcttacttctagctggcgcatggatggatcacgtgtgcaaggttcagaagatattagagacctagtattaaccggcaatgcgtgagtagcagagttattctatacatatagcgcaatgtactatgtagtttatgtgcgttattggattaagtgattgctttacgatctctgcacgcgactactaacgactactatgatagtatcataactcaggcagaggatgcgagtgtaggtataagtctgatcagtcgtaagtcgttactcgagtcagctgtgatctatactgttgattatccacttactataaggatactgatctgtatcattgtagagagacaacatgtgtagtgtgttacgtcgacgtagaagtaatagaagagtgtagatacatatcagtctcatgcacagacacatggcacacgctcatccagactcgattcagtagacgtatacagagagcagtgtcgtatgcacgacaatcattcactggtctttagtcgccagctatcatatacttgctctcagtcgaccgtgatcaatcagacgagtatggagtgccatccgcacatctgtatgaccctagactgtctgactgagtcgatgctgtctagtacgtgtagcgtgtatctagagcacagtatgtagatcagtatagcgtttgcatgtcgttgttgtcatgcttgcgtgctaagctgtctgtaggtgctgatctctagtaatcgtagagtgaccattgccgtgcgtcgttcagtcgctcttgctcgtatgtcgctgtcatacggtacgtcgtttgtagcgtgctgtttgagcgtgtacatgctgtactgtgtgtgctcgctgatgtgcgatcgtcgtaacgatctatatgcttcgtagagttagagcttacatcgtacggtccgattgagtagtctgcgtcgatatgggtgtcgggtgtcttagtgtgtgagctgtgagactaggtatgagttgatactttcgagttgc

SEQ ID NO: 298056 - DNA, 632 bp, Homo Sapiens
  misc_feature (521)..(521): n is a, c, g, or t
gttctcatcttgctaagcccaattgctctccctaacctgcttttggcttcaaagacttcagattccatctatcctggcattaacagtgtgcagatgtttaactctggactggcttcagctgtgctacactaatgggcgctgtccacataagcaatcttataaggtcgtcaatcaagaggccaaagtctgaatcccttctgtggctgacttaagcacaggatccagtccagagccttgttaatccctgatctactgtgccatacactcacttgcatgctaatatatgagcacgtacatacagcgtgcaatataccatgggattgatagaacgtgaaactgcaatagaatccttcaatcttactgttcaatgatcaagctgattagtgacaaatgcagatggaactaaatagactttccaagattacagaataccattgagcagatcggtgcctgactgtgattgaaatcgcactgcgaagtagaatatctctactacgacaccattgcttcacgatatcatnactgacgacacgtatagcagctcgcagattcttacctagagtgatgcatagtgcactatgtgaaagaccataaccatgtgtcatatgttgagtgactggtccgctaggggg

SEQ ID NO: 298057 - DNA, 608 bp, Homo Sapiens
aggagttacgatcatgtatcggacattgaggtgacaacacatctcacaagcttatagatgcacgacaagctggcatatctatgaggtcgatgtgtgaacaaatctggatccgtctgactgtaaggacttgtacattactaaacgttcaggctcctaacgcacacggtctaattcgaaggccaatattagccacctgctgtagcagggatatacagtggaggtgttagcacttagaaagacaggacaatttccgaacaggatcatctgtgattatggaaagggcgttaactgccacggatatgtggcgagcaatttaagtgagaaggcgcactgttgctgtgcaagactttgaggtgacaggcttgcatactagagaggaggtagcctcaatgctcaagacactgtctgacacacactcggatgtggatccacttagaagatcatatgagaggggcattacatgtgactcacatagtgtcccggagtattactagagtcttcatctagagaacagagttgtcactatgcgtgcagagtcactaagcgcatgtgttagggcatttgggttctatcacacagcgccatggtggcttaacgggcccgtgggg

SEQ ID NO: 298058 - DNA, 356 bp, Homo Sapiens
gtgacattgggaagggaggggctaggttttttagaatatttgaaaatagaattgatagggtatgtttatagatgggtagaaggaggaacttggagacaaaaatgattttgagatttccagattgagagaaaggtaatgctgcttatccacgacagaagacttaggaaagaggaagaaagtttgaattgtttaaggactgggggaagatggagatttataaataattaataatatagagcttgagttgtctgctttatattgccctaaatattatcttatttatttcttgcttagtatcctgtaagtattagttggatgtttgcatttttctattagattcagaggcctcagtctgg

SEQ ID NO: 298059 - DNA, 365 bp, Homo Sapiens
ctcataccagagtttctcatgtggtaaagtgtggatctgagaaacagagcacatgaaatgcgaagcacgtacttgggtttacatatccagagccactgatgaatctgttttctcatctgtggaagtttcactggtcttggttcatggagaaattaactaagtgtcagctgtcaggcacactggacttaagtgaaggtcattaatagctgtgggacacatatgtgtggatttggattgcgtggttattacttaacaaccggataaacctggacacatggactggaaatgtgagaactacaacttcttcttatttcatttgaacaattggcgggcctttcaccggatttacctgtggtggcttttgg

SEQ ID NO: 298060 - DNA, 585 bp, Homo Sapiens
cgctgatatacaaccgcatatgagacccgctttcggtcaaggcgagatattgtttactcctaagagatgtcaaggtgctgtcgttacagggatccgcaagagtcagacgttccatgacacaggagaagttgatcaacctgccaacattgtggttactgtcctagctctcatgccgggacagtttatgcaaccaacggagcctcttcacctgtcgtcggcattgaggtctaacttgttacacacccaggttcatacttattctcacggactcttgttcctcagaagtgaatgcagaccgcctgtattgacacaaagggccattctacacatacctgtgtccctgttcaggagtatactgtaatgtttatgcgaatggaccacattcgcgaatacactatgtctatgcactagaggcgcttaaataaccacttgcgtatcaaagctaacgccgtatgactagcgtgactcgggaggctcaagacttatcacacacattgctatagggtacggagctattgctgagtgtgcccgtattagaagcactgtatcccctgtggcggtactccgagaccctatatgtgtccc

SEQ ID NO: 298061 - DNA, 385 bp, Homo Sapiens
gaccaaagacaatgattgagctcaatgataatgaacaccctgggacgatattcctggaaacagctgatcccgagctggctgctcatggagcgaccttacccaagatggatatacatcatgatgtggactttttgaagatgtctgataccatacgtgacttgctcccagctatgtgtgacagaccatgatacattcaagatactaaccttatactatatgaggaagttagaccgcgtttaccagagagaattctcgactatgacgtgtatcttgatcaagccattgatgaactattggatggagacatcctagtatttcacaacgatgaccctgactatgatatcagtgagttaccgaccgtacaggagtttccgagatctatacc

SEQ ID NO: 298062 - DNA, 425 bp, Homo Sapiens
gttgtttactggattagaccatatcatagatgtcgatatgttgccggggctaatctctgtgcaactctacatgcagctagctgaactgatgtcagacctttgtctgcttattgatgaacatgaccatagtccctcagcgttgacgccgcatactatgacgcagaccgagccccttgtgaggcgatgattgattagagcatcatgaggatgaggatcgaatatcgcagataatgttgtgctacatcgtagagcagatcctaagattactatctgcttgatagtcgaatccgtattgacctcatcgattaaggagaggtgatgagcttaacgatgccgaccgccattagcctgcggctagctcatcctagacatttgacatgctatctaggagacctacttgggagatgatcactgagacgcttctt

SEQ ID NO: 298063 - DNA, 366 bp, Homo Sapiens
ccgctccgctcgttcgctccctcccccgcgccgtgcacgtgttggttcggtccgggcataataggctcctcggcccacggctcacttggcgctgatcgcgtgtcctcgcgtgtgatcgtccgtgcgtgtagcctttgcccacgcaggtttcattcatggctctccggttacgcgctcatcccgacgccagcccctgacttgcaggcctcaccggcggttgctggcgccttctttgtggtgtccctgccggactcctgagggcatgtcgtggtcctctttttctgccctctggacttcgcttttgtgtgccctaccgagatcatctcgttcagcatccgtgctgaggacttccgccgctgggctgtg

SEQ ID NO: 298064 - DNA, 303 bp, Homo Sapiens
agggctcgcgatagcaggctcttgagcggcccattatgagaaggggggcaaagaagggggaacatgcctgtcacttgcagaggtgacggggtggaaggagcagacagcagtattttgcagggagcctgcgttgggatgtcaacgaaacacggtggccagacgagaatattatgaacgcttggaccggtagaattgaaggcgttaaagtgcatgggttaggtgggaaaccaggtcgttctgtgtgcgggcgtgtggatggaccgaccgatgagggcagaataagcgatggtgggcaccgtcttt

SEQ ID NO: 298065 - DNA, 474 bp, Homo Sapiens
gccaaacccactggagcgcactaccatgccgtcttaggcactgcaggtaccctcattaagcgtcagcgattgacatcggaagctggcgcactagacgtagttcctcatgtcttatgaatagcgaagtacctaggaagatcatggcaaggtgagccatggctgagaagcaggtgcccagacaggctaccgaggagcagctgatagagcacaccccgatgtggatcatactagtgttcgggtctacagatagagccgacaaacctaccgagactgcgatcgctggatgtccaagttagaatcactacacgaacctaagtgtgcccacagagccttgtaactcacctcggcatctaactgctagtccaaagaggcacagctcattgtgctctactgagaactcgtgtacagagcgtctaagagtcatcatcgatagcacgcgctaatgcaatcgccaatttaggtgattaagatgcc

SEQ ID NO: 298066 - DNA, 283 bp, Homo Sapiens
  misc_feature (144)..(225): n is a, c, g, or t
taaataaataaatttgtcatccaggtattctgtcacctcatcttacttcaatccatggcacagctcagaccataactggattttctgggttcttatttatgtgtttgtgtattacatgtctcttccagtaaaatcaggaatcannnnnnnnnnnnnnnnnnnnnnnnnnnnnnnnnnnnnnnnnnnnnnnnnnnnnnnnnnnnnnnnnnnnnnnnnnnnnnnnnnttactaaattgtattggtagagaaggctatggctttattatattatgtgagctttggc

SEQ ID NO: 298067 - DNA, 422 bp, Homo Sapiens
gccgcactgtcatcgtggacaccagccgtgtgcagcctatgatgctgtctagggcatcgatggtactgggcaggaccggatgtcaggtactgtgcacgcaggtgcacgtggaattgatggtctacacgagcctatgcatcatgcgcggtgtataacgccatacgagctagggcgacatgctgaccattgaggagtcagagcgagaagcccggcggttagcctgagcttggctgatcgctgggtctcggatgtacggtacaatcacttgtactatgggaatggattgacacactctgctcgtgctgattgatcggcgactgtactggtaagctgatgttcatggcgtcgagcacaagctaactcactgactttgctgggctatacgactcacatgatgggaccctcactactcacgcctctgt

SEQ ID NO: 298068 - DNA, 270 bp, Homo Sapiens
caaaggccggatgagtagcatcgtggtgtttaacgacaaaagtactttaccgaaaaaggcgcaatgaattgtattcctcgaaacgaagatagagctcctaagtaagataatgtcaagtgaactgtagtacaaggaggttggaattgaagtagagaggccaaagggatcgttgtaaataagcacttagattgtaagcttaagcgctttaatgaaattaagtggaccaactgacagattgaagaaatggataacgtattcactgactgtgtc

SEQ ID NO: 298069 - DNA, 383 bp, Homo Sapiens
atataatggacattctgaaagcctaggctcatggaggattttgcgactgtacattaaggcatgtatatttgacacaacacggggatacgaatactaacagctgctgctcttggtacactctgatattgtcatatagattttatgctattgctgtttttgaaccactaattgcataacccaatgatgtgacgatattgacatttttgagacactgctataaagtgtttgacctatcagggatgtggcagatgtaagtgatcactgggatgttttcacttccttgacctggaaggatcagttcatgttggtgctgagctgaataggattcattactatgggcaccatggcattcccatgcagttactgttctcaggctgccatgt

SEQ ID NO: 298070 - DNA, 708 bp, Homo Sapiens
  misc_feature (636)..(636): n is a, c, g, or t
gtgaaccgtatatgaccaagaccacactatgccttgtagtgacacctaataactattgatcttagaactacgagagatgttctacggatgatctctagaaaataaaacatctaccttacctctggactctccggctgagagtagaggtttcttttaagtcttggaggaaacagttcggtgaaactttactgactcactgtagaggctacaagaacaagcaccccttccatgtgtcgtcttgagaaagatctcacagaagcttttctcagcagtactctatggcttaaaacgttcagcacaatagggcagagggggtgacttttcttacattaatgagatttacatccaagacactgaatcttccgttagaggcaagactctattttctatactgtaaatatttggtatatttgccactacgtgaatgattggttttcactaagctataatcgtgaagctagaaatgctagtctcttgcctgattctgtgtactcattgctgcatgttaagctgccagacattaaagtgcactcttgcatattttgaagaacaaatttttctgtctgcaccaagatccatagaagagaccagacagtccactcgtgggggggccaggtccccaattcggcctatagngaggtggattaacattccctggccgttgggtgacaccctttgactgagaagaccttgcgttacgaactttcg

SEQ ID NO: 298071 - DNA, 475 bp, Homo Sapiens
  misc_feature (218)..(218): n is a, c, g, or t
cacgcagagtagatgcacgagaatttcatgtgagtgatagtgtgcacgagacacatgtgggagagtagcatatgagttgtgagagaaagaggaagagcgcacagcgcggagaaagacacactcgtgagagaccacacacaacacgaggacacgagaatagcgtcgtgatagtgcgagacgcgtctctctgagacaaccactatacgacagacggcgcngcagagagcatcgtgctctccacatatcacacgcggcacaagagacagtgtagcgtgtgacacatatacacacactgttgtcacatagcgtatcacgcgcacatatgatatgcgatatctcgcgctcatacttttgtgagaggacacgagctatacacatctccccgtgtgctctgagatttctctcttttgtgcaggcgcacatcgctgtgtttcacactgtttaaggaagcgggaggattctgagtgcggctctt

SEQ ID NO: 298072 - DNA, 661 bp, Homo Sapiens
ctggagtgcatgttcagactggacattagcccatatatagcccctggctctacagagagcggtagagctagctgatcatggagtaatatgcctgcaggccgagactgatcctaggactgaggcgccaggatcactcaggcccagcagtacaaggctgaagcgagctatgatagcgtcactgccctacagtatggacaacagagcacgaccctgacacttaaaatagtaatattcaaccaatgggacactagctattcaccagggagattgaggccctagccatgagccaggcagatgatcgcagctgcgatgtgatacgttagggaacagaccagacaatggctacctgacgttgcgcagctgacattgcaatgcgagtctgagtaggacagaagatactgtcagacatgcactacggcggcatacgaaagaccgaaacaagagtcgctgagaaacagcgggatagtatggggctctagcagaacgtgatgatggggtctctgaagataaactgaatgatttgagatgccggacagcctgagatacctgcacttggcaccggaacctgtgcttagagtaggcgcatgctaaatctcaaggagaggcccggcacagcagtgctgtcgaacagaactttaacgggttcgctgtcctggctccc

SEQ ID NO: 298073 - DNA, 681 bp, Homo Sapiens
ctctggtggatgatacgtgaagtcacaggatccagcatacatcttcctgaagtgccaggctacttatctaatcacagttgaattaagtcctatagctgctagactaaagcttgcttttgactctgagtattatgatggcctgtctgttgaatcagcactattgctagctatgacgtgggtgattatgacaagggatacaggttcatagaagacccttggacttctaccaaactgagggtctgtcatggccaggcctttgccattgataagaccatgtggaaatctgagtccattacaggcgatacgtgatttctgacgatcgcagttcactcagacgttgtcaagtgcatttttacatgtcgctcataagcatactgtggtgcctagacatctggtactgacctcagagataccgtgcaagttcagtcagagactagacttactgtcacgccagccaacgctgtcttttacagtgatatgtgccaatctgagcctgtatctttacaaattgaaaccactacaccccgctttgtacagatacagcgtaggacttggttacgccaattttgcccattttcagaccctgtagcccaccgcccttatacctcacaagggcccctaccctcttgccggggtcccctattcttgcagatggtttatcaccccctgctttccccccct

SEQ ID NO: 298074 - DNA, 495 bp, Homo Sapiens
gtgcaatgtagctctaggcctccaactccattctgatggacaggtgtccccatggcaacgctgttaaatatttcgaataatatcttagatgtaactgccacttgttttaacctctctcttgatatataacagatgcttgttataggtctagcactgtgctaagtcgtgtatgatacattagcatacatttcaaagtcaagctaactaagttctaagtgggtctgacaaatacagtactcggtaggctgtaattagcatgaacgagaagcatgaactgactgaggtttacgatgactaaagtttagttgggaggcgagaaagcatagcgacacacccactgtgatagggagctgtcccaagagggctatggtgagccaaccctatgactgctgtctactggtaagagagtagctggcatgaagtgtcttatcgaggctcttggtacccatcattgcctgtacttcgcagccatatgtgcatatgcccgactgtcat

SEQ ID NO: 298075 - DNA, 273 bp, Homo Sapiens
gtccgacgtagctctaggtgtccacctccacactaatgcacaggagaccctacggtatcgttgttacatctgacgaatatgatctcacacgtacgagaatgccacttatgttaaccgttatcttgatatatgacagatgcttgttatcgggctatcactccgctcctgctggcatgtgaaacagtataaattagaaagaggataggctcttagtgacagagctgtccatatgtcattaggattcagatggtcaagcgaactgttctcagtgac

SEQ ID NO: 298076 - DNA, 384 bp, Homo Sapiens
ggtaacctttattaccgttctttttctctatagctcggcttattccacgggagtgtttcgttgatatgcacacatgattgaggctgctcattgcgataaagattttatacatgacgatttcatagtcttggagatgagtgtcttagcttagtctcttcagcagtgttcatttcgaagatcatgtttaaatattggatgaatgaactgcatttgcgctcagtggagactaattatgcacagttgcatctcttcgtgaaagctatcgtgagatggttgactgctgtgcggttcacgatcctgacagtgaatgcttcttgccacatagatgacgacccagacttatcccgattggctagaccacaggttgttgtgatgagcactgct

SEQ ID NO: 298077 - DNA, 278 bp, Homo Sapiens
ggtaaccttaattccccttctctgggtctatagctcggcttattacacgggagtgtttcgttgagatgcacacatgattgaggcagctcataggtttaaagcatattttacaagtttcaaagtctaggagatgattgcctttgctcaacatcttcagcggtgtacattcgaagatcatgtgacaattattgaatgaagtaactgaattagcgcttaatggagaccttatgcacagttgcatctcttcgtgcctatcgtgacatgcctgctgttgtgcg

SEQ ID NO: 298078 - DNA, 314 bp, Homo Sapiens
ggtaactttaatgtccgttctttttatatatagctcggcttattacagaggagtgtttagttgatatacgcacctgattgaagcatttaagttgtttaaagaatttatacatggacatatcataggcttgtgggtgagtgcctttgcttaaagtcttcagcggatatacattttgagatcatggtcactcattgaatagggctactgccttagcgtcatcatgctgtagatgagttgtgatgtgcatctgttcgaatacctgtggagagactgctgatcgttgtgctgtgtacgaacctgacagtctgtgctgg

SEQ ID NO: 298079 - DNA, 354 bp, Homo Sapiens
cgggcacggcccagtggaacaacagatgcggtagcaggctctggaccctgcaggctcgatgaacatctacctggtgctagatggatcacacagcatagaagccagcagcttaacaggtgccacatatggtctagtgacagatgccccataccccacaatttgcatcgggtctgaagcagacaggattaaggcagactgattcacgaagcacttgaatgatagcaattctgaagaccacaagctgaagtacggggctaacaccaagaaggccctacaggcagtgttcagcatgacgagctggccagatgacgttccttatgaatgttggccgtgcccggcatgtcatcattctcg

SEQ ID NO: 298080 - DNA, 205 bp, Homo Sapiens
ggtaaactcacttcgagttattaccatgtatagctagccacactagatgcgagcgtaaggtatctgtgatcactgtgagagaccgtgtgtcatagatatagaggcgtaagggatgcactgtgcacagatattgtagatgagtgtctctgggcctctgtatgcctcatgagtaatcgatcatctgtaactaacttatcaaggccgc

SEQ ID NO: 298081 - DNA, 637 bp, Homo Sapiens
  misc_feature (556)..(556): n is a, c, g, or t
atctccccgttatgcggcaagaatgattggagtgactctctacagcgtatctatgtagaagtcacctctatgctaaccagaatgattcccgcccacaccatcttatactgaccttatgattgctaagcacagtatgtagagtgacgtctcttgcacagctctgtctgatcaagcaaaatgctgaccatgcatcaggcattgtgagtgtagtgcgctctatgctaccaatatacgaattgtgtgtccacccctccagacagcgaaccatatcttaacacactgttctgacacctaccataatctcagaagcacctgccgttgtacttaccctgctaccctgaaacttctcggaccacgccttctgacgacctggccctacaaacgatatactaacggtgagttgcactaacaggttctctcttttatagttacaacgctctctctgtctcataacattttacttgatgaaacagacacttgacatggatgacaacaatcgtcttggaattacgggcacactattgtgcttaccagggttagatcagagaagtctggntccaggacacatatggtgtatacacactctctctatgactctgaatataatcattacattggcgatcatgacctatacttt

SEQ ID NO: 298082 - DNA, 402 bp, Homo Sapiens
agcaaattcactagcaagaataaagcggccgtatataagcgttttatgatatcctactagactttactgattccaaagaaatgtgtattaatgaatatggatcaggccgcgtactggcttattaccctggtcagaatgtcactccctatggattaaccaagatggctaaagatgcaccgactgctgttgataaacccacgtggaattgacacgctctgggtagttatgaaaccggatacccatgctcttggatgtactgggacatgggatacagaggtccaaatactacatacattcgagctggtgcagtcgaagttgacactgaagacatatctgtttcattgcgttcctgcgttatacaccctagatactacgctcttcaagatgaagatgctcgtgccc

SEQ ID NO: 298083 - DNA, 415 bp, Homo Sapiens
agcgcatacactattagggagaaacccgacgtatattagcgtagcatgaatctgggactgacttacttacttctcaggatacaggtagacttaagaaccaataactccttgacttgggataaccgataaagatatccaccacctgagatgcttttctgggaacaacaggcagggacgtgacatgtcagactatgtatgcattagcatgccctatggaatttaaagatgcacagacaggggctcagataatatatgaccccgttgttaaggcacgttaaatgacatctcattcatcataagagcatgctctgttgattattgcttttgaaggcgatgttcttcatcgcgttcccgcttcattcacaccagtcatagcgccctacagagataactgctgctgtgaacaactacacgg

SEQ ID NO: 298084 - DNA, 650 bp, Homo Sapiens
cttacccacagtttatctgcagatgagaccgaagcacagagaactgcctgctcatgtcactcgggcttatgcccaagatgtcgagtttgccgtatatgcctgagccttaatgctgcaagcagtacatcttatagccgcagctgctaacgtaccaatgctgccatagggaagaacagtgattatacgctcagagctgaacctagcctacgggcacaacatgctaagacactagcggacagtgcgttcgactatacgctatagacccaatcactggagctacgcttcatgatgatgtagccattaccgcgcatgcctatgctagagatgatactaccactggtactgacctgctacgctctatagccaagcatggctatgagacgatcagtattggagctaagcagtgtaaatataaggggctacatgatcctgttgatgctgtagtgctgcacttaggaagcagctactccagagaccaccctgtgcgaagtgcacaagatgctacgactacttgcacacgcgacttacgacgtagctgatatcatcttagatcagtgtatacccacgcccaacccgggtgcagcacttgaaagggatggagctcaattactggatacttgattaacacgtcagggtgcgcgcctagtccc

SEQ ID NO: 298085 - DNA, 630 bp, Homo Sapiens
  misc_feature (122)..(180): n is a, c, g, or t
  misc_feature (501)..(501): n is a, c, g, or t
  misc_feature (508)..(508): n is a, c, g, or t
  misc_feature (517)..(517): n is a, c, g, or t
  misc_feature (556)..(556): n is a, c, g, or t
  misc_feature (562)..(562): n is a, c, g, or t
  misc_feature (570)..(570): n is a, c, g, or t
  misc_feature (596)..(596): n is a, c, g, or t
ctgggggctttatttattcctaacttttatacttacaaccattgtccgtaattttatatattgcttcatatctcctgtattccacacgaatggaaggtactgcatcttatttatccttcacnnnnnnnnnnnnnnnnnnnnnnnnnnnnnnnnnnnnnnnnnnnnnnnnnnnnnnnnnnnaccaaattactgattatatattctcccttggatatctcacgtgcatctaaaacttagtacgtggaaaactgaactcattatccttcttccatgctcaacattgtcttttccttcctatgtttcctattttgatgaatagcccgtattctcaaccagtcacctgggccaagagctttggagccaacctgactttctattttcccctcacaactaattgataaccaactcttgtctattctccccacccagagcagtttaatccatgaccacctccccactctcactgtactgccttggttacgacccccactttccagattnctgacanaaatgattnttctgaagagaaatctgatcattacaattagctaatcgnatgcanaatttagntctccatgtcagagatgagaatttgnggagaagtcagcaggacttcactcaagagagtcg

SEQ ID NO: 298086 - DNA, 365 bp, Homo Sapiens
agatagaaaatgaataaaacatgagtgagaaatatctaagaaattgtatttacagaattcaacactgaatatagaacatagaatttcaataggtttaatagttcttctgactaggaattcttaactttttctaagtgaagttaccttacttcctgtgtttaattcttgtttaaaattatatcattattaactgctggtagttatctccaattttgtccatctgagtccattgctcattatatttatgaagataatatttaatattgagaaatcatttaaacttaaatggatagaaccactgagtatgtggaagattccttctcataagacataatttccaaatagtaatattaggatacagtttt

SEQ ID NO: 298087 - DNA, 653 bp, Homo Sapiens
  misc_feature (620)..(620): n is a, c, g, or t
gggctgcaggaattcggaacgggtcctgacacacaacgaagagtggaaccttgccctactatgtctctatagctcggcttatgccagggacgtgccacgtgctgaggcgcacagcattgagcgcgcttaatggtcataaagattgctggacgcatcagatgatcctgtgagagcagagtatggagacacgggatgagcatagccatgcctagctgctgagtcagatcagacgacgcagaccctactgcatagccgtgcagcacacaattaatggacacctaccactcgtagccagacctaaggtagcatggctgtatgttgtgcacaacaagcgcctgagagcatagcatgcgtcttcgcccactatgcaggccaccctaagctagaccagatggagagaccagagtatgatgtgcaggcgcatgctaatcatggcattgtagagtcattcttgatcagatactgggaggacattgacgaagcagatcctgacataaatgccaggtgaaccccttccgtcgatggtgtctagcagctgttaccgaacggtgactagctgatgactaatggaatctgactgttgacacagctcgattagactacgcgatgaacgcctgtgntgctgtggacagcagactctgtgcgtccgtctt

SEQ ID NO: 298088 - DNA, 717 bp, Homo Sapiens
  misc_feature (364)..(364): n is a, c, g, or t
gctcaagtgactaaagatgcattactgcagatgcctcatgcgagacaccagtatgaatctcgacgcgaagctggccccactaatggcatagctctctgactaggatgattgctgacaggctcgggcactaggcatacttgagcacgctctgcgagctctacaacaaccactcaaatacatactgccacatacatgagacattgtccgaggactaggactacacttaattgagaccacgcagtgaaacattcaggggctgccacccctaaggctgtagacacattctctgggtgtcccattgagaggagcctttatctgtatgaacattggcacatacactaagcctactctatgcctgtcaganatacgcttttacataactggggaaatctggatgtctgatgccaaagggttgaagctccttggatacatttgctggatatacagccactacgttatttgtgatcagcggactttgcgccactgtacaggggactgcccatcagcagcagcattaggggcttgagttgtgcaccttgaggatggtgtgtccgcggacatgagaatcttgatgggtggtatatgaaatgaactacgttagcactctgatgatgggtttaaaatggacatcctcataactggtgggcgatgagcaggactttgttgcgactcgtactaatggacctggactgattttgggcttttagatttttgggc

SEQ ID NO: 298089 - DNA, 293 bp, Homo Sapiens
  misc_feature (49)..(49): n is a, c, g, or t
  misc_feature (104)..(105): n is a, c, g, or t
  misc_feature (132)..(132): n is a, c, g, or t
  misc_feature (135)..(135): n is a, c, g, or t
  misc_feature (151)..(151): n is a, c, g, or t
accgaaggccctgcagtcgctagtagaccccagcacgtcagaatgcttnatgtagctagctagcttctaccctgactactcgtattagatcagttaatggaaannagaagtaacatggattcttgacaattnagnccacggttgaaaatcncctttacttattaagggctccccccttcccttccctatgggctaaaataaaccgaaacttaggctttaaaatttgtccggagggaaaatcctctaacctggggaatattaaaaaggggccccgcctttgttgtttccccccc

SEQ ID NO: 298090 - DNA, 339 bp, Homo Sapiens
gagaaccgcacacgcgtttggcacactgaagagtgctacctctatgtgccttctgtatctctttagctcgggttatacccgcggagtgtattgacgcgatgcacacagcagtgtgggcgctcatcggagtacagatttcggagaggactatttcatagcctcgcgcgggatggcctttgctcagcatcttcaactctggccattggaagatgatgcctaagtagagagtgaagtaactgaatttgcatacacgtgcgatgctgatgagctgggtggcactctttgagagacctatcgtgagctggcctgctgccgtgcagcaggagaccttgcgattgg

SEQ ID NO: 298091 - DNA, 329 bp, Homo Sapiens
ttgccccacacataggggcccttgggctgcacctttaggtgccccgtctccgcatgtgctccactgttatactgcatttccctttgatttctatcttctatgcctccttaatcctttactgaacttcctatcatttacactcattccccctttctcgggtctaatccttcctacagtccccatccatcttgctttctgcccctctatattacattcccgctattatgacctctctacccctattttccaattctgcttcattaccgcttgatctttctgtctccccctattcagtatatttatccctcacccttcgcaccccccgccct

SEQ ID NO: 298092 - DNA, 392 bp, Homo Sapiens
gtaatcagtaccctgatacgaaccaggatgcccagtattggaagctcatatgcacactctttccctacaccagactggagtctgatgcacactgtgccgactcataccaactgactaaggaggctttatatgaaacatgtgctgcaacctgtggaataacgagctattcactgaactcaaggaatgttagacctcgttataccacatatgccggtcgttagcccacaatcattgcaaggctgcatggacagcaacaagctgcaagtcatgcacgcgagtgacagtgacgcacgctatgtttatgatgcactatacttggtccgagtgcctcatgagctgttcgacagcgtcacaccgtggttcacgaccttgttggtgatcacatggatcag

SEQ ID NO: 298093 - DNA, 308 bp, Homo Sapiens
gccggctctgcccgcgggcgggtgtttctctcggggtcgtagggtcggagcggagctcaatggcaggtgcttgggggaccaggaggtctcatcccaggacctggctcctctaaggtctgtctcactgaactcagtttttctgtggtggtgagtgcgaaagggaacttccgatggcttgctcggcggtctggtgctttcaggtcgttaagtttcctggcaagttgaggcggtgagatctagacgaggctgcgccgccgaaggtggcagggacgtctgtggtctcagctcccgggtgggtgacctagatc

SEQ ID NO: 298094 - DNA, 347 bp, Homo Sapiens
  misc_feature (134)..(290): n is a, c, g, or t
attttatattaccttgtgatttcatatttaaaagtctcttattttcattgtgttctgaactcagaaatcttggggttggtcttcaagacacaaagttgcatggtctcactgtgctgcagtcctgcaaaagagtnnnnnnnnnnnnnnnnnnnnnnnnnnnnnnnnnnnnnnnnnnnnnnnnnnnnnnnnnnnnnnnnnnnnnnnnnnnnnnnnnnnnnnnnnnnnnnnnnnnnnnnnnnnnnnnnnnnnnnnnnnnnnnnnnnnnnnnnnnnnnnnnnnnnnnnnnnnnntctatgtctgtagacttgtggaagaatgctgctttattcttctccaggtccccggtg

SEQ ID NO: 298095 - DNA, 379 bp, Homo Sapiens
attttctgttaatataaaagaaacttcagtttactgaccgtgaaacagactatgtactgacatccagggtaaagtaaaagacttttaaatattggtcattaaaggacaggagctaagctagcaaagcaaaacatctttagcactttgcagatctcaagcagttaaccaggctctgattcccttccactgttttatgaattaattccagttcttttcatgtatctttgaacctaagattatgaagtaatttccctattagggactagaatgacttcagttttttcatttgataatcagaactgctacctttcccttttttaatgatgctgtagatgagtgcattaaggtttgtgatctttatcattgtatgtcattcttg

SEQ ID NO: 298096 - DNA, 257 bp, Homo Sapiens
agagagttgaaggtgagacatggcatagatcctactatagtccgctcgccgtacatgagcgcgtgttgagcgagaggcgcgctcgggccgaacagctctagctctctcggatccgctgaggctactggcatgacagagcttagaagacatgaggcaagagagagcccagatgccatgagagtatcgactgcactcaagagatactctatgaggaagaggcgttctcacacatcaccggtgacgcgcatgaagacccg

SEQ ID NO: 298097 - DNA, 397 bp, Homo Sapiens
acagatcgcttgcacggagatggagcagatggaggagcacagacgccagagtcacagcactggaacgcgacatagtgatacacgcaccatctgttgtctactatgaccgtgacatacatcaccatagaagaggaggagagttagcttcgacaggtggataatgctgcagaggcatagcggacgcatctgtctgtgagagaggaacagaactgtgatggacgcacgcatctgccagggatcggatcgtgagcggctgcctacatgtctcccgcgctccgtgtgcatagtgaattgcctgatcctatacgatggtctgcgaggtcaccatgagatagagaaccatagacgagctgttgagtgcatgatggtatccacacacactagggccgtgtctatc

SEQ ID NO: 298098 - DNA, 613 bp, Homo Sapiens
gggaaggggcagccaggaggaagcttctattactacttatgtctctccaagtaccagccactctgcacacactgactcatgaccataacatggaactatcagaacgagcccatagaattagctccgatgataaccggattctgactggaaattaatcctgagatccatagggaaccccatgcggaacatcatggtgtgctccatctaccagaccatcggcggtgtcatccttttcctgaacaccatctaccagaacgtctgccatagagacctgcacagaaacatgctcaaagacatggtgatcgaagagggaatcgagttagacctcagaggtgctcctcttgctgcaacaatcgcagaaaccaccattcaaaggcttgatggacgcttagatcgctattctcagtccaagacacatggcgttaactatggaaatggcttgctatgctggagaatgccgatcaggatcgcttacaaccgtctatccagcataactctaacggcctagcttcgatactccagcctcttgtcgccagttacttggcccctattgtttgaaccccaagtgattaccctaagggggacccatgacatggccacctgcacctttgtc

SEQ ID NO: 298099 - DNA, 363 bp, Homo Sapiens
cttcggttttgggggcgctactgaggtcggagagtgccgagcctccccgcctgcgctcagcgttcagcgccagcgcgaatccgcatcggctcactcttgccttctggctccaacccccaggcctaggaccaggcccccgggttagaacctgcgcttcccaaggggatcccacagcccggggtgggatatggaggaggatccttcaatatagacccagtcccagctctacgcggcctctcaggcttgcacagaggtgcgcatgctcgacatgctgggagccagggcaaggggcatgaaggattgctacgctcttgcgtgaacgagtgacctgccaggtgttctctgaagcagttagtttggttt

SEQ ID NO: 298100 - DNA, 451 bp, Homo Sapiens
ctgtaagtcaacatatacgccgttgatcggcaatggtaactgtgcagaatagtggatgctgacgcatacgctactggtgctggctgggccatgggccaagaatccgtgcgtggaacctctgagcatcctattcataacgatgcttcatctctctaacccacttgtgaggctcagcacgcgctctggagcacatcgttctcgctgaccaactgctgtgtctgccggtgtcaggcttacattgccttatcatcggtggtatgctgtgcttgccaccggatcctacgcgtgacgtccgatgtgtacctcccgagctgagctgaattctgtgacgactcgtatcggcgacgactgcgactgtgccgtgatgttctacgggtgccaagctggacgaccaccgtacgcacctgtctatacgcagacgtcgccggatgtgtcttgatatgccaggacg

SEQ ID NO: 298101 - DNA, 413 bp, Homo Sapiens
ggctagtgtcggctgcagaaccgaggaaggcatggtaggttgcgcaaggctgtgtcctgtgtgcatgtgcgacacacaatgctcatgggagcaggatcactgatgctctgcccttgatgatcaaggctgtggctgaagtggatgagggaggcaagttctggggtaattgcctttgcagagtatgaggacaagctctgtatccctcctatttgtagttgatctcataactagaagcatttgtcaattgctgtgactcccaactgacagcacaggttcattgtcgaacccttctaacatcttatacctttcttctgctagaactagattacagtttgattttattctatcatgagctgtgcactagccatgtcctacttggttatcttgattactgctaccgcttcttgccttcc

SEQ ID NO: 298102 - DNA, 719 bp, Homo Sapiens
agaaatagcgtgaggcgggtgttctacctcaccccacacaccatgcttacatggatcaccgcgatcaacatccacatccgtgacctccaccacccaccatgtcagctgcagcttagcacacacactgttctggtactgatgctgggtctgctgcataggattaagctgctgggggatgtctaaaggcaggaccactcataaggacttaatgcgaagcccaggcgtatgcctacacgcccaaatacatatacactatgaccctgagaatgggcatcactgtgaacatggggatcatgccaaggcgcttgtcagagactctgacagtgctccatagaatgacacagactatacaggtcggagagactctttgaacgtccatgacaccgcaagatgaggactcccactgtgcaccagctggaccatccgcgactgtggctagtggtgaatggcccactgggtgctgaacatacatacactgagagaatacccacacactctgtgacgagtgtgtcgcccgcaatatgactatacacgtatcataccaagacttggcgaatgaaacacatggctaccagatacactacccaactgactaactggatctatgaatcgaagtgccaggttactggaatactaaggcttcagaatgcgcgacccatcgggaacagagagcaccgcaactctcaagacatctaagaaggctgccataacaggacgct

SEQ ID NO: 298103 - DNA, 351 bp, Homo Sapiens
atgcttctcatgcctagagagcaacgtagaccaaaccatgcatccgaaggctgtgcaactgacacaggagacttggcagcgcacatatacttcatgagcgtggctagacgaatagggagcatggaccatactgtcgttggtaccacactgtactgcatcatatatactgtacatcgaggaatctctgctgggagagccagacctgagtaccgattgcccagctgtgggaactactcacaggatatgacccctatacggataggtctctggggaatgctccaggatgtaagtaaccagactttgctgaaggctgagacttaagtcttacacttgtagacaagctctgtgagc

SEQ ID NO: 298104 - DNA, 625 bp, Homo Sapiens
gtgattagcttagagtggtcagttcagacattgccaattgttcgaataacgggatgacaagcatatcatcacctatgttgcgccatatgttccatgggcagttccttattataccagacagagttgtactatacacatgacatgtgttggattagatccatgggtggacagctgttgtcagcatgcgttgaatcgggctgatgcctgaataccgtctcgtttgatattaacgacacgttaatggcatacaccatgctgcttgaatgtaagcaggatatcacatctgaagaaacggttcatactgactgatgctttgaacggaatgctgagggcgtactgatcgatacatagtatgttcacgtaatgactgggaactacttccgtgtgatatgagtgattgtcagcattatcatcttacatagtcagtagtatcactactgagtggctattgattgctagtagcagtgcatcagattcagacgctgctgctacttatggatcactttgttacaggtcatcagtagccacctgtagagcgcatagtatgatctctatatgatcctccctgtaattgagatacctactgaccctacctgaggagaatacggagctcttgtatttggcc

SEQ ID NO: 298105 - DNA, 782 bp, Homo Sapiens
  misc_feature (578)..(578): n is a, c, g, or t
  misc_feature (653)..(653): n is a, c, g, or t
  misc_feature (675)..(675): n is a, c, g, or t
agcttgttcttaggatgactccgaaggctcattgacataaatgctgacatgtacgtgcacatagccatataccccaagatatgcatagtgcgggtgtgatcatgcacacacacactctctatctagggtctatggctatctgtaactgtgtgtgacggtagtcatagagacactcgacacattagggtcctatgacaagctaagttgccacctatgatggcgggaccagatcgtctacatcacaagctcacgactctacagggtgcgaactggagggagcaaaacactggacagatactgaccagttcgtttgatactagatacacctgaagatagacatctgggaaacaatcttttgaaaacctcgacaccttagaggtaaacactcactgacacaaggggcacaagctcaatgcctatattggggagcgtatatgcatgtaggagatctattactgtttgaaacgcttcagatatgtgctggatatatatctactcatccaagagtacgtctgagctattatgactgacatagatgtatcacatctgcagcactatggaaatgatgagaatagttnctacctgtatggggagaatgttatatgaaatctaccctgcatacactttcccaaacagtgcatagctggtagccnataatacgaggcgcccacagcntcgggggcatcaattatgtctcctcaggagtgctcttcaacgggacgccgtgaagaacactggagctctacaggaactgataatgcggggcttctcatcacgacggg

SEQ ID NO: 298106 - DNA, 719 bp, Homo Sapiens
cagacgtcggggggggaggagccagcatgaccgatcgctgcgtacgctactatatactgaggggcccaagatgggacccctacccttattgagacccacatacacgtctatttgaccacatgttcaggctcgctctgctgccggaggatgtggctcatgggataggcgtgggcagatgtccaagatacgtgcgacccctggcccccgactgcatcgtgagccgacaactgtcagggcccgactacaatcagcgcgctcacacggcaactgatctaaggggtctcggacatccgggacactgccgctcgatggcgactgtccatggatgtgaccacttaccccctgacgagatgacagtgaaaccaacgattgagtgctggacatcaccgactaggactatgagcggcaagacgagcatagcttcatatcccattgtttcacgcggatatacactgctgaccccgatgtggtagccgaccagtttgcttctgcctgggcgctgaaggcacactgacacgagacggccttatgcctaatgtatgcacgcaggacatctcaccgtactatgcacctgcgaagaatgggtccaacttgtgtgcccagatgctgaatatacgctggactgtacacttgtatagtgtctttaaacattatctttctatgttaacaaaggagaagatcactgtaaagaatgatgtgaggggggtcggcacaggtgt

SEQ ID NO: 298107 - DNA, 339 bp, Homo Sapiens
ctcaacctgtgttcattggacctactgggcctaagggacttgctaaactctctctgcagcaggtagccatcgctcagactagtccctgtactgacactgttatggataccgtgaataccaccttgcagtaccttagccctgctacactgaagcatcacttcctgcctggactcgtgtcatcaggcagactctgactcacgagcgatcctatttcagccctgtaccctttacctcgacgagctactatagttcccacattatcgcctatcatacttcttccacttgtgtcctttgatctgatgactaccatcactgttatctagcacttgtgctcccgct

SEQ ID NO: 298108 - DNA, 273 bp, Homo Sapiens
cacatggattaagtttctcataattgacagctctaacctcgtgactgtatctcgctccccactgccattgcctaatggtgtagtcctgtatctgatgccagagtgtcgtccgttttcccatgcaggctcggatactgaatcgttgatcactcctggcacccctccttactcgacctatcctctctctgcagcccatcttcaaccctgtgcatcctccagcccaatcatctcattcagccccctctcggcttattgctccctattactcacccc

SEQ ID NO: 298109 - DNA, 405 bp, Homo Sapiens
ccgaactggatcagtcactcggcatcggcagtgagtacttcgaggctactcttgctctgagaacatcagctcctgtattgtatatggccgcatgactgacgctagcactatatatgatgagcaagtcagaaggagcgaattagaatacagcggctttgttaaccttaaacggctgctcgctcctgcagctcgaatccatgttgactcctaaacatgggatctctattatgctaacctctgacgctaccgaagaccagaccgcgtctgtacctgcctaactgatgagtgcctatattaacttggctcgaacttgttgctagacatcaacatgtggaggaccccctctcacagttccttctgtagcatctcggcctactatcttacagcttgtcggttgtacattcg

SEQ ID NO: 298110 - DNA, 359 bp, Homo Sapiens
ctggaatcgagcactcagcagactaaagctgaatctcaacaccagatatagggatctctgtgtacatcaataatctgtttgagactgatctcatgcctgctgcaatatagatttatcgagacacaaatgaaccagcggataccaagaggtctcatatctatgggagtagacagatgatactggagacagaggcatcagacgagctcaaacggtgtgaagatccacgcttgatgctcatgggtttcaagccgctggtactgctgaagcaccattacctgacgcactcaatgtgtgagcacccagagtagcacatgtggattgtgagcttccttgttcagcgctcagctgatcaggcggcg

SEQ ID NO: 298111 - DNA, 358 bp, Homo Sapiens
atggaatggttcagttggtttaggccggcagtctgtctacctgctgagacctagacttatagagccagactcaagctatgggattcccctgcccgagcttagacaacactgacccacggtgacacactgcatggcgaacactggaggtcccttatctcaggccgcagaggcctgatcttgggttcggaagcatgagccgaggacgttgcctgtggcccactctggctgctagtgggtctaagtggaccagtacctcactggacccaccattatctgacgcactcaatgtgtgaccaccattcctaccacatatgcctcctgcgcggtcttagtgagcggagagctgaccagcaggctc

SEQ ID NO: 298112 - DNA, 371 bp, Homo Sapiens
tggcacgcgagaagggcttcatcatatgttacgagaactaacagctataaggcatatctgtcactactgttgagacctgaagcgagaccttgaggctcatacctggtgagatcttatgacaagataaggatataagaggataggcgtgccccgaatagtggaccaactggacgcgtgacagtgtatgtctggagcactgcaagggttatagcccagaggatccaaggtgggcccatattgagaggagcaccctgtcatgggagaaggagagctgtgttcgtacatattgaatatgtgagtgcacggtggatccactacccttatgagtctggagttccctgaggctttattcagagggcatggaccgtgct

SEQ ID NO: 298113 - DNA, 412 bp, Homo Sapiens
ggaactactctgccgtaggtggcacacgcatcagccacgtcacagcagtgcggcattcattaactaccttgacttagagtatggtaatcccttcatggtcattagcctgtagtagctctctattccgtactgtccggacacgctcataagctgacccatgtataccttcatgtgccgaccattggtttgcccaccattgtggcttgcacccatagtattatgtggatgaatgctgctcttactgaagccgatatcagaatggggttattactgccataacactctatccgagcttggatatcgactgacagcttgacccaacgcacgctttagggactaccggagacgcgcaggatgacgctgtgatcatagtacaccagacatagcttcagcggatggtccatatatctcc

SEQ ID NO: 298114 - DNA, 410 bp, Homo Sapiens
ggtactactatgcagtcggtggcacacgtattagccacttcacggcagttcagcattcattaactagcttcacttagagtatggtgatcccttcatgaacattaacctgtagtagctctctattctgacctgtacggacacctcataagctgcctcttgtatacttacttcatgtgccgaccattggtttgcccacgatttgggtcttacacccataggattatcgggaattgatgctgcaataactgttgctgctatcaagatgtggttattaatgccgtaatactctactcaggctttgatatcacctgaacacattgacccaacagcacactttagcgactttacggatagagctggatgccgaccggtgagtcgagtacacctcacaatgctttcggcggtccctg

SEQ ID NO: 298115 - DNA, 354 bp, Homo Sapiens
atataatcaaagcgctggtaaataatttaaagaattgcctcaaaggatttgcagactagaaagagactcccttctctggtttaaggtgggagaaactgttttcattgtctttcccccaagatattttattcaggagtgtcccacacgggcttgaacttataagtggctgcatttttctcactatactctcatcccctctttcctttattgattctttttaaggatgctgtcggcaacatttatgtccaactttctgttcatctcagatctgtgccccctgctctttagatcaatgagagagtgcagggtcttggctgctgagatgattcatcctattagctctttccagagggt

SEQ ID NO: 298116 - DNA, 346 bp, Homo Sapiens
ctttgctggggcataggatgtgctcctaggcctgcagacgactgattttgcaagacagcgtgctgatgactgtggcgagatgctactgagacttgtcaatacgtatggaaccagtctcgagaactgctgcgccgctctacaacctgatgaaagctgtgccaaatcggtcgacgaagtgtaaacctgatggggaagaccctcggaatatcctcaagcgtgcatgttacaccaagatagatccctaagtgtcaactacaactcttgtcgaagtctgaagagaccttcgaaatgtggtcaagctatgtagtcaacattaccatacgacagggcccttggcaggacttct

SEQ ID NO: 298117 - DNA, 747 bp, Homo Sapiens
  misc_feature (503)..(511): n is a, c, g, or t
  misc_feature (553)..(696): n is a, c, g, or t
  misc_feature (703)..(703): n is a, c, g, or t
ataatttatccactcatgggcaatcatgtttcactgtgtccccactcactttctcctatccttgattattatgaaacaaattctagatatatcatttcattcggcaacctaagtaacgaacagagggaggctgtctaagagaaaaagatatttatgcgggaatagagcattgcaatgggaatatgtgtaccatagtaaactatgaggtattcagggaggtaaaggaagacacatgttttcaaaggaaaaaatgagaaggattacatgattctttgaaaataattatcattggctacaaagatcaataataagggtgacaccagtccaaggttgaacaggcagttgctgggcagaagtccttgcagaaatattttttgtataaggttgtgatggcctttgtgcaaggttgtggttttcataggatcttttgtgataattcttatcaggcaaataagcatgagaatgctcttttcatagccttccctggctctattatcagagannnnnnnnnaacactagtgactccattttgattccaacaacattgacacannnnnnnnnnnnnnnnnnnnnnnnnnnnnnnnnnnnnnnnnnnnnnnnnnnnnnnnnnnnnnnnnnnnnnnnnnnnnnnnnnnnnnnnnnnnnnnnnnnnnnnnnnnnnnnnnnnnnnnnnnnnnnnnnnnnnnnnnnnnnnnngaagcangagaattgcttgcctggagcggagttgcaggagccagatcgacc

SEQ ID NO: 298118 - DNA, 264 bp, Homo Sapiens
  misc_feature (233)..(233): n is a, c, g, or t
tggatttacaccaacgaattattttattatgcccaataagcttaacacattcaatgtccactcatgtgcctacgagccagctgagaaagcattaaatgtgaagtcattatactgaggcatctgggccctgaattacaagattccttccctcctccagaaatgacgagcacttataatcatgcactgagtgcttctatacttctgtgcaatcaactcataacaagtgtccctgntcattttgatgcgttgggctggattgcactt

SEQ ID NO: 298119 - DNA, 216 bp, Homo Sapiens
ggggaccgaggcctagtggtttgcctaccttttgaaatgacacctgtttctatcagctgacacacatcctcatgccagctggctgaatataatgatgttttttatacgagctgtcggctctccactcacccaacaatagaacatctgacgccgctgcgtagaatgcatttctatatcttaccctcacgggaacccggtatgctttcttgcccgttg

SEQ ID NO: 298120 - DNA, 347 bp, Homo Sapiens
actggatagaggtcaggtgcacggatgtgagaagcgaacctgggcctgcttgatagaagcctatgaaagggaaagcgatcagagctgtgagcttaagatacgccatggtgttgatcgccagggcaagtatcctgaggagtgctcactctgaggatcatgtgcataactgaaagaaggactgagagagatactcatgcggagcgtgaagaatagccgataacagtgacagcagagcttgtacgctctgatgagacagcatgtacacactggcagctttcggggactactatctggaaatggctgactagtgagcactgcaagctcctgagagtgtgcttctagcggcc

SEQ ID NO: 298121 - DNA, 587 bp, Homo Sapiens
tgagtgtgattatcaacgatccattatggttgaaagtcatcactgagcttactattgcttatcaaatcctaaaccttaaactatgtacctgacaaactctctataatggacctatattatcatagtataaactacattgattctgacacaatctattgttcttcaactgtctatctgatgcacttcacaattataccaagctgatccaaattctcccatctcggatcgatcagtatggatacacgatcacagattctgatactgtacatccagttacggaaagttcacctataaccgtacttgacattgccatccatgcatatcggactactatctgcagcattcatgccgtgcacaactctgaagaggaactgcccattgatgtgccacgctgactgcatacccatgtctgtgagttacatcgaacattatctacacatcatcgtattggtccgaatgtttccggttttgcacagatactggctgtatgggtcatgccatgcttcattatcgcttaatgcccattgacatgatgcacctacctgctactgattatcacgtcttgcacttcacattacctccctgat

SEQ ID NO: 298122 - DNA, 640 bp, Homo Sapiens
  misc_feature (406)..(406): n is a, c, g, or t
gactctgtctctaccagacataaaaagtgaataaaaattgattaaacatgcacaactccacctcgagctggatctctccttaggtctaaagacacttgctgagaacctgatgtgtgcctggccttccaaggcacacctgtcactggcttggaactcagaccaatctcctgggggtgtttttccagacctgctgtggggagaacctttgggctcagatgataaagatcctgaattagcagagtcctgtgccagcttcagcccctgcctttgggtggaccggactaggctggggaaagaaagatgtctggctatgaaagggtggctggccaaggttgaggctcagactgcccctgctcaggctccgagcagcaggctcagcagccacagttaggcacgtttgcacttncaaccattacaggcaggcgggccaacacggccatggtgtggtgactaacacctcattaatggtcataccccttctgtacctggcatgtgccctccattgtgtgcgcttcgcaaagagcccactatcgttccccagtcagcagctacttggtagtcactgtggcatgtcggtcaccatttatatatggatgcctgtgctctgcttcaggctgaggcaggcaccccttctttctgt

SEQ ID NO: 298123 - DNA, 566 bp, Homo Sapiens
gcaggaattggcaccaggctgaccgtgaacagggagccgcctctgcctgagggtgtcttcatttgcatactaatggtagatgcactgtgcaccactgaacctgtgtctctgctggaatgcggtatcatggaggagagagagatgtctcgatttacagaagcagatgacacaattgaggaccggcctgctaccacttgagctccaagctcctagctgaatcctgtgtggtgtataccagatgcacatacaaccgtgcgctaaggccatttacctcttctctgcctcgagcaccactgcatcccatgtatttgtcatcctggggaccaatggtgtaacttatgcagccaacagctttcctgagatcgaggatgctctgaacccacacaaataccagatgctcatggccacggtggatgtgatgtttgttagtgagggccagacactaccagatccgattgtgggcctgaatgacacaccttccttcataatggcggacatcttggatttgcataccggccagtgcattgactccacaaccttaacctggacatgtttctccggagggg

SEQ ID NO: 298124 - DNA, 739 bp, Homo Sapiens
gtcatacttaggagtatatgcgggatgtcgacccgttattatcatacgctctcttaaagagggggactgccttagaacagtgacctgaacctattatccgtgagtctgggactccggggcaagctgtgggcacccaagctgttgaaagcctagacaggctacattaaacattcggcatgacaatgaacacagaatgaggacatcagctaaactgctgtataatcgtgagacgagactgagaaacggatcatcatccatcatgatgcggatagtcagtcactacagatatgtcacctaatcaaggacaaggtgcacgacggtacacctgggccctgactgacagaatcatgaatagcaagacagtctgcatccaagatgtactgcgtaagttcattctacatcacacaagcagcaacaagctgcgcatgctgtatcctaagggaccagaggactaaaggttccttcagctggaaagagatctctctacacacatgagtaatccgagcgcgcatagaaccacagaactgacgtaactacgccattttgggacgttcatgtaggtcctttaaggagatggcgtccatagggcatatattgatagaaaaccgtacattttgggaacaaattccatggagggactgacgactgggccatcataaggtaagggtcagactccccctcttgaagactctcttggttgtactgcataagcgaccacctgggcggtcttgcggcccgc

SEQ ID NO: 298125 - DNA, 729 bp, Homo Sapiens
ccgatctctaggagtatgctgcctgattgccactgatgatgatacatactctctctagaggagctggactcccttaagtacaccgacctgctcagcttagtcaagagtatggtgcttcggtccaacctctggacatccaagttgatataagccttgacaggctacattaatcatgcacgcgcgggaactcagaatcatgatgtaagccaagcttctgcataactcttggagatgagactgagatacggaacagcatccagcaagaagcagtgagacaggcactgggccatgtcaccataacaaggagatggtgcgagactcgctgcgaggaccctgactcacagaatcatgtaaagcaggaaagtctggatctgatatctactgcacaagttccttctacatcagacgtgctccaggaagctgctagtgctgtatcctcctgttccacatgatacatgcgtccttcagaaggaaagatatatctctacacagatgaatactatcaacttgtataacatgccagaacatgcttcactgatccagactgtaggaagcttcatgtacctacttgtcagggaagacatgcatgatctgtagcagcgacacatcataagaggtggcgtaggactacagtgactccagaggaagatctctgtgctttttactcctcagcaacgaccttggcgtcttgtgccctgtgcatatacttggcctgatgggcctcggcct

SEQ ID NO: 298126 - DNA, 418 bp, Homo Sapiens
cccagacctactgcaccttgctaccatacaaccttagtcaaaccatttacccacatacatgatacgcgcaagaagatgcaaactggcgccataagtatagtgccgcatgggaacgatgatcgcttataacacaagcataatatatcaaggactaacccctataccttctcgatattgacattaactagaaacttctttgcaaggagagccaaagctaagacaccccgagaccagtcgagctagctatgaacagctcatagagcacacccgtctatgtatcataagtattggaacatggataggtacaggctaccctaccgagactggtgatagctggttgtgcaatatataatgttaggtcaggtatagagtagcccacagaaccctatagattcccttgtcaatttaactgttgtgc

SEQ ID NO: 298127 - DNA, 417 bp, Homo Sapiens
acgacacctactgctgcatgccttggggcatctgtttgcgttccacacattgctgactatgacacacggacctctggagttcaagatgctatacagtgttctccactctatgagcctggagaccctattcaatgttgttccctggagtagcagccattacagcgttgaacatcctaagcatccatcacagaggtggcaattctgggcgtagatgaggacggtggctaccctctggatttggatgaagctgtaatgtagaggacccctctatgggagcaagtagtcgtatacactatagttccttacggaatgcctaaccaggatactacagtatgggtgatccagtacgacacagagtccagtgttcacaactaacactgaatacctagagctacttgtgagagtcatggggttctc

SEQ ID NO: 298128 - DNA, 834 bp, Homo Sapiens
  misc_feature (244)..(244): n is a, c, g, or t
accgaggccaacctcatcgtctacattgcgtccgtcccgctatgacaggacgcctatgcgccagacatcgtggcagctgcatgtcgacttacagctcggtatgggcatgctcgctaccagacaccactatgctcctactactgaaaggcacaggagcgcactgcgtcgggcagcactcatgctccgccacatactggatgagagctacgagacttatccatagagtgagttgatctcatgcttncagcagctacacggtatcttctgtatgacatggtccgatatcaccggaagaaggttgtgtacgcagcccagaacagagccttttacagactctaagcgagagatgcctggaactgggactaagatgacactccaactgcctagaataagacctatgctgtcagagaacacgtctgagagccatcctgaagctctgcacgacagtatccaagacgcgcaaactacactgtagatcctggaatctgtctaacgaatggcacagattgcctgtggactgtcaccgtgtgagagtatgactccaaccatctaggtccttatgagatgacaacaaatatcattggctagagagaacattccttccccagatgaagcgaagtcgccttcacagaacactctgagagatctaacagttgatatgcgccgtcagagtatcaggaacaggatttgactgcacatgttacatctgctacacagagtggaacttaagctccttcaggacaagttctttgccctaagccatgccgaaacatgagagggagcacgcagaattatatgggaaccttgttgaatcagactctactgtcagttagg

SEQ ID NO: 298129 - DNA, 671 bp, Homo Sapiens
cagtttcagagagactgccacacagagggattgtcatggggatcgcggtagtgcctccttcaacgccgcatgccatctttggcagcaccggcagctgacagatgaacaggtacataaagctgatcgcgcacagcagccgatcattcaatatacgtgatcgcgcaaccgagttgggaagaccgcttagtcggtttgcactagccattgtgcgacatatgttcgaccagacatgccccagattgcgtatttcgctggacacttatgaccggacgtgccagagccatatcctaaaggatgactcattcactctgacccagagccagctaatctcacaagttaaccccgcaagggatgagctgaacacacatagctttttccctcaacgtgttcaaacatttcggtcccccccctttaattaaacacctgtataccaacgccaggtggtaaaagcatgattacatcccctatgtgaagacccggttccctcacccgctttcaaaacagaagcccatgtgcacaataatggtccaagatgccgcaccaagagggccatgtgttaataagaaccgccttaaagttaggccctgttcgactaaccccaactgaagaaaattcccttctccccactgtccctgtcactcaagggggactccccggcttgcaatgtcttt

SEQ ID NO: 298130 - DNA, 523 bp, Homo Sapiens
gatacagcgaggcggtggcccttatgtgggtagagggagtctgcgggatataccaaggcagatgagaccatatccatgaggagcctctgagcccaggtattgatgctgagcgcctgactggcggagagcgctaaccctgagacaacggcgcccgacaacatgcaagtgcaggaaaacttgaatatcacttggacatatgggaagtggtacaaccagtgcaacggtatcacctggccctggctgtacaacataatggactggaagacagtgagcaccctggtgctgctagagggcgctacataggctcataacagtatgaccagcacttgaagggggtaaaggttcctgagaagagaccactttagcttatatgagacatatacatgatggaaggtatgtataatacatcaaatgaagacaaacatgagttctaaggggtcacaacaacttgagaaggaacccctttcttgacaccaacctccatatgggccgcatttctggcaagcttggcgggggccgtggg

SEQ ID NO: 298131 - DNA, 329 bp, Homo Sapiens
ggcccttctcaagtcactgcttacactgcatacatggccaaagccaatatcctgactacacataaccagtacctttaagggggtgtgacctgaagatcctgatgaacatgcactttgacctgaagctcaccaaatggtgcctatacaggatgcaggccacgagtgccgacgacatgactgcactataccgaggatatcaaggtccttgtatagcccaaggaggttcaatgccatatcccatggtacagcaagtcgaatgctagatcgatttgccgacattggaccccgagcttgtgcgtgctcgagcccgtattgccatggagctcggc

SEQ ID NO: 298132 - DNA, 780 bp, Homo Sapiens
  misc_feature (21)..(21): n is a, c, g, or t
  misc_feature (31)..(31): n is a, c, g, or t
  misc_feature (34)..(34): n is a, c, g, or t
  misc_feature (44)..(45): n is a, c, g, or t
  misc_feature (47)..(48): n is a, c, g, or t
  misc_feature (61)..(61): n is a, c, g, or t
  misc_feature (447)..(447): n is a, c, g, or t
cgccactcctacacaccaacncacaacttcncantacttgcccnngnnacccaatgagaancccttgaaatcccaccatgtctgtaacataattctttccacaaccttatacacgagaacttttatccaactcgggcgtaattcgcccgcaatatacaaacaaatctttcgccaaaatgagagccaaatgattcctcatagatacgcaaaataaaagtttgcttgcttgacgccaggtcgaacctaggccgttcgatagagccaaaaacatactcgcaccagcccccacgaagcgccccggtgtatcatccatcattctaatatagcatccactgttcatgccttacctcggtaaatcactgttattcatctatcttggagatgaagacaaaacaaacccgccacccgagtattggtacaaaaagtaatcaaccctaacccacatanctcccgcttcttttcggagatcaactccacctatctactcggcctatacgacacagcgtatcaacacaattgtactaaccctcacttttcataacctcaaacctcaagccacatactcgcgactgctctcatcaacaatactgtaaccactagcactctcacactttgtccacccatatatcaacgcactatacaccccgtgcaaataaactccataacacccctaatagcccttaactcttccctatatccttatctctctcctccactgctcataacctctcgtacaaagagaacaccctgtctcatactaatcaacaaatacaccgtccg

SEQ ID NO: 298133 - DNA, 435 bp, Homo Sapiens
tttttctttttatctttgattacattaacctcccaaaccttagggaggcaagtattactatttagtgttaaataagcaagaaaaaggtcacatttcagaaacatgccagtgggctcacaaatttcttagcaagcatgagagaatccgaatcccaaatgtaagatgacacatttatagaataaaaccaaggacaaatgtctcctttattctaaatataccatcacactctgagtagctggggttaactatttttacccacaccggctcttttgcatctcaaactcatgtaaaacacggtgagaaatggcgactatgataccgatggagcacgaaagcgggaagctgtgggccattcagcgacttgtacgattgtgcgtttatcttctcgcgattatagttacacaggcgaccgaatggtgctcatgtgttgtcctg

SEQ ID NO: 298134 - DNA, 335 bp, Homo Sapiens
aaaaacacccctcccaaggatagtagaccacaccacagagtgacacacgacgatccaccaccacgagtggtgtctataatatgagagcacacacacacaccaccagagtcgatgaggaaagacagtatcataaatcctcaacacacactcagcatgcaagaacaaattaggagtgtgtgtgctgccacgggcacccttttattataggtgggtatatataattatgtggtgtgctcaacaaacacaatagagatacactcaccacatggtgaatttattatagtggatcatgagcatatacaccatttatgttgtttttgtgtgtgtggtgtggc

SEQ ID NO: 298135 - DNA, 151 bp, Homo Sapiens
cttatatttgctcaatagagttaatatgctcgtgcttgaggacaatatattgatatgcttggcacacggtgattcacgtgtggaagacttctttaaggtggagatcgagctatgatatcgtggacagcttagcgtgagtcatagatatgcc

SEQ ID NO: 298136 - DNA, 292 bp, Homo Sapiens
cgggctgtaggaatttggaccaagcgcactccagctcgcgttactgaggaagttctcagaccacacctttattaggtgatccttggtgtaagatgtctattattgcgctcggttctggaaggtgcgccatctcttcgttaaggtgaggaactggccacatggcctgtctatggctcgatcttgcgattggagacatgccttgtcctgcaaccatcctagtgccttacccctgcgaagagcaccgggatgagcccacattgcattcacgagctcgggtatctttgctgtccgc

SEQ ID NO: 298137 - DNA, 342 bp, Homo Sapiens
gtgatactcacttagaaatgatctttgcagcgtttgtttatacagatataaaatactcaacttttacatacagtgcacttaatcactaacagcctactaggctgttggacaccaggcacccagaggtaaagccgttccttcaatggtcagccccctgccagcgcccctgggattagggagagcatggccttcagaggctggagcctgtagtcctaactgcacagctggtccagcagggcataacgcatctacctagagagtagatctcttcaaatgtctagaactctgcgcaaacaataggtaggacaagtgtgaacctaccccctctgttgactacgctgc

SEQ ID NO: 298138 - DNA, 491 bp, Homo Sapiens
  misc_feature (455)..(455): n is a, c, g, or t
cgcgatcgtaagggctgaggattctaggtccggacgctactgctcgtgactcaccgatgttcgctctagccgggtaacatgtagctcagtaagcccgaacgcaacaggcatggcttgtacggataccgtaataacacccgtggagacgaaggtggcagttcaccgcattctaatcaccctgacaagccggagcgttctcacagtgaacggtccagttcgcatgcctaccaagactttgagaatcactacaagacaaactcgttgtggtgaagcttctaagactcacagatcgttaccagattagaattcacaagcgagtcatagacttgtacagtcgttgtgagattggtaagcacattactatcatgcagatcgagccagaagatgaggcggatgtcagcattgcagatgcttaagtccactattcgaatcaatagatgactagttgtgatcantgtccctacagacctcgagcagtttctttatggcgt

SEQ ID NO: 298139 - DNA, 453 bp, Homo Sapiens
ggggccttcatttaccctgcaccagcctctaagacatggcctttgcctctatcaacagaccaatgtatcaaatcaaatgtgacagcaacagggcctccagtactatccagcagacctggaatagctgatacctggtactcgatctcctacctttactacagtgcagtgggctgcttaggatgcattgttgctggagtaatcatcagcctcataacaggtcgccaaagaggtgaggatattcaaccactgttaattagaccagtttgtaatttattttgcttttggtctaagaagtacaaaacactatgctggtgcggagttcagcatgacagtgggacagagcaggccttgagaatggcagtgcccggaaacagggggctgaatctgtcttacagaacggactcagaagaggcctggtacatgttccaggctatgatcctaaggacatgaatg

SEQ ID NO: 298140 - DNA, 250 bp, Homo Sapiens
gaaaaaaggctacgcgaaagcaggctcttagcgcccatttaggagagggggacaaaagggggaacactacttgatcaatgccaggcgatggagtggaagggcggacggacaaaatttgcagggagacttgcgatggcttgtctaacgcaccaggcgggcaagtacgagatatgaacactggaccagaagatagcagagcggttagaggcaagggttacgtgggaatgcgatggttggtacccgtctcgtt

SEQ ID NO: 298141 - DNA, 279 bp, Homo Sapiens
catgttcctttaaagaagaagaatatgtcatacaaaagaccttcgcacagccgggaagagacagtctccagcttatgccaaaagtgctctcttcccagagggaaaagggcagattgcgttttatgcctcacagggcctgtatcacacaatagagtaaaacatattcagcagttttgggagaaaagttatacatatctatgagggaagatgaacacacgtgcaatggataaacatatgtaacacacattccacgctcactttggggtaggcctctacatt

SEQ ID NO: 298142 - DNA, 625 bp, Homo Sapiens
tccttgatctcccgacactcagacctctagttttgtgctctgctctctctgtcttcaactttcttctcatatgctgtttcctgtgtctattgctcattgtgagatgatggagttccagatcttgtcctctacctgaggtattgctgatcctctgtctgcttctctacctgtgtagtcgcagatctactgtctgcttatcacctcttacatcacgctgatctacagtcttcggatgtcatcctgcttgtagttgcactccaactctcttatgaccctcgtgtgtcatcagcaccccatctgattgacgctgctgcttagcattccaaccaaatgtgatacgcactgtgacttgtgaggcctcgatattgtcacatgacttcatgattccatatccgtcggttatatctcatgtctctagtcttcgaattgttcacgctgtatataattgcctcccctcttgggattgcttcgccaggatcctatcgaagaccaccttgctactccttgtctcactcgttacgattcccagttcttttccatgatgtggctgttccctcttaatcgtctggaattgttggtcttctgtctcaagcttgtcggcatgtttatcttatgttacgattct

SEQ ID NO: 298143 - DNA, 281 bp, Homo Sapiens
ggaggcagaggaggcggagtgtggtgtgccacggggcagaggcataaggccgggtgggttgtgttgagaaacggatggtgaactggactaactgggaagaaaaagagaggcggagagggggaaaatggagcaaaggtaaaaggctggaagggagaactaggggggatacaaacacagccaaggaattaacgcggatttctctctgagagcagagacgaactggataaataatactaagtaggaattggattaattttagatagctgtgtatacagggagcg

SEQ ID NO: 298144 - DNA, 386 bp, Homo Sapiens
ctgcagtattcagcacgagggaaaacaatttaaagctggaagggatctaacactgataaaagaatatcaaaattttagactgatatttccaacccttttgcattcatctatcaccccttgattgatgaacttaccatatatttcaacaagcaattataagcaatcagaagggcaagcccctactgtctccatccaactccattaagatgcatttattaatatatttaccatctcttcctactactgtgaaatgtcactactgccttctggccaacctccttacacccttaatggcttcacccctgtttctctttcacatcatcaatatttccctctgtactatgtcatttccatccagcttacccatttcctggtgtctcccatct

SEQ ID NO: 298145 - DNA, 343 bp, Homo Sapiens
gtctcactgtaaaaataaatgttacgaatagtaagttctcccttcatcaatacgttcttggaaattgcaactttgcacttaaagtatattgagtatattgtattggtataacaacataccaatgtgaaaccaatttgacatagactaattgatataaacaagagttaagttcctatggcatatttctggtcacatatcaccaaacttctaaataaacacccatttaagaaagattaacaccaagtaagataatcatttacccaattattccagtttaggagcatgtgtggctgcagcctgtcctggctgctcaggatacaaggagagccagccctggacaggt

SEQ ID NO: 298146 - DNA, 363 bp, Homo Sapiens
cttacagcccgtgagagtctgtgcgctggttgggttctgtgctgaggtgatatagatgcccatgcattctctcttccccgccttcgttgcctccatgtatgtcatccctgccctgtttctggtggtgcccatttcgattcactatgtccctcctacgtcttatgtttactgtgaggtgtgtgtattcctggtgattgaggtgaccaatctgattgtcatcatcccgtctgtgatttgattacttcgcgctttttactttttgtgcttctatcttgccatttccctgttgggagttcccccatgtggtttccacgttctggtccttcctcctttccatccttctggacgggtcttcccttgtct

SEQ ID NO: 298147 - DNA, 733 bp, Homo Sapiens
  misc_feature (546)..(546): n is a, c, g, or t
atgatatcatgtatgagtctgtcttttcctagaggctactgatgccttaaagaggcctgattagtgcattcacacagctggcttacatggctctaacatcctggacaggacgataacctagtacaccgcagtgctgtggcgagataaagagtctaccatagccagactatgacaccagttcgtgtctcttctctctacgtgagaggtgcttgatctggcaaactaagcatcataaagcctcctctaatgagcgcgctatgtaacatctttccatatgtgagatgggaactgagccttcagttgatatattgctgtctacgacgagacggtcatctccacatcctttgagatgttcctctgcattgagactatcagactaacccagactgcttcactactaatggatactactgcattgttacaatcctcatcctatacagaaactgacctatggtcatcaatagatgagcctatatatcatacacagatacgaagcgaagtgacaacacttaactaatgcgatatttttctacaatgggtaaagtncctatttgaatactgctcgtcatgacgagacttacctcgatgcatagtgtggctaccgttgatcagcccattatagacagtagtagaggccctgaggtgtcatatggtatgatcttaagcagacgatcaagtccctctcgaatcttttcatagatcatacactttgctctattgagccaggttactg

SEQ ID NO: 298148 - DNA, 730 bp, Homo Sapiens
  misc_feature (565)..(579): n is a, c, g, or t
  misc_feature (716)..(716): n is a, c, g, or t
gccaatcatagtgaagaggagcatgcaatatctccgcacctttaatgctgtgcagaaaatatgtatagtgagtcgacattatattggtctttatacttttggaagaaaggttaacttttttataatcttactcaggaaaatatatgttcattagaaaactatgaagaataaagaaactgacgaatgttaagcagggaatgtagtggtacatggcttaaacatctcttttggctcaagcaaaatgcaaaccattattcagtcattaagagtttagttagctctctgtaaccaattcatgaaatctctgtccacccaatttgacaatgagccatatctaaaataatacattattagaacacctaccaaaatctcaaaagcacaggttgatgtccttagtcttgctatgtatgaagttattaaaactggagaaaattctacttcagaaataagtactgcttaggttttatattaaaaatgcagaccaacatatcaaaagatgcttcttagcgaaatgatctataattgctgcattccaaaagcaggttttctctttaattgttacaannnnnnnnnnnnnnnaaaatattatacttcatgaaaaagacaattgacatggatgacaacaagagtcttgaaattaagggcacactcattgttcttaccagggttagaagagagaagttattgttaaggctattttgcttacaccctctcgnttatgagttggatt

SEQ ID NO: 298149 - DNA, 643 bp, Homo Sapiens
gtcctcgacatttgcgctggctctctgacggtcgtgcaggtcgtgcagtatgcctgagactgtgtctgaggccgctgctgaggaggttaggcaccttatgaccaagtcatcgcttcaggcgatgctgctcatatatgctgattacaaacaagcaactgtgcccgacataagtacagagcgtcccgcgctgatgtacttcacgcccaaggtcacgtgagatgcctggactgagctgaagggaactgacatggaagatgccatgaaagcttacatcactaaagtagaagagctagtggccaaatacaggatatgagagactggatttggtaactgcgctatgagtgtattctaacgtgatacagtgccttgatgctgtctaataccgagcatgtggggaattcgagaggatagccagatagaccagctgctcacggctgatcaccatacggctctaacagattagcagctcagttggtactttaatgaacgacaccattttagatcacactcaaggcgttgcccgaacgccaattgccctaacgcggtcggaatcacccttaatggcccgccgattacaacgaggcccttgagcacccctggcgtacacaccttctctcttcaccaccctcccctctttgccgcg

SEQ ID NO: 298150 - DNA, 631 bp, Homo Sapiens
ccgcgcgcgtacctgtagccatggaagataccgcccagtcagcccgcattaaggagtgcggcctctgcctgttagacgtggacgtaaccctcacgccggctcgacagatcgcagaggcggacggatatgactactgtaagatatctgagcagctgcctgacgacgatgaagtcattgacacgttggagtatgtgcttgacgagaacggcatagtgcgagataagtacggacgactgatgtccaagcagaccatccagaaccaactgctataccagcatcgtcaagagcttgaacatctgtgccttaattatgtgcatcttgataaccatgctgctcatcgtcataccagtgatgagcttccagatctaatgctggacatctagcaatacgtgcggacatgagctctggacatgagcagcgagctactgtactctagctacgattcatagcactgcgccagaagtcgagtcatgtcatgagcctatagtctgatacgctgttctacaatgtctatcaatagagagcacgagtttctggcgaatacccgagggctgggacaagcgctactgcatggatagcccggaccacgatgcttctataccgagcactattggtcttgctcgcccttgcg

SEQ ID NO: 298151 - DNA, 705 bp, Homo Sapiens
  misc_feature (435)..(435): n is a, c, g, or t
gacattcatagataagaggtgcctgctatttcttcgaacgtcttatggagggcatatacaatgattaagacagtcgggcttatctagggctatcaacgttgggaagatgatgtactatatatcgctactcagaaagattggctcctaaccatgaatactacagacctgactactgtctagcagaggatgtaggcggtacatcggctccaaacatggtctgtcttgcttctagctcataggcgagacgcatcgattgtagaccatcttgctgtatagggagctttgtgcgacgagctcacgtattggatgaacactcgatttggagactgagccatatcttacatatcacatgtttatgaccacccccaattctgtggactgttctaccatagacttaagtactgctaaggttgtatatccaactgcagacacagngtttcataggtgctgtggacgcaggcgatctatgatcgctgagttccacaagcgggatgtactttttatcatgacaacgctctcgctgtgacataccactatactgcctgcagacgcgtgacctggctgactaacatatatctgacgttatggcgcgctgatatgtgcttaccatggttagacgatagaagtcattgtgacgcacgaatattgtggatacatcctctctctggtgagagatctggacattgcattactgtgcggacagac

SEQ ID NO: 298152 - DNA, 261 bp, Homo Sapiens
cgccggcgcgtgctgtgggtgcctgctctcgcacgtcagctgacgcgggagctaccctctgtagctgagaacggcgcgtttattgctacacgagactctattgacagtggcaggttcagcggtagcggcttcatgcggtctatagctgttgcttcctgatgaggctactcgcatgcgtgcctaggactggtgtaagcactgagcctctagcaggaggcatggctcgaagacggagtctgcgccgggcgtgctagagccgtg

SEQ ID NO: 298153 - DNA, 174 bp, Homo Sapiens
aggagacgtaggtccctaggctcactatgcatgtagcactagctgagcttatgaggtgccttgtcggtggcggtgcggatatctcgcgcgctagcggtatccgcatagcacactaggtgtaagaatattcagagattacgagcgattggatactattggtcttccacgtttggg

SEQ ID NO: 298154 - DNA, 442 bp, Homo Sapiens
ggagagaaggagtaggagggagggaagtttcactcgccacacacacgcttttctagttcttcttacagtttatcgcggaccctctgacgttttactgctttaatttcgctgtcctacagatgcatcaagcccacctcacgcgtctgttctgcacatagtcacagtctcggcgtatacatcttgccccatagcttcagatcttctcgctccccattgtacctcgccgtcttcgccctgctgatcccactgctctctgctcgctcagtctcacttatactgctccaccgtctaggctgtgccccatccttcagcctccgcctctgctccgcctcgtccccaggccagctttaaccctttcctgccttttctcctgcctcgcttgacggttgtcctgcagcccctccgtcctctatgtccttaccacgattccttctcgtcccgc

SEQ ID NO: 298155 - DNA, 394 bp, Homo Sapiens
ctcagtacctctgtcttactctgcccaatttcaatttagtaatggcaccattattcttaattcccttaatgtctgtccgctgtatccaattggcacagattttccccttcatcttcaattactagtagctacccccatcaattcaccttcctcaagagtctcaattgaaaataatctttgatgatacaatctctgcttttgccacaggtttgacattaactagacgtttctgcccctgtgctcattaccctcccaaaacaatagtttttttaatgaattgaaacacaattagatccattcctgagttttcatttttaactatttactttgtgtcagttggtttctgcatcacaagggcattctcttacaaaacaactcacaacagaagtcaagc

SEQ ID NO: 298156 - DNA, 329 bp, Homo Sapiens
cgtatgtgcagggcgcattttgttatcaggcgattggtgacatgcaggtattgcgagacaggccttgtgcactgcagaggagttaccatttctgacagggtgcccggtcaaagcattgtatgcgccaggataggaaatgtgacctcttacatgactggaggacctgaactctgtgccgccgcccgaagaatggccttttgatgtgatcttataacatggaacccaacgctttacgacgtttgaagattccaacacgaacgggttttattgctacactggggtacatgtggaaggcgctgactctgtcaagggcactgagggaggcttgt

SEQ ID NO: 298157 - DNA, 403 bp, Homo Sapiens
gtacacacctgggacgacggtgacgtgctgctaggtcaggggagtccgctcggccaatccacatgacctagctatgagccactagggggccactgagactgcagcgtgtgcaactgagagaggctgcgtcctgcatgacataaggagccgcatctggatcgcgagcccgtgctgcatgcagaaagtgaggcacagacagcagactgtagatctagccagctaatgcgaacggatctggaccgtcattggaagtaatgcctcctgagctccagatgtgcacagactgttgcatgagcgtgagcgacaactggctgtagactgcggctgcaaacagaatgcatgatgaagtttaaggactgctgctgccgtcattgctgctctatactcgagaggtagcagagct

SEQ ID NO: 298158 - DNA, 404 bp, Homo Sapiens
gagagagcgtgagacatctatacgagcgtatgtgtatatgtaatgttataacatacatttgtgtcatgactctattaaactggactgacagctatgataatactgcaacagaatgcacagatgccttgggacacatactgagcacaatatgcagacttcagtgcgtgcatactaagcacgttcatacctcactctagctaatactgtattagaatacgctatactgggctctgctagttgaggaggtacactggagacagcttgatctactgtcaagcgagcattgtcgaatggtcattctgctagtgcgctccttagttgcctgagctgactcactgacgatgatagcatccacggatgctactagacggcacagctgctagaggaagctgcactactagtgg

SEQ ID NO: 298159 - DNA, 337 bp, Homo Sapiens
ctcgtgctcgcactcacatcctgccttggtttatacttgagggacgagactggctggatcagcgtgctcgaggtctcttaccgtggtctatgccctttaatactgggctgatactggctaatgagctggacaggtgcaatggcaatgactgtgtgggaataacgcgactgactgtggccctgcgccatcatgtgagtgttatagccatatgctgagatctgctgtgcttgccaatcgcgtagaaggagctataccagtgcgactggcgcctgaggatcgaagatacattattatgcatcgcctagtctttaggattcctgataggcgaggactattc

SEQ ID NO: 298160 - DNA, 311 bp, Homo Sapiens
aaaccagaggtcaagatagggtaatataaggggaaaatcaaagagcaggaaagctagtgtcaatagggagacatatatctaaagaagagctaatatagatagagtatgagatatatgtgatattatgcaaatataatctcaccatgatagatcatcatctaaaagcgtgtatggaatgttatgatgatagagaagtatcaggtgagattgataagaggtgacatctagaaataaaatcatatgagtctctgaggaaatgatgcataagaaggacgtctcaaagagataacctgagtatgtacataaagagc

SEQ ID NO: 298161 - DNA, 378 bp, Homo Sapiens
gttttggtctttgacctcccacgcccacggctggggctgccgaaagtgaagaaactagatttgcagacgccactgctagttggttatgaagctccgggcaacagcgttttggatgtttaaatatgtagtgcccatctaacacagcctcccttttcctgctccctgcccgcctctcatcaccttggctttctccttttctttgcactttgaaacgtacagttaatgcagatttcacttcagcaggctccaggtaacctcctgatcaccaaatccagcgctgtgattccggacagacaatgtaagggtgtcgttgagaggggactcagtgccagggttggaatcccagccttatctgtttctctttagtgtgctgggatc

SEQ ID NO: 298162 - DNA, 685 bp, Homo Sapiens
  misc_feature (402)..(402): n is a, c, g, or t
  misc_feature (512)..(512): n is a, c, g, or t
  misc_feature (548)..(548): n is a, c, g, or t
  misc_feature (559)..(559): n is a, c, g, or t
  misc_feature (590)..(590): n is a, c, g, or t
  misc_feature (601)..(601): n is a, c, g, or t
  misc_feature (635)..(635): n is a, c, g, or t
  misc_feature (659)..(659): n is a, c, g, or t
cgacagtgctacagggactgccacctgtggggagacattagaccacaatgaagctgccgactgacgcgagtcccatctatccagcttgctgcttcttgctcatcccattctacctatccccagactctgttgagtgcatctcttcttcacctatgtaccgcagctgcacgtgcggatcttccttcctctaccccagttgcccaacctagttcattccagcatcaaccagcttcaactgactctggactatgcaggtcacgctgcccaaccacggactacttctgtacacgatagtcagtaattgaatactatgatcatgagtcgcttatcgacctcatgcccctcttgctagactatagtactactatctcatcggcaaggcttgccctgactacagatcanggctgactagccaccatcactgcagactcagacgtatgttctataccagtctgctcgcagcatgttgtacatctcgattgagcgtcctgctctaatttccatcctcccgngtagtctatcttgctcccgacttagcggactatgtntcagatggctntcttcaggcgagccgaatctcatctgatcangcttgcagtcngactgtccatttatgacttgagcttgactatgangagtctcattatgaactgatctantcggtctgttctgcatgtcacgcctg

SEQ ID NO: 298163 - DNA, 428 bp, Homo Sapiens
ggggtccatacggagttggtctgacttcccgccgtatctgatagggaatctttcacagtcgccgcagcgattgatgtcctgccaattaccgacgaagatggccttacgttccttgcagcaggatcccacttatgtcgcaccaatcttgacttccatatggaacagtccgtttatcaaacgaaacgtgatcgcatctatatcataaatttcagtacgacctgttagaagcgtctgatgtcagctagggccattgttggcatagtccctgctgatgtcagatgtacatccttcaggaatactggccacagtgctctgctgtagatcgctgctgccactgggaccactccgattggatgtcgcttgactcctggaacctttacttaccgcatacaggcaggcttgctggccacatgtctttgtcgctactg

SEQ ID NO: 298164 - DNA, 425 bp, Homo Sapiens
ggagcatgcatggacacactggccagtgtctatgaagtggtgctgctcttatcttcgtgtacgcactccatggaaacgacagactgtgacacaggcggaagcctaggagagccgtatcatcgttggggctgagccagaactggccaaagtgactgacatactgtcagacagtaggctcatcgagaaggcacgtcaggtgtgaggtgagatggtgctgtttcaactcttggacacaactgatgtaactattgagtcctgctccaagggctctgctgaggatgagatactgggagtcagggcacctgtatatctgactacagttgtactcgcattactcgtgctagatattgctctacttagactgcatgaggcctggcaccagctttgagagagtgcttactgacctgaatgatgataccatgctt

SEQ ID NO: 298165 - DNA, 627 bp, Homo Sapiens
attcattccaatcccgcgcctacacaagactttcaagaggacactgacagggagagcctactctattacatatctcttatgcttggatgcttaagcagctttataaatgacgtgtacggtacaatgaggaccattcatttgatatatataattgaggatttcatccagatcaactcatttgatatacgatataacatcacttttgaatggactatgcagagacatggagagtgcttgcggcatatattctacgagtatatggttagactattgcaggtatagttatacaagctaagatacaaccaatccgacattgaatggtgcaacatcatcttaggatgcatttatatgtgaggatactgggaccatggactcactcgcgtgagtgagactgcatgatgcattcgatgcagcagaccgtattatgaaactagtaaggacctagggaagtagacatatggaggtcttcaacacattagcgtatgccatcagggtaagacttgagctagcgattgaagatacgtgtgtacgtctcatatagtgatatgcagctgtgcacaaggataatgccgctccacttggacatgagaccttcatgtgcgaatggcatggtgactacaacttatg

SEQ ID NO: 298166 - DNA, 693 bp, Homo Sapiens
gaccaggactagggcatgcgatgatccaaccttgctcactgacggctttcagtgcccggcatggagctctgcgcatccatagactgcctatgagtgtgcatgtgcacaggtctcaacagcagaggaacacgagtatgtgcacattgctacattgcattctagatcaggatggatgtcctattgtcggcatattccttggcaaccctagcagtgggtatcaagattggctcttgacccatcgtaagggctgtaggatggatcctctacggtcttgtcaggttctgttgcactgattgtcggactgtgcatgcctgcttgagtatcaataccatcatgcgtagtagggctgagcttggtgatgagactatgctaagctattgcataggctgaaatgatgcggacacctaagaggactatgcatgaaggcctgattactgtgtcctggtgtacatagactagcgaggcatattgggccatgtggagactctctgtgacgttggagactcttactaaggcgttgagagtctgactcccgatgctggatcccatgccgttcgggcctcagaggtcaatgaatctcagctgtctcttatggaggatctacgtgagccaactctctcatcgccttgcttgatccatgccctgtgaattattaccatgatcacaggaacagttttgtaaccggctgactcc

SEQ ID NO: 298167 - DNA, 370 bp, Homo Sapiens
gggatgtgcactgtgactcatgacactgaagagacacttgtgaaactatactgatatgataatgccagaggagattcttacttgtatgcccccgaacttcttgtcgttgcattgccagttgccacagctcgaggaacttcgggatgatgggaaagcttcgactgacgaacctagacttgcgtgtgcctgtctccatgaagatggaggagcattgagacgcatgagcagtagctcgcctgagacagagattatgcacagctgcgactgttgaacgtgcaagttagtgacagattgtaccatagtccacacgggatgctgccatggagaactgcttgtgtgctcatgactgggaggaccttgccacgtagtt

SEQ ID NO: 298168 - DNA, 352 bp, Homo Sapiens
ccgccattgagatcccttggacgcctgatgaactaattggttccaagctgcgtgtaccaccaagctatggaggataggcacctcgaaacgtgacttcacactcaggaaccatcagagggtccggacatgaatcccccactgtactagctgtacgccattggcgccattggctccgcccccaaacttgcgtatggatgcattgcatgtcattgaaatcctcacagggacctgggaggggtataccaagccagacgttactgcttatagaaccacgacgactggttcgcacggcctgggtgagttctttgactgtgggccatgctgagatgagttcctgcgcttttctgggctg

SEQ ID NO: 298169 - DNA, 307 bp, Homo Sapiens
tgtgagtgagagcgccccataatccccaatctgagcccagtgttgtccccagatgacttcacaccccatagctgggctggatacgcttgatttgcactctgacctgatcggaaccatcttcccctactccaccgcttgacctcctccctttgccctatccctgctgatgactctctgctgcatcccttcccaacttctctaagttccgtttcacccaggccttgttctaccaagggatcgatttctcgatcaactttcactagatctgtatcatctttggcacctacacccccatcgtgtgccctgt

SEQ ID NO: 298170 - DNA, 388 bp, Homo Sapiens
cgatagtgtcagcgatagagactttgaggggagcacagctggagaacctggtctaaatcttctcatccttctagaggatatacattcgaagacaggtgctagactgtttactttatgaggatcacttcttgctcttctatagctgtggagctccctatcacatagtatggcacctgtaccagcagcctactttatcagttgaatgacatactgcttttcagagaggctactgtgtcgaagattgtcgcactccttaacgagatgagcggtactggatgttcactagagcttataccaactggatgagcgtggcatgtatcctgctgatcatgcatgtgagttcagacacttatagcgctgtgcatgatcctcatagtactcaggttgt

SEQ ID NO: 298171 - DNA, 600 bp, Homo Sapiens
aggaattcggcacgagggaaagtctggcctgttctagaagcagcctgtgcaataccacactggtgctctacgctgacgcgtaggagctgaataggagatgtgggaagctccccagtcaccgggaatcactccagattgtgcaaacccagaggcacacgctggtcactcggaccaatgccagggctggctgactgactgctaggactttctcacagactttcttctctagacgcactgaaggcctcacggagccatgtggtggcggacttgaatatgctcaggactgcagtggacagcctgtgtgcgtactactgcaagatatatgccaccgagaacagtctggactcagacacggggttactcgatgacctgacgaatgatccgcatatgttcgctggtgcagtggctgagatacacagattggtctcaatgaattgagtgtacattgcgccgaattatagtcccagttgttattgcccaatgagtggtcctttcccatgctgtccataaccacccagtatgtggcccctcttgacctattgtacctcctgcacaacaaggccattgcatatctactccccggttacttaatttccatct

SEQ ID NO: 298172 - DNA, 559 bp, Homo Sapiens
ggaaagtttcgactgttctagaagcctctgttgtatttgcacagtggtgatttgctctagagactgagagccatttaggcgatgggggatagattactgtccgcgggaaattacccacttttttgaaacctaaagtgactgccatgggcactctgtgtcttgacagggattgctgaatattgagtcttggatgggatgcatagagtgcggcagcgtctacaggatccacctatatgggtgatactactagaagtatgcctctatacatctgtcaatacactgacacaggtattgtgtagcatgagctactgagccgcaagttatcactgatgcagaaactttagtacagatattctgcggcaacgtgttagtgtccattgaacccaataatcgttccacttgagttagaacaaggttgaaattcacgtcttgactgtccgaccacacaagtaggtcacgtctagaacagatttaatataacttggggccgacatgccattccgtgacctacacttgggttactgaagtgtgaacaacaggaatactgtctgtgttctgg

SEQ ID NO: 298173 - DNA, 586 bp, Homo Sapiens
ggatagtttcgactgttctagaaacctatgtggtattttctgaggcgtggtttgatctagagaatgaaatccatttaggcgatgggggatagattaatgtccgcgggaaattactcacttttttgaaacctaaagtgagtgccatgggcactgtgtgtcatgacagggattggtaaatattgtgaaaatacttatattaattgccatgataagaaacgcacttatgagctcacgggattcttggatggggtgcatagagtcaagcagcgtttacaggatgaacctttatgggttatactagctaaagtatgtctctctacatctgtcaatacaatgacacaggtatatgtgagcatgagctactgtgcctcaagtttgcactgctgcaaaaacttttgtagagagattctgctctaagatgttgatatcatatgaaccccataattctctcactagatttagaacaatggtggaagttacagcgtgacctattcttagaccaaaaaggattcttacgtttaaaaatatttaaaataactggggaacaaggcctttccttctacactggggtttcgctgtgtgaccc

SEQ ID NO: 298174 - DNA, 382 bp, Homo Sapiens
gggaaattccctggccactggggtaatgtttcagagaggaatggaaccactttcgctgcatcccatgcctttgacaaggcagatctcacacccacagacttctgctggcagaaagctgcaagggccggctgggtcccacagtgcaagactgccacacactgcaagacttcccccgcaagacagaaaccgcagctcttaggccacaccccttctagtttggcccacgaagcaggggcacctggctcctgtgtccatgccagaagcatgctttatgcttgattaggttgctctcgcttgggagcttctttcagcctgtggccatctcctgagttagctagcagattttcacgtgggcgtctgtgagttggattagggtgtcttc

SEQ ID NO: 298175 - DNA, 595 bp, Homo Sapiens
  misc_feature (516)..(516): n is a, c, g, or t
ggacagtttcgactgttctagaaacctatggggtactggcacactggtgagctgctctagagcctgcgagccatgtaggcgatgtgcgatggattgatgtcgacgggaacctacccactttggtgaaaccaaaagtgactgccatgggcactccttgtcatgacagggattggacattattgagtacttatactcaatggcctgacaacatacgcacttttatgcccacggacttcttgtatgtgctgcaaagtgtcaagcagcgtttacaggatgcacccatgttggtgatactacttgcagtctgtcgctaacgatctgtgaacacacggacccaggtatttggttgcatgagctactgagacgcaagtgtgtcctgctgcagaaacttggggagagagattctgcactaagatgtgaatgcagtctgaacccaagattcctcccactagagttagcacatgcttgcaagttagcgacctagcttaccatagaccacaccagtatgctcacgtngtagagcagatcttatacgttgtggcacgagcaggcctttccttagactacactgtgggtaactgatggtgggaactcg

SEQ ID NO: 298176 - DNA, 372 bp, Homo Sapiens
gcacaagagaactttcactcgagatttttcgataacaaacagatgttctcacattatgagcactacgcatgagactctaggtgagcacatgaggctcatactatggtgtatcttatgacaagttatgggcatatgagcacaggtgtggatatggagagttgacgagaataactcgatgcagtggaatataaggaccgttacatggtgaaagctgacctcgtggcattacatttagcatatgtgatgagccatgggtagccactacatattctatggttcctagagctctgtggtttaacttagcaggcttgtaccaggcctggttttatattttcgctcagggtattttctgtgaacagtttcctgctttcg

SEQ ID NO: 298177 - DNA, 561 bp, Homo Sapiens
  misc_feature (397)..(397): n is a, c, g, or t
ggaaggagtggcctgtactagaggcaactcctgcacgagccctatccaattatgcgataaagagaccaatcctgctaggagagctggggtacgctagagtaccagcgaaacccttcacactttgcgaacatacagtatacacactgttcattctggaccaagcacttggacagcaagtgcctgcgcatgactttatccacataccgagttgtgtagaggctctggaagactcactcagtccagtggaggtggacataggacatgcgcgtaaactgatgtggtcagctttagatggatacttcatacaacagatagaagcattctgcagcattctggattcaggacaacgtgtctactcgatgagttagcagcactgatcggccagctgatgattagnaagagtaagcttagatacacatagtagggcacacacgtagttgagtgttacatcgaacctcattaacagttctactatgcttcagatgactcttccgtctgtacctgtcccatgacgaatatacgttatccacggccaggttaccccctttagaacactgctgg

SEQ ID NO: 298178 - DNA, 426 bp, Homo Sapiens
  misc_feature (382)..(382): n is a, c, g, or t
ctgaattgctgggactacagtcacacgctacaatgctgagctaattttcgtggttataggagagaccgggttttgtcatgttgatcatgctgttctggacctgctgaccttaggtgatccccctgccttagtctgccaaagtgtagcgattacaggcatgagtcactgcacctagactacaggcaaatttgtacagagaataattcctatccagatgtagcctgatatatcagaaagcatgagactggatgtgagacagacttagctctacatctactatgtgagacttaacccgtgatagctatggacacatgacctgaactcactgatcagtttctgcattctgtaacgttgggatgctagcatctactctgatgagatnttgcgtatttatctgaagcatatttaagtcatgtcatatggtgt

SEQ ID NO: 298179 - DNA, 746 bp, Homo Sapiens
gtcagaggcgagagcatctgtgctgacttgtgagctggggtggcctgattctagttcaccaacgatgaggtccctcaggcgtgctggacctacctgagggagcgcgatcaagggatggccctgctttactgaccaaggggctacacactagctgtattctaagcgtgcgatcgctgactatttatgggactacgcttacgtgtcacacatcaagtaggatgagaccattctaggggcgccctgtctcaagagattacggccatggtaagtgctggcagctcatttaatgatctgaaccttcacttcgcgcatgtctatcacatgctttacgagatacccaatacattgactaacgtgtcctggagccttccgctgatgatgatacacctggatgtgcacatacagaccattggtgtcacatgcatgctctgaagtaggtggagagcagatcgtggctcgacctagcatatcagtcacagctgcattccttgagatgagattacagactcatgtgataccatgttatggctaccgatgatgacgatagcgtctgcagagtgctgattcatcgtggggtcgcatatgtgtcacaacctggttcaacaagagatctacaatctgctactgccagtacggagatctgttatgagtaacctgggttacgagggcctactactgtctgtattaagagcgcataggtctaagactatgctctgagtgggacgttttctaccgtggatcggggg

SEQ ID NO: 298180 - DNA, 336 bp, Homo Sapiens
agcactgttgcaggaaatgttttgaacaccaggagctctgttctaggcgaggggcgcgggatgagagttgtgttgagcctgtgtggctcatacacagggatattttatgaacatatagggatactatgagcggtgaggggtggacagtgttcgagtgagacactgatccacggagttcgcgaacagtgggtactcttggtgaccgggacactggtggctgttaacccagaggatggtcgtaacatgtgctaagctgacactgtcggtcctacatattgcactgtgaaggcaagtgggtagtgcgcacaactggtgcgtttagagatctctgagctt

SEQ ID NO: 298181 - DNA, 397 bp, Homo Sapiens
ccttagagctctgtcatgacacagtagagctgttgcccacggcagctgactaactctgacttgcgctgaccagagaatacagcatgaattgtagccatgctgttgctgaagttactgtcgcacagtttcctgtttcaagcggaacgtgcttatgcaggcacaggatgatactatttaacacacttctttacaattagtagaagctgtgacaatacgtctgagatacagttagatgcttgtgtagcatgctccatatgagttccagtgcccttccacgcctgaggttgtattgcttggttatccctactgccggagtcgaggacctctttaggctactgagttttcctctggtgcggctatttctagacgttctccagttcttatagctcttttcctc

SEQ ID NO: 298182 - DNA, 451 bp, Homo Sapiens
gacagctgttactgaaagatcctgaggtctcccaaacggatctgactggttgaagccacgacttctgctaacatctgcctatgtacggaagaccgtattatgttgactatcgatttgcataagacttgactattattgccctcattgtgcagctctcgccggatctgtactgaaaccctccggttagactcagtgcggtgacatgttgtgatgttagactgagggccaagctcctggtactgagctcgctgaagtgcataaagactgcatcgagttaatgtattggcttgatgacatccaacattgatcgaccgcctatttggtgccaccgggtatctccgaagcatgttgactttgagagctaacgactcccaggaagacccactcacacgaagtatccatggtctctagaatttatactttctggaatactgtcatagtcttacagcgg

SEQ ID NO: 298183 - DNA, 440 bp, Homo Sapiens
aactagatctcagaatggacagacctgatgttggacattataaacatggctccatcagcatgagttctctaccatgtcgatggccagctacagacgaatgcactgtcgtttagagcttgaggacagacatctctgtgaccgcggatgaggcagtcccatctctgaggacctatacgatgttcacaggacaccatactgtgtgaagcacataagttacagtagtggaccattcatgtaacagtacgcatggcaacattttgactatatgctccaagaacgtgacgatcatatagacagttagttgatgatgcagatgctgactgtatcaatcatacggactgacgatgacaacggcgtgctgccatgtatatcatcacctgtatgcacataggcagattagttcagagcttgatgatatacatgcctcgctttatccgtgc

SEQ ID NO: 298184 - DNA, 251 bp, Homo Sapiens
agcgaaggtgatgccttttatcaactgccactgggttatacactattatgagctgataacactgcagaccctactaacgctttagacaattgtatttgtgccgagctaacgatccaagacgctgtgatgccacttgtcaagagcgctcattctaactctgtcttcgcaatgatctccacatgcttccagaccagcgtgtggctatcgaatgtgaaggggacagctagattgttgttgacaggtgcctgtgc

SEQ ID NO: 298185 - DNA, 326 bp, Homo Sapiens
ggtgcctgttgtgtgcctagtgactgtgtgtgccattcatagagtcgacttgcctctattttacagacattcaccgagaagagacgacacatttacagacggaccatatgatgcttttgcgtcttacctgaatgcccacctgaacatctggtgtataagatctgcatattggacagggacgtactgcctgcaggagcatgcagcgatgatatgcactcactgatggcatatatgccgaagactagtcatttgttctaagtaccagtgatatgtctactgaggtcaggtatgaactggagagcagtactgctgcagcatttggcggc

SEQ ID NO: 298186 - DNA, 365 bp, Homo Sapiens
  misc_feature (314)..(314): n is a, c, g, or t
gtgaactggtagatagtggattgccaaccatatgaaatgacatctgtatatggcagctgacatgtataaagctcatgacggctagatgaaagtaatgattaattaagagcaacacatcattcgaattacccaggaatagcatatcgtacggcggtgcatagaaagcagtgatagagctcacagaaacggatcctcggtatgtatactttagaccacctgacaatccacctgcactacactaggaatctgatcctgtccgaacgctgagtctgcaccttacctgttatgaggctaagaacaccgtcgcggccgantggaatactgcagactgtagccggccttaccatgccgtccagggcctgttt

SEQ ID NO: 298187 - DNA, 266 bp, Homo Sapiens
tggcaaccccacacgcctctggctcaatgaagagtgtaacccttatgtgacttctttttctatttagctcggatgattccatggctgtggttcgccgcgatgcacacacgagtgaggttgctcatctagtgacagattctggataagacttcgctgccttgatgctgatggcctgtgctgagtatcttgagcaatgctcatttgaagatcatgtaacattagtgaatgacgtaactgtctgcacttgtgatgccgttgattcactt

SEQ ID NO: 298188 - DNA, 578 bp, Homo Sapiens
  misc_feature (540)..(540): n is a, c, g, or t
  misc_feature (546)..(546): n is a, c, g, or t
aagaaatgcattttctatcttaacttatttacttaactctccattctttgtttcttccactttgacatgtgtccgtcacagagcaaagtccatctcccacttcttggtttcgctaacttcctacctttgttgactacttgcttcttaccctaccctgtcattgcctaattatattcaggctcagtgagtagtagaccattatggggcctctctgctcagatgttactgggatgttgactgtttcctgcaccctatgagaccctaataagagagtaatttcataaggacattctaaaagttgatggagatccaaagatgaccttcaggtagtccatgggaaagcgctaatgtttattaagcccagttgttgccttcaggcattgtaggcttaggataaatgaaaatgtacacaattcttaacttattaatttgacagaggcaagcattctgaataccatcaccatcgttcctttgtgactgcatttagtccccactcctgccccctaaaccagcccactggtctggtttctgactatactntcgctntttctatttttatattattttgaggttcatct

SEQ ID NO: 298189 - DNA, 313 bp, Homo Sapiens
ctgctgttctgctgcggatcctcatgagtgctatgccccattgtccaatgaaggtcagcctcttgtggaagagtgtcataatagaatctaccgttgatagctttttgagcagcttgcagagtacacattgcagaatgcgctattagcccgttacaccaggatagtatctcaagggtcaactccaactattgcagacgtctctagatacctatgaatagtgaacagctcatgttgataacttgctgactcactgagagtgccctgtgcagaagactatctatccgtggtcctgccagttatgagggttgcatgg

SEQ ID NO: 298190 - DNA, 665 bp, Homo Sapiens
  misc_feature (158)..(291): n is a, c, g, or t
  misc_feature (535)..(535): n is a, c, g, or t
ttacaatgaggacgagagggtaggtcctaatacaacgtgatggcagtgcttataggatggcgacatttggccacaggcgtgtgtgaagggagaacttctatgtaacgtgtagacctgcactgccgcggaggggactggaacagatccatacttaacannnnnnnnnnnnnnnnnnnnnnnnnnnnnnnnnnnnnnnnnnnnnnnnnnnnnnnnnnnnnnnnnnnnnnnnnnnnnnnnnnnnnnnnnnnnnnnnnnnnnnnnnnnnnnnnnnnnnnnnnnnnnnnnnnnnnngccgcttcaatttactggggaagccgatgtaaacgagcttcgtgagatgttcatgcaatattcgggacgcgcctgagtgtgcagtggacaggtccgtctgcaggcggaccagcatgcggcgctggcatgcacctactgagtcacccttcatgcatacagatgaggaagcagatcatatgtagctcttcatgcaccaagttacataccttagttggaatgctcgaaggctctctagatgatccgngttcaggcctgactatctgaggcattagcccgagtgggtaggtggctgaactagatctcgtctgatctagccactaacgtaactcttgggagcatttgccattctgagctgttgccagagtggctgctgc

SEQ ID NO: 298191 - DNA, 649 bp, Homo Sapiens
accatgcacaatgggctgagtgagagacggctcgcaagctgcaagcctgtacatggatagtcggcaagtagggcacgcattaccaggtactgagtgaggtgccgagcgacatcaccactgggcaaacacgacggaatgagacgtgtacaccccgactgtcaccacagagtatgccgccgctgccggagcctacatgagccaccctaacgggccgtccattacagatcacgcccatttgtgatgcactctctgtacttccgacccatcgtggctccaccaactgtcgagctcaatatcatgctgtcacctgtagcaaggaacacagcatggagggactttgccggacaggagagacaagagatccgacatggatacagacttggcataagtacctcatgctaaccactgccatccatatgagtgcgtgaccccatgagccactgtgttgagagccacattcagagcctgcattggaccgtgctgtatacatacgctgacatctaggaagaggatgacgattattaggataaggattcgggtacgacacagactctagtgcgagtcaaatcgtgagaaccacgagaccttgtgtgatatagcatactgcaggggaacccgtgtgtagagtgctcgacacacgcttttacgt

SEQ ID NO: 298192 - DNA, 346 bp, Homo Sapiens
cccaacgccagtcgatcttactactagatagccttagccacaccatctactacacattaggtctcagccgatgaaactgaaacctgtggcagtagatatcacactggatgggaacgatgaactagtatgaccgagtatatgactgcagggactaactggtataactgctggataatgagctgaactagaagtatctgtgcaaggagagccaaagctaagacaccggagaccagaccagctacctaagaacagctgagagagcacacgcgcgtatgtaccagctgcttgtccaagatagaagcctagactaaccctagattggcccagagccatctacatacctggt

SEQ ID NO: 298193 - DNA, 631 bp, Homo Sapiens
gttccagaatatcttgaacatatagtctgagcatgatgcgcacgtgacagcagaaactgtgactggcaattgtaaaagcaagcggaagaactttgtggattaacaccttaggactttacgatagccgtgtaatggatacaaactgatgtatatacagacagctattataagctcacatctatgagtaagaagtctactgtatactgaggctcaagctagtgaagtggcacatcacttattgggaagtcaagaatggtacgttcctccagattttagataaatatagtgctgtgtagcagaagccatagctgtgagaccatagaaccgtttgagagtcactatatcacctgaacgacaggcacagaggttaatcatggtacatattctggaggatcgtgactggatgtgcagcaggcctaggagagagaagtctgtacagagtttgtgggaggcaaggatcacatgactgagtgaggatatacctgtgcagagctgagaagagaatacacttatgacaatgtgacgatatcaagtgcctcatgctatagtctatgaccacacatggtcacagtgtagtctgagatagggagctccaaggtgaatgtgtatcacgcgagaccacagttgatat

SEQ ID NO: 298194 - DNA, 335 bp, Homo Sapiens
atgatgcgaagtctgccttactacaacacacccatatggacaccgttgacttaaagcgcttataagctatacagaacgacaccaggctgactaactttagtgcactgaggacaggatgatgccttctcgccaagactgatgttgcgaggactaagcgatattacttcagggtagatgagagaacgttgatgtaactgaaggaggagagcatcagctgagagctacagaagacagacgagctacctaagatcagtgcaacgaacttaccaatcctggcgagagctgctggactacgagagaaccttacatcacctcttttgaccacagccctgtgt

SEQ ID NO: 298195 - DNA, 621 bp, Homo Sapiens
ctaatctcgaggacatgtacactgaataagtgtactgatacaatattgatatgcatatctgcatcaatgtgaaactctcatttgtataagtaactcaacattattagtgtatacatttcatcaaagactgcactgacagatataatcacatgctctacgctatctatcgagctcagcttccccttgcctatttagcctctatagagaatcgattttcaatggtctggatgggatcatctatactctcgctggcctctggcgctattgaacttgactttctggatcgacgacatgctgtatgaacacaagtgctagtacatcctggctgcctactgtcattcattcaaacgaatgcttagcttaacagtatgatggcaaagtgtactcactagtaatgcatgaccttcaacgttcatttccaggaatctgaacatgtgaaccatgaaacttgacgaactgattgctactcttatttgatcgcagtatgagaccatgctaggtttaaggctgatggcagtcagaagctttcaaggatatgacccataacgaacccatgatgcatataacgttttgtggggatcaggtgccctcatgcgctcagtgacctttggagcccctgtt

SEQ ID NO: 298196 - DNA, 318 bp, Homo Sapiens
cgcacatgcacagaatggtgattgtgaagctcttgcccggcagagtgtctcgagtgtacctgcagtgcgccgtatagctggacatgatccactctcgcatgtgcgcagtggcgcagactgacgggtactgcttcattgagcaaggcaccatcaatgctctgggtgaggtctatcggaccgcacgagaagcggagctagcgtgttcgagaactgacggacatggatcctagtgatctgccatatatagagtgagacatgttgattacgagagtgtaggctatggactcatggggaccgattgagctgactgatggtact

SEQ ID NO: 298197 - DNA, 456 bp, Homo Sapiens
ccacacgcctagggcacaatggagagggtaaccgctatttgcctactgttgctatttagctaggcttattccagcggtgtgttgcgtcgtgatgcacacatgagagaggttgctcatcggattcctgatttgggagaagcatgtgaagatcatgtgaaattagtgactgatgtaactgatttcgcactaacatgtgacgctgatgagtcagatgataattgtgacagattacttgataccctcttcggagacagattatgcacagatgcaactctacgtgaaacctatggcgaaatggctgactgttgtgcaagcacgatcctgagaggaatgcatgcttcttgtaacgcacagatggcatcccaaacctgactcgattggagagaccagaggatgatgcgatgtgcactagatttcatgacaatgaatagacattgatgcacatcttattggtgc

SEQ ID NO: 298198 - DNA, 784 bp, Homo Sapiens
  misc_feature (194)..(370): n is a, c, g, or t
  misc_feature (766)..(766): n is a, c, g, or t
tgaaaacacccgaacgatgcgtgctgtgccgtatgggagttaccggattgttatgaaaatattctgtgctctacactgaatgttgactgctaaccacacgacttatgtggaaatgctaacccgcatcgcagtgctattagtgggtcagcgcctttgcaaggcgattagtccttgacgatggaaacctgtccatnnnnnnnnnnnnnnnnnnnnnnnnnnnnnnnnnnnnnnnnnnnnnnnnnnnnnnnnnnnnnnnnnnnnnnnnnnnnnnnnnnnnnnnnnnnnnnnnnnnnnnnnnnnnnnnnnnnnnnnnnnnnnnnnnnnnnnnnnnnnnnnnnnnnnnnnnnnnnnnnnnnnnnnnnnnnnnnnnaacaagccaatgcaggatcctgttaaagcaggacatatctatcaagacgctctacctacatctatgattctggaggctgacagatgattatcactgactgacagattaatagtgcccacaggagtatatgaacgacgcactgtgttatgaaatgatgaagaatatcagcggcttaaagattgctacctgaccttgcctataatgtggtcacgcgtacccgaactcacttctagctaagccagcttacctactctgacactgtatcacgaaatggctactacaacacatggtgcagctgcccaatagagagattaagctccttcagacgattttatggatgtgctgtgctatacattgagggagcctgtcagatatgtgcgattatgtgatgctcgngctctatagtgcatattc

SEQ ID NO: 298199 - DNA, 102 bp, Homo Sapiens
cacaaggccgggcagggcacttggtgctttcttcgcaagggaaaagcttttttattggggttccccactttaaaacccccctaaacctgggggggagaaaca

SEQ ID NO: 298200 - DNA, 544 bp, Homo Sapiens
gctaaaccatggcactggctgtatcggggaagtcgggcctattaaatcatgcaccaaggacacggtattgtgtccttgacaagagaatacatctctcctgtggccggcagcagatgctatataccacaccataaagctaatacacactctcagcctatgaccagagataaactctctcagctttaaacgtaaaacaaacacaccttattcttaaaaaaagcaggtgtcttactatgcttaccaaactagactctaacctccgtgatgagagaagatccccatctctcacttaaaagaatttgacctaactttggtgaccctttcccaagcgcatttatgagaaacgatccagcccaataataagctatctgcacatattttcacgacgcctctccacgggagaaatgactcccatttactattttggtatctggcatgaagcgaccttcattaatactaaccctactcaaagttgttccaatattaaactttaaagtcctttccgcccaaccccttttccagaataactgtaacgcggtttgcc

SEQ ID NO: 298201 - DNA, 343 bp, Homo Sapiens
aggctctggtgtgctctcgtgtataagcgtatcatgcgcctaaacccagtgccctgtaaaccttctttgcggagcatctgtggacaggggttctggaacatgctctgggagacatgtgactttgcagtttgtggcagaccccaagcctgtgtgcttagatctggcaagggaaaggcaagtctttggtggagatgtatatgcttgaaaggggcccctcttctaggaaaagacacagttccttaggcattcttagcagggagaagacacatggcagagtggagatagctggtcaagttgcttagcagatcatttgcagttgctttcctagtgctctgtgctgttg

SEQ ID NO: 298202 - DNA, 591 bp, Homo Sapiens
gtatagattgagcggatagaaacaagaagatgtggcaagagttatatgagagaatacacgaggaggcaaaatgatatagatatttaaagcgcttctgcggtgtttttgttttttaaaagcaactgcggttgtgcagagccactctttcctacccaaaaaagacgagttctgaacaagacaagactgtcatattgtagagaccttggtgtgtgagaccataaaacacagagtggataggcaccctagtgacttaccaatactgacgagaagagaactcttaatactgagagatattaaaaagcacatatatactccttgcatggaaaagcaaaacaaatgcaaagggggagggcggataatttcagaagccaccgcataggaaagggtgaacatgggctcaaccctctaactctttacggggggagaagaccaacctacacccgtaaaattaataaagggtgaaagagagcaaaaaatggcgcacctataaaaaagggggtttgtactgaaaaagttttgaagagtttcaagggccccctatatttaaaaaagggagagccccgggggttatgtgatgggacaccgggccgg

SEQ ID NO: 298203 - DNA, 397 bp, Homo Sapiens
  misc_feature (53)..(131): n is a, c, g, or t
  misc_feature (188)..(356): n is a, c, g, or t
gagaaattgcctagatccaattgccatagacatgcattcattattgtgaatannnnnnnnnnnnnnnnnnnnnnnnnnnnnnnnnnnnnnnnnnnnnnnnnnnnnnnnnnnnnnnnnnnnnnnnnnnnnnnctaaaacaacacaaaaagaacacacttgtgaaaacttatacaaattttttaaaaaannnnnnnnnnnnnnnnnnnnnnnnnnnnnnnnnnnnnnnnnnnnnnnnnnnnnnnnnnnnnnnnnnnnnnnnnnnnnnnnnnnnnnnnnnnnnnnnnnnnnnnnnnnnnnnnnnnnnnnnnnnnnnnnnnnnnnnnnnnnnnnnnnnnnnnnnnnnnnnnnnnnnnnnntctagattctttgcagatactgagggacagctctatcatct

SEQ ID NO: 298204 - DNA, 458 bp, Homo Sapiens
  misc_feature (82)..(82): n is a, c, g, or t
  misc_feature (88)..(88): n is a, c, g, or t
tgctagcggaatattcgtgcagcgacgcgtctttcgtagtactcattcatcaaatggagtctatttactcgtcgtataaaanagggtngtggagatagtgtgtgaaaacactatgcgtcttttgagctcattatatctgtgcacacacatatatatcacacacagtgtccccgcgaagtcgtgtgtgagatatatgtctcgggtgtgtggtgtctgtgacacgtagacccgcgttttgggttataggacacagcacacactgggctgtgccgacatttttctgggcccttcttaccaaaccaagggaggggagaaggacccaattctttttcttttggcacgcgaaccggaaccggttttgacacagggccaaggagagaaacactgtggtgtgcagagatgaaacctgggtgatggggaggtctttgagcaaccttgtttatgagactattgattgc

SEQ ID NO: 298205 - DNA, 104 bp, Homo Sapiens
acgagggataatgatacctacttctttggattgttgaagggattgaataagggtgtgtgtgcaccctgacactgctctagcacttagtagatgtcctgtatagg

SEQ ID NO: 298206 - DNA, 338 bp, Homo Sapiens
  misc_feature (225)..(233): n is a, c, g, or t
tctacattctgtctctatggatttgcctgttttggacattttaaatggcatcatacaatatgtggcctttggtatttggcttctttcatttagcgtaatgttttcaaggttcatccatattgggacatgtatcagtacttcatttctttttgttgctgagtaacattccatagcatggctataccacatattatttattcatttaaacacggggtgtttgccaannnnnnnnnctttggggcccagactttattaaattttagtcagtcaaaggaaacaaatcaatgctttcttagggggcaaggtattctcatctatgagcagtgcccagacagcgg

SEQ ID NO: 298207 - DNA, 251 bp, Homo Sapiens
cgctcatgtgtcaccgcagcacagagagacatctttggattactcctatgtatatgcttgtcatcaggcgacatactgtatctctttatgtcaggtcgcaatatgtacttacggagctttacactacacgcactgacattactgggaactgcaagacctgaaccttccagagccacatatagctgcgaactcgcctgccatcacatatttaacgtcctacgttctcttactggtttgcaggcggtccatat

SEQ ID NO: 298208 - DNA, 365 bp, Homo Sapiens
  misc_feature (181)..(230): n is a, c, g, or t
ctagagggtgacgtttcctctcctggctccttaccacctgccgtgaagatgatctactctggcctttctctgtggctccaggggtgttgaaatagtcacttcctacagcgatgcggaaacatcttgggctttggggtcacacttcccctgagttcagagccttcatagatgtgtggcagcnnnnnnnnnnnnnnnnnnnnnnnnnnnnnnnnnnnnnnnnnnnnnnnnnngactttcctcgtctataagacggggtgatgatcccgaccttgccagtggtagaaagcgcagccgcgggcctcatgctgtgcatggtgcctggcagctggtcggtgctcagcacacaggctgtggctgcccctggt

SEQ ID NO: 298209 - DNA, 240 bp, Homo Sapiens
ctcagtagccaggcacagctgttgctcagtgataatagttgaattaacaaatgaaagacttggctatcattaagatcccttccagatctcaaattctttggccagtttaacacataagagctctcaatctttcactcctctctcacttttattcctttcagcgactttttggtgatactgttcaatatggaaatggcacatgtgagtgcttaaactcagcttggattgttccatctccat

SEQ ID NO: 298210 - DNA, 327 bp, Homo Sapiens
tggagccaagaggatggcggagctgtggctgtggccacggggcaaacagcataagcgcgggtgggttgtgttggaagaaacgggatggtaaaaactggcctaccgatggagagaggaaaggagaggcagaagaggggagaaaaacgagaaaagggtaaaagggctgagaaaggggagaatagaagaggattgcaacaaaaagccaagggcattaagtgtggatttctcctgaaggcaggagcgcataggctaaattagatctgagtcggacattggattaaaactggttgtagccttttattaaggggtagacacactttttctttt

SEQ ID NO: 298211 - DNA, 719 bp, Homo Sapiens
  misc_feature (470)..(470): n is a, c, g, or t
  misc_feature (473)..(473): n is a, c, g, or t
  misc_feature (507)..(508): n is a, c, g, or t
  misc_feature (637)..(637): n is a, c, g, or t
cccaggcggggggtgaagctcatgcccaagctcaagctcaggctgaagcccaggcccgggccaaggcctactatgcatctcagaaggcgtagctgcttcagcatcagcatgagctgcagctgctacagccaccaccacactttcagtctactggggcagcccccaacggtgggggtggtggggacggacatgcggtgacaatacaccatagtggctggctgatgaccacgaccatcgtatatggaccgatgagctcttaaggacatctgacttactgtgacccactgcaccatacatgaggagcatctgatcagatcttagagatgcgcgctgtccatcattgggaagaggaacaagtcatgctgtggggaatcgtatgcaacactgggcgggaagagagaatttcttccgagtctggatttggatacgtcttcatgagcctatgctacggattgcctatacgggcgggnccntggggtgttaacttctgttcaaaaggacatttannccctcctgattggcaagggatactgagctgatggtgttattcagcagcctcccctccaagcaaagcttctaaaactggggggtcggtgcttaagggaaggattttgctatgaccctctagaaccttggncagtgtgggcaattaccctatgcctacccttcttatcctcaagtttgggctgatgtaatggcttggcctcctacaggggttt

SEQ ID NO: 298212 - DNA, 347 bp, Homo Sapiens
gaaatatcaatatgtgtgtttctaatttggacctaggacagagctgttgcttgtcatagagacaataatgcttaaacatagcacattataattaaagcaggtttctcacatacttttcattttatcctttggataattttgtgaggaacgcaggacaccaacttccctttcatagatacaatccccatgctattgatgaaagtgtttttgaatgaagtcatacaacaaataactgatcaaagtggcattacacctaagaggaacagcaagagagaaactggttctttggaagtctttcgtgctacattatacctccatcagagtaagacagcttatgcactcctggg

SEQ ID NO: 298213 - DNA, 364 bp, Homo Sapiens
  misc_feature (95)..(95): n is a, c, g, or t
cacgagggacagaccacagaggactgtgtatccacgatcatgagtggggaagctgaggcgcatgagctcgtatgtgagaggttgtgtacatatanggcaagtgtggtctgtggcctgtgttggcaggcgtgtaacaatggtgaagaaatcaagttctgaccttacactgggaccatctgagaaggcgagaagtcctgtcatatccgagttggcagaaccgcttgcttgaacattcccaagggcctggtctataattagatcaaccactgtggaattgatgaaattttcagagaaaggtgtgcccctgggtctatagaaagacttcagagtctgtgagctgtgtatgggctcaggctcctgtgtg

SEQ ID NO: 298214 - DNA, 353 bp, Homo Sapiens
cgttcttcaaatatgtggcctgcttcaagataatgtaactgcacatcagctaaatgattatgcagctggtgcctcccaagacggagcccccgcaacggcagtgattttgacaggcagagataagggtgtttccataataatgtggtagattaagggattcagcctgctgtactgaggggagacttgcatctgaatttttatttggagagatctgaatgtattttactaacaagtctggtccttttgggctgaactttccatttgtcatggaagtgcccggcaatatcttgactccgatgttgtagggaccagcttcccggtgacgggattagctcagtcacgggagtaccgcc

SEQ ID NO: 298215 - DNA, 368 bp, Homo Sapiens
ggatgatgaggcgtaggacggagctcgagaccgtctctgcccgcagatgtggcggcaccggcggatccagccttatcggttcctctatgggcagcagcggtggaggctcgattgactccttctccgaacatctgatcactcgtaagcccaggacggcgcttgctcttccatccgcgctccccgaaggcggccgcctgttcatggatcacacgggccctgattatcagcctgacgtatctgtacagcgacgggtagaagaatcggaataaattgcataattattacgtgcacaacgacaacttgaacatgcaatcattagagatcatcatataaggagtcatatgccgccccacgacgatcgtgcgggc

SEQ ID NO: 298216 - DNA, 379 bp, Homo Sapiens
ggaaatgatacaaatattcatcaaagattggtcgactaaaccagaatacaatcatactatagaatatcggaatagaatgcagctctctaaacgttaggtagaattctatatctctgtatccaagaaatacccatgatgaattgttaaatgacgtgtaggagagagaaccacaggcctctgtggtccgtatgtgcacggtgagcgtgcaggaggctgcatgccaatgctgacaatggggtggggatgaactgtggcaggatgagtcatttattgctgattcctttatacatgatctttctttgacttattacaatgagcacgtactactttcgtcatttcatagaatccagtaacagcttctctgcacagccctgcaatt

SEQ ID NO: 298217 - DNA, 389 bp, Homo Sapiens
  misc_feature (344)..(344): n is a, c, g, or t
gaacggttcaaggagctgcaatcggtaggaggaatcggaaattttaattgcattattaccaattataagaattattgtgctatgagtgggttttgtgctatgaggggacccaaaaaagggctgataaaacaccaaaaccactggtgaggagaacttaagagggaaccaggcttcaagctcctaaactcaccatggactgccacagaatttaaagcacagtccatattcctcagaaagctaaccaagcccaccactgggtgtcctaccggccgttccctggcattattctagacagaacaacccagacggcatgtactgctgtggagagatgaatcaattcctangaggactggacagacattctcggataggaagaatgtgagaacagg

SEQ ID NO: 298218 - DNA, 265 bp, Homo Sapiens
gggagaccaaagacgccatgagacacaagcctgctgttagcccatgtgtacatatgaggaaattagagaaatagccctacattcagacaggtatagccacatacagcttggtaagcagaacatggactgtattccagctactaaatggcatgatagttcagtgccattgggcagtgaacagtctgcacaagtgcagcatccttgctacaaggatttctgatggcagagacagcaggaaacgagaggcaatgtaacaacatatgag

SEQ ID NO: 298219 - DNA, 436 bp, Homo Sapiens
  misc_feature (395)..(395): n is a, c, g, or t
gcccactgcagtcatgaagaaagaggtgctgctgatggggaatagccggtcgtggaagaccaccatgatgtcgatactctttgacgattacattgttcgcgacacccgtcgcctgtcggccagcattgacgcggaacactcccgcgtacgactcctagggaacctggtgctgtacctgtgccactgaggcggcctagagaccgtcttggacaattactttgccagccatcgatacggtgtctgacgtaacgtggaagtgttgatagacgtgtttgctgagtagagcctgtatctgtgtggcatgccttattgccagtcttgtctgtaggccgtacttcatacactctcctgactccaatatcttctgcctggtgcacagagtggatctggttcangatgatcagagtgacctgatttttgatgagcgataggcctc

SEQ ID NO: 298220 - DNA, 417 bp, Homo Sapiens
cttttgtagtgtgagatctactgtgaagctggtactagagcttatgatgacatgctgataatgtagagcagacctgattgtagcgccacctattaacgcctgacatactggcaccgccagatgcgttccatgtgcacagagaagacatgccgcagtgtctaaggcaagacattagtatactgagtcgtagacgctagtcgtgttagctcgctctattaccggatggtgcgaccctcaacaatctgaagtgtacgcccatgctgtcatcttctgctgtgcactgatacaacgtgaacctccgtgatctgacttctgtggaaaccaactcgagcatgatatcgcgtatcattgcgttaatcttaggaggagaccaatatgacacacgcactgcgggaagatggtccatgtagatgctgt

SEQ ID NO: 298221 - DNA, 617 bp, Homo Sapiens
gtctgcgagacattgaactgtgtacactatatgcccatgatttctctctgcacttcgtcttattctactggtatggcaagtcgagatgcacataacccagcggacgctgatagattaaatgattagtccgacctatatcacacaggctcggggatctctgtctaggcacagtaagttaagcagtacacatgtccagatcctgtacgagaagagatagctgtaagatgttgatgagaaacttagggacttgtacgagaaaggtacgcgactgtacatgagacctatgcagaccacgcattctgctgcgcataacgagatcccgactgacctgactgcttattgtcacactgagatgacagttcacagatctacctgagccgagtccaactgtagcgtgaagtgtactgattatcatgacaatgcagcgtcgatgtcgaaaggacacttatacggaattgtagatgacatacttacttctatgccacggacatcttgtctttgataaccggactcagctgctttacagaatgttgcaagctgctgataaagtgcctgctggtgcaaagctcgagaacttctggatgaggggttaggctgtggccgagctcgtgtgccct

SEQ ID NO: 298222 - DNA, 342 bp, Homo Sapiens
acaaacttgaggcaaatgcgactaagtgactcactgagtccaggctctgctactgctgaatacgctgaactgaagaagatggactggtcgagatatactactacatgataccgcactacgcatgcactagagtgatggatcaccttcgacccttaggcagagtaagatggtactacatggatatgtcgcgcataacaaaggccttaacagatactctgtcaagagattgtagtgatatgtgcaattcggacgctcctacacacctgatgacttgtatggcttgctgtgagacgaggaccacataggatgtcactgatacgtctgtcctacactgagcgtatg

SEQ ID NO: 298223 - DNA, 364 bp, Homo Sapiens
cgatatttgagggcatgctgccaatgcaacccgcacatactactggggttgtctgtccacctctaacatgtctaagcctggcacagataacggagctgttgctttgacactcagatatgccatgctattccccctcctgtgataccagctcttatgtgtgagacctcacagtggtacccaatatgatggggctcgtgttgcatacattctagttcacgctaagtctcttgcctacagagactacgtgcgtatgatagcacgtctaaggcactcttacagcccagatagctcatgtgactcgtgtgaacgagcttgttccgcttgggcaccaccaccggaccgaacggttcctggcgtcacgtgc

SEQ ID NO: 298224 - DNA, 557 bp, Homo Sapiens
  misc_feature (438)..(508): n is a, c, g, or t
aatgttagccacttaattctactttggttttaatcattgctgttttttatctcaactgttttggcacttgtaactagcacatagtaactactcagtaagtagttaaatgaatatcgtaagtattcaatatacttctgttagtacagagcagtataatagtcagaatttaggaattaaagcggtcgtatgcctggtttcctagttattggagggttggaagttcagtcattcttgtcactttcacaaagagttcttctgtctgtagctcccctctcactgcaggattgtaagtgctttgcaatgtccaggcctcctgcctctaagtgcttcacacactctcagttcccctctgctttctctcactttgcattactttctgggtcatcagagatgaggtagaggtgataagaggaaaccaaggactgggatttgaataannnnnnnnnnnnnnnnnnnnnnnnnnnnnnnnnnnnnnnnnnnnnnnnnnnnnnnnnnnnnnnnnnnnnnnatatcttcacataagatttgtggtaggggatttaggtaccagcatggag

SEQ ID NO: 298225 - DNA, 353 bp, Homo Sapiens
cacagatacgggttgagcctctctcctaacacacgacatcgctcacctcagtagccaacttggagtagcttgtaatgggatagcgataggacccctgtgctctgaccttatgagaaacctatgatcattttcttcagctatttgaatagagacttcatggagtactgcatggaatggactgagctcctgggctgaacatggaccacactgtgacacggaggccatgggaatagggagcacaaggcggtactgcttttggattgtatcacatgtgaatcctaggttttatcgatgcgcacgcagtgagtgcttttgagtatggaagccagtgaggggggtgatcgccttttggg

SEQ ID NO: 298226 - DNA, 340 bp, Homo Sapiens
agcgatgttgcgagacttcgacccaatgacccacacagagggaaccaggtgtgtgcaccaatctccgttccctgaggctcttagacaacattgagttgatgatttgcgaccatatactcaactgtattggaaatgtgacatctgtcacatcaagaaaccgcgtactgctcaatagtgaatgcccatactgtgcatcgtggactagatcaaacaagatgcttgccctgagaatttcagagcgtattgagcactttaagcaccattagagcctattagctacctggctctggtgcagggacatgatcagattacggaatccatgtagaagggctcatggtac

SEQ ID NO: 298227 - DNA, 714 bp, Homo Sapiens
gagaggcgcgctgactgctataactaagtgatgccgcggtggtgggctcctgttgtaactcatgtcagggcccactaacaactcgtgcgcggttttatcatcattgctgagtcaacatgcctagcggcctttactacgtctctcactgagagtcccacacctttatcagatgagatagtgcagcgtctatgtaccctaggtatatgcgacagtgccatctcgcggtgatactgagacgctaatactgctaccctgcacaacactatctcctacgtggtaccctacacctatagtgagttgcataagagacgcaatatgtgtcataggctgaacccatgggctgaaacctgtattgacagcatatcatgaggctgagctctgaagaatgatataccccacgagtctgagaccccactggcgatgattgagacctcggcggacagataacactttctgagctgaggggcggaggagcatgcaattgcactactcgagatggtgaggacagagagcctgcacttcagcagctgagggctgtgttagcacatattacaccacctcgctcctgcgggacagatgccgactctgtgtcctgatcataacacagagggcatacaacgcgcagctgttaacatgacggctgagagtatagagaccgctgcttctctgcgcatattctcctgactaggggccattcctgtttacagacatact

SEQ ID NO: 298228 - DNA, 179 bp, Homo Sapiens
gaaaaacgaggcaggcaaccagccaccaaggaacaacagcctcttgttaacagttggccaaatgagcttgtaaagtaaaccccctagccataaaacccctaagttggcccccccagttaaacggcaaaatcctgacttgcaaataaaccaaaaaaggttgttttaatttgttacatagc

SEQ ID NO: 298229 - DNA, 351 bp, Homo Sapiens
atgaaaggttcctgcggcgtcaggccccgatgctggctacctgtagagacctgcacttctatagccagcctgaagatctgtaagcttcctgagggagctgattcaccactgtgccaaggtgacacaacccaaggcacacattgaccctgacttctcccagaccccatacgcgctgggcttgagctcgacagcaagcgccgaggacgtttgctggagaattctcctgtgcctgtgagtgactatgtgtggaccagtctctcactggcccatgctcttgttgacagaccaatctgtgaccacgagtcctcccacagaagcctgctgcttgttctgagtggtcagaggccgcgc

SEQ ID NO: 298230 - DNA, 273 bp, Homo Sapiens
  misc_feature (94)..(211): n is a, c, g, or t
  misc_feature (217)..(217): n is a, c, g, or t
  misc_feature (236)..(236): n is a, c, g, or t
aaaatctaagaatttgctaccactgctttagaattattattgaaattattatcatccatgtagttttgtcatcttctactaattaggcaacaannnnnnnnnnnnnnnnnnnnnnnnnnnnnnnnnnnnnnnnnnnnnnnnnnnnnnnnnnnnnnnnnnnnnnnnnnnnnnnnnnnnnnnnnnnnnnnnnnnnnnnnnnnnnnnnnnnnnnctggtngaggatcaacttgacctgngagctcgactcagtgagctttgacggcacccttgtct

SEQ ID NO: 298231 - DNA, 409 bp, Homo Sapiens
ctgggatggagcggttggcccaggccgggtgtctgtaacaccttgtatgcgtctctgtgtcgtagggtaaccttccctgtgatccttacgccctacctgtgtagacctccactgctagagccagactcacggacctgggattctacatggaggatcgcatacacgcactgtgccatggtgacacaggccactgcagacattggacgtcccttctctgagggcccagagccctggtcttgagtttgtcagcatgggccgatgtcgatgaccgtagaagcctactatggctgcgaatgcgtctgagagcgccagtccctcagtgggccattcgttttctggcgctcgatctgtagaccaggattgcttccacagatgcctactgctcgcattctgagtgcgcacaggctct

SEQ ID NO: 298232 - DNA, 616 bp, Homo Sapiens
gcacgagccaagacctcatgaacaagagctgcgctgaggcggtcatgaatgcagcaatggctcataagcagacatgcattatctgatcgctgtagtacctgctcgtactgctcagctatgcgtatcgcctgcaggtactgatatgtgcctgtctatgcatgcactagctactggatacgtgttgactgtagagtcatcgtgtgaggataaggtagacagactaacttagaatatctagttgtgagacatcggcctccctatgtccgaatgtacgaacatcactctagatcttgcttgctgaagagacgaagggcatgaaagatgactacttgaccgatatgtttgaagacgctgcttaaggagtgagactatgacaggacgcagcgagggtcctctgactgcatgtacatgcgacaatgtaccttcccatgacacgagctagacatgtcacgaccgatgctagatattctacgtcagagtctgtatcagttctgagaggtgatgagaccttctacggcgtacgcgtagctgtatcagagttgcactagatgacagcagctggctacgatgaccgacgtctgatatcacctgatgacgtacgaccatcgactgactg

SEQ ID NO: 298233 - DNA, 360 bp, Homo Sapiens
ttattttcctacctaaaggattatttttagagaatgtgccaagtgattatatctctcatttttgtagatggttacagtcatcctcattttacagatttcctggaggctaaatcaggagcagcattaccatttctgattccttagtctagtgttacatattctgtcttgcctggaaattttaataattacagctcagcactttgtggttgagaagagggctgaagattcattcacttgatggtgaggatgtctaggaacctagtcctttcactttgaatgtgttagtgtactcaggtaagcaccactaacagtttagtggtgttcactgaactattcaaggaatccagtcacaaggagcag

SEQ ID NO: 298234 - DNA, 405 bp, Homo Sapiens
gagagagagagctactctgaagatgacgaagactatttatgcagtgaacaagcatcattagcatgtggcactatgcttctcatcttggccagcccgactattggcttgatggagactctcgaacattgtatcctatgcactaccaatgactgcgaagacaactcggcagactctgatggctgagatgaacgactgtccgggtccatagccctactattgttcccatgaccagcctcttataatctgagccagtccagggagatcaataacactctcaacttgtgtatacgcagagctttcattatgaacaactgagactacctaattcccaattatggaacttcattcgactagaggccctcggaggctgtacttgtacacatatgcacgtcgatgtctggcggc

SEQ ID NO: 298235 - DNA, 411 bp, Homo Sapiens
aggcagcgtttttgtgacggcttcaccatggcctgtgctctgctattgctcatagtcctcactcactgaacagctgccagggcccagtatgccctgactcaggctgcctgacggtctgcttctactggacagtcgagcaccattgcctgcactgtgaccagcactgacatctgagatgataactatggatcgtggtaccaacgtctctcatgcgaagctcacgaactcgtgattcatgatgtcagaactgggccctcaggtagtgctaatacattgtctggcttgaagactggactcacggactacgtgaccatacatgtgcttcagactgaagacgaagctgatgattactgcagctcatatacaggcaggaccagtcatcgtcatggcggagggaccgctgtccgatct

SEQ ID NO: 298236 - DNA, 431 bp, Homo Sapiens
  misc_feature (385)..(385): n is a, c, g, or t
acggcgtcggctgctgtttgtgctctaggggacggtgcacttgaagacagtagctctctccggatcagcctatctcattcctttctttcgattacccgcggcgcggtgagtctgggcggtggttgcggaagctggggcccaaggtggccgggcggcagctgctgtgacatgtgcagcatgaatcctgggtatgaccagtcattcacgtgactattcgattggcgactcaagggatgggttttgcctacttcataggcttgcggatgatacatatacagcaaggtccattagcactatcggtgtggcttacgatatccgtactctagagttagacgggaacacgatctagcatactatatggcacacagattgccattgccgattntgctattaggtctagtgattacagtggagacactggcctcatgctg

SEQ ID NO: 298237 - DNA, 251 bp, Homo Sapiens
gatagatgctggaggatcaagatgcttgcactgtgagtgatagaagacgacatgtcagtggatatgttaaggcagactggctacatgctcgagatacgttctgtgtaactccatcactctggaacagcataatgatggctgtgaccttaagacagtcaggatatataccctctgcaagggattcaatatacattgagctgtgcaactgttaccggcatagcgaccccacgattgtaccatctgccatggcc

SEQ ID NO: 298238 - DNA, 600 bp, Homo Sapiens
ctgagctacggatgctgcgattacagatgactgatcggcatataagttgcgcagaacagtaatttagatatatgtcagaaactagcctgaacacaccaactgcacctaaagttacgctctgatgcatcgttgacataaagaatggagtcctgctcttgaaggactctaacaccacagttcttggtggtgaagaggagacaccttattgagaaatgggagatacagagaagcttatcagaacacaatataggcaatgttggaactcgacgtggaccacagtcttttgggcctcttggacagaagtgtgtatcttatggtccaagtggttagcatagaactagagcgaagaaatcattgcagatacagtgcctgcgtgactagcaaagaaaatgtgaatttgtcaacgtacggtcgtattgtggaagtgcaagagcatgggaccctgacattgaagatgtgctgggggtttagaagttactcaattggctgctggtacccggataggggaggtgtaccgcacgagaagttaccgaatttgtcggacggcaatgggcgttaattccgaagcaattgaggaggtcttatgggttggcccccttc

SEQ ID NO: 298239 - DNA, 421 bp, Homo Sapiens
ggctactatacggcaagtgaccatggagttgtagcccttggattcgttggtgctcagggaatacccattacacccgttggctggcatgtctatcgtgctcaggaagatgatgcaaagcacgatgtgtatggagctgatgctgattgcactgtaacgttcttgcacatccttgactacaatagacgtccaggatgacatatgtcactacactggtacacgcgcctgggttggccgccatccagaaggaatgatgatatctatatatgactgatagaatgctagtgggtcagcggtgctactgatcccgagcgtttttacacaagaacggtgggtgtcacaaggctatgactggacaggcacagggcagcggcttgacagctgagctctgtgtcgacaggagactgatgattggtgcgtgttt

SEQ ID NO: 298240 - DNA, 645 bp, Homo Sapiens
cctggctccacctctaccggacagatctcactgcgctgttcagtctctggtaccatacctatggcctggatccgacctgtccttgcagcccggtgcccatttcactgtctcagcctcagcgatgagaccttatgagggtcatgtagctacgctcgcctcaagactatcgatataccaggctaggtagggctgtgaggaatgcattaagaggcatcggtagtttctgacaacctggctgagcaaagctggaatcagatcctgtgtgcctcgctgagaacgtggccggtccgctgatctactggcctggagcttatcaaatgtcgatgcacaatgactgaaagtgattgactcctatatcgcacagagagtctagttggccaggacagtgatgcctgcagagagagctttcgattggtgaccagagacatgttcgacacggacatagaaaccgctgtctgtgtacatgggattcagtctattactcttgactaccctaagatggaatactgtcattgagagatgatggaaggggcttgtgacggggaaggccttgcccagtatatctgtgagaatcatgattcgagctccagtgtacttgacggatgctgtgacttgtgttggaatatacccagctgttgtcgctgg

SEQ ID NO: 298241 - DNA, 363 bp, Homo Sapiens
cattgctagagacacctagtgctaaccttctcatgttcttgggttagagattatgcctgatcactatgacatccttccattagcacggatacttcttggctgattccttgcggtagaactcaatgtggcgcctgactgcgcttgcagaagttgtgttctagattcttgcagtaacggacttcgtttaagactattactggcttgaactctttttgcacttcataacagaagaagacctttttcctgattggttgagagacacttgccacgacctccctgagcaggcccgtgactgatcctattgcctacatgagagtagtgacacttttatgggatgctctgtgcgccgctgtcctccccgcc

SEQ ID NO: 298242 - DNA, 378 bp, Homo Sapiens
gctgcgcaagagcaccgtgctagttgttcacatcaccttttacgcctggcccgctacccacatcctgccacacacaccgatgggaccgcctgcccatgatgatagaccagatcaagtctgctgctctgaggtaccgacagaggatgcgcacactatgtgaggccctggaggacgagtgcctaagactggaagcacgaatactgagctctatgaactgtcagaatccggagaacgcgagatccctgcttcaaggacctgctcatggacgctcacatggcccctagccagatgacctgtaactgctaaccaggcactggtgtggcttcggatggcaggctttcaggtctctagcgataatccgcgtggctttctttattc

SEQ ID NO: 298243 - DNA, 414 bp, Homo Sapiens
ctaccgcctgccggaggaaacaaaggatgttctgggcacgcatcagtgccctgagtgaaatggagctgcgctacaccatttacgttaacggcctttgctagagagagtatagtcctggtactacaaggcagggactgttttacacagtttttggttatacatgatcatcatcagttatgtaacaacaaatgagagcatggtagatgacatttaggggcacccatttagttgggtcaggccaacaagagtattaacgggaacgatgcatcatatttgccaacaacagaagaagtcctgctcgcaggcaccagagacgaagacgggatcgtctgtctgacataatggcagtagtggggatgatgactatgaccatctacattacgcacatccgcattcgacaggatcctctagctg

SEQ ID NO: 298244 - DNA, 360 bp, Homo Sapiens
cgagcattacactgctaggccctgtcagcttggggtgggcgcctctcgtacactgcgcactggacccgctttgctttcggagcgtacattcacttcttttctctattgggttacatcagtatatggcgtttctgcagtggcaatttgctgttttgcacacgacgctttgtcagatgttgctcattgtcttcttcctgttcttgggacctacttgtgccttcttgatgtgcttggtgctctgtattgtgtcatagctgctatttacctctttctccttcttcggtttgcttctgtatttcgtgatctcttgcgatcctccggtcttgtgtcatgtcttgttctggtgtgttggctcgccgc

SEQ ID NO: 298245 - DNA, 400 bp, Homo Sapiens
cggagacctgagccttcggagagacgtggactaatgtaagcaatgccgagaactggtgagcaggagtggcgtgcgagtggacacgtatcgggactacatatgctattgcaggaacggatactattactacacacagtggatggagtgcattgataatgactagtgcgcctatgttgaactcggctgagatggcggtcgacgtgtcaacactgacagcgctgatcactgtgcctgcgagccatgactggtgctggatggatcgcagcgccgctgcgtcttcgacgagagccagagcctcgatgacactctatgaggaggctgacaacaagtgacggctgaccgagtacgcagtcaccctctgctgccgtggggcacctaccagagtgctgtgcctgttgcc

SEQ ID NO: 298246 - DNA, 412 bp, Homo Sapiens
ctaatatgctcacattagccgtgagaagcttagcatctatagtagccaacctatcaatcgctaagacctccaactcgtacactaatgatgaaccatgcattggcggatgcaccgatattatcagtcagttccccacagcgattttcatgtgcctagaccaagatggcattatctactactggcactgagccacaacccttgccacccatatcatcgtaggctcctatgtagtctacttatgcgtagtactgatccctgtagcattgctcgatacacgggacatcatacaatgctcactgtgggctatatactgagacccataccttaataagggcctcagatatccactgatttgactgattaccatactaggctcacataccgcttacaatcgatttcctgcccttggccg

SEQ ID NO: 298247 - DNA, 402 bp, Homo Sapiens
gcttatagctctgccaggagacaggttagctgttgcccacgtcagctgacacactccgacttttgttgaccagagaatacgggagggttagagggctgcctttggactagtctacgtgtacacctactgtcctgtgtcgtgaggcaggtgctgatgcaggctcaggaggatattcgttgacatagttctttactattagtggaatctggcacaatctgtctgagtgctagcctgaggcgtgtgcatcatgctccatattacttactgtggcttgtcgggccagaggttgtattgcttgaagttatcgctacttggtcagtttgagccttccttagtatactgagttcctcctctgctcggcctaggactcggatgtctactgcctatgagccccttgtgcgt

SEQ ID NO: 298248 - DNA, 360 bp, Homo Sapiens
ggaacacccgttatgtgacctgacagtcagctctacattgtgatactacattcacagatgatccccaagtatccttggcattagaagctttggaccttttgtgccactgacttggggctgatctgtcacacactaaatacataatctgatgtcatggcgtctgtccatctctgaatatgcattggcatgaccagactgatgctatgagagaatatgttggacacatactgtcataccaggttccacttactgagttactgcacagctgactgtcttctatggtgactacatagaagattcttcaatggttttcgtatgcagtgctaaaccattaacaggggaaatagaggtggcgggcct

SEQ ID NO: 298249 - DNA, 357 bp, Homo Sapiens
ggagagcacttagatgagacacaatggaggtttagtacaccgcattagtctacatctgatgatcacggctcagttgatgccacagcgaatgtagacaaactgcctggcaatctaatgctagtgactgtcagagagtcaagaggaaagaggctctacaatcacagagatgtatcaccttacaaagttctttacggagagagcatagtggcattctacctcttagcttcacttagaggcctattaggtgtagtaacaatgggttacttaggactgggcctgaacttgcattttttgagacgcccgatgttgcagttcctctgggtctagcttacagaccctgacctcatcttacctctt

SEQ ID NO: 298250 - DNA, 340 bp, Homo Sapiens
tagatatactgagagagccgtataagaacgtggtggttcgaatcctgagcagtgggattattgtgtcacttctagtatgtgtagagaatgcctatgattatttccaagctgtcaagatctgtattgcctgctccctggctgatccacttgacaccactccagattctacacatggattagtggtggagtcaatccatgactcatacatgtcatagatgttatgcacacgcgtattagctgtggctgtttatttgatagctgttgctgtgtatttaataggaatcctttctcatggattgactcgtgacttgaatactgtctctttacaagtatcttcttg

SEQ ID NO: 298251 - DNA, 646 bp, Homo Sapiens
  misc_feature (322)..(322): n is a, c, g, or t
gtgaactgggagaaagtggagtgccagccatatgaaatgacaactgtatatggaggctgggaagtataatgcgcattctggcttgatgaaattaatgaaattttaattaagcttaattctcatttgaattacccaggaatagcatcttgaaaggcggggcataaaaagcagttaaagagcttcaagaaacggttattcgtttggtaaactaagaaccaatggaaattccaccgcgcctaaaaagaaagaaacctattatggcccaaaggtttgtctgcatttacaacttattaagctcaaaagaatctgtgattcgcccaanagaggtggagttgggggcactgctttatccacaacacacgccgcggccgctttgatactttcgcccctatgacacgcctacctcggcgcgcacagcgccttttttgtgttcacactcacactagtcttttcccccttcacattgttggggcccctcctcagagtccccctggtcaccactcccctccccctgtgtttctttatctttaaaacttctgttttttgagggaggaccaactttattcccctaaaacgcctaggaataagataatttttgtcttttataaggcttgttttcttgtattgcctgtttttgtgggggggg

SEQ ID NO: 298252 - DNA, 387 bp, Homo Sapiens
gcacccggccgctagaatttttgaagtatttgcaactatgtactttttgaaggaaaaaaaccttcattctcatgtcgctatgtagaatattcttcatcattaagcagcaccataactatcatctagtgattagaattttatttttccataaaaatatgaggcactgtttttgttttggacaaaactacacatttttctttaaagatttacaaactcctatgtaatttgaaagttgctatactgggagtaatctggcttagaaagttcatttccttttatatttccatcttaaatgtgctgctttttctattcgaagtttacaaagaaacaagtaaatgggatgtcgtgcatgtatgcacatgctcacacgtgtattcagtgtccttt

SEQ ID NO: 298253 - DNA, 533 bp, Homo Sapiens
ggaggacacatcatgtggctgaacattgtcaaaggcagcatcccagtcggctctcgagtcttggtgaaaccatccctgagctcatacagggagattgatagaacatgattcttattaccatactctttctctgatgcaggctgagactaagtgtaacccatggatcacagtccgaggcaaacgaatgcactgtccaggattcatttaaaggtgtggatgctgctctgacgagacataactggctagaccaaagtgacagccagtttgtattgcaccgcataactgaagccactaagacggttgcatctgacacgatacattccttcatgtacgaaatcaaggagggtgactgtgctgaacggggtgaagactctcgggactgacatgcaccgatgctgtagaagcactcactgtagaatgcacagcatccgaggagaagaggagctgtactgagacatgccacaacgagagcctcgaatgtgtggcatccctatcctcagagcccagacctggagcccatatttagacacggt

SEQ ID NO: 298254 - DNA, 340 bp, Homo Sapiens
cgtaatcagaccccgtagagagtatttcactactcagcagctatcgatgcagttgacatccatggaattccgttttcggaaacctgtgcttacaatgcaacacaatgtacaacatgttactgatgactatgtccagctctgatttcgcgagtggatcctgtagcttcagacattggtactgagaagatcaatgatttcagagctctccactctcacttacgtatggaaggtgctgctccaagacagctccatccttgtgtcacagcgatgactttgcattgtgcacccattagaacatactacacagaggtcagagattgttaatggactactgctgtgt

SEQ ID NO: 298255 - DNA, 416 bp, Homo Sapiens
gcctaagacattagtctgttctgagacagtgtcttccatgtggcccccctactgtcttgatctccttgggatccccttcccctcacccatctctactcaatgcctgggtccttcagcaaaggtcctcccctttctgggtaccctcagaaattcctcatagtcagttatctacacctttcaatgctctgtcctctagattgcaccctgctgtctgattttataccttattcattaattcatttctttattctctccctcatcaaacctgcctcctctgtgctaaacacaggagaccttgagacttacagacagtatccctgtcccccagaaatttctgagtccagtgaggagagacagacaatactatagggatcacaatggagcaccttactgagggcagtagtctcagagagagg

SEQ ID NO: 298256 - DNA, 630 bp, Homo Sapiens
ggaactttgtgactaatgagcaacttgtgaagatggtgtactttgggctggagatgatatcttcaagtagaatggcactggcttgacatatgcctgatatgacgagcaatgcaatgcctgactacgaactccgacctaagtgcacgtgacactatacagttatgccacattcgaataggaggactggtgcgacatgctcactattgaactgcgctagaagccatgagaaggactgggagttactatagcaggttaactacactatactggagtatccgtgtcatacgttgtcatacgaagaattgcccatgccgatggaagactgatgcagggagaccctatatgaatggtgaatgctgaagacgcacgtgatgccactgctggctgaatcaactctggttcattgcatacagataggatgctatctgactgcaagcaggtattgaatgccatatggcgctttgacttgtgcagacggtggatccagggcatctgagtcactggacagtagctacaatgacaatgcattggcatctgacctgcggaatgaccaacatgcgagatggaatgggacctactgactgactgggaatagcatcgctggacgagtgacagcccacttggtgtgtg

SEQ ID NO: 298257 - DNA, 610 bp, Homo Sapiens
  misc_feature (496)..(557): n is a, c, g, or t
tcgagtgaaccgtttcggtatctgaagttgctgattaagcctgatctagatgacatcctctcatacgcaccgttacttcgttgctgatcccatgggggataagccagtggggagcctggctggtattggtgaagtcctgtgcaatatgctggttgggtgttttgacaatgcctatgttgtccttggcctttttctggtgctcattatcgatgaagacctctttcggtagtggctgactgacacttttggcgccaatgcctttctttctctggactgcttcttatgccttcgatagtggtgcgacgccttcttgtgatgctctctgtgatgctttcattccctaccccttattcatactttgcagccgagtagggactcctcctctgtcctctactatttaactgattgctcttgtcttactctcctcctacgttctcccgtgtctattgggttttttgccttgtccctttcgatctttttttggattctcgttctnnnnnnnnnnnnnnnnnnnnnnnnnnnnnnnnnnnnnnnnnnnnnnnnnnnnnnnnnnnnnnggttcctcgtcccttttctttctccctctctgctttccttccctttggttccc

SEQ ID NO: 298258 - DNA, 379 bp, Homo Sapiens
tgcgtgagactcatcttacgccattgtctcttctcacttctatgctctagccatatcacctgtctctatacctcaatccgagcctcacttattgctgctacctttgactgtagtgcttctcccatatggtcttctcacacctgcctgcatctctgcacgtctttgctgacactacctcttcacagaggctctctctggttgcgcttactcataacgtacatcccactgctccaccgtcattcccatgctcattaccctggttcatgttacccccaagcgttgacggctgtctgacatcatatgctcatttgtatgctcgcccactgatgcgacggatctttacttgctcggctaccatgctactaccactgcctgtacc

SEQ ID NO: 298259 - DNA, 615 bp, Homo Sapiens
  misc_feature (128)..(179): n is a, c, g, or t
  misc_feature (241)..(321): n is a, c, g, or t
aaagcacaataagattatgtatgccaatattctaaaacaaacaggatggaggagcatctagacattctttactgaatcttgtaataatcttactactcaaaggaaggtctgtggatcaggaacattgnnnnnnnnnnnnnnnnnnnnnnnnnnnnnnnnnnnnnnnnnnnnnnnnnnnntttcattttatcaagatgccccaggcaatttacatctacatcaaggtttaagagtccttgtnnnnnnnnnnnnnnnnnnnnnnnnnnnnnnnnnnnnnnnnnnnnnnnnnnnnnnnnnnnnnnnnnnnnnnnnnnnnnnnnnggtggagtacaggaagacagggtgcgtgtaattggatattgggatatctctagagataaggtacacaaatgttaaataacacctcttgcttagtaagcattgggtattttcacgtgctaagtactttcacaactgtaaggggatacagctttcaaattctcttaagtatttgaactcatcgtctttaaacccttacccttatttacgtcatattaagggtttttagcctattgtgttggggaggggttttggtcatctggtttagcctttcttccttagagatgagtgcccagg

SEQ ID NO: 298260 - DNA, 622 bp, Homo Sapiens
agccatgtaaagagatgatgatgctatacagatatatgagaggagattacacgaggatacacctaacacatgtgtgcacgagaagcgtaagatatgcgcattcgaaaagcgccacaggaaaaatgtgggaggcgcattcgggagctgaatgagtatctggaacacatttggtggagacacacagaagcctggcatgagacttgcagaactttacattaatgagacatgactatgccaaagcaggcttttggttagagagagactaatgaggactaattcacacaaccacttatactgtgagcagtatgctgaagataagtatacccaaggtggacttggaaacctcgaactcttaagaaagtgttttgcacaagcattggaactcggcacacacgaaatatgagagctttggttggactcttatatgtcggcaagtcatattgcgtttaatacgccagtgcgcaaacgatatcaatttgcaagtcgaagttagaaggagaacccatattctcttaaagctgtcgaagacatgttggaaacattggagatcacccagtcttaaagtgttacaaactctctgacactagatatcacaactgtgctgcttattgggccggactct

SEQ ID NO: 298261 - DNA, 477 bp, Homo Sapiens
  misc_feature (116)..(116): n is a, c, g, or t
  misc_feature (135)..(135): n is a, c, g, or t
  misc_feature (142)..(142): n is a, c, g, or t
ccatatccaaaggctgccagagagacacgggggacgaccacaacctactaggcgatgcctcgagcatgcggacctgtattgcagcctatgctctctttcttggcgctatgacagangatacatcttttaactgancaccatnctcctgacatggcatgggagagcttgactgcggacaacagtaattatgtaaatccatacatcgtaaaaaaccctgctgttggtgatcaagccatagactgcagaaaaagtaaacaaagaaatcaaagggctctggcactaaaagtttggccctggggagagacaccccagaccggtggaaaaaaggccggagacccacgaattccccaattggccatttggaccaaaccaaggcccggaaaacttggccccaaaaagacctttgaaacagaaccaccatttttttaaaattccctaaggagcggctttggccatacaaaatttgggtcccccccc

SEQ ID NO: 298262 - DNA, 700 bp, Homo Sapiens
  misc_feature (41)..(41): n is a, c, g, or t
  misc_feature (43)..(43): n is a, c, g, or t
  misc_feature (60)..(60): n is a, c, g, or t
  misc_feature (62)..(62): n is a, c, g, or t
  misc_feature (69)..(69): n is a, c, g, or t
  misc_feature (77)..(77): n is a, c, g, or t
cctgttacttccttcgtctacgctaccacacacgccgcccncncttgcacaaccatgaanantctctcnggtgtccnccggtggtggacgctctagaactagcggattccacgaactgcacgaattcggcacgaggcccagactcagacatctaaatttgggggggtggcgctaggtactcctgaccacacacaccctaggctatggaaaaacgcagtatatggctgtggtgctctgcctgtgccacactgtgaccatagggaagggctgcgtgcttctgagctacatagcacgagacagttacagtgagtgcttccttggagcttgttaggggaaacaggagacttttcactgacctggaggggtcgaacgacatactagactgtgtggccatccttgaaccaaagtcttgatacaatgaggaggaaatgtcactcactgctcaagtgcaaggaccaacccaagaatttaagaagcggaccaacgtgagggtaaagacgaagacaggctgctctttgacacctcggacgatcaatctactaaccaggggagacaggtgaaaatccaggtcgctttcatgggcgttttactcacctggaagaatgatttcccctcgtttcattcacgatcccacaagtaaatggattggaacatggataagtctgtttggcgggtggctcaggtatttatttccccttct

SEQ ID NO: 298263 - DNA, 104 bp, Homo Sapiens
taacatacatttatcccaaatcaatattttttttagcctatgagcttctcaggggtcttagtaatatgtcgctgaattgaatacatgagtgaatggagaggctg

SEQ ID NO: 298264 - DNA, 358 bp, Homo Sapiens
gccagagccactatgaagtgggtaacctttatttccctactagggctctatagctaggattattcgaggggcgcgtgaccccgagatgcacacaggagagagggcgctcatcggtggaatcttcagcagtgtccatatgaagatcatgccatattcgagaatgaagtaactggctttgctaatacatgagatgatgatgagtcagctgaaacaggtgacacatcactacataccctatttggagacagattatgcacaggtgcctctataagagcctctggagaagtggctgactgatgagcataccatgaacctgcgagagatgtgctcattgccacacagataggacagcccatcg

SEQ ID NO: 298265 - DNA, 416 bp, Homo Sapiens
cactgcagcccggtttgcctttctaaatttcatcttaatttaaggaggtaaagaatgaagtccacactccacaggataactacttctaaggagctggaaagctgtctggcttattgacacaaatttaagaaggaatatttcctccaaagtcttgggtgaaccacagcagcttgggcagtgtggacgtctggcgtcctgagcttgtgctgggctggaaggagagcgggggagtttgtaaggcaggttgcagtggtgtgggcgggagacaggggtggcgttcacagtgagagacggccaggggaggcccctaggaagaatccgcccatcacagtggatggaagccacgattggacgtgaggcttaatgtgagctctgtgtacaaacaaagcccagctcattctgtagaccagtattct

SEQ ID NO: 298266 - DNA, 344 bp, Homo Sapiens
ggtgatgatgactagtccaagaatgacttcattgagcagagtaccatgcggttgaacagcctcaagctaggataccggcatgtacacctcacggctaagaacggggaccaggattcattagccaccctctgtgtgaagatctccctccaggactaggctggaggaagccaggggtgtcccgactgagagggctgggccctctgtccacaagacgggaccggcctggggtggctggtcccagcctcttgctcagagctatggcccacgctagaccagcccctgtagctgtccttcattgcgcaaggaatcactgcagccctgtacaccattcggccagagagggt

SEQ ID NO: 298267 - DNA, 527 bp, Homo Sapiens
ggaccaagagctcacaagctagtgatagaggcatataactgatgccatgaccggaacgtgttgacgatgctcagtgctcgaaactatagttatcgctgtggtaaccaagctgcgatgacggaacttgacgatactcttactctttgttgcaggttgacccaacacctaggaaaggccagccacatgttactagtcctacacgagactacttcctgggtgagattgtacacttggacaggattgccatgaaccatatatcgacctaatgggaaagggaagaggaacaattgcttcaaagagtcagaagagtagctcacattcaatgtcattaagagccgcgaacactttagaatgaaccagttcattgcatgctgaaacgacattgttggtgaagccagtttatggcataacgcgatttgtagagacactttgggttatctgagagagtgcggatagtaagatgtgaacattaacacctcgagtgtacactatgcttcatcatagtatagctatactcagcatgctgt

SEQ ID NO: 298268 - DNA, 372 bp, Homo Sapiens
ggaccaggcgctcaccacctagtgacatagagagataactctcgccatgaccggcttgtgttaagctggctcagtgctcccaacgattgggatcggagcgcgaaccaagctggaatcatggaacttgaccatactctgaaatactctatcttgcagattgagccaacacctcgccgaggcaagccacatgttaattgtggtacctgatactagttactgtgatgagaattttaaactggttcaggattgtcatggaccatatctcggcctaatggacacgggaagagcaagagtaactccaacatgtgcagaaattgctatgatccaatcgtcatcaggcgcgaccactttagaatgccagttcattggcgc

SEQ ID NO: 298269 - DNA, 589 bp, Homo Sapiens
gataaacttcggatgtgccttatgtgtaaaaaaactttttttcctttccatgcttccagacagtgtgcccctcagactgttggctggaggttgactagggtctgaattgcgcacagggccgtgaaggtgcggcttctgttactgaatatgagccctggagacccggatctgacagcgggagcttcgaggggatgtttttccggagcttcgagaatgatggttttcaaagaaacacttttccgcgggtggcgctcagagtgggtctggaacccggcggtgcttccgagcgctgtcttcggcttgaggcccggttctgatgcagactcttgactctgggcatttcctatgtgtctgtgtcctcatcgctgaaatgggcatagtagcggtgccccaagtgccgacgggcccacacccgggctctgggtgtgctcacgatgggggtcaggacaggtgcaaactgggacacaggaggcgcttcccagagcccaaaggcgtgcttgttccacagaccctgggtttgctgtgaagaagggtcttccacagaccgaaagtctggtactgacccttaggggggaaggattgtggctcc

SEQ ID NO: 298270 - DNA, 313 bp, Homo Sapiens
cgcttatatgacagcgcagcacagagagacatgtgtggatgactctcatgtgtatggttgacaccaggcgagatactctacctctttctgtcaggaccaatattgatttgcggagccttacattacaggaactaacattactgggctctgcaggaccatgaccttgcacaggcacatatagctggaatcctcctgcactcaagttatttaacgtgctgcgttcacttaattgtgaattgcaggcatggcccatatctcaaggccttgtcggcaacatcgtgatactgcgttaacaagcagaacacctctcctt

SEQ ID NO: 298271 - DNA, 192 bp, Homo Sapiens
aataagctcatcagtctttccttccccaggatgaatgggactcttgggagtcctcaatctctctttaagaaatgaggcattgaaagacaggacccacacagggatactgcttctcctcaagaatgtagtgaaatcactgtggagtgtttagaggaaagccaatgcctctgggatttaagaagggtgatcatc

SEQ ID NO: 298272 - DNA, 373 bp, Homo Sapiens
gtaaatgtggctagttaaggctaacaactgattgtttcccagtatcagatgatctaggccaaatatctagcagtcagtgtgtggctagatacatttctgcacataaaggctcatagaaatagattcagaaaaagcaaaatagataaaataaggcttacccaggtagaagagtaattgagctatttgttgatatgctttagtgggggcttggcaaaagtgggtaaagaggtaagctggaggataggtcatatgcaatctatgcctctaacccggaaactgttcctaggaatttgttctaaggaaatattacagatacgcgctaaagtgtaactacaaggatatttgtcactatagtatttaagagtatattgtc

SEQ ID NO: 298273 - DNA, 167 bp, Homo Sapiens
  misc_feature (31)..(31): n is a, c, g, or t
  misc_feature (34)..(35): n is a, c, g, or t
aaacatcgggtggccgaagggctttcatacncannctgaaaaagccaacaagccctttgcaacccccgggattttacccgccttctagggttttttaaaaactttccccccttaaaaaatggggcaaaaattttcccttgtataaatatggggggggaacccccccc

SEQ ID NO: 298274 - DNA, 525 bp, Homo Sapiens
  misc_feature (213)..(213): n is a, c, g, or t
  misc_feature (217)..(217): n is a, c, g, or t
cggcgcgtgctgcgaagataacttgccacgaacgcgatatctcgtgtcatagggagacgacaggaagaatgatgagacacgtgcatatccctgtgtgagtatgtatagagagcgcagacgtcgtgatatgtgcaccacgcgttgcgacagcgctcgtgctcgtgagtttgtgctctcgagagcgcacgagctctgtagagaatagtcgacaanaaanagaagagggagcacactaatagtagagtggtgtgtgtgtcttatacacagagagtgtatacttgtggcggcgacacgagatattatactcgtagagctcgtgtcgtgtgttgtagaaggggaatatcatctgagagagacacagagaaacacgcgaagaggcgccgagatcgcgcgcatattgtgcacaggtctacacgtgctgtgtggctcaagagaatatagtgtttgtgaagtgtaagagttccacacacacctctctgcgttaagacactgtgttaataggaggtgctacacactacacttgtg

SEQ ID NO: 298275 - DNA, 409 bp, Homo Sapiens
cacgcggggatatctctatgtgtgtttctataatgggcctctgacacagatgtggcgttggatatagagaaacactattgcgttaacatatggcacattatttaaagcgcgtgtttcacactatcctttcatatttattccttggataaatttgggagggacgcgcgagaccaaatttcctttcatatggaccattcccatagcgtttgaggaaaggggttttgagatgagaggattccaccaataactcggccaagggggattacacccaaatttcttaagaggagttctggatataaaggttagatatggcctgaaagttggttagagggacacagagagagccgggtctttggaagagtttcggcgttacattaccttcattagagtgagagaggttgcgctcttt

SEQ ID NO: 298276 - DNA, 369 bp, Homo Sapiens
  misc_feature (91)..(91): n is a, c, g, or t
tccacgcgaggtgtgacacgagaccacaggagcgcagcctgtggccccacaccctcttctcaaaacacactctacgaggccaatctgtccncatatggccgacaccatgtggtctctcctttccccctttccaagtcacagggaagtggacacaggtcaagtgtgttggttttataagcgcaagcctttgggaaaggcacacacatttgggaattacatgtgaattccccgggagtgtggctttggcctctttctcttttgaaggccaagggccattaaccagaacttcacactataggcccaaggcacaacccccttcctttacacagagggaaccttattggctgggtggcctttcttttggtgttg

SEQ ID NO: 298277 - DNA, 363 bp, Homo Sapiens
cacgcggggcacacacatgtggcacatatctcgcggagaggggactgtgacagatttgtgagagactctctctctgtgagagcctgtgttgagagagatggaatggcctctgccgtttggtgtggggctcttgcggctggtcttggtcttgacccacacgaaccttggttaaggtaactctccgtgcacacacatttctgtgaccaaactcttgaggccaaacacacagggccggattgacggatccgtgaaaggcttaataagagaacggggctgagcttacacctgtgaaggacatcaacacattatataagggaacacaggcgcagattggccttttggcacggattggcccttcacggg

SEQ ID NO: 298278 - DNA, 372 bp, Homo Sapiens
gtgtgtcgatagttgcacaagagtagggcaggatatttagggaaatgatacattagcagtctttatgccgagattctatatttagtcatggcagatggagcctaccatgaagataatgatgaataagcctcagaatgctgactaatcctcaactatatgaaagcatttgaagtcggctaatcataatatcacgctttagtgggaaatacagcaacgatgtattggatcagggctcaatgaagattctcatatatgatcgtatttggatgattgaagtccatggtttgatcatgaacatatgtgcttcattagatcatccaaccaatgcataggatgcattgacccagaacctgacttaatggctttggacat

SEQ ID NO: 298279 - DNA, 369 bp, Homo Sapiens
gttttacaaaccttacaaagccctgcacgacactgctatcatctctgggataccggctgcagctggcgttgacttacatgagaaatttatagagtctgcacgagatttgcacatgttaagaacggatggttctgagctgttccagcatgtgccacagtttgacattgatcgaatgaagcttgtgcaccccatagccatactccactacattgccagcaaatacatcctgtatggcaaagacattacggagagagccctgatcgatatgtatatagcaggtatagcagaatcgggtgaactgagcctccttctgcccgaacgtacatcagcggtagatgccaatctagcctcgatcagtgagagacatcc

SEQ ID NO: 298280 - DNA, 420 bp, Homo Sapiens
agactgttgattatgatctacaatccacagggacattgcaacactgtgcctattatagagggccagatctgtaaggctatgcacagctgtaaagctccgtaagagaaccgagccggacccttcaggcagccttgctgggcacaatcacatctacaacgttcatgcgaccagcaaggcatatgtgctgatgaagttcgtgaatctgctcaatcatgtcgtacgcatgagctactggatacatgccgcagtaaacgtcgtacccgctatggagtctacccgtgtacacaacacacgctgctgactatcacagtggtaacggctgcatctggtggcatgacgctatagtggaagacgctgcaggaacaagttgcacatggattacctaccctagcctggctactgccgtctaggctgcagagc

SEQ ID NO: 298281 - DNA, 685 bp, Homo Sapiens
agtgtttgaataccattagcaagcgtgctatcagcagagtgaacattgaggcccagatgccatgtgaccgttgacatcatgtttgacaactcttgccctgcctctcattcgcatcctttctggcactgcaggcaaccaaggatgctaggacttagctgcgcagattttgaagcgatgagcttacagcgctggctatgctatatggtacaactaatgctcgacctacagcttatgtataccgatgatgctgacgtattcatgaaagcttgcatgtctagactcgacatttttcaggatgattcaagctgctttatggatgcttccttgcatggcattgctatgcacatattatgggcttgagaccctgcacttgcaaccacggatggctgctttagtatgtacaattttgagttcacagtcagtctgacatatcaccaggccgtgataattatgaatattctatccattactaacctttcattgagtcagtcatgtactatagttcaatgtactaagatgctttataccacgatcctattgcgtattaggacattccttatttagtacagaattgctgctcgatattcactatatggagttctgagtttacccatcgtaatacctggtcacagcattccaacccatagtaactaggatcccgatggcagccacatccacggcgtcc

SEQ ID NO: 298282 - DNA, 629 bp, Homo Sapiens
agtgtacctatgtctagggaacagaggctgacagtgactgtaatgctaaggaggccatagaatgagacatgtggaacctgcgtggatgtattatggatgctgaaaggcatcatttagagagaagctggctgagacagaggctgcatcgagctgcaactcgttttcagtcgtggagaacccataggcactcgagctcaccagtgaattgtggcacgagtactatatccagctgtcatacccatagactagcatgtgatactgctagctgctacaggacaccagatgcaccgtgagcactactacctgcgtcacaccttcatgctagtggactcagtgaggatagcatcagtagaagtgtcatacagcctgataacacgcacagcggtgcagactatgcgtgatgctgctagctggacagtgagtactacatagaccgtgtaggatcagacacttctaggtctaggctagaccatgcagacatgaagaggattcgtacagaccacatatccaccagtctggccaagcttgagcatgatggggtgcctttgctgcagacacgcacgtgtacaagccaactacataatatcaagcttgattcctactgccgcattcttacagaccgaccgtgc

SEQ ID NO: 298283 - DNA, 420 bp, Homo Sapiens
  misc_feature (97)..(97): n is a, c, g, or t
ctcgagtttcaatgtctgtctcatactttctctctggattgactgtcacaaacacttcgaattcctcctttttatacggttccttgagctttagtgncagcagaactgtcactgacccgcttcctggtcaggatcttctggctgcacttgcttgaacttgaaagctccctgtttcggacatgcctctttacgaggctatatattgacttctgtgcctacaccataccgtggaaatacttactgtgactgcgcaacggctaggctctgcggaaagatttgaaacagtccgcaacttagcatttaaacttatggtatacgctgacagatgatgcatctgatgacccctactgatctgcggaattagaagcatactgtgctttcacaagcttctctagttattccacaagggggggcggttct

SEQ ID NO: 298284 - DNA, 354 bp, Homo Sapiens
aaggctgctacgtgacctcgacccaggtggtcacgcactgcaaaccgtggatgtgcacgaatcaccgccacaagatgtacaaggacaagtatatattgaagaatagcgaccagaccctgaactgcgaggggactgtctccactgactatgcgctaaacgtcaaactcgctgaaagtgcaaataacatactgtgcattgttaaacaatgaacaggatcttccgtggatcgtgctgcgagacctactatcttagaacaagtgataaatcaaagcagctattctaacaagttttggagcatagacaacatcagattacaggaacatcaatgtgagggagcttagcaagcatctactg

SEQ ID NO: 298285 - DNA, 371 bp, Homo Sapiens
gcaggtcaaggcttgctgctgacaaaatataaatcatgccatatgatgccaattctaaaatgccattaattctcctccattaacccctgcagagtattcactgactgctgaaactagagcatcactgagaagcaagagatagactgacctaactagagggagagctgccatccaggatgatgccaccatcacaggaggtgagaaggaacacagcatcttctgcaaatgctacagtaaatagggacggggtgcaggtaagatcactgaccccaggtcactgaccccagtattctcagagccaacagctaactttgcaggagagccctgagccaattactagatatgtaaactttaaaaatgcttaagtcatc

SEQ ID NO: 298286 - DNA, 382 bp, Homo Sapiens
ggtataatatgatgtcatgcagccaatccaaacgggagatactactggggtgggccggtcaacttggacattgcaaaacatgggacaaatgattgggtagtattggatgaatgggaggggtcatggtactcaatggagaaaatgaattttaaaaataaggccctttttccacacaaattgtccccaataccgtaaattttggttttttgtgttggaacaacattttggaccatatatgtatatggaaattttctttaatcacattatattcctataaaactctcaaccacacgagatgtgacattttgtgagtgtaggatatattacactttagcacatgattctctttggttctctacatttctctcgctcaccaagagtc

SEQ ID NO: 298287 - DNA, 354 bp, Homo Sapiens
ccgacgacgtgtcaaacggcgagcgattagctgtggtctatcacacagtgtacttatacattgacgaggactgcgagaccagagctcttgtgaaactcatgagcggcgtgcagacaaagaaccgctgactgagttggaggggatatctgaactggaaactaaggggctaagttaactgggccagctttaacagaatattgcagattttaacattgatggtacatgactacacacgctcaagtgaggctgtgggcaagtccatctatggggagaaatttggggatgagaacgttatcctaaagccttcaggtgctggcattttgaacatggtgcgctggaccccacactgctggc

SEQ ID NO: 298288 - DNA, 167 bp, Homo Sapiens
catcatcattattttatatacactttggcctacatagttataacatataaagttgtgaatagcattcgtgtatttatgtgtctaaaaaatgtgatgtagcaaacgtgcccaagtttaatgcaatcagactgtggcatttaacacaacctcactgagtgatgctcaat

SEQ ID NO: 298289 - DNA, 177 bp, Homo Sapiens
  misc_feature (93)..(107): n is a, c, g, or t
gcgcgctgcaggaatcggcacgagccgactccctgccctccccagagtgggtatttgaggcctccccaccatgacgtgcttcacatggagggnnnnnnnnnnnnnnntttgtaggaccatgaagggcgcctggtcaacatccggcccgcctcccgaaggatttcttcacaccactct

SEQ ID NO: 298290 - DNA, 721 bp, Homo Sapiens
gaagcatggagcacacctggcgctgctgctgagaaatcataacagaagaccggctgtgctgtcccatgactgtatatgtacactaccaaacactcaggacacatgctgtgctccagtgctgtgagggaggaagacctctcttctgacctaatggcgtataggctacaggggtgatcctggactaatgacatcctacgacatagagctagtcacctctgaatacaacgatctaacgggagatcatctgtgtctatgactgctgacatgcgcacccaccacgtgtaaatgtctggtgttatttctaaagacacaggtcatgagatgcgtgcgtgataatatacacacagtacaactatcactcctttctatgagaatcgagagccttatatctgaagtgtgccacgaccctacatatcactatatctccccacaagctatgacccccaatagctctgtgtgctaaacatgaattacaagagtctcatgtattgccaaatcacagctgtgcaagatatcgcgcaataatcagactggcgtgctgggggtgctgatcactatagtaatgtgccttacatatctttcatcacagagttatgcttggactgccccactcctatgaagacccatttgtacctgtaagtgctgaagtggaagaatgtacatgcgccccggtgctgatactcacctctccagaagaggtgccctttcgcatgatttgttg

SEQ ID NO: 298291 - DNA, 385 bp, Homo Sapiens
ccgagtgcactgaatatggcggatgctgtcagacggctgctccgagcgtcggatgcaccgacatgatgagcgccagttcttgcagcattgctgccactgaagccctcagacctgctgcatgtgaacgaacgagcttgacagatctattgagctctgggtacaatcaagcactattattcagcaccagttgcttatgccatgcacctgctgacacccacaatgcaccctattttaaggagactagcgctgtcaatggagagttcaaagacctatgccgtgatgaccttagggggaaatattcgatgcttgtcttctatcctttgaaatgccctttgagaggcctacacttggagatattagtgactgaggtcgattaccacgcgcc

SEQ ID NO: 298292 - DNA, 297 bp, Homo Sapiens
  misc_feature (84)..(144): n is a, c, g, or t
  misc_feature (146)..(189): n is a, c, g, or t
  misc_feature (205)..(205): n is a, c, g, or t
ggagatttaaggctgccagggccttgggaacagaacaatttaatgactctgctctgtgccttgtgttatgttgatccttggctnnnnnnnnnnnnnnnnnnnnnnnnnnnnnnnnnnnnnnnnnnnnnnnnnnnnnnnnnnnnntnnnnnnnnnnnnnnnnnnnnnnnnnnnnnnnnnnnnnnnnnnnnccgtgtggggccttgnggcccagaaagagaacagaggtgggaccaccgagaaccctcactagggctgtccactagggctgtgaggccagcatcatcacagaggccctc

SEQ ID NO: 298293 - DNA, 136 bp, Homo Sapiens
gaaaaaataagtagttgattctacaatcagctccaaaatcaaaccaagaggcataaacgttgattgagttgtttgatatcaggagaaattgcataactaatcaaggcatattattagcctcaattaatgtgtgaag

SEQ ID NO: 298294 - DNA, 336 bp, Homo Sapiens
gggctctacagaggtcatattgtgctcgaggtacttctgtcatgtggctattgtgtgacgggactgttccaagtcatatgagataccattctgtacagagggtccgctattaccattctataaggcacagagaacatagtacgcaatttctggcacacgcgctatgtgtgccgagagacaggttacagagcgtataatggcctctcacaggaatgcggcccattacagtctgaaatgtacacccagaggctgaacttttggtggaactcttgattgtggcactgcgatgtaaatggatggctcgtgaatctggccagggcccatgttagctggggc

SEQ ID NO: 298295 - DNA, 339 bp, Homo Sapiens
cgagaggtacacgatagagtatctcctgtaagagcagtaacatggtcacgtctcacagtgagaaagaaatcccgaataaatagcctaaacaagatatcaaataaacagccagagctataacttgtcctcatcacatatctgtatcgcagaaattggaagaagaatgtaagactgtactgtgagcccgttcgtgtgccatgtgcaagtcatggtataagtccaccactattccttaagtatatgtatgggcctcaagtgaatcagccacacagaccccccacattatctacatagaaccgtcattcacacaagcaaacaccctcatgttcataccctctt

SEQ ID NO: 298296 - DNA, 345 bp, Homo Sapiens
accaaacatggcggttccactaggcggtatggtgtgtgggcagacacccgctccccctcaggccccgccggaccttacgcaccaagcttagcttgttcaggcagctgcaggcgctcctagacgtagcagtagtacttcgcaggacgagtcggagccatgtctggaggcttgctgagcatttctgatgagtcaggactatgtcaatggtaccgatcaagaagtctgaaccgagaggcattgcctctgtgtacacaatgttttgggcttcagcagtatatactcagtgctaattgtatactatcatgtgcttcagtgctgaatgtattctaggaccattagagtgct

SEQ ID NO: 298297 - DNA, 353 bp, Homo Sapiens
gctgaccaatggtgcgaggacacagactcatatgtttatgtacatgacaagcgtgattttgggcagtaatattcccctatgtgtgggatcagggaagttcatgagtgcagagccgttgtgggcaagtgtgaccgtgggctgacaacagctgttgcggatcatatgcaagctgagccaactacctatgatgcgtgatagaattcaggctttctggaaagctatctgactgactacactggctctgcgtctctaggaggaccatatgacctaatatatgtattggataaagcttgcatgaagaggtgagtggatgctagacgacatgagaggccctgtgtatgatgcgtcgcttt

SEQ ID NO: 298298 - DNA, 631 bp, Homo Sapiens
gctgcaggcgttgatcgacactcgggagttgctctgctacgaaccagacggacgccccacattcacgacctgtacggctgaacatacccaaagacacaagccatctgaagaaacatatgaccttgctatgcgatcgattatccaaaggtgggcgggtctggctaagtaccgatcgcgcgggccgcctgaccatgggcatcccacctccttgtactacaatccgagagccggacctacaagaaagatcagtgttacaagactctacagaactgtttaccatccacagacatctgactgtagagacaccaatgcctgtagctccaaccgtccatggagtctaggaattactcaagcacagacgttcgcctgatatgtacactcccatctcaaggccgaacctgtgtgaacctcatgccagcacaaattaggagtgggcatgtgcatcctaaagcctaccttcctgagatgacatgcatagaaagaggggttgcttctttccacttcacatagacaactcgtgacaacatggggatgtcacctgaaacttggattgctctgtcgaggaaaggtagtagcgtttggcattcatctgcttactaggcgcagaatacagtgctgacattttttgggg

SEQ ID NO: 298299 - DNA, 409 bp, Homo Sapiens
agggatactcgcgagtaggtgacacatggagcatatacttcacaagaatgtgaccttctatctgcgtcggatcacttatagtatggttaacccttcactagaataagcctctattctcgctctagactgactcgcagggatacctcttcaggtggatattctacaatgccttcaggtgagacattccattgcacacggagtccggctctacctttaagccttagaggactgtatggtggaatagagaatgatgctattacaatggctttattaatcccataagactgtatataggtttgtgtatgccagtcacgcactggcccatccttacactgacgtgatcctagggagagactcagctgttcgaacggagattactgcatacattctggcttcgctgggttacttt

SEQ ID NO: 298300 - DNA, 557 bp, Homo Sapiens
  misc_feature (16)..(16): n is a, c, g, or t
  misc_feature (515)..(515): n is a, c, g, or t
cctcggaggtccctgnctggactgctgagacgtacaagctctacgtgatcactactgcatcaacatctgactagagcaaactctaatccgcctctacagcctctggtatcatatccgacacacttactaacctacacttcatctttattatagatcaacttaaacactgatctacgcatcaattgtaccatctccattacacattctcatactcttatatacaacctatcactttcacactactcttcatgtctatctaccagcgcgtacacaactctacctcaaccgtactatctacatcaccatccataacctattacgaatgcctacatgtactaccagaatctattaccgctccactccatattcacatacactttactcttattaatctctatcactgccttacttcaccatcctcgcatcacttccttcacttctttctactatcacatccatctctcaatcctctccaccttcacccattctctctttcatccgaccattgctttctncactacactcactcccactacttctcacccatctctccctcc

SEQ ID NO: 298301 - DNA, 386 bp, Homo Sapiens
gggacgcagcgggaaggctcagacttggcgtggacctggcaactcggggcggggctaccttctcctgtggctacagtgctgaacgggtcatccgccggcagcggttgtgatggctatgtctgtggacctgggctcgattaatatcacctgggccggccatactctacgttgttggctcgcgtcttttagaccgacgattgctatgtacgagctgacgcatacatgttcacgcaggagccgttgactatcagtgcgtgctacagtgggttgagcagcaagcatctcagtatgtagcagcaactctggtagatctactcacctcattgcgtagcgtcgctgagccagctgcaccatctgatgcatgcgaccactacgtcgtctttgtc

SEQ ID NO: 298302 - DNA, 359 bp, Homo Sapiens
  misc_feature (91)..(206): n is a, c, g, or t
tagagtagagcgagtgcgtgagcgatagcgagagtgctatagttcgtgcctctgacctatacctctcatccctctcttttacttactctcnnnnnnnnnnnnnnnnnnnnnnnnnnnnnnnnnnnnnnnnnnnnnnnnnnnnnnnnnnnnnnnnnnnnnnnnnnnnnnnnnnnnnnnnnnnnnnnnnnnnnnnnnnnnnnnnnnnngcccttcttcccctgttgctccgttttttccctctttagctcatacctttgcctccactcacctcctcttttacctctccttcctttccccttcctcctatctattacctctcatgctcttttcttcccttgctctttttttcctctctcccc

SEQ ID NO: 298303 - DNA, 410 bp, Homo Sapiens
gacacttgtgttacaagggacctgagtggacctgtctttctactgaatagaacaacgaccgctgacaacagcagactatgaacgacctacatctgtaagatgactgaccatatgccgacgaccagaatatattggacctagatgatcatctccagcctcgtaggtgctgctacactacatataggtgctgtccggtgacttgctgccagattctactattccatcagcacctgttgactagtacgctatcgctgactcaattcgcctgagtattgatgtatcagatatacgacacgagacatgtatcgaccgcataattcggatgaccggctgacttatagctatgtgatcaagacttagagctggactaccgctgagaccgactttcagtaggacatgatgctatagcg

SEQ ID NO: 298304 - DNA, 426 bp, Homo Sapiens
  misc_feature (134)..(134): n is a, c, g, or t
cagaagcggtgatagcgcccagggacgaggttgtgcgctcgcgcgggcacggaggcactgccggtgctagaccgagacaactaccggaccacgggcagcaccgtaggcttgcttctgctgccgatactgcatgntactgatggcgactggagctgtgcagggctgagagacagaggagaggcccacagactcgcgaagaggagtgccactcttacgcaactggacaagagcacccatgagaggcatcccaggtcacgatcggcgatcactgcctgcagctaggcacagcgaggatgtccaagtcagcgcccatactgaaaggaactagctgagaccagacggacaagttaaggacctgaagttaaactgttatggtgagaagaacctggttggcctcgacccactcgagcacacttgagagaccgc

SEQ ID NO: 298305 - DNA, 349 bp, Homo Sapiens
gacaactagactctagtcggatgataatcttatgacctctaaccagcgtcatattactctgttgccatataattggatactactatactttgtcacaataatcctgactgtgacagaagggctcgttaactcctcatctgatgatggtatgcactcacattctgagcgtaacataattgcagtaccgagtatgacgattgtacaatcgtcggatgttcatctctacacactttactatctgtaggtatgtacattgacagcattagatcattctatattatgtcatctgatcccgacacctgatgagcataggcattgaccgtcagccttggccgtcattatcttcctg

SEQ ID NO: 298306 - DNA, 160 bp, Homo Sapiens
acaagtaaaaacaaattgtgggtcaaagtaaatgtatacagcttgagtacaatgtaaccaaagttgtcacgcagatgtgtaataagtatccaatttaatatatcttaggaggagcacaggagacagaccttagaagtgcctaccaactcttacatgcttt

SEQ ID NO: 298307 - DNA, 417 bp, Homo Sapiens
ctccaccatactgccctacaaccttaacgtgcccgtagcaccccctgaatgctaggcgatctagatggaaccctgacacaatgaatatgtgaccggaggggatggatacccccttatggccctgcatactatagcacggactatgagctatacctactgcataatgaatcacctgttggcttgccatggagagacaagcctaacactttcagaactggactatctacctaagaccagctctcagaacacacgcgtctatgcacatccatacttggaacacctataggtagaggcgacccacctaccgactctcaagatacctagttatgcaagatagcatctgtagcactgctttcatgagctcactgaagccctgtactaccactgactggccaactgttagttgcgaggatctgt

SEQ ID NO: 298308 - DNA, 224 bp, Homo Sapiens
atgctgttagcaccgcgtatctcaacgattcagacaactccactgacggatacacggagatgatcatgcgatttagggttagccatgcagtagtactgtgaacatctgtctgttctttagagatcccggaacttgcaggatttgatatatgtgagtctgctagagcacttgctagtttgattagacaatcagtaacgggatgaggatacatgtgtgagagccgc

SEQ ID NO: 298309 - DNA, 596 bp, Homo Sapiens
  misc_feature (470)..(470): n is a, c, g, or t
ggccggcctacccagccatttcatgacattaagatggagcaagttatttcgcctcagctaggcctgtgagatagaccgcctgaggcctgagctctgttgtactgccagatcaattcatatttggcagtgatacgtgcgcacgctgttttacagatgactatattttcttacctgacatacagcatatacttatgtcgcacacaatgttgtgtagacaacctgctagcgccaggtagtcaaattgcccctgactatctaatgtttattacatgtgcagacactgttgttgcttactcagctactgatcaatacaccctgcacattgtgctaccatgcaattggctactagacgacactccaaagcatctatggacactgttcccgaatttttacacaagtcactagtatgacctagttaatggtcacatcaggtctcggctataatggtgcgtctctcctagacccagaangtgtgtttattttgcatcccggccatagatccctaatacctcgtgccaatagctagtaggtagcaccaacgctgcctcatggtgtagatttagtataaccgagtatgcaattgactatttgctctc

SEQ ID NO: 298310 - DNA, 210 bp, Homo Sapiens
cccagcatgtatgcgcatgatctgagacggaggacactgatacgctcatgctcatactcgctacgacagactgaagcgatgcagagaagtgctgggccgcagtcaatacttgtgccagctgtgccgactggagcaaggaaggaagatctctgggctaagagcaccctgtacttgggctctaatgctagggccttgagcgcttccaagagc

SEQ ID NO: 298311 - DNA, 382 bp, Homo Sapiens
cccaaatggcgtctgagttatgagcctccagccagcggtcgagggtctcgctggctcatggatatgacgcaccggacgaacctgctaacgattatggctatgcaatctatggaaacggctgctagaccctgtactacctaattactatgcgacttgtacgccgcacataattccaactcagcagaggcatctgtggtgtgcatcatctaacacacaatcctcataagcttatcgacggatctcaagctatctgcatagttgccgagagcagatgcactcgcttactaagctgtgaactcgtacgcttagccctgtgggatattcgttcatctacagctacagactgagatgccatgtatgcgacgactctagtatagcctgg

SEQ ID NO: 298312 - DNA, 461 bp, Homo Sapiens
ggcctacccctctacagcacaggggttaaaaagtgcgggtgtggaattcccctttggggagggcgtttatctttcggggcccaggggtttggtgtttatacaaaccccctttcgttgattaccccaaagtgccctacagagtcaaaacccaccccttcaggggccaaaaatggggatatccggggtcccgggaccaggaggctccaaaccataaaattgttttcctttccaaaacttagtaaccttgaggtataaaccctcggcgggcagaattttttatttctgaaaaagcggcctccgattggtttttggaacccagtgagcaaggtccttgggcagagaccgaatggccccccggcctcctgtaagtgagagcagctccagccacacacaggggagaaacatctccccatgcactgcagcgcatcctctttagagagagaccgcctgcaggtttcggc

SEQ ID NO: 298313 - DNA, 765 bp, Homo Sapiens
  misc_feature (310)..(310): n is a, c, g, or t
  misc_feature (432)..(432): n is a, c, g, or t
  misc_feature (439)..(439): n is a, c, g, or t
tcctagttttaggctgctctaggggaacaggggtcctggaataagaagccccaccccctcctatgaagagaggaaagctggagacaaaaagaggaagcaagagatgaattgcaaaaaactaatcagattgcaacctcaaggtaacattttgcataataagttctaacaatgttttcttgtttatatcagcctcctcctcttagcctggcttactaggctggtgtttaattccaatgcttctgggttaatttattcaactttattatccttactatagtagcctcccctagcgttctcccctacctctcanaggtctcatctaagtgtgtataaagctgttaaatagaggagaggaatcaggatgaactgcacagcattttcttaaggcctgtgggttctggagcctatgcttcagcaactgaagctgaactngtgtggntgttgcttaacattggtgtatccaccactaagcctcagaaatctttactgatatctttgaatcccatgtgtgtccttccctgaatgcattgctttgtcacccagaggtaacagctatccagcattcagtgcttatcatccccatgtctttctttattgggtttctaaatttggaatatccctggagacaactttggcaactgaagctaaactgtggaatgggtgtgacctctgatgtgctactttttaatcaaggacttaattttccctctttctctctcactccacaggccattctggggacttatgcttgggtcccagccgggg

SEQ ID NO: 298314 - DNA, 195 bp, Homo Sapiens
  misc_feature (100)..(154): n is a, c, g, or t
tgtccttctcattctttcgtccgtccttcctccatttctatgcccttcacctcatccttcgctccgatgtccacatctactcatctttccccttgtcacnnnnnnnnnnnnnnnnnnnnnnnnnnnnnnnnnnnnnnnnnnnnnnnnnnnnnnngtttgtcacttgcctccctctttttccctctgcccctttcc

SEQ ID NO: 298315 - DNA, 578 bp, Homo Sapiens
  misc_feature (496)..(496): n is a, c, g, or t
  misc_feature (525)..(525): n is a, c, g, or t
  misc_feature (529)..(529): n is a, c, g, or t
atgcctggccagaaaaactttggataaagtcaaggtattatataatttgggggaggatgaacgggggtttgtagtactctcgaatattctctaacatcagtgatgtgagtgacccttatatgaatcttcctcagtttcaccagctctaggccccacagggcaaggggacagttatagaaagaagggaccatggacacacaggactaattgcacacccttcctggctcttgttagttcttggggccaggacagctcacaggtgtcagaaagttccagtgagccccagtggtgggctgaaataattgccagtgattggctcccccactgttgtgtgcacgggcgtgtgtgcccaggtgcggtagggagtttcatcgcatctaggagcttcatagtagccataagatcatattgtatttactctgactaaaggccagtgtgggatcaaagactcccttaaaggttcagacacacttacaaattcaccagacacttattntatttgcctgaataatactccctgagctngctntttctgccagagagaatattcttcaggatcactttagaagattgggccc

SEQ ID NO: 298316 - DNA, 473 bp, Homo Sapiens
  misc_feature (451)..(451): n is a, c, g, or t
ggcttcatccaagggaggttctggtgtccagttttggcctgacgagccctgagagccagggaagagtgtttctgagccccagcttcctgtgcagcggagctgtgatggaaatgcacccattgagaccaggaagttccattctgattggctcttcacatctaagagctgggacaagggtaggggaagcacttgtggacctggccctctccaaagcagcggaccccagggaccaccagcaccaagaaccgccttcctgagtagttgcccgcttccaggctcaccttctccaatccatgtttacaactgtgctcctgccaccccccagccacatgggtccccctgtaccaggaccagccccttcttagtcttccgcttccagctcaggaatcccctcatccttgaccactcagcctagagaaggttctggtcacggtttccttccttcgcactngtcacagctttcttctctggtc

SEQ ID NO: 298317 - DNA, 627 bp, Homo Sapiens
  misc_feature (539)..(539): n is a, c, g, or t
gaaaagagaaatataaggtgttcaccatgattctgatttttaaaaattcttttgaaaatatgggtattaatctagaagaaagactgaagagcacatcaataaaatattaatagagatttcctttgattatgaatgatgagtgactgtgtcttctttataattggtattgtttgtaagtttttatattatataatcgaaatgtttaagtgcttttggttacaacattcattgttatttattctaggttttcaacaaatacttttgggctttactacagcgtctataaagcatagaaagggttggcatatttagactgcttaccctagggtgggagagaatacagttctttctcagagagatgttcgtaatacaatagctgtattcttcagaggctgagtgtagttgctgcggaagtgtttgactatgaggccccctggggacctgaacatccctgactacacagagggattagactgttcagtttttgccttggctgggtcctaacctatgtgaatgtagctgatggtgcatataactanactcattaagtgacgggtatcggtagttctgagcagttatgtgggaggccgcacgctagcaatgctgttggggagagtgaatgcgggg

SEQ ID NO: 298318 - DNA, 403 bp, Homo Sapiens
aagagatgggcaccaagggcactgctattaaacgctaagtaggcatagtctgggaagcagcaagccccttatgctcgcagaggtgaaggtggttatcgccatggctaatgaagagaggattcagatcatggctacctgcctgtggcatactgacaccactgttatcgatgctcaattggagagcctagctaacccagggatcgagggacatgatgctgcaagtcatgtggagaggatgagtccactagtgaccgacgccaaacacatgtgacacagtaatggcgatttatgcacctctatggagaatatgcaagaaacgtatgaggacactgacgaatgctggtcggaacatgagccttctagaggactgctagtggtcacccactgatggcagacccctgcg

SEQ ID NO: 298319 - DNA, 654 bp, Homo Sapiens
  misc_feature (255)..(296): n is a, c, g, or t
  misc_feature (363)..(420): n is a, c, g, or t
cttcatagaccaatacactgacagagagtcagctcgcgtgtggcatctgtctatgggagacacccgtatccgcaccgtcgcctacagtgcatggctgctcgggctgctggggcggcgcgggtgccggcgggtgctgggcgtggcctgtgacactggggtgggctccattgtggctgtggaagacgtcttgggtgtgacggctgtggatggcggtggcctgatgctgcagtatgcgcttggggtgctctggaaccnnnnnnnnnnnnnnnnnnnnnnnnnnnnnnnnnnnnnnnnnncggctgcatggcgtctgggcacgatgtggcccggtcatgagatgggggctttgatgctggggtctgnnnnnnnnnnnnnnnnnnnnnnnnnnnnnnnnnnnnnnnnnnnnnnnnnnnnnnnnnnctgtggctgggggacattggcagcgtagtccgtgcgggggggctgctgggcggtggtcgtgggacctgcgagcgcgtccgtcgtgcagggtgggggcctgcgggaaggagatgtcggtaggagtgctggccggacggcctgggtgcgggcggatggtgagcaggcgggcccgcgtggtggccctggggtcgcgggtcgacggtgcgggtcctggccgggtgggtgtcggggtgg

SEQ ID NO: 298320 - DNA, 394 bp, Homo Sapiens
cgtatttgttcactcaagagaaagttataagcgtggattcagattatgtgagctgagatccatgtatagtcactgatgatatcatgcattggcatttcatagctattggtggtagtgacagagagtcttatgttgaaccatgggataccattgaatgtatgtgtgaattgtggtatacagctgatactatgatgatatcatgtcaggctctgtgtagtgcagcaactctgtgctaccccatatgtgaatcacagtgtcatcgttaccttagaggcactggcaagttccacgattgcgcatctcactcttatgtgctcatagcttgtgcagatagcttctgatattgtgggaagtcatgaatcattgtttagacattttatactcgggtcgtttg

SEQ ID NO: 298321 - DNA, 389 bp, Homo Sapiens
aagatatctgcgctaaaggggagcatatcatggaggacagaactcaggttcacagagatctgtctgttaaccatggtcataatctgaaggccatacaccgatatacctgaagcatctgagtccgagagtgccaatatacgtggcacatgataccgctcgcagtcaagtggcctagcccttgcacagctacactatggaagacgagatgttagcatggcatacatggcgcaagctgctttcaacagagcagccagtggaggacctgagcgacatgtggtgagccatattctggaaatgttggctgacagaatgtagttccaagctctgtaagagacctgacaagttaagctatgagacccggcacatactggtatcctatcgttgcagcg

SEQ ID NO: 298322 - DNA, 361 bp, Homo Sapiens
  misc_feature (188)..(280): n is a, c, g, or t
taaacaagggttagttcataaagggcccccaggttctgtttgggtctttgggtcccagggtctgtttcaacaccccgggggaacccaaatgctcccccctgaaaaaaggccccggtagttaaaacctgaggtttcaggcaaacagccaccaaggaccaccaccctcttgttaacagttggccaaatgnnnnnnnnnnnnnnnnnnnnnnnnnnnnnnnnnnnnnnnnnnnnnnnnnnnnnnnnnnnnnnnnnnnnnnnnnnnnnnnnnnnnnnnnnnnnnttggcccccccagttaaacggcttttaaaatcctgacttgcaaataagccaaaaaatgttgttttaatttgttccataccc

SEQ ID NO: 298323 - DNA, 413 bp, Homo Sapiens
acgccgggccatgcatcatatactctagaaatcgcttcaacgctataatccgccgcttactattaagcgtcgatggcgtacggtacacatggcatgaccgaggtaatcgtcccagcagttatagcgttacagatctgggagagcctaacctctactgcctactgctcattgagctagcagcgatgcttaatcagcgagcgcttaggagaattgggacgacacgagggaagactgtgcatctgacgggtgacgcaccagatatgatggcctgccctgactttccaccagtcgagatgtgatatcccgagactatgcccatacagatgagagcctctgtggacctgactgtcaagacggtaacatgtgctatataacacgcggtttcacaacagccgtgcatgctggtaccagtc

SEQ ID NO: 298324 - DNA, 361 bp, Homo Sapiens
ccaccatcaaggctttgaggaatgtagacacggctgacaccagggaatatacagctggcacagaggctgatgacatatagaactggctgcagaagcgcacggtcccggcgtgccacacaccctggctgacggcgcagatgcagagtccttgctggagttcaacgcggtgagatgtgcattggcttattaactgacgtggaggcggactctggcaagcagtttgtgcaggcagcataggacattgatgacgtaccatttgggatcactttcaacagtgacgcgatctccgaataccagatcatcgaagatggggctgtactatgtaagaagttgatgaatgccgcagcaactgtccgctggg

SEQ ID NO: 298325 - DNA, 407 bp, Homo Sapiens
tttttaaacacaattctgggaggccatcgttttggactaagctcatgcactaggccccaacagaccaaacctaaagttggttgtgctaagactttaaggaaacgcatgaatcctagaacagatcaggttttgtcttttcttctgcaaatctctgtaacaaacattcttgacagcatgggtatctaccccttgaggttcccattaaatcttttaaccaaattcatttcctcttgcctagagaccatcaagttccagatgatcatgcaacggttccagccagttccaggtgaagacaccacccctggtcatcaggaagctaccctgtctctactagacagaacagggcgagagttctgtgatccccaataggtagggactatgccccaagtcagcatgaagaacttacg

SEQ ID NO: 298326 - DNA, 402 bp, Homo Sapiens
attttttcaactaaattgattatattaaagtttgcatgacatagatgaaataaacttgtatatttataatatgtaatttactaatttagacataaataatactttaaaagcatactataagtaataatttttagaagtattgctcttttcccactcttaaatttcatgagggagttttggtccaattcccccttccatgcattcttgagttcataatggtggcacctcttcaggcagctggcctgttttcactacctgtcatctggaatcgagtttaagtagcttggggtgcaggactttgtgaaactgtgtatgatggaaatcttttccccaactacaaaaaaagaacccacttactacttatctccagtaaccacttctgttacttttttgagtgtcttt

SEQ ID NO: 298327 - DNA, 526 bp, Homo Sapiens
ctttttgctatctacagggaactatcatacagtggctccgtggtgtaattaacacacctgcctggtatcatatcaaccatagtactacacctcaagctatcacatccgaagacactatactttgtacgcctggttcacgattttctatcgcagagagctacccccatcaacctcattagcagagcacatgcatgagcacaccgcactgaatgtgcagagatgaatgcaactctcagtcaacacttggacctcacgttttccaccatattctgacatagatgtgatggatgcgttgatatgactgttcaacgagactgtcagagtagccaggtgacagactatcacactgtgtttgccacagcatcacaatggcactatctctgaactctacggcattctgtgtactcaatctagactgtcaataacccacacttggtgtgaccggaccctcacagttacctgcatgtgacaagtttagtgtcagcaacattaaccccttctttactgggtggcttatagccgcgcc

SEQ ID NO: 298328 - DNA, 668 bp, Homo Sapiens
  misc_feature (14)..(14): n is a, c, g, or t
  misc_feature (40)..(41): n is a, c, g, or t
  misc_feature (57)..(57): n is a, c, g, or t
  misc_feature (59)..(60): n is a, c, g, or t
  misc_feature (70)..(70): n is a, c, g, or t
tctctcttccaacncacctccagtctcccccaagcccccnnacaatgataacctganannctcccagctncaccgccgtggtggacgctgtagaactagcggatcccacggactgcaggaatattttactaggacgcagtggccgacatgactgcttcgctggtggcggctattaatgtttccccaccgccaaacctgaacatgagcagtctctacacgtacctcttctcggtgctcaggacgcccctgtgactggggctaaaatcacctcgcccagatgcacgttttcaagagcgactattctattttcgaaccgataggggcgccggcggtagttccgcccaggacgaggccccttcttcaaaacaaaccctttttactaccgtttacgcaagacgattcagctgcagcgcattttagacacacttgtttaagaataccgacctggagaaactcagagaaccttttgaagcaaccagagggcctatctattcatgagccatctagcaaaggtttcaaacatgaaaccgcaagcttgggcttacaaactgtgtccggggcaccacatttggacaaacatttaaacaaatctttaaaattagaacagaacaagaaaaaacttgccaacaaataccctacctcccctaactctgccacccctcccctct

SEQ ID NO: 298329 - DNA, 760 bp, Homo Sapiens
ggtaactgcgtctcccaagcgcaaggactgctgcaaagagccacaggctgttgaagacaactggctagagtattcgtgacggacactgacttggtcctctttgtgatgaataacgtgtaccgctttggcacagataagataatagccaatgtccactataacggcaagatcgcgcgtgtgtattctcctgccggtgtctggctttatggtggccatgacgacaagtatcactgatgggtccttaatgggggaagatggatttgtgctgtgctctgttggccataggtccgaaggtgagtattgccgggtgctagctagagcaatggccttgctctgctgtatactgcacacgcacgggcagccttgagtgctagatcattgatgacgtggaatctgctggcggagactgaatacatgagccataatatataaatctttgatcgccgaagatctatcactattgacgcgttcctttctgagcttcagactcctatgagttcctgggtgaatcgtacatccgatgacttgctgatattaggtccagatgatgttgtggaccccttgatgtaacggccagagttggtaaaaatcgaaaaacgtaccattgtgacaatttttggtatgtaactgtgtgtcttgggtggatcctgttgaaatgccccggaaccggtctggtacaattggatgggtgcatactctttaagcttggagacccgatgatcccaagtgatggattttaccattcacggagggcggtacc

SEQ ID NO: 298330 - DNA, 375 bp, Homo Sapiens
attattctcaagcgtcatctgcttacataccctgaggtcacttgtgggcctctacactcagctcatctaaggatctgtagattactcaggttatgctcatctatctcattcctatatcaaactgttaccctcaattgaatcaccagcttcaggataccaaagtgctaggatatctcttgatactcacaatactgtgtctgcattgtggcatgactgtactaagcagatactaccttatgatattactatattcttacataactgttaccctgtctattgtctactctatacagctctcctacctgatattacgtacttcccttcactcacgtgtcttcacataccagagatcctcatacaggttggcatgccgtt

SEQ ID NO: 298331 - DNA, 525 bp, Homo Sapiens
cgctgatagggtatttaaaaatgcccataacacacaactagactccttaaggtgataatatatattactgcaatatattataggctacttatgataagtatatccgtggattcaatatctacaaacaaaggaggactcaagggaagcagacgacccaatatctatcaataccattccatcatattagaatacatcaaggcgcgatatatcatgggcccattggtttatgggtgaggcttggcaacggccttagctacttgcttttggaaggtgaatagagcaccacgattccccctcaggagaggttgccgttaccaagagacactggaacctcaggtgtataacagatttgcgcacggaagaggttgctgcgagggctcataggctacattaaatatgttacaccttttcgtgccccgacccctaggacactctatgcgacagcatattgaatactgtgctcgcacacattgggacctgtcctagagtgtggcttgtggagaggggtaatgctctggatggggg

SEQ ID NO: 298332 - DNA, 581 bp, Homo Sapiens
  misc_feature (427)..(427): n is a, c, g, or t
cgcacacatgagggcgctggaggcatatactatacacactgtctgctctgtcatacccttcccagagcgtggaccaccaggctggccacctctccctgactttaacaggtaatggcaactaaggatctataggacccgctcatctgcagatacttgcattgagatggcgaaggcagagcgttccagatagtatggggtcccccatagaagcattaacccctggttattcccattgagcttcacacagccctgcacacaatggacacccaggaattggtgtcaacagaagggcgtgagcaggttgcacaggagctgggtaggctgaccatgggacctacactctctagcactccactcatatttactgacagaagcccagagagattaccttcacccagactgtggcccactgagacatactagacangctgtacttcaagcccagctgagtggattattgggcactgtgaggacaggcgtttcgacctaacagtgcccactctgtatagactcacactctattgagagattctgcagagccccatgacatttattcacaggagtccaccatacctgcgttt

SEQ ID NO: 298333 - DNA, 238 bp, Homo Sapiens
agttgatggagaacctgtgaagatgtgataaactgacacttgctctatagagcgaggtactcacaaggcgagttggggaatatgcatagctcgagacagagctgagctttcgcggaatagctctagcgcgcccgctctatatggtgagttgtgacccacatagagtccacgggcaaggtgaatgggatacattgttcgaatggcaaggtcccagtgtcgcggacttgcgattcggtcg

SEQ ID NO: 298334 - DNA, 328 bp, Homo Sapiens
gcacaagagatgatgtgctacgtctgagaatgtatgcgagtggcaacgaccttagagctcaaggctcactccactgctagatgatgtatctctctacggtcaggatcaaccgtagaacttacggcgtgactctgcagggtcaaactctccttgcttgtctcacactggaggctgcaatcgccacagggaattgcgtatccggttccacgacgcaacacaccacatgcggatcccacgttcattgcacactgttggcagattctcaaatccgaagtcctcctttgccatatggtacatgtgagttatacggcttgtctgacacatatcc

SEQ ID NO: 298335 - DNA, 693 bp, Homo Sapiens
  misc_feature (355)..(355): n is a, c, g, or t
gatacatgtcattgtacattgctcacagcccatgtgatgaatacgacctagagtgcaccctagcgtatactgtagacagtaggctgaaatgacttgccaatggagattgaacagcgtgatcagatgcactattgtggtgcagcatgacgatagcctgataggatgggcagacgtgttgcaatgcaatctattggaatgctgagtatgctctgagcaatcgttctgcgaacctagaactggtctaaaggatatagttatactataagtgcaaggaatagttcactcatgaagttcattgtgaactgtgactacgaggctgaggttatgactacaactaacatctcacaatagctgngatcactgacgaactcacaggccaaccgtcgtactatcctctggtaatgaaagcctgacatacctgtgtgtcagtgacactgatagcccatgtcacactgtttatttctgacgtgcagctacagttatgttatgacatctacaaagtccgatgcagtttcttcactgctacgatatacacatgatgcaatgtaactagttattgtcataggctagtatggcatggagctgatccagcgataatgtttagaccgtgtagaatgccttagagagattgcgctcagatgactagaagtgcactgctgtcaggcgatatcagtgcacatcatggttggcccg

SEQ ID NO: 298336 - DNA, 272 bp, Homo Sapiens
agctgatgtgctagttctgaacacatagacatgtgtccccgactcccgcgtgtaccgatcgccccaggcttcacactgtgtgtctctacgtcaggtccaatctgcacttacagagctctacggtacaggaacgagactctccggggctcgccaggacctaaccgtgctggcacatcggctgcatatgggatgctctctacttcctgtgcacgattctcactggtacaggctggcatagtccgtatctcggccctctatagcatggcgatgct

SEQ ID NO: 298337 - DNA, 295 bp, Homo Sapiens
aggtgatgtgcttcttctgcacacatagacatgtttccctgacccccgtgtgtataggatggccccaggctacatactgtatgtctatatgtcaggtccaatctgcacttacgtagctttacactacatgaactcactctacggtgaactttaggacctataccttgcagaggcacatcgatatgtcaagtggtgctgcactagaaatatttcacgtgctacgatattatacttgtgcattataggcactgtccagtatccgagcctctatagatggcgaaagctagctgcgttc

SEQ ID NO: 298338 - DNA, 393 bp, Homo Sapiens
gggctgtaggaattcggcacgagtttttgggatttgctcctagagcccggttcatagagggtgcttctgagttatttgtcgttcgtctccctcgttgttctgaatgttcagtttgtgtatgctggggaaatgagcacagtatgtaggtgatgtgtctggtgaatatttgtggtaatagaacatatggtaaacgtagtgtgacccgacaatctctgagcccctgtgagaaggctttataaaattgtgggagtattaaataggggggtttatagtttcataaagaaagctcatcgagagtaaggaccattgtgaatctgagtggttgtattacgtgtagagaactgtgaaatgtgtgtataaaatatttggaagagtggaaaagaggtggaaagt

SEQ ID NO: 298339 - DNA, 640 bp, Homo Sapiens
cgcaacgcctgacgctcagactactgactgacttttacgaagccgccttgtagacataaggcgcagccgatcgccctgcgtgacctgcacgtggattacacgctgggaccgagctacgtgctagtcagactggatatcagcctggcactgatctctgggatcaccgactgacgtgagcgacgacggcgtcagcgtaccgtcgtcctcacgacctctgaaccgacagacgccaacggctatacatgacagcatagctgtgacacgccggtatggagttaccagagtcgactgacacatctcgggatgacgtgacacatgcgtgcctagcgctagatgattcgccaagagcctgagcttagagatgcactgactagcgctgcaaacgcgttaatgaatgaacccatgagagagagttattacagtaacacacctagtaggccactgaagagattgcacatgagaaagcgacagagctgagcagacaggtgcctaaagacatggcagacaactaggtgcctattgatgttgcattcgaacgatgtgtgactcgaaacaagaacttgtgagccgtataggagcattgaagacatgcagactcgcttattacctggcatagtctagaacactgtactacgtgctg

SEQ ID NO: 298340 - DNA, 361 bp, Homo Sapiens
  misc_feature (196)..(250): n is a, c, g, or t
taataccttttttaaaaacttcctgtaatctttagtgtccactcaaatatatttatacactgtcctgtggtttcttttatattgtaatttaatgtttacagtgcttttatttttgggcagtgctcttgttcctctaactacattgtaagccactcaaaggccaaaatactgtgttacatatttttaacattctccnnnnnnnnnnnnnnnnnnnnnnnnnnnnnnnnnnnnnnnnnnnnnnnnnnnnnnnagcagtagatattgaagaataaaataacgtggcatgatccttaatgtccagcagtttacaaccaatctgtggtagaaaatacatgtggaaactttgatttatgtgacttgc

SEQ ID NO: 298341 - DNA, 336 bp, Homo Sapiens
atttacttacattttctttgccattgcattccatatagcactaccatatctcccattgcaaaagtccactctcacaaccccctagagccctggtactcaaagtgtggttcatgaagcattagcattgttttttagtgtctggatctgccccagaccaactgaaccattatttcagttttagttagatacccagtatgattcacatgcacattaaagcttagcatatatggcaggcctctaatgaggacttgtgtattcttaggccgtttatatgtatatgtggaagaagtttctgttcacttttctctatccttcccacttaaacagtctcctgtt

SEQ ID NO: 298342 - DNA, 154 bp, Homo Sapiens
  misc_feature (54)..(90): n is a, c, g, or t
caatccccactatacaaagctaggtttgtactatgtaatataggtggctattannnnnnnnnnnnnnnnnnnnnnnnnnnnnnnnnnnnnatgatttcaccaccgtgtgaattcacacagtggctgattatacctgtttgaaaaaaggccaggt

SEQ ID NO: 298343 - DNA, 103 bp, Homo Sapiens
gcgtggcagcatgcttatatgggggtgtactcccatgatgccctttggcctttatcccggttacccgaagccccctgggaacacaccgtttccctgtgtcttt

SEQ ID NO: 298344 - DNA, 352 bp, Homo Sapiens
  misc_feature (35)..(35): n is a, c, g, or t
  misc_feature (207)..(215): n is a, c, g, or t
tctcttacaaactgaaataatcatctcagctatanatttatttgaggacactacatttataggatgttcaggatctcattggaaaggaaaagcaacctctggggggttttgttaatttttgtttgggaataaaaatttcatttggggttggccttttggggaagagggggtctctggcctctcggaaacttaaaggcccccaatccnnnnnnnnntttacctttcttttttacacccccctccaagaaaaaatttggtgggggcccccccctggggtgttttctttggggagagaacaccgggggggcccttctttaaaaaggggggggaattatttttaaaaaggccgggt

SEQ ID NO: 298345 - DNA, 580 bp, Homo Sapiens
  misc_feature (138)..(138): n is a, c, g, or t
  misc_feature (270)..(282): n is a, c, g, or t
  misc_feature (370)..(379): n is a, c, g, or t
ggcacggggtccttgggtcggtaggcgcgctgagaattcctgagggccgtggccctcggctacatgcatgccatgcgcgcatactgccgtctggcgggcgctgtggctgcagcccaccgttctggggcccaagtccanccgttcgcaaaaggcgggaccccggctcattcaccggaaaatttgcttttacaccgggccaaagggggctggggccccccaccggccccaatttttgggcttgggaagccggtgataatggggttccgggannnnnnnnnnnnnagaaggggggggtgaaatccccccccaattcctccagccccggagtcggcccaaacctggtgtttacggggtgcccaattcttaatcnnnnnnnnnnaccccccgtttgggccgggggaccttttttttaaaaattttcccaaaaaacccttgtggttggtttggtacaaaacaccggaggtttctcaggccccttaataaaactaaaaaagggggtaaaacaaaatccgagggacaccttggggggctttttcacccttttgctgggggccccgttgcccccccaggagtggggggg

SEQ ID NO: 298346 - DNA, 164 bp, Homo Sapiens
  misc_feature (54)..(66): n is a, c, g, or t
  misc_feature (84)..(92): n is a, c, g, or t
tagcattgatgcacctattctttttttaaaaaggaagggtctccgaaaaccttnnnnnnnnnnnnnccccccctgatcctgggnnnnnnnnnggtttttaaatttggggggaacctttttgaaaaatttttgccccccttttttgttccaaaaaaaccaccctc

SEQ ID NO: 298347 - DNA, 348 bp, Homo Sapiens
  misc_feature (52)..(137): n is a, c, g, or t
cccacacccaccgcccaccatgtgtcagacttccaaagtgctgggtctacannnnnnnnnnnnnnnnnnnnnnnnnnnnnnnnnnnnnnnnnnnnnnnnnnnnnnnnnnnnnnnnnnnnnnnnnnnnnnnnnnnnnngttcattctcatggtgctatgaagaaatacccgagactgagtaatttgtaaaggaggtttaattgatgcacagttccacatggctgagaaggcctgaggaaacttataatcatggtggaaggcacctcttcacagggtggcaggagagagaatgagtggcaagcgggggaagccctttatctggccctgtgattcagatatcttccctggt

SEQ ID NO: 298348 - DNA, 391 bp, Homo Sapiens
ggcacgcgggataatactatatataacctcagaagagtttttctttgcaggagatttctgagcctcttacacacattagactatagcctataccccaacttggaaggcacatgtggccccaacacagcattacacccgctataataccctagaagtgccacttctaaacacattcgcattacttgcattaagagtgtcaatcacctgagctcaccataggctaataggaaacaaccggaacccaataattcaagccctggttattaccattttacacgggctctattttacccttctacacagcctcagaggactttgagtgttcctttacacaatttcgacaggatttaccggttaacaatttttgtgggcacaagctttcacggactct

SEQ ID NO: 298349 - DNA, 275 bp, Homo Sapiens
  misc_feature (184)..(185): n is a, c, g, or t
  misc_feature (191)..(192): n is a, c, g, or t
gtgcctagcccatggtgcctagccctaacctacatttataaactatcacttgctgctgtgtggagactatattgtgagattaacagcagggatacctgctaggaagcaattgctgcagattgcctgagacaaaatagttatcatggactatggggatggtgttggtggtggtgtaggtggtttnnaattannatatattttgaagataggtaaatggtgcaagattatgggtcagttttaaatgctgaagtaaatattttttgtaagacatttta

SEQ ID NO: 298350 - DNA, 483 bp, Homo Sapiens
ctgctttgctacactatctctttgcttgcagcgacggatatactcatcagcgcgtgtgaggactatctgtacctggatcgttctctgtgttttcgactcttgaaattaagatgcattctgcccatatggaggatggcgtcacgaagctctgatacgagaagaaggcctgtctcagtcacagtagagatgattagaaagcatgggcacaaatgatttatgcgcaattgattgggaagatatactcactgagctgatgagaggctcacatagacccagacccgttacccagaagacttatctcagtgatcgagagagaaatcctagaattatatagataacatgcatctaaacatctagatctgactggatatgaagctatagactcgacttcccatacaggtgagatgcaaccagcgtccacactcgacttagcgctcaagaactcgctgtctttttgccatgatagttgtgacagctcctgtc

SEQ ID NO: 298351 - DNA, 438 bp, Homo Sapiens
gctatccatatggcgggcataacatggtaccatgatcaacctgtttgtatggctcacatgcaggccatgggagcaagtgtaatgatggactataacacattgatgcagtacatacctgatgaatgcactgaagacagacattaatgatccttcatagaatgagaagattatgagattctcaagaattcagcatgatcaaacagcgagagccgctggatcgatcagtcttcaggattgaattagtgctccacagatgaccctaacgtgatctagttgcgacccacaagctaacctgctgccagtgccagtctatgtatgtgatggtgatcctgctggattgagtggcatctgagcttaccatgataacaaggtgttgactgtgatgatcactggcatgtatgatctagaaggtagatgcgatgtagggagtcgactctt

SEQ ID NO: 298352 - DNA, 437 bp, Homo Sapiens
  misc_feature (62)..(62): n is a, c, g, or t
agaagaccttatacagcttgccaggaaatactcctcccaaatcttgattcattctttgattntattaattgtaaattacaacttattttcatagttttcatgtttttaagataaagggccaaacaccttttccttattaaaattggaaccttcttttaagggaattcactttgtttcctttttggtaaccaatgggcaatttttggacacaattatattaataatgacatatacaaaggggcttgataacccaatctaaaattttccttctgcaggtccatccttaagtgattgtaaaggtttcaccttttcaattaatggtaatgggttaattgaaccattattttaattgaaaccaggattaattaagtaggatccttcaccttgacttattaatatttccatttttaatcttgaatgtttttgtctcccaggcc

SEQ ID NO: 298353 - DNA, 407 bp, Homo Sapiens
gtgggagctcttgcttgaggccctggcctggctccagaagcactgacatgtggcatgcgtaggagacgtgacctgtcactgcacgatgacacagctgatggacactgtccactgaacatgcctttgcctacaagacattacagtggctttgatggactgtccacttgccctgagatcccaaacataagccctgccttgctaggcactgattaatgcatgggtggaccatccaagactgcaccgaagggcaaggtggaggctcatatgagagctatattaactagaggacagagtgctactcttactaatgtggacagatgcctgcaccatagatatgtcatcttgagcagagacagtgacacctatatgtgcttacccacatgtccactgcacactgttatggcctg

SEQ ID NO: 298354 - DNA, 730 bp, Homo Sapiens
  misc_feature (682)..(682): n is a, c, g, or t
acgccaccagggaggcgcggtccttctccgtatagtggagctggtattgatgctgctgctccccacattaattcttggcatcttcttacatctgcccatgaactctcgcaagggcctgctggctggagatgctctacgactctgcccttgattggcgcgtacgagacttacgaccatacttgagacactgtcagcctgcgcagccacctcaagagcacagactctgatggccatattctctaatccaaataggatgcttccacggggaaatgtgcctctacacactgaagattatgacacgtttcacatgagtcaagcgagacccgcaacatgtctgagacccgaccaactacagttgatatacatgatacacctagaggaggcgaattatctcgactagatagcacaagtttcgtctctctctgcattgaaagacgatatgcgacgcctataagacctttgagagaatatacgcgacgagatgagatacatcaagaacttagaagagtagatgcgtgctgcctacctgataacaaacacatctgtactatacttgaggatcttacgaatgttgctgttccttgcactagatacctgcgaggagttctacctgctgagcttcttctagccaacaaattgattgtgtatcaacgatggatattctctcacagcgtgtccacgngaccgcgtagtctattgtccatattttttcggggggggacgaggtggc

SEQ ID NO: 298355 - DNA, 730 bp, Homo Sapiens
ggcccaccagcgctgccgcggcccttttccgttagcgcagctgctgttgttcctgctaggtcccacattggtgctaggcatcttcttccatctgcccattaactctagcaagcgcctgcgtgaggagattcacaaggacctgctactagactgacgcgtacgagatctccaaccagcctgggggctgctggcggtcggcgcagacacctcaagatcacagattctgatcgccatattctctactccacagaggatgcatacactgggagatctgcctctacaactgatgactatgacatatgcgaagtgtgtgtcgagagcaccggaacagggcggagaccctaccaacgctagatgctagacatgaagcatgtcgtgtaggcgagtaatcacgtataagaccagtgacaatatatacgcgacgatgtcgcctacatgatgaacagagaagaggagatgcactggaccaacgagtcacagacactcggctgctatactgaggatctattaatagtgctgtctcattggaatagcatcctgggaggagtgctacctgcgatgcttctgaacgccacaaacatgttgggcactgaatgaaagctaatgttctgcgagcttgtacgcgagacagagtacataggtggcacttgactagaacaaagaagactctcacaagacatctttgtacgccggcgttttattggtcctatctcttttgtgtgggaggaca

SEQ ID NO: 298356 - DNA, 742 bp, Homo Sapiens
gagaatcacgggcttcatcagtgaactgcactaatgaggactatatctgctatacactgctgaatactctgaaaatccatcctggcggcgctaggtgaacagctcatctacaccagaggtgcctacatagaaagcgcctcagactcctacgcaacttatgaaggctgtagggtgccaaagactcatgatgtcctgctgctgcttgatgagctgtgtgctggggaagccacatgctctgcggcgttcagaggctcatgcgcagccaacaagtaccacacatgaggtgcccttgctcctataatacctcttctgtgccctctattgacaaagcttataccctctctacatacatctctagcctctggtgcgctcaacattagtgagtgcagagctgcgatatatactgcatgtgctgcagagtgcacactgtacctgcactggagagaaccatacctgtgaagtgccacaaatagcacctgtatcattcagggggcctgtaagaaatgtcagtgcactcacatatggacagcttgagaagagtactctgtcatggacactacgcgtggagctacggacactcagacatgatgtagtcgttgctcacaccccccaataacatgtctactattatgctctattatgtctctgttcaacatgtgagcatatggtgctaccacagacacaagatgcatcttatatgatagagacaggtatattcccactacctgtggatagagtttcc

SEQ ID NO: 298357 - DNA, 517 bp, Homo Sapiens
cagcagtgatccgtctcgtgtcttgtagagtgatctctgacggagcctgtctgtgcatagtgcatctgcatttatctcacagtgtgctgcagagaccaacatcctctgacatgtgaccccattcagatattagacattggggttgcctgagcctgtacagagatgttcccacatacatctctacatgtattctcgcgaatcttactcttttgctgagactatagggaccatgtgactctatagtaatggggagatgatgtccactctcggaataccgtgagacacatcaggaagcttcttcacactattgcctacctagagagaagagtgactctacacacctcctacttcgggccctcaagaccatagtcacgtacgtgagagaactccggatatcgatttgctattatccccaaccatgttatccagactctctcttacatgactataacattttgctggctccgagaactctcgcacacacaccgcagtgtttctacgcctgtttctgacaggg

SEQ ID NO: 298358 - DNA, 707 bp, Homo Sapiens
gttggattaataagaaagagagtatgccacatagcatatcatacctcttcagtgatgaatgacacaacctactgaataatgggatctagtagaccagcgatgctttgtatattcaaaagtgaagaagacgggagcaggtctatgaaactttgcatagcacagatacaggcgtctacgtagaattccatactatgttatatatgggagcactctgatgactgatgtgatatatacatgcgtacaagtgatgatgcaatctcgctggatatagattgtctagctatcgccggaaaggttggaggtgagaaactctctatattgtgtttttctttatatatagaaagtcgcatttcttattcttgacacatgcactctactgcagattatatcatactttctgccagtatctatctctgatatcatatatgcaccatactatagagaataaatattacagatacgccctgcatatgaaatacgcgctgactgttgatttcgcgaatgtacatgtgtttacgaatgcctgtggtgagcatatagatagtttgactgtgaggagtgacagatggctgaagcgtgtagtataatgaagctactgcgtcagacacagggactatatgagagcccttgttgatgcactgtgacatgagctgtgtattgcagcaacagattcctagctctggtgttattggctcgagagatgtcag

SEQ ID NO: 298359 - DNA, 421 bp, Homo Sapiens
tttcggcacgagaccataagggcgtcatacagcttgattatgtcccgaacctggatatttactcattgatgcctgacagttaatctactgctagatgaagcaatatcgctgctatgcgtgtgttgcctaatagcatgtcacaatgctcactagaacggtgattgactacgatagcttgtgtgcatagcacccacatctatgtaacaacgcttagtaagcctaagtggatgctggaagtgactggcactgtatcgtagcatcagtatgtagacctcgcgcaacgatgcatattattttagaagtgatgatagattgagctactgaccgttcttcattgaggatagatgattgtatgccatagactacatagacatgtcggagtcagcacgtactcttgtatacaggcttgtagttaccgtgc

SEQ ID NO: 298360 - DNA, 434 bp, Homo Sapiens
aaacaacatatgatccaggtctttgactgcacttccccagggcttgagtacatctcgggatattatagaaagtgctacttaaacaccagttgaaatggaagagcatagtacttgataaatccagaatgttaggggatttttgtggcaattttgaggaaattattaaaatatcatttgattattaaagagtaaaactcacaaaatacttggcccacacacttcctgagcccttgttaacctgactgccttgttcctcctggctcaggaggaaatatatctacttttcatattatgacaatgtagctggcttttccttagcacaagtggaaggggctataatgttacacatgatatgtgacttggtaataggtgtcttctctccaccagcattcaatatgtattctgaactttctctttttaagattaggtctgtt

SEQ ID NO: 298361 - DNA, 107 bp, Homo Sapiens
ttaatataaaggcagctgaatattgtacacaggtttttcatatggcctgatttgagtgcatatggttaatagggtgtcaggttgtttgccaatttatatcttggctg

SEQ ID NO: 298362 - DNA, 374 bp, Homo Sapiens
ctgctacagagagtctctgctggcgattgtgggatgctcattacttgcctccttgtgccgctgttggtctgccatatcggacagtgcgggctgcctgcccttgccctgtgcgctcttcatgtctgcctatggccttgttctccttctagagctctgcattccctggtgctgctctgtaccgtgtattggttgttcctcctgtctgggcttcttccgtgtcctcggcctcgccatgcgagttgactgttgaggcttcctatcctcctgaacgattggcggatcttgacacatttatgcgctattgtactcgatttggggaccatgatcatagttatcagctataacttcgccttctttcagtctacgttatggct

SEQ ID NO: 298363 - DNA, 424 bp, Homo Sapiens
cagacacaatggctccttttataatgttttgtaatatgtagaaatgagattactgtatttccaaaaatcagtataagaaatcaatttaatttgcaagtatgaaggaagtgatttagacaacatttttggaagattcagtgcttgttaacacccatgtaaaagattcttgggattcgtgaaaaattctaggctcaggtttccaaccacatgaacactcaatgggaacattgtaggattatgaaggattgttatatggtgtgttggaaaataacttttagcatttttggttggcccttgcccactgcctctactgtctcctaaagataactttgccctccaggatttccaaagtactccagttgagaactactggcttaatgctagtcaagattcatccttgggatcagagagagggcctgcccgc

SEQ ID NO: 298364 - DNA, 413 bp, Homo Sapiens
aacagatcctctatcaagcgcgcacaactgtgtctagagctcacagctcttgtatagagctcgaggacagtacactgacgctactactatggacgtagatgcagcactgcctgggactatcgacttaccgagggttatgctgacacaagcaaggccaatggcctcacatgtgcagtcacctggactctatgttgctgggcttacagctacatcaggatatgctgtgccggcaccagtctggccatatctgagaaagtaaggggattgagatacgttgcccagtacattgctgactgaacccgatgggagatgactgtgaacacttgcggataccacgctgagagctatttgggatacgaagctcatattatcatattcttttacgagatatagatgatgtctgctcgggcttg

SEQ ID NO: 298365 - DNA, 352 bp, Homo Sapiens
agcttgcagaccagatagagtctgtaccatcataaacgtcactacagatatacctactgccatacacacacagaaggctatacagaaacacctaaagacactgacagtgacagtgcagtgccatatggccacatgtgcatgtgaacttggcagacatgagtttttgcagccaagtgatccgtacaggcccctaattagactgtggtgggttattgatgctatgacaagtacatttggttatagaggccctgtgcagatgagttactgactatggccatgccgatgccttgactatagctgacaaggaagggctattggcacattcaggtttactttgtggggtctgcttggg

SEQ ID NO: 298366 - DNA, 595 bp, Homo Sapiens
  misc_feature (439)..(481): n is a, c, g, or t
tggaaccgtttcgggcactgttgttgcggattaagcctgatctagttgacaacctcccaaatgctcccttacttcttgtcagatcccatgggtttgaagccagttttgagcctggctgtgattgttgtaatcctgtgcacgaatctggaggaaatgggttttgacatggcctatgttgtcctttgccagtttctggttcttaaggattaagacctcttccgtgaatggctgttagacacttgtggcgcctacgcctagcactcccgggacttcttttgatgccttctactgtggtgcgacccccttttttgatgctctcttggtagctctctattcccatgccttatcctagttttgagcccagttgggacttcttccctgtcctctactaaggcagatttctttttgtcgtacttaccctccacctacttctcgggtnnnnnnnnnnnnnnnnnnnnnnnnnnnnnnnnnnnnnnnnnnngattctctcttttgcctgccttccccgctcttttatcctttccctttccctggtgacagtttccatcttttcctgattgttttccgggccccttcttttactcctcctttcttt

SEQ ID NO: 298367 - DNA, 414 bp, Homo Sapiens
ccgaggcccagaggtcgcgcgacacaggcagctatgacctagctgctagcctctaccgctggcagcgcagggagtaggctgtgctgcagcggcggacacactaccactatggcggaggagcaacatcccggcgacatgcctacactgagcactaacctagggcggtataccgctcggagtccgagcctcatggagccatggtggggccgacacagggggcagcgcctgcagctggaagcggagcccataccgactgcggaaccgaccttgcaggcaccgaaaggcgcagagcccagtcggcaggggcaaatagtgacgccagtatgaacgatgcggatgaaagccattcatcggcccaggacactctgcatcagctacggcacacagggatgtgcagacagtttataggcgccc

SEQ ID NO: 298368 - DNA, 696 bp, Homo Sapiens
cggcacgaagtatttccgatctagtcgcgcaaatttctcacatcgctcttcaagcggattgtcaggggcatttttcacttactcgggataccccacagtgacttattactctctaattatattatttatcaccatgctcaaaatacaatgccaagaaccatttttgcttaacatatttcatttatttataccttgtcacccagtttcactctaatcttttcttaagttatacaccttaccatcgcttattttcattaattaagaaaagaaccttattttttcccctaacgacactgaatactttattacaatatatcaattttttaatacaatcttcgccctctcttataaatattaataaaattcttgttacttattttttcccttttgccaaatatataacataagttttcttacatattagaatacaatcttaacttgacccttctgtacccatatatatacatccatctaggatgttctctctcagttccactcttttcttctaacttatattaactgtgtgaatacctgttcgacgggccgtacgtccactaacttaagtttatcccccaaaccctttccctttccgttatactcactataacactataatctgatatttgtcacatatttcaactactcacaatgttacttttaacatacttggatgactaactttaattgccacagatt

SEQ ID NO: 298369 - DNA, 660 bp, Homo Sapiens
tacatggcaaggccacattgcggcagtaaggtggctgtgcaggggccaggcacagtgctgaccgtgagagccatgatggcactcatgcctgtgtggatactgcgcccatggccttggtcagaatacagtgcacagaacgagctgagaatggcatcaactaccgtatgaagctgaattccgccatgctccataagcttactgcgctcagcaagagaaagaggtgcacaaccacacccaccccaactacagcgtattgagaactgagcagagagccttcccatgacagagacagacaacccaatggcagggcctgaatgagtcatacactcctgtgcacaagctgactgacgctgaatctacatatactgaggaaagcagttgaaggtaggcgcatactgaagaggacacgtggtgggttatgcataacctatgtcgtagacaacctaggatacactatgagtctggaactggagctggtccttcacaatgtcgatagtaccggaagcacactctggctgtgaactggcgctggccatgctttatcgatcatacaggacccggcaaactggccaaagatactgcattttatttccgtttgaaccatgcaggagctgttgatgatgcaatgagggcataccgggatccggagccccggtggtc

SEQ ID NO: 298370 - DNA, 287 bp, Homo Sapiens
accatgcttggagcagagggtagaagactattacagctactgcaatcaattgaactacaatcgtaatgccgacggtcctgcgtcacttgaactaccgagaaagtgactgagggaaattatcaatgaggtcatctgccagagacagtcagtgagtcagtacggatgagagactgtcaagaagacagaggaggagaatgacagactgtcgagccaaacccgccaacgagcaccgacagatgaaggtatacaccggaagtgaacctgagagtgaggatgatggtggccgc

SEQ ID NO: 298371 - DNA, 536 bp, Homo Sapiens
  misc_feature (96)..(96): n is a, c, g, or t
ggcacgaggttgactgtgactgataccttacgcaggagagactgatccagatctgtcactacaagggcatcaccgttacggcctacagctccttgngctctacggattgaccttgggccaagccagactacccttccatgctggaggatcctaggattaaggagatagctgcagagcacagaagaaccgcagaccaggatctgatacgatgcatatccagaggaaggatgcatcgaagctggaaccagccgcatgtgaacatgaggcttgacttatgaggtacgaatcgactctagttacaagctgagcctgtacggtgatcttattgggattctcatcataatgagagaattcgtagaatcggaactctttctaagatctatatcatagcgtataaccgactgctgtacaataggtgttatctatgtaatgatgattccaactgtgaagagcatgtccttcgcgcattatactgacttcaatggtgagcactaatgattacatcacaatacgtattttactcttaactgtgtatg

SEQ ID NO: 298372 - DNA, 201 bp, Homo Sapiens
accggggaaagtccaacggccctaaaggaaagtggggaattatatttaaaaacctcttttccccggcactttttcaaaaatttttcgggttgaaaaatttaaatgggcccgaattccgggggggttatttaaattaacccgatttccgggggggttttaaaacccggtaaccccccttaaaaaattaacctttttccaatt

SEQ ID NO: 298373 - DNA, 328 bp, Homo Sapiens
aagaagcgcacgcagatgttaatacccactctaaattctgtgtctagatcaccatgctgactgcacagacgttgatgagagctgatagaggtgtacgaatatggagcgccatgaatactgaaattgcgatcagatgttgcagtaccgattccatcagagcatccggatctaatcaccggccatgcatgtggcgcccccgctgagacatacatacgctctggtacttatagccgaacactactcttaccctatactcctggctcagatgtctctgccgtgatagacgctgttgaagatcgcatctgctttcactacaggggaccgagtc

SEQ ID NO: 298374 - DNA, 384 bp, Homo Sapiens
gatgcttgtggatattgtgctgttacttgtcagtgcagtgttataagctgacgcaggcttatgcggaggagaatgttatgatgttacttatactagcattaggtcttctatagggtgatagactgtaccaattgggctgtgaggagtatacttatatgctagggatttgcttaggtactgggtgtagaactagagcgctatcttaagtggagagtgcttttacgcctactatggctgttacaactactactctctctacgacgcactttcctagggatcgagctgatcctctttggactaaccgtagggttcacaaggcgatttagaggggtctgtggtgacctatatagcagcactacaatgctatctggcacgcagctatcc

SEQ ID NO: 298375 - DNA, 264 bp, Homo Sapiens
atgatgaggagatcattatataccataatgtgcgctactattgcataatatgagcaatagcccggcacttatatctaagacctctctgatgcactccattactttttatgaggtatcatgccacgagacggcctagagttctaacagaccttagcagctttagagccattacaacgtgccaggaactgctttgagtgaccaatagcagcccatattacttggacgtggtggacctttacacatgctcagagaccctcagcggcc

SEQ ID NO: 298376 - DNA, 767 bp, Homo Sapiens
  misc_feature (427)..(427): n is a, c, g, or t
  misc_feature (441)..(441): n is a, c, g, or t
  misc_feature (527)..(527): n is a, c, g, or t
  misc_feature (529)..(529): n is a, c, g, or t
  misc_feature (542)..(543): n is a, c, g, or t
  misc_feature (562)..(562): n is a, c, g, or t
  misc_feature (576)..(576): n is a, c, g, or t
  misc_feature (578)..(578): n is a, c, g, or t
  misc_feature (581)..(581): n is a, c, g, or t
  misc_feature (583)..(584): n is a, c, g, or t
  misc_feature (621)..(621): n is a, c, g, or t
  misc_feature (633)..(633): n is a, c, g, or t
  misc_feature (667)..(667): n is a, c, g, or t
  misc_feature (682)..(682): n is a, c, g, or t
ccgggctgcaggaattcggcacgagaattttgttacttagaagagtatatattattgatatatggatgttacctctgagtagcagtaagggcagcaattagaatagtgatgtttctctttttattatagaaacttttttggtaatagttttattgatatataattcacataacatataattcacctaacatataattcacccacttaaagggtactatttagtggtttagcatatttgcagagttgtgcaaacatcatcacaatcagtattagaacatttttatcaccccctaaagaaaccccataccctttagccatccctctgtaattctcccaaagctcccagttctaggcaaccagtaatctacttagtgtctgtatagaattgcctgttgtgaattctggaatcatattatgcatgcctttngtgatgagcttctnttacatagcataatgtcttcaaggttcatccaacctgtagcgtgtatcaacccttcacttcttttatgcgcaaataatattccttnanatggatataccanncattattatccattcatcnagtgatggacattngngtngnnttcactttgggctctatgcatatgctgtatgacattngatacagatttngttgaaatacgtttcattatctggtatatactangagtggatggctggncatatagtactctgatctacctttgagaactgcagactgcttcagagtgctgaccagtactcaccacagtggtggggtcttgttt

SEQ ID NO: 298377 - DNA, 340 bp, Homo Sapiens
atctacctgagaaggtaacatgtaggcagagatctgaatcgtgaggagtcagcctttcagagtaagtggagtaggcacttccaagagaaaagcatattcctggctatttgcctatcaatgtcatcttgaacaagggttagcaatctcctacctgtaccacagatgctatgtgccacctccatgctacctttgccaccaagagattcaatgtgatgcatgatttgaaggttcctcatcctgataccctgtggaaagtaaaatcagtgacaaatgcagatcattatctcaggtagagtctgctgatgatacttgcttgtcagtacatgagtatccaccctgt

SEQ ID NO: 298378 - DNA, 404 bp, Homo Sapiens
attcacaaaaagtgctgagtcagatataaatatagagtatgagatggcactgtgatgactgacttgcacggattatcttgccttgacgtaattcctactagcacagaagcactagttgttgaaatcgctagctgtgcctcttcagcgaagcacactatctggtcctggcctagccggcatttctgcaacaggcctgagaaatctgaaatgacagtctcaagttgttcctacgacatacgccgcttatgcttcacatggatacagtgctcttgctacatcgtatgcagagctacaccctgaacttggcacatatccatatggtgaacttgtcatcagataatgcgcgacggacataagtctgatccaccaccaagctgctggcatagcctcctgacggcatatgt

SEQ ID NO: 298379 - DNA, 431 bp, Homo Sapiens
  misc_feature (104)..(235): n is a, c, g, or t
  misc_feature (414)..(414): n is a, c, g, or t
ccctaaatgcataaggactaagacagatagaaacaaagaaatataggaatcatagatttttaccttattttaccttatgacactgttgaccaacagccaaagtnnnnnnnnnnnnnnnnnnnnnnnnnnnnnnnnnnnnnnnnnnnnnnnnnnnnnnnnnnnnnnnnnnnnnnnnnnnnnnnnnnnnnnnnnnnnnnnnnnnnnnnnnnnnnnnnnnnnnnnnnnnnnnnnnnnntctaccactgggcaagccacacagccacgtcagccctggacaagttattgatagtgtatgatagaactaaggtgacggttccctttgggacacactctgatcaccagtgaccaccagtcagcagatgggctcaagccgcatgaagatgagccgttcccagaggcattttccaatccaanaagacacgccgctttct

SEQ ID NO: 298380 - DNA, 340 bp, Homo Sapiens
actagtctcgaggattattattttcattgtttagattcttgtccattctttattaattgaagcacagcgaaatgcggctgagagattaaagagatttatgtgattgagacagggtgttggctttacaccaacgaattggatgaacatgtggatacgcttttgatcgtgatcacctttctgttattctcatggaaggctgtgcttttccttctaggcgaatcgggtgtacttatcgtcagacttgcataattctctacataagctgagacactatccatcagctatcagttgctcttctagggtcttggactagtgtgtgacaggctcagctggtgcacgc

SEQ ID NO: 298381 - DNA, 220 bp, Homo Sapiens
ggccattgtccgaacgagaaatgcaccctcgaaggagaggcctatagagcggacacccacgtacataaggccgactatgagcagagaatccctgcagctgaaagagaagaagcactaccctaggtgaaggaacgccttccacttgtgccgagagaagcccatacgcagctacataatcgtggacactagcatagaactctgtgccgagctggactacgcc

SEQ ID NO: 298382 - DNA, 625 bp, Homo Sapiens
atcagactctggctacctaaacttaaggaccacatattactcttcttgaaattcttgggctttaatacagtgcttcatgcatagtgaggatgatataactatttgctgaaagtaatatatgagctctatacaaacatacagtggtttttttagctgctgtggctttttaagctaggttcacattctcttaattacacgtgttatttcaattgcattttagatatcctatatgaatttctaaattttaattacttattgttgcaagattaatagggatggtagtatcttaaggtgaactgttttttacacaaaccccactttagaaacagattccttttggctctcggaaggtgcttgttgaggtacctaatggagcagtggtaataattaacatttccaatcatcctaaattagaaccaactcaaaagagagaaagtgaactttaaaaagatgttttccagagaatcatctggtaagccatttctggaaaataatctgtgctaatgaggaaaaaaacaagtgaagtgtgggatgtgggctttgctattttcggctctttggtttgctttcaacaaggtgtctctaaaccttgctgtgtttgtacattctgtctgagtctcttctg

SEQ ID NO: 298383 - DNA, 203 bp, Homo Sapiens
ggggccggccccccccagggacgccctacaaaactgtggccaggaaatggccgggataaaggatgccccagggctggacgtgtgtaggagttagcgggtttgaaattggtaaaataataataattattaaaggaccgcttttggatggatgttgaacagggtcccgggttttaaagcttgatataaaaccgaattccaaagtg

SEQ ID NO: 298384 - DNA, 369 bp, Homo Sapiens
ctcacttcgaggagagtcaggatgtttgcgcaaactatactcaggcgaaggatgacttcctcagcatgtaaagacatgaatatgcaagaaggcatcctgattactgttgcgcgctgctgctcagacttgcctagacatatccaccctagagaaacgctgtgccgctgcaaatcctgatgaatgctataccgaagcgtacgatgaatatgagcagctcggacagagcaaattccagaatgcgctattagtgcgctgcaccaagaacgtaccacaagcgtcaactccaaccgtacaggtctgaagagacctaggtacaaggggcagcacaatgatgtaacatgctgaggcagtgactgccctgtgctgatg

SEQ ID NO: 298385 - DNA, 536 bp, Homo Sapiens
ggctggcctgcccagccctgtcaggacattaagatgagagccagttatttctctacagctacgcctgcgagatgaacagcattatgcctgagctctgctgtacctccagatcacttcataatgggcaataacacgtgcacacgctgtcttataccagaccaagcccatgcctcccgtcatacagctcaggacttacgtgcgcacactttcttgtctagacaacctgctagccccaggcattcaaatggccgctgactagctaatgcttattactggtgcagacatgttggttgcatactcagtctacaatccaccctgaacattgtgctatcatgcaatgggttactagacgacactccgtatcatctagatacaccgtttcagaaatttggacacaagtcactagtaggacctaactaatggccacatcagggccgcgctataaagtgcaatctctcaagacccaaatagcaggtgcatcaactcgtcatcaatgcgttggattgcatacccagtgatatttacactctggtttc

SEQ ID NO: 298386 - DNA, 190 bp, Homo Sapiens
  misc_feature (51)..(51): n is a, c, g, or t
accaaaagcagaagggaagctctagacaaaaatattttgcttacaaatggnacatatccaagcttttgtgaaccttggggaagaaaccaagaatatgaagccctaatggaagtgtccagaaatgggtcgcttgccgacaagggaaccacaacccgggccacgagagggccgactatccacctccctctgc

SEQ ID NO: 298387 - DNA, 546 bp, Homo Sapiens
ctagactggagcctatcgtgtgttctttaaaaacagccgctcctatgcattccactataaagacgcaggactgacatacactccagtaatccgaactcactgaggattatacatatacttcatattatcactcgaccttctggaagacccttacctctgatcgagcgagcgcggtatataacgagaacccccttcgagaggatgagttacataattcgccggcgagcgtactttatttgacctttcgtggcatgaagacgtacacctagtacgaagggtccacgcaggtacatatttcgggttcaaacccacctgtattatttcacgaccgcaggccgatgttcatgggctttgagagactcggtttacctgaagctccatagactttatgccttgaactgtacgtgccatgggtgcggctgtgctcacttgctatcaccgggagcacgtctgatctcaactcataggacgcatgcaagttttgcacaatgcgcgttaccactattgtctctatatgtgctctagcagggttatttccggagcggt

SEQ ID NO: 298388 - DNA, 604 bp, Homo Sapiens
agatcgttttgtctgttctagagggaacgattgattctgcacaggcgcgatttgctattaagaatatactccagttaggtgatgggggctagctccctatacatgggaaatcattcaattatttcaatcataaagattcacgctatgtcattcggggacatggccatggattgcttcatattccgaagcatgtaatactcattgccttttttgtagacgtcacaatgaactcaatgtactattggatggcgaccttaaatgctctcaacattaccagaggcaacgtttgatgcttattctacataagatatacactattacatacttcttgacaatgacacgtgtataattgatgcttgacgctcatggtccgcaaattataatctgaagaaataacttagatcgaaccactgtcctcacactagtgcgtgcacatccaaccgaattaacgttctactatatttaaacacaagttgagctctccagtgttacatcttttctcagcaatcaagtatctcaagtcttatcgatttactgatacctcgatgaccaacaagctattctggtaactaccactgcgttacgcaagtgtgaacaacaattt

SEQ ID NO: 298389 - DNA, 366 bp, Homo Sapiens
cgagcgatttaccggcgtgattgtgtgctcttccccttgcccctttctcctttctgccctttgtcgctccccctgctctctcctacctctttcctgccttctcctctgttactcgctcacctccctctcccatcctatcctgtgctcgctcctattcctttcctcttctacactgttcttcagacttcgtccacttccccttcgcatcttaccgctccgtccctgatgtgcctcttgtccccttattcctcttgactcatgcctcctactcctcatccacactcgccatttcacacgcttctgctttccatgctctcacactgtcctgtggcttcatacttcctggtcatctcttttctcactgtt

SEQ ID NO: 298390 - DNA, 351 bp, Homo Sapiens
agcgcctggggtgtacgaggcagtcctcagaaccaggacctataagtgtgctagcgagctatggcgacgaaggccgagtgcgtgctgaagggcgagcgtccagagcagggaatcttcaatttggagcagaatgaaagtcttggaccagagaaggtgtggggatgcattaaaggactgactggaggcccgcctggattacatgctcatgagggccgagataatacagccagatgtaccagtgcaggtcctgaatgtaaacctctatgcagcaaggtgggccacaggatgtattggcatgttggagacttgggctatgagactgctgacgatggtgtggccgatgtgtctttg

SEQ ID NO: 298391 - DNA, 391 bp, Homo Sapiens
cgagtcatctaccaatggtttatcgccaggttcctcacgaacgtgcggagcgtgacgggcgaggggtcggccatctttctggccgtgtcctgtttatcatgacgtggcactacgcaccggaccacggacccggctcgctgcctggtacgcgcccttccgagcgcgccgggcgcgtggcatcgaccacatggtttctcactatgccttctgccttattgtgtttctccctcgacagtatataccttggtcttctctgctattcttgttttgtctctgatccacttcttgcttctgctcatctttctatttatcctgactttaccttgacttggcttctcacgctattttcctctcttctctcttttcgtctttttgctttctacactagtcc

SEQ ID NO: 298392 - DNA, 345 bp, Homo Sapiens
cagacttgaaccgcataggaagtcatactgtgccagaggcgctgtcaagaagaacgttgcgctttttgccctcgagaagctcctgcatttaggttctatctttccaggcgaaacacatgggtatactttacatacagccatcttcaaatgaaccttagaatgaactcgcagtggagttcgagtaaagataatgactgatgtgctagacccagtcagaattgttggtgctagaggtccgcatgacctaattgagactctacatatagcttagatttcctatacgcttacagtatttgctagatcacatggagcactgacactgatatattccgactcggtcatctg

SEQ ID NO: 298393 - DNA, 343 bp, Homo Sapiens
ggtcaagagggcgaggggctgttagatgaagactcctaggttgccaaaggcttcagaagtcaagacatgtacaaacacaacgcaaccgagaccagttccaaacggcagcgtctgaacctgtcacggaccccagtcgataccatgcatgctggcggccttctatccttaaccaacctaagatgctaaatactactccagggaactagagttgttactcctgtaacaactgaaataacatgacacgatacacagaatatatatgaccatgtacagacggactgtgcaactaatgaggaagctgacagagaggttaacgaagcgacctgatgaccatgtctgcttg

SEQ ID NO: 298394 - DNA, 449 bp, Homo Sapiens
atcctatgtttgaaccatgcccaaatgtggtcttgctgcggatgcattctgctgtaatctgtgggtcacatgttcactcctgggagtatggaccggttgcgaattttatggacgacatctggatagtacctcagtcctgcctagcgttatgtcatcgcgcctgatgctacgcgagacactgctgaattctgctggatggaacgatacctgtgaccgttgcatataatttgtggcactatctgagatgaccatgaacctctgccggtgctataagcgcaatgcaggcttttatcacaagcatgctgtcagtgtgacctttaaggtatgccccctgactaacccactatctgtgaagatccatgccagtagactatgggagataacctgttacacagagtgcttacgatgtgagctgagacaatgcgcttgcgcactatgctctaggacaa

SEQ ID NO: 298395 - DNA, 655 bp, Homo Sapiens
  misc_feature (347)..(347): n is a, c, g, or t
  misc_feature (495)..(495): n is a, c, g, or t
gtcgcttcatacggggctactgcgtgagacgagacagtcggttcgactagacacatcgacgattacagtacgaatacagcttcaaggggccgtacctgatgcagagcgacagcaccgtgcccttcagggcctacacctggaatgctattgaaagagcggatcaggtctgagtagcacgcatcgataacaagccagagaggctcattcgtggcaaatactcgggcttatggaactgggaagttgaagtgacatttggagtgactggaagatgtctaattggaggtcagggcctggcgatttggtatgcgtgatgcatatgactatgatctgagggcagtggtgtaganagtagtactggtatattaatgataggccacaatggacagagcgattgtgaccatgagaattacgggactggtcaagcgtgggcaaggtgccatagggactatcgggcgaacactatcctgtgcgagcggagaatacctattgccaganctcactggctgtaaggaataggtgatggctttacaccgggatgagaatgattgtgaattgtgagccgaagttgaggatgtgagtatcgctgcacgagggcgtgttggaatatctgctgcgggtggaggtgttaggggagcatgagtgcggctgtgggtgg

SEQ ID NO: 298396 - DNA, 732 bp, Homo Sapiens
  misc_feature (146)..(212): n is a, c, g, or t
  misc_feature (462)..(597): n is a, c, g, or t
  misc_feature (621)..(683): n is a, c, g, or t
catgtacccagctatcactatgtagagcgggtgtatgatgaataaaaatggcgactcgcctgttaactaacagagagcccacgaagcattgcatgctagctggctcataccatgcaataagaggagtggtgattgaagatctacannnnnnnnnnnnnnnnnnnnnnnnnnnnnnnnnnnnnnnnnnnnnnnnnnnnnnnnnnnnnnnnnnnccatatcaagagacataagggcgcacaaattgtaaaagaagacagattctgctgaagacacgaagatatatactcagtatgctaaagactccaccagagaaccgccagtactgaataaagaatttagtaatgttgaaggatacaccatcagacatatcatgagcataacatttaatatccactagcagcatacaaccttgctgaagatatgacggtcagcgctcacacttaagaagctactgagagtagnnnnnnnnnnnnnnnnnnnnnnnnnnnnnnnnnnnnnnnnnnnnnnnnnnnnnnnnnnnnnnnnnnnnnnnnnnnnnnnnnnnnnnnnnnnnnnnnnnnnnnnnnnnnnnnnnnnnnnnnnnnnnnnnnnnnnnnntcatggattagaataagttgacannnnnnnnnnnnnnnnnnnnnnnnnnnnnnnnnnnnnnnnnnnnnnnnnnnnnnnnnnnnnnnatagcacaagtaattctgaggcagagacgcttgagacatcatatttctg

SEQ ID NO: 298397 - DNA, 320 bp, Homo Sapiens
agcctacgctacgtgttagcaccaacagttgtacacagcatacatcgtgtacgataagtggctagcgatagatgtgctcgttccgctacatatagagtgcccatgtcgcatgaagcactatgtccctggcacttaacactactatggacgttgcatgatacctcgccactgactctcaagactctacatacagcttgtccactagagtcgacgctcaggcggccatactcatgaggtctggctgactgtggctcgatcagtacattcgagtctttagctgtcatgcagcgacggatccgacataggcacactgattgcgg

SEQ ID NO: 298398 - DNA, 420 bp, Homo Sapiens
cgacgaccatcacactcttcttgaggcgcaagaggtcgttacacgtgcgcagctgtggcactcgctgcttgctccagactacgcgctgactgctgctgtgacagctacacatatcacgattatggccatctatatgtgtgaccccgactgggttggtgacactcctaataggcgtacctatgctgatgatctgaatgagtgcattcccaaggtaatgcatgctgaagtgaccatgacgatggagtggactctactttggccatacgagatacactgcaagaaggcatctgtcgatgatgacctggaacatcattggaagcggcactgtagctagcacgcgtacgattgacgacgcacctgagtaatgactacgggatgtactactctgtacgcatgcatgggatgggatctgttgccgcc

SEQ ID NO: 298399 - DNA, 722 bp, Homo Sapiens
  misc_feature (171)..(207): n is a, c, g, or t
  misc_feature (476)..(567): n is a, c, g, or t
catagacccacctttcagtacgtctaatttgtctatgattactaaaaatgaggaggctccattttgctcagagagatcttcaactcatgaccgttgagtaatcataaccttcattatggtgtgtgctctcagatctgtaacaagatttatatgctcatctttatcaacgtnnnnnnnnnnnnnnnnnnnnnnnnnnnnnnnnnnnnnttattttgacaatagagggcgtacacattgcaaaagacgacatattctgacttaaacataagcttatataccttgtatcctaatgactccatctggaaaatactagtactgcataatgtgttaatgagtgtagaaggatacaccactttacatatacatgagcataacatttagtatccactagcatgtgataacctgtgagaagatatgaaggggagcgatcacacttaagaagctacattgaatagagcagtagctacaccgtttgnnnnnnnnnnnnnnnnnnnnnnnnnnnnnnnnnnnnnnnnnnnnnnnnnnnnnnnnnnnnnnnnnnnnnnnnnnnnnnnnnnnnnnnnnnnncatgaccacgatacattatgcttatggcttttatcgaaatgcccacgtctttcttcatagaaagaggtacaccatcctgcaatgtatggagaccccttaagacctggggagggaaggtaattcttgcagtgaccacagttgcatcactattctgc

SEQ ID NO: 298400 - DNA, 754 bp, Homo Sapiens
cactagatcagaccttctgacgcacagacagtaatttgttcttatttgtatacatacaacaatgtggcgagttccttccatttcttgtcgacacacgatagatctctacaaactctatcgacacgatgtaggaaactacataacgcttcattggtggtgtgtcgatttcacgatgtgctaatcaacattattaattttctttccttcaacgggattctaaaaatagaaggttgtgcttgatagcagctgttttttctacattagaagtgggatacctcgcaaggaactacattccagatttaaagaaaagcttggataccattagtgcgaataacagcacattgatcatacttgtactgcatgctatgtcattgagagtataaggacacaccctttacaagacagtgaatggcaagcactatcttatagcttatgatatgctctgagacaatatcgaaggtaacgatcgcacttaggatgctacttgatgtgagcaatatctacacctgttgtagacttcatacggttcatagtttacagagaagttattgatgagtgtggaaactcatactactgttatacgaaattgacagccttcacatatagaaccaagcaacaccatgctcatggctgttgatggaagcggccagtcttgtaccatgggaggagttccaccagcctgcctttgatggagactcctttagaccctgaggaagcgtatcactcttttattgtctactcttgcacatctccg

SEQ ID NO: 298401 - DNA, 666 bp, Homo Sapiens
ggatcccccgggctgcaggaatcggcacgagcatagaatggctaccagttgacgccatgattgagaactctcgtcctccctctcattgccatccgtcctggtactgcagtcaaccatagatggcaatgacttacctgcaccgattaggaagcataggacttagagagatggctcagttatatggtacaactaacgctacacctacgggtgatgtatacagatgactatgatgcatgtatagaagctacttgtactagatgatgacatacatcagtgtcaatgtactgaattcaagaatgagttctagcaaggcattcatgatgcacatattagcgggcaggtgaccataaacttgcatgcacgcatagctgctatagtacggagaatttgtgggtcgacttcgatggtgacatagtaccacgcctagataaagaggaattattgagccattgctcacctctaatggaatcaatcatgtgctgtagttaaacgtagaaagatcctgtagagaatgatagtagtgagtacttagacattcttaaattaggacacgtacgatgcatatgtactagctggagatatgagttatgtaccatgctgatgctgtgaacaggatgcagcccgtatgaatcagatgtcaggtggaagcacagtatcgatgatcag

SEQ ID NO: 298402 - DNA, 476 bp, Homo Sapiens
ctgatctgttcactagagaggaatttatgcagggtgcttgaagactggtgctgtacaagccatgtgttgtgtctgatcagaacatgaacatgcatctcatacatgacctacggataggtgtccgaagttgtgacactgaaacaggggataccgttgaatccatgcgagaatcgggttatactgcgctacagtctaacatatcatctcaagccgcgtgtttggatggtgtcgttagataccccatatgcgaatcacgcatcatagttaccctgagagcatggtcaacaggcactgtctccacaatgatactgttagggtgtgatagcttgctgagatagctcctgacacatgttggcaaacctaatctatgtgaagaccaattaagataacaggatcaacattgaaccttctatacatactgctagatatcactactcactaggttgttacagaccgcgcctccaggtccggcctgt

SEQ ID NO: 298403 - DNA, 419 bp, Homo Sapiens
cgtcgcagtagtaactgtcactcatgattcagattgtgaggaccgaaccataacagactgaatacgcagagagcacaatgagtaattggctgcgacagatgtgtacagcacatgctgacaggtaaatcttaacaacaccaaggagaatcatgacactgtgcattgcgaactggtccatgtaacacggactcagacgcgcagatttgtgtcaccataatcggaagttgtactcggtcagatgaacacgcgatatgtatctcaggatgcactgcagcgctggaagaatgcaccgctaacgatccctagatgcggcaatgtgtgaacagaataggtgagacagagtgtcagtacatttggctcagaaactgtgcgaatgacgcgttctacggactagcatacccttggcgtgacactgtttg

SEQ ID NO: 298404 - DNA, 402 bp, Homo Sapiens
tgttgccgtagtaattgttactaatcattcaaattgagtgtaccagaccttaacagtatgaatatgccaagatcacagtaagtaaataactgagccagaagtgaagagcacatgtgaacagatcactactaccacggagatggagaaacatcacacaatggattgctaattggtcgatgtaaacatgaccacgaaatggaatattgtgacacctaaatggaagttgaactaagtcagatgagacacgcagttgtagtgtaggaagtcatgccgacatggaacgaatgagctcactttctaccacagctgcgggcaatgagtgaacagcttaggtgagacagtgtcaagaacactgcgctcagcagtgcgcgacgcatatcagtgtactagcatattcagtcc

SEQ ID NO: 298405 - DNA, 421 bp, Homo Sapiens
acgcggtgcacatgtgtctgtgactctactatagctcactctgtagcacctatattctgtgcacatgtgagagctctcacattctatcagagcagagggaagtctctgtcacgtacccacgccacaagcctcaagaaggctttttgtctgagggcctcattatgcccagactggtggtgctgtgaccaggcttctgagacactggcttcctggagcccatgcatgcccaactgtgcttacatggttaaagccttgaagcagcacatcttcactgtgcctggcaagaatgtgggaagcttacaacccctggtttcctgacttcctcttctgtcccactgggtgcccctttccagattcccaggggctctatgggccaccggcagtgggtctgggcctgtcacagcgtcttgcgtcttctctt

SEQ ID NO: 298406 - DNA, 202 bp, Homo Sapiens
accaaaggcagaggggagctcctagacaaagatattttgcttacaaatggaacatatcaaatcaagcttttgtgaacttgagggaagaaacaaagaatatgaagcctaaatggaagtgtcaggaaatggtcgccttgcggacaaggcagcagcctggaaggccaggagagggcagactacccacctaaccctctgcgttttg

SEQ ID NO: 298407 - DNA, 639 bp, Homo Sapiens
  misc_feature (525)..(525): n is a, c, g, or t
  misc_feature (561)..(561): n is a, c, g, or t
agactacaaggtttacagaaccctttaggatactgacatcatgtgactgacaccctagcttgagtactggagcgctcttgactcaccgaacagcctccacctcctcctgtcagcagttgcagtccaggtcatagaggtattcaagacagactcaactcatccacccaaggtcacacttgaggtgaccaaggtgaactatcgatgagccagtgaatgagacagatgtcattctgctggagcagaatgcaccatgctgtggccactgtgccagcctatacaacgtgtatgagaaggacgtcaaggagctaatcttgcgtgctacgtctattgcccgtacaacggattacgccgacgcggacacagtcctgcccaagtgtctagctgcctctaactatgccacgctggacatgatccgcgagggcatgccttatcagtactacgatccatgtgagactgtcactcataagcaggtacaggactactacgaggatgagcacgactgcagtcttatctgcagctcacggntgtgaaggacctctccgctctgcaagcatgcagctncgacctgtcctacagtacgtaattcaacgcactcttgcactgatgtgacatcgttatagacgtctgcgatcacggttt

SEQ ID NO: 298408 - DNA, 439 bp, Homo Sapiens
ggacttgttaccaggggtacacctatagagtctctgagtgaatggaccagatgaggtgtctaccacgactgtgtgaatcactactagagagcctacatagggccacaggactgatacgcaccatagcaatgagaggatacaatacgagctaatcctatgaggttgtaagcaccatccgtaaagatcagacaataacttccatgtaaatcttacctgcatgtcgatgtgtaaactgccattgatggagctcatacctgctgtttacataaagtgttgtacagctgttaataaatattatcagaaagcttatggcccacaagcctgataagactgacttacaatcttataccagtgaattttgacatctaacttacctgcaaagacctcggggataccatgctgtccgtttgaccacagctacattgtctgctgtggccct

SEQ ID NO: 298409 - DNA, 629 bp, Homo Sapiens
  misc_feature (493)..(493): n is a, c, g, or t
gcttgtttcaaaatcattccttaaaaaatgttcagtatttttcttttgtcaaaaaataaaaacaggatttgtgggttgttctgttttttaaaattagtttgagaaacttcctttgccacttgttttctgtgcaaatgttgtaagagctcaaattccctgggggtagggaggacttttataaggtttttttggttgaagggtataaaaggcacttaaaaggtatacagttacttttatttcgatatcccagtcattttgacattatgataagctttccccactttataggttatctgaaaatttggtggggggcgggtattttatttatacttaatataacaaaattattttcctatgtgtagtcaatagcacatacaattatctcctgtttgtagtcagtagcacagtcagtattcaccgtgggttgggtattgtcagtccttctttttcagataactttctaaatggtcattcaatctgtaatcttaaactnttttaatgttataaattcttcaaatcagtatttgtattaaatgcagtgaccagactatgtcactgatacaatgtcatgattagatgtgcagaggactatgttacatgggatgataatgaacttttaacatattgtt

SEQ ID NO: 298410 - DNA, 420 bp, Homo Sapiens
tcttacgcactcccactctaaggcatgtgggtctcaacgggatcggagattgctgcacagatccttgatcaggagacctagagcgaacttgtttgaacattcatatgagagatgtgagggggactattacacttaaaggactgggatgtaccctggcgctgatgagagatccgtggtctcccatcatacccgtcatttccatcgggacctgtctctctcagtagcgtcctggaaacaatgtcgtgttctgttactcaatgataatcttcatggatgccagtgtaggcaagccaatctatagataaatgcacgagtgcatgatattctcgtcttgactgtagaccatctggtcgcgggagactgggtaggcaggacttttcgtatgcatggtcgtgaggcatggctcgccctgcactctgt

SEQ ID NO: 298411 - DNA, 781 bp, Homo Sapiens
  misc_feature (24)..(24): n is a, c, g, or t
gaccaggtgagtaatccagaggangagagcctacccgtagtccagagagtcttgcccacactatgactacgtaggggacgactcaccagaaccctacttaggggcggggagccactatgaggcctctgctgagtaccctgatcattgtagggccctactcgcttacctactgtgtcgggctgattatagacacgtatgtttaacatctctgtgcctgcacccgcactcatacatacacttctagaaatacatattatttatatatgctgcatagacttctatcattaccatatcttttctgtatatgtgcattgttgagaggatctgacctgctgatcaacaggtacttcactggatgtccattccatctgagaacacgctgctgtagcttgaagcacacactttcaaccttctagaaacaaggagaacatgagagactataggacgatctgtctatatctctctgggcgtgggcgagtgctctctgctgcacctggagtacgaggacaaggcatgccacaccacttaactatatatgtggatcaccggcactatcactcttgtcgctgtagatctctagcccactacaacagctcgtgagatccagaaccgtaacatttattattacactgaccctgatcgtaagatttatctgcttattcagttgatgtgctttgaggggttgccctactagctgaataactcccacttccagggcaggatttgaggcataatagagcaagggggcgtagactcctcatcctgttggccagatgccccc

SEQ ID NO: 298412 - DNA, 776 bp, Homo Sapiens
  misc_feature (238)..(301): n is a, c, g, or t
  misc_feature (673)..(674): n is a, c, g, or t
gaacactccttactccagaagcctgaggtgacggatgaggagactctgctcctagcacttcgtgtcccgagggagagactacggctgaagcattcctgggcggcagacccaacatggtccatcttgcagtagggttcgccatattatgtcctcttgttcgctatttaccgagcccggaggattagagagcctatctctgggattcgctgtagacacgcccgcccacatgcatgcattnnnnnnnnnnnnnnnnnnnnnnnnnnnnnnnnnnnnnnnnnnnnnnnnnnnnnnnnnnnnnnnngtatgatctttgtaaagaaacagagctaatgttgataggcggccatactgaactgttgtgactgctgtggactggaggacgtacgggaatgtttgcactcagatgctgacatggaagacgaggcgactagagactctgccatgatctgtttcatgttccacttgatgtggacagggcgctctcacatgcctcagcatgtgcattgacaagacatggcggcgcattcatccatgtgtgagcacacagacatactcagcgctggtgctgatgacatatacccccatcatactgacagaatgacaaagcacaggtacactgatgaagacactggctctcaccacagttagggagatacagagcttgtgtgctacnnggatgcccccaatgctgaatctcgtatcgccccatggggcttctgggtattcagactggggggctccctactctctagcgtatcgcataggggatgtggcat

SEQ ID NO: 298413 - DNA, 666 bp, Homo Sapiens
  misc_feature (17)..(17): n is a, c, g, or t
  misc_feature (303)..(303): n is a, c, g, or t
  misc_feature (469)..(469): n is a, c, g, or t
  misc_feature (656)..(656): n is a, c, g, or t
cacgatggggaccgttntctgcaacagaactcactggctatccacagagtgtacacgagctgccagctagtctgagctcgctgagcaagaattgcgagatagttagagactgtcgtgtttggtcagtcaaccatgagcaacggcatgcgagatgatgatcacttgaggtgcagaacacgcgctgacatagccatgatgtcggtgagtatcatgatactagctgcagatcactgaatgactgctgtggagacactctaggcgcagaagccacctttgatgacacctatggagatgaggtgagcncgtgtgcataacacgaatctgctagagattatggctgactgtgaggacagagagcacaactatagccgtcgcacgagaggtgtgactcgacgatgattgtgagtacactgctttacaggacactgaatactctgtctcgctgatgttgtgatctgcaatgccctangacactcctccctataggcgcccggcacctcccgtttctgctgaatggtataccaaagttgttcctgattgtagccatcctgtggagagcctgctacctgttcgccaaattgtgagcttttgatcactggagagtccgctgcccaagggctttaggtgcgcccccgtacgcggctttcaacttgggngggttccgcc

SEQ ID NO: 298414 - DNA, 383 bp, Homo Sapiens
tagaatcctaacaatcctcatgtgggtgcccatgtggttaataacaaaaaccaaatagatagatgtttgggtcacttgaattatttcttgtttaaaaaatatcttttattgattctgagggagttcatgctaatattgggcccgacccttaacactatttgcatatttattagtgaccaacacattttcatgatcatatcttaatagttgtaaacttgcagcaagaaattattcactcacattaagtttcaataaaattttctaactgggtaactgctggtgtaaggtacactatagtgaggatttagtttacatgtatcagataatcatgcaaactttataaattttcgaaccacaccccaggcctcatttgatatggatgt

SEQ ID NO: 298415 - DNA, 510 bp, Homo Sapiens
gcgagcccaagtctgctgtgcaggcattgattggcggtctcggggtgtttatcatcaatcacagcatctggctcgctaatgtccgcctgacgctcacacgccatagtatcgcctagacaccgaggcacttggagcgcatgaaaaaacgccccattgcttgcatgatgcactgattgcctcatagacctatgactagaacgctcccattttcgcacttactatggagctagaacgtgctccgttacccatcgcatattaccgcattcatacagatgtactaatgaacgtgttcctttctctaaattgagctcgaatatgatgcctcatatgacatatcaaccaggcacatactgttaggcttgacttatgcccggaggttataccgcaattgagctcatgcccccgggccatatatcacccctgtcttataccttgccaattttcttccaccctcccttgtctgggatacaagaattccaggaactatcacccacccgattcacccttttg

SEQ ID NO: 298416 - DNA, 438 bp, Homo Sapiens
  misc_feature (75)..(175): n is a, c, g, or t
gtaaatgctatgccttaccttgtggaccaggtggactacagattcggggtactacacggaggtactgggagtacnnnnnnnnnnnnnnnnnnnnnnnnnnnnnnnnnnnnnnnnnnnnnnnnnnnnnnnnnnnnnnnnnnnnnnnnnnnnnnnnnnnnnnnnnnnnnnnnnnnnntgtatgagtcactgtgccactgctaggaacaggggtgataagaattctcattttatgtgaatgcgtaatgcactacctatgatctacaaattccctgctggatttgtagattaaaggccacgcaatctattaacgcatatgatgtgacagatgcattacgtatgcctcagtcatccctacgtggtggatctacggacccatgcattacgatataccttgacgtggctgtcctacctgcctagccatgatcctgtacctgcttt

SEQ ID NO: 298417 - DNA, 398 bp, Homo Sapiens
gcccgggctgcaggaattcggctctaggggactcacaagctttatgttctccaatcgcagggtgacaggtcggcggctctacattcagctaccatgggcaaccttaatcgcaacttgatcgccttaaatccggacggcttatatcacactcttgtcctcaaaagcatcacccgcttcgagcataacgaatgctgccattacaccatgaaatcactactgccctgtcaagaacacctgaatcagcactacatagaccctaaagaccgaccattctatcctgtgctggagaatttcatgaactcatggacagatgaatgcatagtcaggctaggactgaacatggagcgtcacttgatattcagctagaccactccatgcgatactcatggcagtcctat

SEQ ID NO: 298418 - DNA, 414 bp, Homo Sapiens
ggtgcgcagtgcggagcatggtgctatggtgtcgatggaagccgagctgaactatgtcgtcagcacccgtctagattcagactctgcagggactaaccgacttcgccgtcggagacccgatcggcctgcacatgactatcatgctgacagtgaatatagatgtcagatccttagtaattagcgttgggatgactaaggtgctcaggctacagcgtctctcacacacgcgaaccacggagatagctatgaagatgaacatggacatcagagttatgagctgagagctgtcgtatatcggctgacggtttgagagtgtgaacggcatcagccagtggttactacagggcacgagtaccccccttattcgcatgctagttatcatcgacgacaggactactggactagccgatggcc

SEQ ID NO: 298419 - DNA, 695 bp, Homo Sapiens
  misc_feature (21)..(21): n is a, c, g, or t
ttatctcatccaccacagacnccccacattaaaacatgaattcctccagagccgccgtttagaatatgcacactaacccctccagagagtgactcaagtatattccacttctatctgtaaaatacataacgcggtggtctggtcactaataaattacccccctccaaacatacaatctacaaacacctctatcttgacacctcccacattaaacactaataccactacatattcaacctcaaacattttaaaactaatcccacaacccaatccataaattttaaaaattattacaatctcaatactaatacacgcttcataacctaaccccccttaactacaactactccaattcactcgaccactcccattcttacttttcaaacacatactcacatattacaactctctctatccaatttccctatttcaaataacataacaccaacctattattacatacaaacattttctacacactctaactccacactcgaatcttctcttcacaacatacctcataccacataatatacttctacacaactacttacataacatctcctatattactatctacaacaaactattcttatatctccttcatccacaaacaactcttctcaatctattctaacaatcatcatcactacaatttatcatatatcacttcccactctcactcaccctactcc

SEQ ID NO: 298420 - DNA, 599 bp, Homo Sapiens
ggacgcgcttgtcttaatgagactcttgttactacagctgtgcatggcatatggttgtgcgtgccttccgcacataacacatatgtgtacgtttgacctgacatgttgaaccccgccctggctgttgttatgactgctgtgtctgcctttcctccacttgaggttcacctaggcgttataggctaaagaagctactctggctaagtgatctggtatgcggtagtgtctatctttagctagagctgtgatgctcttggatcactagcctgtgaggaaaggggcgtgttatccctagatgtagcgtgctacaaggtgcgttataagcttgattcttagatgacctgggaagctaggccagctaaagaactccttagtccatacattgagagcattttgacaggctcttacttataaatatgcatgcctggtcctagcacgccctgtccgtgatcttcatgggcacgtatgttcacgtaatggttctagtgagtgtgccagtgcttacacccagaaatgaacggatactagtttgtccttcggtctggtatatgctgagttttcaggtgattgtaagcttcggtactttttcctttcctcct

SEQ ID NO: 298421 - DNA, 733 bp, Homo Sapiens
  misc_feature (183)..(183): n is a, c, g, or t
gtgtcgttcgggtgggcagtgtccatggtaggtcagtgctgaacagatctgttcgttcagtggatgtgacgctgttgaagtttgacaagttggattctgagaaggctggacgctgtgtgtcctagagctcgcaggttgagtactcctggatcctgatggggcatgcgttctatcgttgacatncagaattgcttattcatttctctaggagctgttgctcagagggagcaggtgtgtgcatgggtattacgtcttatacatgggcgtgctgaactacatgctctagcgtttctagaaggtcttatggatcttacataggttgctgcatacacagctccagaacagccgagtctaggaacttcagtctgtcattgtgctggacatgatgtatgatggactcgagggcatagccgtcgtatgaggcattagcatggtgttgtagtgggactggcccgtctcattagacgggatgtgtacaagtgcaatttctgttggctacacgagagcacactgtgaactgttcaggagggcctgttcattctcacaggtctttggctgtattacctataggggcggtctctatactatgtggcctacatatcaatttggctccgctgtgataccaccttatccccatcaattgctatgggatgagtgtttgatactctgggaaggggccgggccctaattgggctatatggagttggatacaagtatttcttcgtcgttacgg

SEQ ID NO: 298422 - DNA, 663 bp, Homo Sapiens
atcacgtaatgcctacattcaagtgatcgagttgttggtagaagagccatgctgtatcattgggtccctgtgatgcacatttgctacagtggtacggatgctgatgaatgggataacattcgattgacgatattgacatttgtattcggacttcgaccgctgtgccggtagattacttaagctatctgactgacttcaaactctgctcttagatgcatgatcatcgatgactgctagctagactggctgatctatccttattcatcgcacttggcctgatgggagaacgttcagcgcgtgtaaccacgttcttctgatcggatctagctatactgcttacaggacttggcgtacatagtgcaagcctatactgcttctacatgtttatgacgtgacaatgggtgtcagtcactgaccatattagcctcatggctccctcattgacgctagagagcactgtcatgtgcatacacctatgccccgagctcctgctatcgatcaagcacgacatcagtaccgggttctgctctaaaaaccaacactcgggagatgggcctcgtttggctggaaataatgtgccgctttaggggtggccctagctcaattgcctctacgcatggcgttttacaatctactggccgacgttttatagccccttgtgtg

SEQ ID NO: 298423 - DNA, 729 bp, Homo Sapiens
ccagtatgtgcgtgatgaccttcatctgaccgcggagatcgagcctgccaccactacgcctgtacacgtccagagactggcaggcctcacactacaggtctggctggtgagcgacctgcgagactcacacgacgggaagcctgcagacatacctacagacggactgctgtgccacctggtgcctacaagaaagccgatgctgaggctagaccatcaaccgaatgccagtttagatgcggattttacagaggacgtgtcagacacctgatcatatcggagaggattctttcgcattgtataaacccacacgcgagtaacctcacctacaaggaaagaacctcgagggggcgcccggctcccaattgagcatatagtgagcagtattacaattcactggcctggatctgacacagacgtgactgggtaaaccctggcgtgaccgaacttactcgcctagcagcacatacgactttagccagctgtctacatatctaataggccggcgccgatcgcccttaccaacagtagcgcagacctgattggtgactggcgatcctacagccgtactcttttgttaacatcagactgatatttttgttacacagactgatgctctaaccaatcggccgaagtcgataagatcccttcaaatgaaacattagaccgcatagggatagtactgttccagtgggaacgagtcactattgatcgggactgcacgtcatggcg

SEQ ID NO: 298424 - DNA, 715 bp, Homo Sapiens
ctcatccatgtatgatgaggctgttctcattggtcatagactaggcgcctatatataatgtcggttccagtcaaagttgactaatcgcacagctgaacgaatcgtggaaagagtcattgaggactatatcatggaatgtagtgtatgatactgccacacatgctctatagtggagagctcgagttgactgctagatcggactggcttagtgttgcgtactgccagctcatgcttatcatgagggagtggactgtgaaagaactactctgtggctactctcaactacggtagaggacgatatcactactgcctgcacatcctaccgctgcacatattgttatgtgccaacctgatccgctcaagcataacgataattctacggacctgtgaaatctatgatgacataggagtatcattcctgatgtaccactgccacaagctccggggatgtgcacatttttagtaccctgatgacacttccgaagtgtaagacgccagaactgctgtagcacacctgagaagccattctcttctagaacaagacagcattgagttcagagcagaactgtggttgtaacaacgtcgtagcattttgcacacagctttgtatgattatcataatctgccaggtgcttgaccacacgtttataccatggagatgaactcgtctcacattagtctgtctaagggggcttttgagttgtggcatacattc

SEQ ID NO: 298425 - DNA, 358 bp, Homo Sapiens
cacacactgtggattgtgggcctctcatgtgttcattttcagagggatacaggagtaatgaagtttctaaggcagaataagggtcacagattttatattagggcatatttgctacaattctaatttggctttctttttacatggattatcatgccattaataaccaaactttttaaattggatttttagaagttctcctgggttctagatagactgtgatagcagggtaacctttagcagggtacttacctttcctctttaagtgccgggttctttaccaataaaatgagaatgactggatctagtagtgtagtttgaggattgtgggtatttggatttagcacagagcctggtcgtt

SEQ ID NO: 298426 - DNA, 349 bp, Homo Sapiens
  misc_feature (66)..(81): n is a, c, g, or t
cacgagggcctgtgttgtagtttccacagcgcgaagtgtctatttagaacacttcactctctgatnnnnnnnnnnnnnnnntatctctctgtgagcaatatgcacatgtgccgggtcttttggttaaaccgtcgggaaatcggtggcatattttacctcttacaaatgcgctgtgttgccattggccctcaaggaaagctacacccggagaaccgtggaaggtgataagggagacggaggttaatctgtgcccaaggtcacatgaagaatgtgcaatttggccggattcttttacaagttccgtgataacacattttgcgcacgtgttttgtgaccccgtgttttgccg

SEQ ID NO: 298427 - DNA, 187 bp, Homo Sapiens
aaccattggcctggtacaaccttttggcaggcgaattcgaggttggaccaatacttaacctgtgttctggaggctgtgtgaaccttctataggttgcgaggggaccaagaaccaaggttaccgggggaaggcaaactgggaggatgggacaggaggtattttacacggggcggaaatccatcccggt

SEQ ID NO: 298428 - DNA, 407 bp, Homo Sapiens
gacgagagtgtctgtggatgactccagaacaccacctgtgaagagactcgaagtcgacacatctgtgtataggaagcgcgtgttggattttctcagaagcccttacacagctgttgggactggagggaggccacaccttagaacgagcgcactggatttcttctgtgagagtggagactctttttccaagaggtgtttgtgccctgcgtttcccactgtgggctataccgcgggttttggattgtggttctatggccgaggatctgtgaacccacagaggggccggcccttggaaccctgtttcagaccgaatgaacggatatgtttggcatgtgccttgatgccaccggcccctgtggacggcctttggccattcattcgcttgtgggatgtgaccgcgctgtttc

SEQ ID NO: 298429 - DNA, 550 bp, Homo Sapiens
  misc_feature (86)..(86): n is a, c, g, or t
  misc_feature (96)..(97): n is a, c, g, or t
  misc_feature (166)..(166): n is a, c, g, or t
ctagctaactacgtaggtgtcactcccggcgcttgctagcgcagatatctgtgcaccgcatgggagtaggagacatacgtagctcngcaggagttnnttttgtgttcttttgttgtttccatatatgtcacgaaagtgttttaatataacacactctcatatatantaaaacctctttttctgagaaatgtgtatatctgtgaaaacacatgtgaaatatctcactcttatacacaagtatatagcgcctcgtgcgctatttctataagagcactctatatctttacacattataaaaaactctgtgtttgatatatatagcgcacaaaatatcctccacagagaggtatatcacatcgtgtgttacacacagagcgctgagaagatttctgtgctttgtactcttttcctctttataatatataccgagagggttcacaaaagagctgggtctcaaaagagccttacacccttggttggggtggggagaaacgctgtacgtggtgtgttctcgaggtctatgtgcgccgtggcgatggtgggcgtgtgg

SEQ ID NO: 298430 - DNA, 325 bp, Homo Sapiens
ggaatttgggacagggtcaagaccccacacactttggacaaagtagagggcaccctctatatacagcctctttctctttagatcgacttattccacaggtgtgtgtctccgcgatacacacacaaatgagggtgttcaacggcacaaagaactctgagagagaaaagtcaaagagcctaggcttatggctttgtttgcttcctcacagtggcatttagagtgatgtcaatttgtgaggcagacccgtatctcgctgtggttccgctcctcttctgtggtttgcaaaccacagggcgggttaagcttgggcccacgacccggagtt

SEQ ID NO: 298431 - DNA, 330 bp, Homo Sapiens
accacatttgctatgaagcagcaacaccagcagagtgtgattaagaaaaatgtggaacgcgcaaagagaacacatgtggaagagggtggatgctctttatatgtccaagctgtgggcagtgcttttcataaccaccactgtgtggttggagaaaggcctagatgtaatggttgggtcatcattttgaattgtatgcattattatatcaaggaggtagatatcttgcatgaatgctctcttctgcggttatagtgttctctgcgcactcttggtgagaaattgaagtgcatgtgtgaatttatgcacagaggaatatttcttcgtatcttc

SEQ ID NO: 298432 - DNA, 358 bp, Homo Sapiens
gagagcgcaatgacgctcgtgggcgcgagagctgtgtcatgatgctgtacacacggctgtggaacgacgcaccgtgtgacaccgagaaggaccgctggatctgtgagggcacaactggtgaccccgcccagtgcgcctggagccgcgcccattggagcatgtcggattctgggggctggtcacacttcctggcttctggagctgattggcaaagaggtttttctttctcatacaccgctggtgagtctcagaaacactctggccaacataggcctgtgcagaccagagcctgggctctgggaccttcatggcgacctcatactaacttcacttacgcagacccactcttcactggttc

SEQ ID NO: 298433 - DNA, 776 bp, Homo Sapiens
  misc_feature (85)..(133): n is a, c, g, or t
  misc_feature (249)..(249): n is a, c, g, or t
  misc_feature (634)..(634): n is a, c, g, or t
gccaggccgaggctcaagcgtgcacagcccaggctcaggctcaggctcaagcccaggccacaggcccaggcctcccaggcgtgannnnnnnnnnnnnnnnnnnnnnnnnnnnnnnnnnnnnnnnnnnnnnnnncaccaccacactttcagtctgatggggcagccccccagggtgggggctggtggggacagataccccaaccctgcagcccagtgttcctttgacctgaccccgtatgggacggcagnggcatcatgaggacatctggctcactgtcatcaccaccaccgttgacgtggagctgatggtcagcttttagagatccgtgctgtcgcccactggtaataggaagaagtggctctgcgtgcttctgtctaccactatctgggggaaaagtgcgtttcttgacagacaggacttgactacatcttcttgggcctatgacaccgatttgctcccaggatacatgcctttttctgaacttgtctttagagagaacatcacccctactgacttgaatggaatacggagctgatggatgcctgcatcaacgtccactcgttagcgaagcttatacaactggggggtcgctgctcaagggacagatatggtatgaccttatagaaccttgtnccaggggggcacgggccctatggcttccctccgtatgttagaaggctggactactgtaggactataggttgggcctcccagatctcagtgaggccccagatgcaccgccctattgtgcttttcgtgcctgctaccgaggttt

SEQ ID NO: 298434 - DNA, 210 bp, Homo Sapiens
  misc_feature (23)..(23): n is a, c, g, or t
  misc_feature (31)..(31): n is a, c, g, or t
  misc_feature (44)..(85): n is a, c, g, or t
  misc_feature (94)..(103): n is a, c, g, or t
gcacgaggtggggcttgccttgnccacgtcnccgggaaataaannnnnnnnnnnnnnnnnnnnnnnnnnnnnnnnnnnnnnnnnnatatctccnnnnnnnnnncgaagggcgcaaaaatatttttggtgtgcccaaaaaccccacaaaaggggcaaagggggccgcccaaaaaaatttaccccacaatttgtgggggggtcttggtgtgg

SEQ ID NO: 298435 - DNA, 399 bp, Homo Sapiens
gtgaaacctgctttggggattcctgtaggtgagagtagctctggcttagagctgaagtctctcctccataggccccacagtagagctaagctttcatttgaagtggattagaaacagccttggtttaccaggctaaagatgatccaggtcaggaaaactgtgtgctttaccaaaggccagaaaattctaccattcttccaagatttcttgctaaaattcaaagtaatgtggtcttgaaggggtgacaccaaagcagctgcaaaggaagaggaaaacccggctgccacagtggagaaatagattgtcattcttttgcacagattttccctgggtaatgtcaggattatatttttggctccctggaaaccagaatttaggctaaataagttggttgttggc

SEQ ID NO: 298436 - DNA, 350 bp, Homo Sapiens
gtgactacctgagtgctgtaacaatgcataagacacattcctttagcttaagagtctaacatatggaatgggcataaaaatacagacatagacgatcaaagtagaagtgcaatgtgtcgaggagaatggcagaaagtggaaatgctatggaagtttagagtgcaaagtgatttctttccattcaaggaacctattttcatattttaattgagcctgctaagatggggagtattttgccagtttctgaaaaagtgagaatttctccatataggataaaatatgagtaaggtgaataggatcaggtacaattttcttgtagtaatttatgtggactgtaatgcaggaggtcg

SEQ ID NO: 298437 - DNA, 385 bp, Homo Sapiens
ctcttgacagatgttgcgcctgtccgcgaacatactcctggactcaatcatggcttgtgggctcggcgccagcaacctgaatctcaaacctgtagagtgcctttgagtgccagagcgaggtggcttctgacgctatagagcttcgtgctgaacctgggcaaagacacggacaacctgtgcctggactctaacccttgcgttaacggccacggcgacagccaacaccattgtgtgcaacagcaaggaccgcggggcctgggggaccgagcacgaggaggctgtcttttcctttcaggctggaagagttgcacaagtgtgcatctttgaccaggccaacctgaccgcgaagctgtcacaaggataccaattcaggttcccccgcctc

SEQ ID NO: 298438 - DNA, 363 bp, Homo Sapiens
gcgctgtacgtgccacgcgggcctacacacggccgcttgtgctctagacacgtgtctagagagacctgtgaagagccacaatatattgcgagagctcaacacacaacatatgatgtggccgcgggtggccacagctgggtttgaacttctggccttaatggcaactggccacttgggccttccaaagtgcttggaatacacagcctgagccactgggaacgggccaaaggtaaactcttgtggaaccggttatatctggaaagggtgtgggcccaagatatgctcaagtggtgtgtaggaaagcgcacattggcctcaccaagagaggccgagaactcacatgggatgtggcacgtgagcacc

SEQ ID NO: 298439 - DNA, 361 bp, Homo Sapiens
ctgtgcgagacggcacgcggggaattgtgacacatcactctatacactctttggggacacattatgcgcacaggcgactctctgcgagacctctgtggagaaagggtggctggtgtgcgcaacacggacctgtgagaaatggaaggttcttggaacacaaaggtggccacccaaaccttccccgatatggtgagacaccgaaggtgaggggaagggcactcggttttaaggccatggagaggcatttttggatcctttctttggttaaaggtgttaaggtggttttacaggaaggtggccagctgttgagataaggtgtctggctgttggccaaggtctggggaccttgggtggggggttt

SEQ ID NO: 298440 - DNA, 230 bp, Homo Sapiens
tattcacctcgccttatttcgcggcagtctggggtttacatgtactgccctagtctactccttcctcggcttaggacattcgtcgtacccgactttcgccaggaattcgatatgccttggctcatcatcctcatcgttgcctgtcagcggatcgcctctcgtcagagcttgcgccccgacctggagaggccaccgcctgctgattcctctgcttccacatcggaccgtct

SEQ ID NO: 298441 - DNA, 440 bp, Homo Sapiens
cttgcatgtcttcctcgtacaacaggtatccttgatgatctcgtctgtaagccgatgaaactgtcgtgcgtctagcgtatttagatcgaacttgccccgatcatgatgacctaggcacagcatagtggagagctctagacagtgctagcatcacagaggactagtggccgttgataaattccggctctaatgaactcgtagcagattgacgctgaaatggaatcagtgctcatgatagggacagaagtgcaccctggcttacacccgtgtcagctgctctactcgtgacacactgaaccccattgccgcttacagccagtgctccctatgttgatggcatcacatcactctgcatctcactctaccatcagaccaagagttggctgttgaatatcgtgcttatgcatatagctgtctatatgcgtcgtgggacataccct

SEQ ID NO: 298442 - DNA, 745 bp, Homo Sapiens
  misc_feature (129)..(172): n is a, c, g, or t
  misc_feature (730)..(730): n is a, c, g, or t
atgatcagcttgtcaatctctgcaaagtagccagcttggattttgatagggattgtatggaatgtgcataccaatttggagtggttttagggttttctagagaaacagaaccaataagaggtgtagggnnnnnnnnnnnnnnnnnnnnnnnnnnnnnnnnnnnnnnnnnnnnttagagagagaaattactggagggaattgattcgcttgattatataggctgagaaagcctatgatctgcagtctgaagacccacgagagccaatggtatagctccagtccaaatccaaaggcctcagaaccaggagagttgatgatgtaatttctaatctgagtccaagtctgaatcaggagaataccagtgtgctggctctatgacaggcattgagaatgaattcttccttttaaccttttattttattcaggttttcagtagattggatgaggcccacccacattggggagggcaatctgcttattcatcctactgatgcaaacgttaatctcattcataaacaccccacagacacactctgaataacacctatctgggcaccctgtagcccactcaagttgacacattcagtcatcacagagagtattgccatcttaacaatactaagtctgacagtctatgaatacaggttccttttatatttattttggatcttctttcattttgctccactgttttgtagtttttggtggtgtagttttggatttcttgggngtatttcttctagat

SEQ ID NO: 298443 - DNA, 622 bp, Homo Sapiens
  misc_feature (522)..(522): n is a, c, g, or t
  misc_feature (547)..(547): n is a, c, g, or t
atttgagcgactcttctaagatgaacattcgcaacatcaaactaggtacaaggtctcggaaggggccctgcttattaagctgtcttagcgtcacaatacgtccggatctgctggcgcttgctgacgctccagtgagggaatcttaggctaatacgattggaagagcgagctgttagggcagagcatgaccttcaccatagcctctcttatctcacatatggatgaacatgaggctccgagtcagcgcatgatcattgcatacctcacaagcgtgaatgtctgggtatcggccaacctatgactctggagggtggagacatgctagtatatcattgaggcaggaggctgtaccctaggcattctgagagggcttactctacagctgtgtgtcagagagcctaatgcttttcagcatcggtaggacactagacggctagtggtctctgcctgagctggcgccatagtgcaagcaggatgcctgctggacgtgtgccgtgctgaatgtgtcgtgattggcgtgtntttgcatgagatgcacgtaggcttncgtgcgtacaagtgggtgtaagactttgcgacttgcctacgtatgccaccatttcatgcgaccctgtctgccggc

SEQ ID NO: 298444 - DNA, 364 bp, Homo Sapiens
tagagtgagtgagagtgtgacagtgcacatgggtgaccttgcttcaccacattgtttcccatggaattatggttaggctcctttgtgctctactgctacaacaagattttggatggggcacttctttcctcattgaatatccacacagcctgacctctgatatgccttatgagatgcacttgctgaccgttttgccacagccagttgtgctcattctgtctttgtctctggcacctgaccctgactagagccgactatcatctcccctgttggtttgcgtggcagctggacatgacatggatgtgttcagtttgtgcatattctcgcggcttgtcacctcccctactggcttgacatatccgct

SEQ ID NO: 298445 - DNA, 615 bp, Homo Sapiens
gagagaacgagcctcggggaagatgcctttctactatcattttaagaacaaggtcttttaaaatgccctgcagaataaccttacgaagcaatactctaatctacctattccttggacaatgaagcacatggtcccatggagtgtacaaggttgtggccacaaccgaccctgtgataatgtgcgcagaccctacatagaattcacgtatgaaggccgtttgtcaaggggagcagtatacacagagctgtagttctatagctgtgaatacaagtctatggttcaatgacaggcatcttgggcgtctcgcacaatccgtgggcctttggacaaagacgacatggtgtctagaagactgacttacgtgtgtacatgtaagtttgtaagccagtgagctcacgatgcactgatgcctgtacactaggcatcctgagatcacacattgctagagtgtctcgtttgtagaacgcgagccatcaatccgattctaactgttcacacacctaacgatttaatctgtggtgcggacttatagctgtttcggccttctctgtggagctcacttatgaactcgaagggtattgttactccctacgggtgaactctcaatgctggcct

SEQ ID NO: 298446 - DNA, 292 bp, Homo Sapiens
ttcagatcttgtttctcttgacattacagagataatcttctcttgcctctcctatacaaccattttcttgatggaactcttcctacatcttttaccaaatttctgtctttactagtataccctcattgtgtattcattcccccaccgatgaactcacaatgtcacccaccgtcttattctgttttttattttctaccaagacagctattgctcccatacccctcgtgacacgagtgtttcgcctcttattcttcagagacatctagttttactttacctgagttctgttgcg

SEQ ID NO: 298447 - DNA, 400 bp, Homo Sapiens
gtctcatccaaatactaatggcagtcccaggcaacggtgcctcggtggttctcactgcagcgcagtgcaaggaacatgcaggctgggttcccagagtgagggagggctgcacagaggggagatgagggtatgagcttagggcacgggcgccgggtgatagatctgggcagcaccaaagccccaatcaagacgtccagctcaagagccttgttacctagcaaggtgctttgggttgaactggagatgtcttggtcaaagtggggcagcagttctagtgaacaagttggtcttagatcaagttttgctcatttgtggcccagttttggttaacttcaccagtactgtcttcatccttctccctgaccaccccaattagctgattgccatcgccagggggcgg

SEQ ID NO: 298448 - DNA, 352 bp, Homo Sapiens
cccggatgagctcagaccagctactcctagggacacactttgcggggcaggagtcccgtgtctgtaatgccacacaggctctccgcgtggtaattctgggaaccatctctgtctgttcagagcgttcctgacacggccatcatggtgggaatgcctgctcatcgttctgtcaccagtgtcgtcagagtctgtgtagagaattgggagctgaggattccttggggttttgagtacaaggaggagacagggattgcagactgcagcttccgaccagcaagtgtgtgtggaacgcacagactgagctcatgtgtgcgtgtgtgtgggtacccacaccttcgcctgtgccctttgg

SEQ ID NO: 298449 - DNA, 344 bp, Homo Sapiens
acgaccgtcaactcgtgctctgtggccaccgccaacgtgtgtgtggtcgacggctggcaaccgcacgattgattaggacacatatttatatgagggaccctatttgtgacagctgcaccgcatttggtcacacactcattgaccatgagtagggcatgggagatgactggcagtgacagtgcgacctctattgagacaagtgtactgtggaaactgtgtactgctgcaccaagatgccaggataacaatgcacatgctggactctgaagagaagcacagttcacagacccacttacgactctgatctggacgacatactggtcgttgcctcgatgggcatatcc

SEQ ID NO: 298450 - DNA, 326 bp, Homo Sapiens
caattactaatgcaaggttgggcttactaggcttcatattcagttgacagctaaatattacagggattatttctttcaccaatcagacatgacattctaggaaacttttccggtccaaggactttatgactactgcgaacagagcagttgactctgcagataacatgtatggttagagctacacgagtaactacgggacccctaggtgcaacagtaccttcgcacttaattcatatccggaccaagtccttccatggtcaccgagtcgacttcggctcccattcctggcgcactgctattgctcacacctactgtcggtttcttcg

SEQ ID NO: 298451 - DNA, 355 bp, Homo Sapiens
  misc_feature (337)..(337): n is a, c, g, or t
ggcaccttcagtttcctttggtcttgctttgtttctgaaggctgtccttcaaaacaattatttctctgactttctcacccttgctgcagacccttgctaatccttgaaacaaatgagtcagaagcaacatgtggtgaaaatcagtatgcaaatatttcactgagggttactgctgtttgaattcaatttttgctatgacatttaacagtgcagaatttaagcgtgtgcgtcaacattggggtaatacatggtgaaggttgtatttcatcttctcagggagctcactgtcctgttattgtttcagtagattttagttcctgattcgtacagttagctntttcagtcatctagattc

SEQ ID NO: 298452 - DNA, 436 bp, Homo Sapiens
aatctgcgctggacaagatgcgtgatcatatcatagctaagaacgtggctgcagacattgccgtccgagctctgtgaatcgtgacgccaacgcgttggaaggggtgaaggggacgttcagtatggggacttgcacagtgaagcaagccctacagtgaggccctggagcggaatctgcagacacatggacgcagtatacatgcgtagcgggacgtaatggatgcacacgttagcgcgcacttatgtcgtcaccgactggcgcgttaatggagtcggggcatgtactcatatggcccggatctgctacaaggtgatagagtggctttagtggcctgattgcagcctgtgatacattatgcgctggggtcgaggagcagttgcgtccactcacggccgcgtgcgagtgccctacactctccatagcagcatggtggcgt

SEQ ID NO: 298453 - DNA, 406 bp, Homo Sapiens
ctaaaatcgttgtaagaataggtcagttatgatcagacttcttatacagagcctgttggaactgagtaccccccttttgaagtggaatatcagttgcttgaagttgatgtgcatcatatcagtttgcctgggagatgtgatgaatgatggtccattttatttgggagacctctctcaatattgcctgagtccatgcactaatagttggttagaccagatgaaatactgattgagcatcttgcagtgaatgggttcccctaatgcattgcctcctcccttgctgatggtatatacggtgcatatgtgtctaaagaactgacttgtaaaggactttgattgtgaaccaccatgagaaatacattttacatcctgacatagtatgcacatatcacacaccattttctgt

SEQ ID NO: 298454 - DNA, 423 bp, Homo Sapiens
ccctgctatatcccacgtacatcatagcatgaatcttatagccggctaccaagttctgaatgaactgtcccctcagggcatagctccacgtgcccatgacatgagactaccactcgctctgacaaaggacgctctacgcctccttgcaactgtgcatatggaagcaagcctttgcaagcacgtcagggcttactaaacacttcgtgtatcgatgatcctcctagtacaggacatgctgctatgtgtaataaggaccagctttcagtagtggagataccactgtgaggaagtcagcgcatgtggagatttcactcactagaagctgaataccttcagctaacagactgactgcgggcctatgagagcttgtgcggctggaggtcagactctggctgaagctaatgagtagcaccttggatctcg

SEQ ID NO: 298455 - DNA, 668 bp, Homo Sapiens
ttctgaactgttgggtatgtgcttgctcctctggacatgcagggtctggtgactggagcgaagcgcattcggaaggctgcggcagcagtgcacgactcgatgttcagaccgggtgtgctactctcatggcgtctggcacatggtatgcactacctctggggcctcgggggagaggagaccttctgggcactcgtgggacagcgtctgcgcgtgtgcactggactgcggacgccggacagggatgacaactgggaaggcgtggcagttggacgagcagggcgtgatgcgcgtggtcgactggagcctgggctagggcaatgcgtgcaagcgacctgcaggcacagccgggacgatctgaagaggggaagggagacagcccggatggagcagggagacaggcacgggacgaagggacggggggacgacagggacagagggtaggatgacgggtcagggcttgacggggaggagtacggggaagcctgaagacgatcagggtgggagagcggcgcgctggcgatccagggtgcacggcggcgtgggtcgtggtacggagaatggtgctagggggcacgagcgcagaggtctcggcatgagtgggcgcgagggacggaagtgcgagggaggaacagcagagcagatgggcggtgctgtctggatggggaggc

SEQ ID NO: 298456 - DNA, 413 bp, Homo Sapiens
gagaactcttgctggacatactagctgacgccactctgtaccagcatacgtgagctatcactgattatcgacttaaggtaactacgcctgcactctcacatgtttctgagttcactaccagggagaccatgggccaatctgcggaccggctgaccggtcacagtgcagcttctctattggaacacgatgaatatgcactgtgcacagacagtgtaaccttgaaggcccaggatgaaggacttcttactgatgtgatacccattactgagcccagactagagacagctactagagctcatgggaatcgaccgtcattactggagctgatgtacttactaatgcctgcattcatgatggcttacagcgcagagacagatgcacagtattcgctctttgactgatgcgcatggcgg

SEQ ID NO: 298457 - DNA, 382 bp, Homo Sapiens
tggcgacctgagcctgcggagagacgtggactgtcagctcttccgagtaccatgtgtgcaagagtgaggagtgtgtgaacacgggcacgggctactcatgctattgaagcaacgggtactactaccacacgcagcggatgcagtgcatgagatatgacagagtgcgccgatgaggaaccgccctgttaaggcggccgctgcggcatcactgtagcctattatcactggacctgcgagagctcactgatgctggatggctcgaagagccgcatgcgatcttacgagagcacagagctctagatgaccctatggaagtgtgctgacctgatgtgtaggctgaccttttgtgcaggcacccattggtggaccgttaggtcttgcc

SEQ ID NO: 298458 - DNA, 225 bp, Homo Sapiens
atgaaagctgccctacactgtacaaccgtaggatgcggatcatgtacttgcattgaagtagctgttggtaacacaggattgactgtgttttcagacgagctaaaagtcggccgcactataaatggcacattctatggaggatgtagtgtacattctgtctgctggtcactgactatccgaatatggatgcattgcgactaatgtaccggtatagagcattcgtac

SEQ ID NO: 298459 - DNA, 384 bp, Homo Sapiens
aggattcagcacgagattgctcgcaattgtgccaatcagagatcaactttccgaactgctcttgagccactggctgattgactgatcaacatcgtctgtgccatctcgacctatgcagatcttattgcagttgcagtgactgacatgatcattaagcgagatagtaatagtgatagctgctgaatcatatgtcatataccgtactctatcaacaccacgaacacttgccaagtatgataatcctagctatgccactgctaggttagcttcttcgacaggtccagtgagcaactatgctgacagcatcaatcttcagatactatgcgtggctacagttatcaccacagctgcgtcagctcatagatactatcatcatgggcgggc

SEQ ID NO: 298460 - DNA, 556 bp, Homo Sapiens
ggatagactggccagcacgcataggagcctgtgcgcgacccagctgctgctctacgaggacgcggcggagcatgctaggagagctgctgagcgttgcactaccggggaatcacttcacacggtgcaggcgtacgtacacacgctgttcagcctggaccaagcacagggcgcgcatgtgcctgctcatgactttctggacagactgtgttgtctagacaacctggaagcctcactcagtcgactggaggtggacaagagaatggtcaagactgttgtggacagcttggatgcatactcagtcaacatagaaaccaactagaacattgtggaatcagccaactggctactagataacctgacagaatgatctggatgggaggttcgtgagagtagctatcagacacatgaagggctcacatgaatttgtgtgcagcgcgcgtattcaaagtctctttggtcatagccaaacgatgacgtgtttttactgacgcgtcccctaccgcaataatttggctctcataactcacttacaatatctcatctgtactgctggttt

SEQ ID NO: 298461 - DNA, 549 bp, Homo Sapiens
  misc_feature (429)..(429): n is a, c, g, or t
ggatacacaggccagcaatcataggaactcttgcacgaccgcactccaactctgcgaggacggtgcggagcatgactaggagagctgctgagcgttgcaataccagcgaatccgttcacacagtgcatgcatacgtagacacgctgtgcagcctggaccaaacacagggacggcatgtgcctgctcatgactttttggacagaacgtgttgtctagacgacatggaagccttactcagtcgactggggctggacatagagaatggtctaaactgatgtggtcatgttcacaagcatactcagttaacataggaagcaactagaagcattgtggaatcaagccactgagctaactggaagaccttacagaacgatctgggagcgatgatctgaagagtagctaacagacacatgtagggctcacataatnttgtgtgaagcgagcctagttcagagccaattggtcataaccaaacgaggactggttgtactgtatcgctgcgctaaggaacagttagtagtgcggtcatctcacatagacttgtttgtg

SEQ ID NO: 298462 - DNA, 535 bp, Homo Sapiens
  misc_feature (514)..(514): n is a, c, g, or t
caaacatttgtttgggtgtgctagtaaggttcttgttattgattgtgtgggcaaacattatgcatgatgagttatacagcctgatattgggaggaagcgtttggaaatagggtaaaatcatagaagatgggaaaggtgtttataagtagattacattaccgtggagggaagccactacaatattttcacgcaaacagctcagagtgaggatatcatacttaactatcttttgctattgtcatccaaacaaatgggctttgttggcgaaaatctcttggcctgcttactgcagaaaaggaaaattggactcctactgatttggatgttctacctgtataatctgaataaaacaaatgacaaagtgccccctgacaactcagcttgtgtgtagttgactacagttatcactcagtttctaggctttgtttaccattctagattatttttttccagagaaactaccaatgaattgtacagagcagaggatgctgttagtttctgcaccctatatggncattcctgcctgtcttgttgt

SEQ ID NO: 298463 - DNA, 210 bp, Homo Sapiens
gagaaatgaacgctgtcgagtgtgcggtatgcacaacctggactctatcatcacctttgctgaagcaagtaagaatgatgatcctgcttactgccgtcacgtgtggattatatgcatatagaagaataacagacaaacgccgggcagaaccttactactggccaagcgatcgctgatgattacgataaaacgaaactagggacggcgagc

SEQ ID NO: 298464 - DNA, 269 bp, Homo Sapiens
cgacgcccttgtagcgctacgtgtcgataatagagatccggagtccgtacgttgcagagcgtgacatgtctctggcttaatcgacaatgcctcgtgccttagccgctgaacatgcaagacagacatatgctaagaggacaccttgattaacaagacgcaggctccgtactcatagctggcatgatgcagcaggaatattatgtcgagcatcccattggtcaatgaggcttcgtctgtatgacgactgattatcttttacgactgagtgg

SEQ ID NO: 298465 - DNA, 163 bp, Homo Sapiens
acagaagactggactctctatggctctcacaatggctacactctattgacaacatgagtctgtacactttcacagtcccagtacgtcacggccactacagacatccccgatttcatgtactaacgggcgcatagctgacgtactccatacccacacatcttag

SEQ ID NO: 298466 - DNA, 375 bp, Homo Sapiens
  misc_feature (25)..(25): n is a, c, g, or t
  misc_feature (157)..(167): n is a, c, g, or t
  misc_feature (249)..(327): n is a, c, g, or t
ctttttctcttttagcctcgccttnattccagggggtggggtttccgtccggaatcgcccacaaggaatgggagtttggtccaattggggtttaaaggaattgggggaaaagaaaaaatttcaaaagcctctggggggggagaaggcgccttttggnnnnnnnnnnnaagaaggggggcccttttttgaaggaattgggaaaaatttgggggggaggggacccgtattttttaaaaaaacttgtgtggnnnnnnnnnnnnnnnnnnnnnnnnnnnnnnnnnnnnnnnnnnnnnnnnnnnnnnnnnnnnnnnnnnnnnnnnnnnnnnngtgggcggcggggggtcttttttttgaaaccactttctttaaaaaaag

SEQ ID NO: 298467 - DNA, 315 bp, Homo Sapiens
  misc_feature (113)..(113): n is a, c, g, or t
  misc_feature (116)..(116): n is a, c, g, or t
  misc_feature (122)..(122): n is a, c, g, or t
  misc_feature (124)..(124): n is a, c, g, or t
  misc_feature (138)..(138): n is a, c, g, or t
  misc_feature (146)..(146): n is a, c, g, or t
  misc_feature (158)..(158): n is a, c, g, or t
  misc_feature (160)..(160): n is a, c, g, or t
  misc_feature (205)..(205): n is a, c, g, or t
  misc_feature (227)..(238): n is a, c, g, or t
cctgctggttcggacagacacctgataccagcaaagagtatggtctatgatagccagcgtctactgatttttagtaggatggacctctgtcgactgctgggatgaagactgcntangatgcntnctatgcttggcccntgcctggnggtcttaccaangngttggaagcctgaatgcccgttgtggacccccaaagtggctttgnttttaccccaatttgaaaattnnnnnnnnnnnnaaattattttctataaaaaacttgcgtgggtatatattgggggggcccaaaaatatatgggagccttttaagagggg

SEQ ID NO: 298468 - DNA, 418 bp, Homo Sapiens
ggatgtgaatgttgctacagcagtgtgtgaacggtgcagatccccggactgtacttgagtctgcgatcgccctcgcgattatatctgcgcttggaacctgcgggaccatctctttaggccatctcctgcttctgtgacctgccagcaccgattgtgtggttagcttcttgttgtcaccgaccatgagctgccagattcgccagaatcattccaccagcgtggaagcaggcgataacaggctggtcaatttgtaccagctgtcctgctacacctacctctctgtggggtgatatttcaaccgcgacgatgtggctgtgcaaggcgtgcgccactacttgcgtgaattggccgaggagaagcgcgagggctaggagcgtatactggacgcgctaccagcgagcgggtcgcgctctattac

SEQ ID NO: 298469 - DNA, 251 bp, Homo Sapiens
ctgtatgactgttgctacagcagcgtgcgatcggtgcacatcccgggcctttgtccaaagctagagactgcgctaccgctataccgtagcttggaaccgttcgaacgatcttgtcggccatatagctgcttgctgacctgcctgtagccgattgcgtggcttagtcctcgttgtcaacccatgcacttcgagattgcgccagatcattcgaccggcctggaaggactccgtcacacgctggtcattctgcc

SEQ ID NO: 298470 - DNA, 354 bp, Homo Sapiens
gatcccacatgtcgcctgtattctaagtgcgagagcgagagagcggatcggataacaatgtacagaactagcctgcagaggctatggagaagtgcatgcaagccagatgaatacagtgaatgcattcgatgattccgaggacattcttcaacgatcggctcagcatgtgcagacgatcattgcgtgactatctgatgtgattgtgttagccatgacctccctttacaagtaggctttgcatcatagagattgttagtaccggtcataatgtgctgtatgtggacttactaacagggaagaacgtgacatggacaactgagctagcgatgctgatgatccactctctgagatgtg

SEQ ID NO: 298471 - DNA, 317 bp, Homo Sapiens
gatagaccatctgaggcatatagtaagtgacgaggttgttgccgtgagcagctctgtctatacaggcttgaaccaaactacctatgactcaggctttgaccactacacagattcacattatgcagacggagatgcataggaactaattgatcgatcaggctatgtgctgaccctgtgcttatgcgtatgtaagtggacatgtctagacgtgatacatctctatgtagccactacaatggagtgaactacatgagtgtagagactttgtaacgtgatggagacagtggccatatgatgatctgacctgtgttgcgcgt

SEQ ID NO: 298472 - DNA, 417 bp, Homo Sapiens
ggtcacagaactaactgttctgcatggttcacatcgtgtgcaccagagcataacactctgaatagacggagtgcacagtcactaatgagcggaggcagatgtcaacagcacccctgaccatggtcttaacaccatcaattagaaggattgctctgtgtattgcgcactgcatgatgttccctgggctcagacggccgatgtagatcccaatgtgccctagcggtaccgcctgaatggagctcgggttctagtgtatgatgcacgccgagcctgatagcaacgggctgcttactatccctgctgtgcacgatgtgataactgagtaggttagacagtgctcaatacatggagctcagagaccgtgcgccacagatactacggattagcatacagctgttggcatgacatcgtagtggg

SEQ ID NO: 298473 - DNA, 290 bp, Homo Sapiens
ggtcgccgtagtaactgttatgcattattcacatcgtgtgcaccagagcttaacagtatgaatacgcctagtgcacagtcagtaatgagctgaggcagatgtgaagaggacatctgaccatgtgaaatactgatacggtgaattagaagcattgctcagtgtattgcgaactgacatgctgtaaacatgagctcagaaatggcaatatagtatcacactcaaggcctagcgtggcgagtcagatggagactcggcgttctgtggagtgatgcacagcagacctgatgcgg

SEQ ID NO: 298474 - DNA, 364 bp, Homo Sapiens
agtattcgttccgggccctgttctaccccattgagggatacttgtagcacgatccatatgcattattaaaccagaaccagacctggtgcttgaataccgtacacatggacacagtagcactccaagaatactcattctcatcccgacttccctctgaatttatgccgcgatccgtcattaaagccgacacggagcgacatgcttgttatggatcacttctaccaaactaaagtctaccacagtcagcttaccacgcacatacctctatgcgggacgtctgggctaagctcccactatccgcatcgatctctacggctacgacggcatattaacctaggcgtatccgactattgaccctatgggt

SEQ ID NO: 298475 - DNA, 368 bp, Homo Sapiens
aatgaatcaggcagtctaggctcagtaggatagtaaggctgttaaatgtctgataaattgggaaggaatatggagtcagtgaaacagtgggctccctaaagctgaagggcaggtgtaattggagtgtgcttaagtgtattggaaggctaagagctaaggtcatagtgcaatgggagttgatttcagatgtgtagccaatctgaagatgagatccagggtacagccacagaagtagaggaacaagtttaaacagtctgacttgtgatacagcagtgaacagctgaacctaatagggaagacattcaatcaggtgagctgtatgtttttcctcaatgtttttgtcccacacttctacttttcatatcctg

SEQ ID NO: 298476 - DNA, 344 bp, Homo Sapiens
cgcatgtcctagcacctctgggtctatgtggggccacaccgtggggaggaaacagcacgcgacgtttgtagaatgcttggctgtgatacaaagcggtttcgaataattaacttatttgttcccatcacatgtcacttttaattataagaactacccgttattgacatctttctgtgtgccaaggactttatgtgctttgcgtcatttaattttgagatgaagaaactaaggcaccgagattttaagaaacttaattacacaggggattggcagcaatcgagattgaagtcaagcctaaccagggcttttgcgggagcgcatgccttttggctgtttcgtgcatt

SEQ ID NO: 298477 - DNA, 389 bp, Homo Sapiens
gcacgagagcacacagagggataaactggctcgcgtgtggacactctccggctctgtggccagacgagagcgcacatgagggacccagcactctagagacacaacacacatgtgtagctgctattggctgagtgtgtatcctgtgaccaatggcctgtgtggctggacgatgccttggcttgagcttttttggtgctggttagttcccgcccctgtgaaacctgtggtaggtggaggttctgtcttaactcgaggggcacctgggattcaggacgcttctaaggggctctggctgtccgcgttaatgaaggacaacgcgtttgcgagcaccctgtgctgtgtcttgtgtagcggccttccagagccttgctttggacctttggacgccc

SEQ ID NO: 298478 - DNA, 387 bp, Homo Sapiens
ctcttcttgtggctcactgtgcacagactctctacagagacaccaatctgtcagtaacaacacgagagtgcagcactaatcggtgacatggtgtgcatagcggaggttgcggcattactttgcacaactagcgtctttgtgttcatgaaggaaggttttattttttcacacgagtattggcagtccgcaagatggcatgaaaagggtccatagcagtagcaacaatagcattataatatattacacgggtaaatgggcatgaagactatatatagctgagatattggttatatatatggttaagtaatatttgcccctttttctttaaattaaatgctagcgtgttcactgtcgtgtcgcatgtgcaccagcacaagtttaactggg

SEQ ID NO: 298479 - DNA, 432 bp, Homo Sapiens
agagcctccacacaggactcctccgtcattgaggacaccgagatactcgacagcgcacatgtgtctgcagctccgccaacttgaggcgcaagcgtgtgcacacggccccggtcattcgggctgagggtaccttgggcctcgtctgggcaccagacttggatgcacacctgtgccaggactctacagagacacgggcatctctgatgcgcatcttcagatgaagaggtggtggaggaaccttagagccgaccgacaccgatgtccatgggcaccacacgggcttaaagtcaacctctttgctggactgaggcccttagtcctgaagggcaagctgtgcccccggaatctctcaactgaggaaggagagctggctgagagcgagtcgagccacaatgagttcgcggtccagcggaccggctgcaaggtgccgct

SEQ ID NO: 298480 - DNA, 222 bp, Homo Sapiens
  misc_feature (111)..(146): n is a, c, g, or t
atgatactgagtggcagcacttcaactcatggtcttcacagcaagcttagggggcttctccaaagctggcttgggaaggttgtcaaaccttacaaaaacaagggggaaccnnnnnnnnnnnnnnnnnnnnnnnnnnnnnnnnnnnnagagggcccccttggcgccccttggggttttaaaacccaaaaaccccccagaactttttttcccccgggggaaaac

SEQ ID NO: 298481 - DNA, 552 bp, Homo Sapiens
cggaccatggaaacctgatccataatcagatcgcgtgtggtgctatagctgcaatataccaccgactaacattgatggccgaaataatgcatgtactcttggttaagcttaacaggagagagacacctttgctggctggtgcagttacagtgctattaccctatacttaacctgttagcagctctaacttgttcagtgtgccagtctcttcatttatggtgcattcagcaacatatatggcattctatactgttaacatatagggtgtctaccacaaacttgactattaccatctagagactgtatcctgcagattcagtcgtgataactgttagtactatacaaggtgaggagacagtattgtctttggaccaagaccgatgatggactgactgcgtcagtaccacttgttgtcagttttctagaagagagaaagcagagaagaacggactctcttttttcaaatgcacaaggataactcatataccaagtaggcaaaccacattgtgtggtgattactccacacaaagtgtgggttcccttttgcttata

SEQ ID NO: 298482 - DNA, 663 bp, Homo Sapiens
ctgcagcgaatacggcacgcggagcacgagtcgtgcgagaatacacagtttgagtgtatatttgatgtgggctcttttaaaaaagtgtaatggggtagctaatgtgtgtatatgtgtttatatagtagtgtttataattaataggagtttaataggagattgtgaattttaaacactttaatataaatgtaatattgggggatatatttgagaccttaatatatagtgagtcaaatgtgaaatgtgtttgagggatatattttctctggtttttataaatcaatttttatacccaatattataacacccttatttgccacgcccgtctgtgtgcgttggcctctatgacacaggagtgcgctcgtgggttatacctaaacggtgtctctggtcacatcttggtgtgggccctcggttgactcttgccacggcagctctctacacgtgatcacgttggccacactctagagactcgtgtttgccgcggctatgaccttatacggtgcactttccttgaagtgcgcacgttgcagcgatcccagagccgttataacgcgaactcggccctaagttgtgacctgtttttctgtaaacgcttcgaataagaggtgccctcgcaaagagttgaaagataccattaggtgggcgctggcctgatcgcat

SEQ ID NO: 298483 - DNA, 956 bp, Homo Sapiens
  misc_feature (300)..(300): n is a, c, g, or t
  misc_feature (455)..(455): n is a, c, g, or t
  misc_feature (458)..(458): n is a, c, g, or t
  misc_feature (513)..(513): n is a, c, g, or t
  misc_feature (536)..(536): n is a, c, g, or t
  misc_feature (582)..(582): n is a, c, g, or t
  misc_feature (584)..(584): n is a, c, g, or t
  misc_feature (596)..(596): n is a, c, g, or t
  misc_feature (642)..(642): n is a, c, g, or t
  misc_feature (661)..(662): n is a, c, g, or t
  misc_feature (665)..(665): n is a, c, g, or t
  misc_feature (674)..(674): n is a, c, g, or t
  misc_feature (683)..(683): n is a, c, g, or t
  misc_feature (739)..(739): n is a, c, g, or t
  misc_feature (835)..(835): n is a, c, g, or t
  misc_feature (848)..(849): n is a, c, g, or t
  misc_feature (864)..(865): n is a, c, g, or t
  misc_feature (913)..(913): n is a, c, g, or t
ctgctacgaataactggcacgagggaatttttttaaggagcacgcattagtgtacacagtgtgagagagagtggacactatataaaaatatgggtcaaaagacatcgtgatgcgttagagtcaacatttagcgtcagacacaggagacacacacgtgtgatatcacgatagacgctgtgggcgcctcgatatcagaagaaagaggtgtctcttatatcacgacagagcgacagcacgcgtatatacatatataacactcctctcaacacacaatagcgtcataagatgtttgcgacatgngagaaagcgtctatagagagtgcgactatatatttataaaagatgtgatatgtgagactcctcgtgcacatagagtctctaatatttatactcgcgtcgtgtgagaagacatcgtgtaaatattatagagtgatagtggagtatgagtaccacgngcngcgctcacatcgtgatctacatatcaacacacacctctatagtagacgactctcncaactatacatcttcacgatgtngcgcctcgtgggcgttctcacgaagtagtgaggaagaaatatatantntcgcgtcgtgtngtgagtactgcgtttctactatccatcttatcagccgtctgtggtngagtataaaaacatgtggnntgngtgcactantagtcactntatgtagaaaaaacactcacacaacatcgtgcgacgcgactattatttaaaataantatgtcgactagtgtgctcaatactgcatagtgcgaccacctacgaagtatgcgtcgttgagacgcctcgtctgtgagaaaattgtggactactangtgctgctgtttnntttgcgacaactagnntgtgtgttgaaaacaacacaaactatggtgtatgatggtgaagaatantaatttctacaggatgtatccactattattacctgcataagga

SEQ ID NO: 298484 - DNA, 346 bp, Homo Sapiens
aaagaagaagaaataaacaaagtgtgccaagagctcaaaaggaccatacctgttggacgggattacaggcccttggacccatcctcatgaaaaagatcagtgtacaaacatttgcctcctgggctctgcatgactgtgcatttcagtagaatcacctggaggtctgttaacagtgattttttagccctttgatggtcatcttctgttcaggtggctccacacgctgaggtcccacgtgcctgaaggtctggcccctccggttacatggctgtgcacctcctgggggcactcggggctgcgtttgctttcttcctgatattttctgttattatgttttttgcatgcc

SEQ ID NO: 298485 - DNA, 375 bp, Homo Sapiens
gtgatactcaaccaatgacttcatgagaatcagggggacagccatgggctattgcaccaagttaaattacttcctgttaatctacactacatctcatattgacgaccactctcatcttaaactgctcatctcaaatgattcaccaaattatatcaatgtaactgctatgattacagaccccaataacgattctctgtctagcaacacctactgaaatcatgtaaactgacacagatacttaaacattatactgtattctgctagtgaactcattccttatgtattaaccttttactaaatcttatgagcttttagaacactcctgtacctaagtgatctgaatatgacagacactgtcattctgtctgctgccgg

SEQ ID NO: 298486 - DNA, 404 bp, Homo Sapiens
ggagtttcgatgcttgcgaggtttgcaatgatcgccagagctcgagatcactacacatggatgcacagaatcaacataggaagtggcagatcgttagttgtgatccatcagcattattagggtagacgccatagattagactatgagatagagattgagcctactgtgattctgtgcttagagcagatcaagtgcctaccaggcgacattgaatacacagatcggccttcgagtggaatagacctgctcattggacagcactaagacgggagacctttgatgggactcatgacagcatacctgttaatgtgaataataactatgagcgcagactcatcaatgcacctgcgacatgcaggactgccaagtaatgccagtggcctcatttggagcagatgaaccgt

SEQ ID NO: 298487 - DNA, 104 bp, Homo Sapiens
  misc_feature (16)..(16): n is a, c, g, or t
  misc_feature (34)..(34): n is a, c, g, or t
gcaccgagcttaattngcccaacacttggggagnggccacttccctttggggggatttttttgcccctgtgaaccctctaagcctttttattttgggaaaacca

SEQ ID NO: 298488 - DNA, 224 bp, Homo Sapiens
  misc_feature (113)..(148): n is a, c, g, or t
tgggtgagcctttatttccttcttttttctctttagcctcgcctattccaggggtgtggtttcgtccggatgccccccagaagggagggtggctcattcggtttaaaagattnnnnnnnnnnnnnnnnnnnnnnnnnnnnnnnnnnnnaatgcccttttttctcaaaatttttaaagaggggccttttttggaaccctctaaaaaatttgggaggagggaaccc

SEQ ID NO: 298489 - DNA, 238 bp, Homo Sapiens
  misc_feature (64)..(195): n is a, c, g, or t
acttcgtttatttcagggggtggggtttcggccgaatgcccccaaagggagggtggcatacggnnnnnnnnnnnnnnnnnnnnnnnnnnnnnnnnnnnnnnnnnnnnnnnnnnnnnnnnnnnnnnnnnnnnnnnnnnnnnnnnnnnnnnnnnnnnnnnnnnnnnnnnnnnnnnnnnnnnnnnnnnnnnnnnnnnncaaaattttgtccggaaccccttttctctccctttttttggtg

SEQ ID NO: 298490 - DNA, 123 bp, Homo Sapiens
atctaaacaaactggctcctgtttaatgctcagttaggggcctttgctcccctggttaagtggcccaatgggccaaaaattcttgggcaaaattttgggcaaagccccccaaatttgaaaaaa

SEQ ID NO: 298491 - DNA, 790 bp, Homo Sapiens
  misc_feature (338)..(338): n is a, c, g, or t
  misc_feature (384)..(384): n is a, c, g, or t
  misc_feature (513)..(513): n is a, c, g, or t
  misc_feature (579)..(579): n is a, c, g, or t
gtgatgtgtccaactttagatctgttggaagaaagaagaaaggacaccctctctccctccatattctccccctcctgtagaaatttcttctgtccctggtgtattaactccgggcgagcgtagcataaatcaatcagcaggtagagattagtttagaattcaccagctgttcctccctgtaattggatgtaactatgcaggacaccttttgaaacagttatccagttactaaatgccagacctgtcatgggtcttcagctgactgcgacggattagcccctaaagagctagcgatttagcagcctgcatctccgccccctttgccagggagagcctgngaatgggctcagtggtatgctggatgcttctttcagcttgcagaanagaaagctaagatagatcatagggcagggtttgcctttctttggaggaggtttttgtagcctttccccattcctcagcttcatacagtgagtgagggtctatggaagtgttctgtgcttctagtgtttnttgtgttctctggcactgcttcctgacatggagtagctcctaggaaacacttgatgagaatggttntaggagaggtctagattgcagacagctgcagagcctcactgtagggctggtaggcttctgccttcagacagtcttggaaatgtgaggtgggattgcttatggcagggtcttttatttatttttcttggattactcactgcccattctctgcctctacaatccttcctttttcatgtcagtatttctcccttgccccatgccttgaagaggt

SEQ ID NO: 298492 - DNA, 203 bp, Homo Sapiens
ggcattcagagcgtgtgagatgctggcgtcgcgtgctccactagcgagatcgagctgcgagtctgacgcagtgatcatagagattctcagctcaggcgataggttgatacacatactgaggtacactgctgaggcatacgcctacatcttctgagggcagcgacaatctaggctacgcctgaatcggacgaacagtccgccgc

SEQ ID NO: 298493 - DNA, 189 bp, Homo Sapiens
ggcattcacactgtgtgagatgctggtgactcatactagtcatgagatatctacgtcacaggctgtctgcgttatcatacacattctccgctagcgtgataggatgatacacgactaaggatacctgctgatgcagatgcgaacatcttcagaggaccgccacaatccatgatacgccagatacaggcg

SEQ ID NO: 298494 - DNA, 345 bp, Homo Sapiens
acgagagaaaacctgtgttggagtgaccagagcgcgaagtgtttattgagcacattacactctcagatgaagagagagagagttataaatctgtgatgaaagcagagccactattggaagaggttttaatggaaggactgtgctgtgacaatatgcacaagtgccgggtcttttggttagactcggggaaatttgtgtggcatacttacacttttacaggaaggttataagggagatggaggttattctgagcttaaggtcagatgaggaatgtgcaatttggctggattctttaacaagttctgtgatatacacaatgtgcacaagtttttgtgccctgtgttt

SEQ ID NO: 298495 - DNA, 370 bp, Homo Sapiens
aggacgcggtattacaagatagagcctctgtgcgtgacctaaatgctataatggtcatttacagaggaagtcatgatgtggtccacggcctacaatgacactgttgagatattaccctaacaaagtctatatcctttctgagtgtttgtggaactcaccttgagacactctacatcagcggggctcttggtaatacaggtctctgcgttatgcagaaacgggaaacatcatgctcccttttggagctgagatgttaagaacacttaaacccttgccaaacttttttatatatgcttgaaaacgcatgggttttactttgtggtgcgctagagggatacctatcagaggatcaccggggcgggggtttttt

SEQ ID NO: 298496 - DNA, 352 bp, Homo Sapiens
agactctacattactatcagagaccactatagagaccatttacccacatatagtgtatgcgagatgagatagaaaactgtggcaattatatattaccgccaggggaagaggaaaaattgttaccaagcgttatattgccaggacttacccctatacctcttggctatatggattaacctggaataactctggaaggggaggcaaagcttagaaccccgaaaccaggcgaggtcccttaggacaagttaaagagcgcacccggctatgtgagaatagagggaagagttatatggagaggccacctaccgaggctggcgatatatggttgtgcaagatagaatcttagtccctt

SEQ ID NO: 298497 - DNA, 172 bp, Homo Sapiens
attgtgttcatggtctgtgacaaactaaaccaccctttttggggttattctcaaggcaggttttagctatttaagtggggggcccaactaagggctttcatggctggatctacttttcaggctaatttgtccaattgttagcgaggccctggatccctggtgggtgttccct

SEQ ID NO: 298498 - DNA, 314 bp, Homo Sapiens
ctgtaggaatactgcacgcgcggacctgtgacacagaatctacactaccccgtgttgtgtcgcgtggcatatctcctgcgttgcaaggcctgctgtctggtccctgtgttcctgtgtgtggatccccaaggagagactggccaacacccaaactgggtgagttcggctttaagctataccggcagagtgggacacacaagccaacagaaccaatatcttcttcttcccagagaggataggttcaggctttggaatggttttcctggggaccaaaggttacactcaacatgaaatactggaggggctgattcctc

SEQ ID NO: 298499 - DNA, 162 bp, Homo Sapiens
acccttggatccagtctgggcatggcccaaaaaaccttcttggaggggggtgaaactggcggcttgccaaaacccttaaagccctccggggggttttcccagccccctagggtttcaaaaagggccccgcggttcccaaaaagacccccaaattgggagaaa

SEQ ID NO: 298500 - DNA, 107 bp, Homo Sapiens
tccactccgatcagcacacatggttcgaactaaagcctgccgctcagggctaaattcctggggcaaactttttagggtttcctccaaacaatttggattttaaacct

SEQ ID NO: 298501 - DNA, 169 bp, Homo Sapiens
  misc_feature (26)..(26): n is a, c, g, or t
  misc_feature (38)..(38): n is a, c, g, or t
  misc_feature (66)..(128): n is a, c, g, or t
aagaaaaactcgggtgggcggagggngcttcataccancttaaaaaccaacaaagccctttgcaannnnnnnnnnnnnnnnnnnnnnnnnnnnnnnnnnnnnnnnnnnnnnnnnnnnnnnnnnnnnnngggggccaaaatttttccctgtatatatatattaggggggg

SEQ ID NO: 298502 - DNA, 409 bp, Homo Sapiens
cgcatgtgcattgagagcattagaggaactggcttcaaggccttttcttactgcggaccttagagatatgcttgactgcgtggatataacatctttcagtattacacctattcttctactgtggtttttgcacagggctgtcccacaggatgccgagataggtgcacactgacagttaattgaatacgatgctaatgataggagcatacaaatgatgcgagcattggaccataaattggcagctatacaggctgatatctgtgaattagacagagtcctcatctgaggtgacagcgacaccttctataaagacatgattaatcgcacagattctcggtgatgaccttgagtccacgatgtgttcagaatctgaagcactatgagttaccttagggggatacataggttc

SEQ ID NO: 298503 - DNA, 374 bp, Homo Sapiens
gagggggtgaggggtgacacccttggggagggggcctgcatatggcactgcctgtgtgcacatggtgtatgtgggaatcggtcctggggactattatgtgtgtatgatgccacaattgcacgactgctcgctattccaatgctcctgacttgaccccgccgacccccctgctcagctcggggccctgtccacacttcatggcctgtgtatgcgcgcagctctaggagctccactgacatatagacaagatgtgacttacattaagtttttcccttgaggatattactattatcttgtacagaatattatcctcttctgtgccaactgctgtccgtgctgatgacattgccccctgtagggggggtgcggcccct

SEQ ID NO: 298504 - DNA, 419 bp, Homo Sapiens
gctgtgcgagaacggcacgcgggggtgtctcccaacgcgtgtcacactctgtgctgtgcgcgtcacacagtggctctggacactctgcacgctgtgcgcgcgcgcgagacacagcgacagggcccggctctgcaaagaatagtgagagtgtggcactctggggccggagccacttaacttgggtgagagagggccaagggaggtttcctttcttaagagccctttgtggccctataggacacctggctgtgggtggcttccttattccagagcgcaagtcaaggtgggcccagagacactagaatcacaggccgtggctgtctctggctttggcctttctctaagggccagacacgggtctggtgtggcttttaccctcttctgagctctgtcgcctgggccggtgtgtgttccggccc

SEQ ID NO: 298505 - DNA, 439 bp, Homo Sapiens
ggcctttgggcggtgggggccacggagagggtggtcctcggactacgtgcgggacacgaggtcatggctggcaagtccctcagggcttcctcgatgccccagctctcgcaggcgcgcctaactgccccgttccaagggtgccaccggaccccgctggagaggaacttatccgttggctgatttcatcaccacgcattcacgattgcacgtcacctttaagcggagctggcggagccgcatggcggcaaggaactggattgcgattggtcagcacgtgcctcggtcagcggcacaatcggctgaagcgctgggacttgtgaagcatatcccgacgggattggtcgtcgatctgcgagagcccgtctaccgcagtacgcggtccacgtgtctagtggcaggacgagactccaggactatgacgatggctctggccgcctcc

SEQ ID NO: 298506 - DNA, 283 bp, Homo Sapiens
gttaccctttgcaccaagcactgtatttgctaggtattggggaagtaatattgagtaagacattattcctgttcactgtctagtgatacatgtgagatggtatgtcctagagatatgaataaaacgtaatgtaagaagtcatataatgcacttatgacaaaggagcctcccataagttttggtgcttttggaagtgaaactccggagcttttccagtgtggctgtgttcgttctcagacttggcttcacattagaaatagtcattaaaaataagtcacacttg

SEQ ID NO: 298507 - DNA, 355 bp, Homo Sapiens
caagttcttgcgcaatcgtatatatggcacgcacagtgagctatggggcgagttacatggcgacacagtcactctctccagcggctgtcattggcaccatggactctctatatctgatagccttgtaccacacaactgacaggctaccggcaatcctgggtgttccttggaaggctgaacagggcctgctagtggcccagggcagggcagatagtcaggcccagttgatgctgtgcacagaggtggacgtagtcacagtcccagacctgtacctgaagcaaacgattgtgcgacagtctgtctatacccctgtggtactatcacgcactatggacttgacagctgctgttgctgt

SEQ ID NO: 298508 - DNA, 402 bp, Homo Sapiens
ccccactggaaccatgtgtgacctcgcagtcaccggggccctgctgctgtggccgctcttactcctgctgttgtccatacgcaggcacgagcacagcagctgctatttgccaccacgccctttcccgcattccatcattggcaacctatagcatacgcaatagaacaatattcccacgtccttcacccgagtgggccagcgctttgttacgctgttcacgctgtacgtggactcacagcgcatgcgcgacgatgcacgcatacaatgcgctgaacgaagcgctgctggactacgacaaggtctaggccagaggcggacctgcacacggtccatgcgcacagggacaggcgaatcattcttaatacacggacctacctgtaacgacatccgtcggttccctgg

SEQ ID NO: 298509 - DNA, 263 bp, Homo Sapiens
  misc_feature (132)..(172): n is a, c, g, or t
attcatattcagactatatagctgttacggtagatcttggtgtggaaatgggatgatgtcaagtatttattaagtgagggagaaacgcaaattacaaaacagtacctctaattgctccatgtatatgattannnnnnnnnnnnnnnnnnnnnnnnnnnnnnnnnnnnnnnnnaggaaactgccttatttttgaagttgctggttgggatttctctgttctttcagcccctgggggacacctcagttaaagcaagatcagtctg

SEQ ID NO: 298510 - DNA, 616 bp, Homo Sapiens
cagtgagtgctagagacgagtgcatgtggaccatatacgcatacttcgctgtatcgctgtctagcgcgatgactcccttgtgcactctggatctcaccctcatcagagtgatgggtattcgatccgaacattgacatgttgtctatcctgacgcacttcacgagactctatggatcgtgtctgtactccgtcatcatgggcgacacatcaggtgacttccctgaagcgactgctaggactctgcggcagagatgtttaaactcacgatccctgaatgacaggactgcactcatcactttgcagacttctaccgttatgtttctacgctgctattatcatcatgtcatgacgcttactaccatgtctaacgcctacagctgcctactagactgtagactgtctgtattattattcatctattagtagccattaggctgctataaagctgtacatggtttttaaagcatctacgatataaacgtaggtcctaaagtcgaaatagttatgtattccatgcttctcagagactgcagcctactttggcgcgtgacagaccttgactatcttaagctatgccgcatttcgtctacgctgacgtttgcttgggagaccgtct

SEQ ID NO: 298511 - DNA, 659 bp, Homo Sapiens
aggatatggaacataagattaaatctgatacatatgttagtttcggagatgctatgatggctatagtagagtgcctgaagtacaaagtatgactattgagctgtaaagctgtatgacgcgatgaatgacttgtgcactcgagataacatgctcatcagagcgatgggtacctcagcaggaattgacatggcgtatatcctggcgcacttcaagagactctatggatagtatctgtactcgaacatcatgggtgacacatctggagactacaggaaagtactgttagtactatgctgaggagatgatgaaactactgatcctagaacgacaggacgatgctcatgactatgaagtcttgtaacatcattgttctacgactgctatagtattatctcaggatagctatctacgactcgcctacagctggcgtctagaatatagactgcatgactattattccactatcattagtcattaggatgctttaaagctgtacttgcttattcaaagcctataagatgtaaacggcagatgttaagtagaacatgatatggataccatggatttcagagacttccttctactgttgcgtgtacatacatcgacttgttaaagtatccagaatgtcgttttaacgaaacactttttggactctgtct

SEQ ID NO: 298512 - DNA, 664 bp, Homo Sapiens
aggatctggcacagaggattaaatgtgagacatatgttccttaaggagatgccaggctgactatacaagagtgcacgtagaacaaatatgactgttatgctgtaaggctgtctaaatcgatgaatgactcgtgcaccgataataacaccctaatcagagtgatgggtactacagcaggacttgacatgttgactatcctggcacacttgaagagactctatggatagtctctgtactcgatcatcatgggcgacacatctggagactacaagcaagtactgttaggactctgtggcggagctgatgaaagtacctatcccacaaggacaggaggatgctcaacactttgaactgtactccattcatttttatacactgctattagcattatctcagaatgctgatttacaagtcaaacgcctacagctgcctactagaatatagactggatgccttattattcacctataagtagtcattatgatgctatcaagctggactcgcgtttcaaagcttatactatctaaatggcgatttaaagctgaaatggatacgtattccatgttattaagagactacttactactatgcgtttcacagacattgaacctgataaattattgcatcattgcgtcttcatgacttttataacctgtgctggtct

SEQ ID NO: 298513 - DNA, 609 bp, Homo Sapiens
atgatctggcacataaggttacatgtgagacagatgttcctttaggagaggacaggcatgctatacacgtgtgcccgtagtccaaatatgactgttatgctgtctggctgtctagctcgatggctgactcgtgcactcgcaataacatgctatgccgagcgacgggtaacacagcaggacacgacatggtgactatcctggcccacttgacgagactctatggatactctctgtactcgaattcatgggcgacacatcaggagactgcaagcaagaactgttcggactctgtggcagctctgatgaatctacctataccacattgacaggaggattctgaagacttggcactgtactacatcatgtttatacactgagacagcatcattccagaatgcttattatgcatgtcgacgcctatcactggatcctaccatatatactgcaggtgctaatatgcaactataagtagtcattactatactccaaagctgcactcgtgtttgcctgtattacgttggccgtgctaaggttcacatctatacgtccaccatgttttttccacattgagtcgtcaatgacgcaatttggcacatgggctgctggcct

SEQ ID NO: 298514 - DNA, 354 bp, Homo Sapiens
gtacagtggaacgactgacatcttgtgcgaccgccgccttcctatttcgctcgttctcggtcactgcttgtacccggtcctcttctgggacaccagcacactgttcttcgtgaacaccttggcacgatcatacgtgacggtagcatgcatgcaggtgtacatgtgcatgtcatagcctgagaacgtacagcccagtgcaagggagcctcgtcatactgcattcatggatgagtgggaccactgagcacttaggactaaggacagtgatgcagccgacttagacacggaccaagtgacctatgacatgtatgcttgtcaagtcaagaattggctctaacatgctgggttctgtgg

SEQ ID NO: 298515 - DNA, 435 bp, Homo Sapiens
ggacagagactctggatagtgtcgacttgacactgattccaccatgaatgggattgaaggatcagttctgctcactcaacatctgtactcatgtctgaactatgggttctagacagtccaaggactcttatggtgagagcctgaactctcatgagctgcagacctggactgactatgctaaggacctgatagatacaggcactagcccagagctacaagcccatgccagaagttactgtgacatgtccttgtagcagattgcatcctgatcaagacgctatgccgatagccgtgaacgtcttgacctagtacatggatgttgcaactcagtctatcacgtagtgacgtgttcagaccaatgactctcaagcgtatctaggctttataacgagctattgggccgttcgtcggttcatacccacgtagacctacgat

SEQ ID NO: 298516 - DNA, 424 bp, Homo Sapiens
  misc_feature (399)..(399): n is a, c, g, or t
acctgcactagccttagacacggatcttgcgctgcttatgcgatctggtctgtgggtgacaccatgggcatgcctgcgcacatggctgatgacttccctggaccctgccaccttgagtgatccacacatggtcttaactatgcttaacctcatgccactagtgaagagcgctcttggacattacgaggtgatcgccatgctatgcttgctatcgaccgatgtccttgattacgctttgatcttgacggaggagcgggacttgtgcaactgatgagctatttatagcacacctatacagatgctgtgtctatactagcgctagacactcgactaagattgttatgctgtctctccaggggacccagcagtgctcattctcgtgcgtgtgtgtgtgcccgngtccctgtggcctatagtgagtcgg

SEQ ID NO: 298517 - DNA, 313 bp, Homo Sapiens
tgacagagtactagagcctccaggttcagggctgtcttcagctatggtcccttcacggtcttcctttctgcgtgactgcatgtgcccttgtcttctgcttgctttctccgtgtccagccatgaggtactgctctgccatactctgataatcgggtgctccattacttattgcagatgctctgtttcgtccttatgtgtgctcgatgcattccgatcactagaccttgttgaatccccctgtctactgccattattgggcttgagtctttgactgtgtatcgtattggtggctcccgtcttcctgggcccgggt

SEQ ID NO: 298518 - DNA, 359 bp, Homo Sapiens
gccacatgttacttgctagccagacgtggaattggatgattatagactatgtacacctttggactcacttactgagttcagatgaaagaatgaggtggcgagtaactcatatctgtcatttgctgctgagcatcactgagaaggcctcagttgctaagccacctctggtctggctaagccatgaactggcttcctgccatgagcagacattacggtcaggggatatgcatatggctcagtcttttccccttgagggtctcttatagatgctactggtgacaaaggatcgtcgtatagtacaggcaccaagggatgctgtacatgacggaatgcggcttgaggccaactgtgaggcccgg

SEQ ID NO: 298519 - DNA, 224 bp, Homo Sapiens
ctccaagtcccaacaacgtgtacggactcagctgctgtccagctcacagcggccctggcaggaccacaaatatcctaagacaagctccccaggcccaagtcaggcctcggggtggcctatccaggctcagcacctgctactacgatgacatctgcaggcccccggcccagccgggggactgctatcggcccagctcgggcctagcggcggactctgcaggcccc

SEQ ID NO: 298520 - DNA, 409 bp, Homo Sapiens
attgtgtctccatatctcaacgtcattcagctcgcacagatgagtgagcgacacccttatctactttgtggtgtatatctgttagagctgcaccatagtagtgcaatctacgtgtgaaaccgtaccgatgctgagtgatcctactcattacttcaagctattgatacatctgataccgacctacactgaggagttacactgatgcgggctctgagatgacattgatagcgagtactcgcaatgctaccgtgctcacagttgcactgacctgtgtctcactgtgtccaggtcgatatagcataccgcagtacttagagaagtatctgtctaccccatgtgagacaggggtactcaggacctgcttgtcccctgcccactgacatgatctgtgcctgctggacattgcgtg

SEQ ID NO: 298521 - DNA, 195 bp, Homo Sapiens
ggcgaatgcctctgataccacaaaggctgtatttgacatggagctgtctcctgaggcttagacttgtgaaacaactgtatgtcaaatgtgactgaccatccccatgtgtgatatgagagactggtcgttcttcaaccactcttgagggttatttatatcgtggacctgtatagtgcatatctcaggctatatggt

SEQ ID NO: 298522 - DNA, 576 bp, Homo Sapiens
ggacacataggcgcgagaccatgggaccttttgtacgacccaggggctggaatgcgaggttccttcagtggatgctaggggaggtgctgggcgtttcgctgccagcgaatccattcacaccgggcgtgcatacctaggcaagccctttggtctcggccaaacacttggaccgcatgtgcctgcaactaatttttcccagaacgtgttgtctagacgacatggaggccttactctgtgcctgggggtggacctagagattgctcaagatgattggtcaagttagaagtatactcagttcacagggaagcaactgaggcttggggagtcaggcactagcttactgataagctacaaaccatctgggagcgaggattgtaaaagtagcttttagacacatgtagggctcacatttttttgtcttaaacgagcctctttcgagagtcttttggttaaaccaaacaaaggaactgtttgtatgtaccctctcgcttatggaaaaaatatatgtccgtcataaaaagctgttttactagacttaccctagggtgttaattctttgccaggatcccccttttt

SEQ ID NO: 298523 - DNA, 543 bp, Homo Sapiens
  misc_feature (210)..(210): n is a, c, g, or t
atcaagcctattatattgtggagcccaatccatgagccgttacagaggacctgtaagacatgataatgacctccgtactagacaagggaggcgtattcgaaggactgcaccatgcttcacttatattcgcatgccactgacttcactcacctgctgtacactatggccttctatacgggagtactctgtcaatgagctcttaagtgtttntcttctgaggaagtttacgagccttgtaccacttccggctagactctaccctctacctaggagggcacttggctctgactatgcattacactgatcaacctctatgagtaccactactagaacgcatacgttgtactctcattacgtagggcacattcctgagctcaccatagactaattgattacctctctaacccaataatttaagcactgcttcttggaaggggtactgggcccatattgtaccctactacagaggctgaacttctggtcttcccttaacaatttcgacggcgtgtacagcttgacattttctcgagtcacggcttgcgg

SEQ ID NO: 298524 - DNA, 306 bp, Homo Sapiens
ggtgaaaggagctctcctctcccgcactgttccgagaagcggttgttgacattcacaaagtgtatgggtgtgatgattccaggactattattgagtgacagtgacgcttcacatttggggtatttcaagatgagcgattctactgaccaaactgactagcgactaggaggtggaccactctgatcgtactgctgagaaggcagttggatgataatgttgggagagatgaagatgctgcttgattggagctagatgatattgtttataagacctcttatgacttgcgatacctacatcagatatttg

SEQ ID NO: 298525 - DNA, 351 bp, Homo Sapiens
ctttactgcttatacgcgcgagagcgcgaagatgcggtgaatgagattaccgaggctagcagcggcatctggctggccctgtgcaagcggcatgatgtcggaagatgatcagcttcatatgaggtaggcgtgcaggaatatgagcacggcataagctgaacgtgctgctctgatgagctatcaccccactgctgaagtcacacattgtacacctggatgtcaacaacctggcacaattgttactgtccttcaaagatcttaagcaaaggtatatctgttgctgaaggatgaacctttctcaagtgaatgctcagcgtaacacttagtagacgagaggctagcgaccgttgg

SEQ ID NO: 298526 - DNA, 546 bp, Homo Sapiens
  misc_feature (385)..(385): n is a, c, g, or t
ggatggtctgcccagaacggggatgagcactggcgagacctatctcgtgctatacgctgacgctgacaagccctacaggagtgtgggctatctccctagctccgtggaatcactacagaaggtgccagaggacccttacactctgctcagtgaggaacaagcccacgccgaacaagttcatcctcaagacttcctggacaagacttttttctatagcggcactgtgagcctcagttacccaagtggaagcggtctttctaatgcttgagactgatgacgacacgtttgttgcttactctgtcaaacaagaatcccactagaactgtcttgctgtaggcactggattactagatgacctgaagaatgaacgcgtaaagtcagttgngaaagcaggtaatattgacgacacggtatcaatcaaactagtgtgtacagctcggctctcgagttcgacttgtcatgaccaatgagttagtgtgaccactcttacaacccaggcattgtctatataccgcccaactaacttaatttccatgtctctctggg

SEQ ID NO: 298527 - DNA, 480 bp, Homo Sapiens
catgtgtgccctatatgaagatgatgccgctgaactgtcaggtcctcctgatggtcagtgccagggattggaatacagtcatcctgtctatatcatcatagggatgaacatattccatgttctgctagagcctttatgactcagtaggggagagatcaagaacttctgcaagtccctggatacagcatcagcgcttggcttagggaacaaagtaactgacaagtctgtattttacagtctgggtatttataggctatgttacgatgcctgcaaaaatgggagcaaacaagcaatcaagtaactccaataagcttcacttaatccatttcttcatgaacaagcttttagtcctaacagcatttgggagttctcatgaaagaaatacaggagaccaatgagccaggagatagatagagctcttcatcacagaagagacatgtttttaaaagggttacgtgatttttaaaataaaacaaccca

SEQ ID NO: 298528 - DNA, 341 bp, Homo Sapiens
  misc_feature (104)..(166): n is a, c, g, or t
aaagaatatagcttctatagttcattcttttgagttatatttactgaaaatgagaatttagcactttttgtaccctattgtcatcctgcatataaaacttgtgnnnnnnnnnnnnnnnnnnnnnnnnnnnnnnnnnnnnnnnnnnnnnnnnnnnnnnnnnnnnnnngcaactcagttttaaatcactatattcattctatgcaagaatcaggtaactgattatattgcctcttatatattacctattgagtgtatttttctttggtaatttatttttaactagctacttttctgtatttcttccaccagttgatagttcttttcttagattcttcttggcc

SEQ ID NO: 298529 - DNA, 169 bp, Homo Sapiens
agactgagaaaccacagaaataaagaagcgctgatgacaatgcctgcttgctgatggttacgatgatcatagcagtgtgcattttgtatgcatgaagcctgcgactaaataaacgtgtggggaaatatttgtaaggaaataagctattaataaaataagctaaaatcac

SEQ ID NO: 298530 - DNA, 166 bp, Homo Sapiens
acagaagaccggacgctctatggctctcacaatggctacactctattgacaacaggcgtccgtacactttcacagtccccgtgcgtcagggccactccagacatccccgatctcatgccctaacgctcgcatggctgacgtacgccatgcccacgcatcttgccgg

SEQ ID NO: 298531 - DNA, 369 bp, Homo Sapiens
aagatttttgggagagaagaagtgttgcggggaggtggaggtggtaattataattactaaaacaggaaagaaagggcccctatgcagaattcagccaccctctgtaagtcaactcagatgggaaggacctctcgatctgtccaggaattcttttctctctgaggccaccactgaagaaagcagagcctggggccccaagaagaccctcccctagagacaatgagggagctagcaccagaagctgcccatgagtggacctgagatccattgtagtggcccaaactgtacaataaccaagactcaatctcacctttctacctggtagactgaactcaaaccatagctacaggggagaaggtgtgtttctgg

SEQ ID NO: 298532 - DNA, 388 bp, Homo Sapiens
gccgccagagcacaggtgctatgagtactacccctatgagtcacagtgtggaccggagagactcatgctcaacattgtctgcattcggacacgttacatgactgcagagtgcaccagtactggtcatctgcatgtataagtgcgagggcatcgactatagaccattgactaatctgagaaggagcgctgctgagacgctagcgagctattttgagtatgccagggccatgtgtaaactgaccgctgagcgtgaacagtggatctgcatcagacatgtccttgagcaataccgtgactaggctgtgctaagtcactatctgacgcgccaccacacagagactgtgatcacatgatcaccgtacctctcaggctgacagtgctgtactgg

SEQ ID NO: 298533 - DNA, 608 bp, Homo Sapiens
  misc_feature (319)..(363): n is a, c, g, or t
ggcacgaggagataactactatcccgtctcaccgtgaaagctgtcggaatgcaaattctcaccatcattcatacattgaagcccacataaagaaggccacatggttgaccaaattgatgaattttcccggttatgcctatacacctactctatgggaacatcagacgaatggccgggggatggggggacggctgcttcgcatgtgcgtgacgtgcatgcaaggctcttacatggacagtcatgagccgaagggagctgggtttgccggggcagggttgtgaccttgctgagtacaccaggtcgcctgatgcggcccgtnnnnnnnnnnnnnnnnnnnnnnnnnnnnnnnnnnnnnnnnnnnnnaggttctacgggccctgaagctttggtgtaagaggctgggcaggtgctgggccttcctgggggctggtgggggtcttcagacaggtccagtagagcccgggcgaaggggaatgtggtagggtgagcatttgtggaacctggtcgcgatgaagtgccaggcggggaatcggggggcgctgtgcgccgagggtgctgggccgtttggggcggtgccgatgggttggccgggagattgtgtgggtgga

SEQ ID NO: 298534 - DNA, 282 bp, Homo Sapiens
agtatgtgttcagtatacagagagttctcagtcttgaccgcgatcagatcttctgagatccatgtatagccactgagcagaacatgaacgccaatgacgtgagcgctgggagcaagcgaccgagaatactatacgaaggcatgggatgccattgactccatgggaccaatgcggagtgatgcatacacatctgtgctcacattctacggagtgagtcttgacacactaggagaatacactgtgtgccaatgactacaccatgcgttatcgtttgtactggcg

SEQ ID NO: 298535 - DNA, 330 bp, Homo Sapiens
gagattggttctataagacataagttgtcaatcttgatcgcatgcgtaaccatgcacagccataccttgagacggagctattcttaggttaagaaccgtgagtgagaacgggatctgcgactgtgattactaggcacagctatgacttgcctgtgactcataccaatcaatgtggcgtagctgctgaccattgagctatatattctatgaatgtgctcctgcgcccagggtgtgtttacacagagcgcgcagtggtgagaacctgttatctactgttgagggaccctatgatagctggcgaatgtgatgtatggctatgacaggttggtg

SEQ ID NO: 298536 - DNA, 420 bp, Homo Sapiens
aggtggtacacaaacccaggggagcaccacctgttgacccacgcgctcctcacaagcaccttgaaggcccatatgagccccatagcctgtacgccaagggtctcccattacaccctatacaagtcctgtgagttggacacgaacgcagcgtatggttctacagcacagtactttggggaagcaccacgttatggcgacttactgagattcccccatgagtgagaccggctgtgtgctagattctgtgtggagggccatgtgccatcaccatgagctccacattgagacccaatgcagaaccaagtggctttgacagagagggaaccctattgtgcaaccggctgccttgtaacttttgtgagttgtgccgagcgatgtgggccagggacatgggacagattctggtgtgagactctgcct

SEQ ID NO: 298537 - DNA, 374 bp, Homo Sapiens
atgagatggaccatgcggtacgctgacggaccgggagcctgagcgctccacatcagatattaagggctctgaatcctatatctgtatatctctggagcagctgaggcttacacgagtgtgactgatgacagggattaccgctcattggacctcagcaagtgtgatccagattacctatagggacattgtgccaagatgaaccatggagtaactggcgatcaatacccgtgctaagtattacttacaggactccatgggcatgcctgccggaatcagatgggttcatccgattgctacattgtttggtgccacgcacattgggatatatccatgcatgtgggaatcttggaactgggtgttgagcctcttactgt

SEQ ID NO: 298538 - DNA, 366 bp, Homo Sapiens
agttgtcttaccggtgctagtactataatggtgatggatacctgtggtccaagaggtatggactattggaggggatcaaggcctggagcgcggatacaggaccgtgcgaaagatgagcaccacaatgatgcatgttgacaacacgacttcgcgcagattgtatgacgcactaatctattatagcacagatagggctgcatgctagcctgtgtgtacttatacctgagctaactgtacgacagtcagcttacatcggagtaacctttatcacggacatcggtgtgagaagcgattatcagaatgcatatgcacgactaggacagaatattgtgccatgctaccgtgactcttgatcctataggatcc

SEQ ID NO: 298539 - DNA, 213 bp, Homo Sapiens
agtattcgttcaggaacgagaaaggtatcattgaggaatgctagtgtctcaatacatatgcatgtgtaatcacgagcccatgaacatgaataacgtgaacatgaggccaggaactgactgagaacattatgtcgtgcgacatttattgtatgcatgactgctatcaaagcagttgcccctgtcagcgtatgactgactacgcttactcgtggt

SEQ ID NO: 298540 - DNA, 366 bp, Homo Sapiens
cggctgtgacctgcgactagagcagttgtaccctagaggcatgtgtgttgtgactgtgggccgtgactgcggtagacgtctataagccgttaccgcagacccgaactatcacaatcctgggttgtcgatctgcgtggctggacttattgatgatttagctgcgagcatgtcgctttgtggactcttaccgtataacctgctaatactctatgacgcagaccgtactagtctatggacgtgactctcatacttgacttgcagacacagtcgttctagatagtactgctatctcttattatacagactgtatcgacaataatggttatgcttgagtatgcatgatcatgtgtcatctgtacacatccc

SEQ ID NO: 298541 - DNA, 641 bp, Homo Sapiens
  misc_feature (45)..(472): n is a, c, g, or t
cgaaactaacaaaaaagttaacacttttaagaagcattcttacgnnnnnnnnnnnnnnnnnnnnnnnnnnnnnnnnnnnnnnnnnnnnnnnnnnnnnnnnnnnnnnnnnnnnnnnnnnnnnnnnnnnnnnnnnnnnnnnnnnnnnnnnnnnnnnnnnnnnnnnnnnnnnnnnnnnnnnnnnnnnnnnnnnnnnnnnnnnnnnnnnnnnnnnnnnnnnnnnnnnnnnnnnnnnnnnnnnnnnnnnnnnnnnnnnnnnnnnnnnnnnnnnnnnnnnnnnnnnnnnnnnnnnnnnnnnnnnnnnnnnnnnnnnnnnnnnnnnnnnnnnnnnnnnnnnnnnnnnnnnnnnnnnnnnnnnnnnnnnnnnnnnnnnnnnnnnnnnnnnnnnnnnnnnnnnnnnnnnnnnnnnnnnnnnnnnnnnnnnnnnnnnnnnnnnnnnnnnnnnnnnnnnnnnnnnnnnnnnnnnnnnnnnnnnatgacttcaaacggcctaggggcgacccgtctattagggccgatggacccacttacgtgaaaccaatcagtcctagtcaagtttttttggaggtcgatggggctggtaaggacctaattaggaacccttattgggaggccccccgattttagcttgatcggcggccggg

SEQ ID NO: 298542 - DNA, 731 bp, Homo Sapiens
ctctgtagtacaccagagacgtgagatgaaccatccaccaagaacctgaaggacctaggttaggagatgcgctcctgtacttggtgggcacctaattgtgtgccatcagtgcagtcgccttagccacccccatgggaagatcgctagtggtgcctcaacacaccacgaacaccgagggtgataaaaagcactgggatgtgtgcagatctcatgaacaatataggtgacctatacacatacacatgctattgctacaccttggcgcataatttaacacgagcttgatccgctattgagagtgagtgccttgagacagattgtggacaactctctgccaccacagattgtgtgacagcgagacccgacacaggggcttcggcggagatcactgtgatactgcgctatgcgcagagctgtgacaccagccctacatccctatgagactgcggataaacaccgtccgctaccacttgctctgtatcactcttgagatagatctcgagcgcatgagtgatgcgtactaagaatcttccagcagactgctgtgatactagttctgttagagcgggctatttgaggactgttcgcacctgaactccatgtgcacgcaagtactactgactctgttgaatatccccatgtgactgggaggctacttcttcttacaggaactggactctagagcggcccgggcccataacaccataacagtttatacgtctggcctgctt

SEQ ID NO: 298543 - DNA, 562 bp, Homo Sapiens
gaggtactgatcttaccacatctcgggcatggggtggactattctattcctcacactcctcactcaaggcacaaggtgctgggcccagtctgacactgactcagtctgactccgggtcttggtctacaggaaagtccatcacctttttctgcactgcatccagcagtgacgttgttagttataactatgtgtactaggtccaacaacacccaggcacagtccccaaggttatgatttatgatgttaataatcgttcctcagtgcaaactaatcgcttcattgactccaagtctggggacacggtcttcctgaccatatctgcgcttcaaactgaggacgaggctgatttttactcgatttcaaatacaagcggctggactttagaagttcgaatcaagtcccaagctgtccgtcctatgtaagaccaaggcccctgggtactttattcccggcctctcctgacgagcttgaagcaacagagccatcctgggttggtgactaaggaattttacccaaagcccaaccatttctggaagcaataagccccccttatgtaggggcc

SEQ ID NO: 298544 - DNA, 103 bp, Homo Sapiens
tcatcccgggctgtaggaatttggtacgagctctctctgtgcctgtattgtaacgtgcggaagaagcacgcgcacttttaggaggaggaggagaagatttatg

SEQ ID NO: 298545 - DNA, 564 bp, Homo Sapiens
cacgaggaggcagcgatctcttgacgtctacaccatagcctgggctctgcggttattaatccttctcactccacacactttttccagatcccagtctggcctgagttactctgtctccatgtcagtcggcctctggacagacgatcaccttttcctgcacttgaaccagccttgatgcttgtaggtgtaaacctgtttcctggtaccaactaccctcacgcgaagcccccaaagatatcattgatgatttcaataatctgtcctcaggcctaagtaatcgattctctggctacaagtctgggaacacgggctccctgacccattttggcatcatgctgacgactaggctggttattactgcagattaaatacaaacagaggcacttctgggatccgcgcaaggaccaagcttgccctcttatgtcacccaaggtttcccttagacactatggtcctccctccctgaaagcttaaggctacaaggcccactggagtgtctatagtgaattttaacggagcctaacagtggccccgcaggagattgccctttaggcggatgtggga

SEQ ID NO: 298546 - DNA, 396 bp, Homo Sapiens
  misc_feature (210)..(300): n is a, c, g, or t
  misc_feature (368)..(368): n is a, c, g, or t
ttcaattctttgtttagaatgtgtacattcttactcagtagctgaggaagatctgactcttagagaacaggatattttggtcttgcaactgatttccagggtggaagttaagatggtcccagtataactgagttattgattattaatggtaggaagatataggagatggcgcaattattaagggaaagcattatatttattttttggtannnnnnnnnnnnnnnnnnnnnnnnnnnnnnnnnnnnnnnnnnnnnnnnnnnnnnnnnnnnnnnnnnnnnnnnnnnnnnnnnnnnnnnnnnntagcattgcattttagaatggcatatcagaaataggaattctagtagtgtgtatctgtgggaaacggnggagtattctgagtaggtcggatgccgg

SEQ ID NO: 298547 - DNA, 368 bp, Homo Sapiens
tgtaggaattctgcacgaggccgcgtgtatgggactgttgcatacgcgtgtgtgtagactgtggccgctttgtgttctttggcttaataccgggagtgaggggggccgcggcggcgcgacacaccggcttcggaaccactgtgcgacagggcttgacatgagccggaaaaaaagtctggatttctataaggcttgagaagctctgcattgactggggggggtgggattatcatataagccggtgtgttttattccaccacggaagagattaaccactcttaccatggctgtggtggtatataaaccatatgccttcttatgattaatgcgggatcgaatggacgtgccaggtgagaggtacgtgggtg

SEQ ID NO: 298548 - DNA, 227 bp, Homo Sapiens
  misc_feature (100)..(160): n is a, c, g, or t
tacagacaccttaggcaaacatttaccaaaataaaggatatgccgattagaattgaacccctggcccaataaattttccccccagggggaaagtaaaaannnnnnnnnnnnnnnnnnnnnnnnnnnnnnnnnnnnnnnnnnnnnnnnnnnnnnnnnnnnnggagaccccgaaaaaacttttttgggggggaggagaaaatatattaacccccccacaaagaaggggg

SEQ ID NO: 298549 - DNA, 119 bp, Homo Sapiens
  misc_feature (41)..(41): n is a, c, g, or t
  misc_feature (51)..(51): n is a, c, g, or t
  misc_feature (75)..(75): n is a, c, g, or t
gtggtgaccgggttgggctcttttgagatcacaactttccnttgacacaancctaaacgccccatttagagtggngggggcgggcctctcccccggcctctttcttggggggaggggcg

SEQ ID NO: 298550 - DNA, 377 bp, Homo Sapiens
  misc_feature (86)..(151): n is a, c, g, or t
gtgattcccatgcctcaactaccagactaggtggagtacagacacgcggtacttctccaagctaatcattgtatagagagactacnnnnnnnnnnnnnnnnnnnnnnnnnnnnnnnnnnnnnnnnnnnnnnnnnnnnnnnnnnnnnnnnnntaacttctaaagtactcatattacctgtgttaatctcactgccttggcaggctccaagaactttcatactttccatgtacgatcttgagataatacctacactatcatctatgaccaatactctttatctatatgctactgtactctaaagtgccctttggtgagactccaaccttcacactgctcttgacatgtatgtcattctcatgcatgtttccgtacctac

SEQ ID NO: 298551 - DNA, 359 bp, Homo Sapiens
gtgatacaggcacactgactgatcgagtgctcatcatattctagggttgaatctgccgtgttgctagtgcaggacagccctttgctatgcctgaataattaccatcttgtacagtgatccggttaagaacgatctatgactcaggagactggattacgtctatactgctagactgccttagtgttcgtaggagggctgatgcgaatgtgacgtgtcacaccactcgggtgcgattacactatgaatcgctcaccaagagtctgggctttcgacggtatattaataacaggcctcggacctgatcagagcagtggctatcccaacatgagacttatatcttgtaacactgcgttgttgtg

SEQ ID NO: 298552 - DNA, 177 bp, Homo Sapiens
  misc_feature (45)..(45): n is a, c, g, or t
tctattgcgagtctgtttatggtccgaatatgggcgcggcttttnggagggaaatttttagggggcacttagggggtttaaaggttgggtttaaaattttaaacaaattgggaattttttgggggccaaatgggggaaatttttccccgttctaaaaaaggggccccaaaaactttt

SEQ ID NO: 298553 - DNA, 682 bp, Homo Sapiens
  misc_feature (178)..(178): n is a, c, g, or t
  misc_feature (181)..(181): n is a, c, g, or t
  misc_feature (639)..(639): n is a, c, g, or t
gatggtttcgggggcgagcactaactggggattcttatatcagctggattagttttttccccctaaacgagtctacaaaatcccggacatttccagggtcctgagacgagttccctaccttccttctgcgcagagattgcctgtcggggatgaatcgcttagcgagacccagccatanctnccctctcatctggcagacagaacccaggcttcaggaagagaagcggctttcgcagattcacgctaggacgggctgagctgggaatcgatcccaaattccacagtcccagtcctctcctgggtgctgctctcctgactgcgtatcatgcccagaggtgatggcgcacttagggttagggaatggcagacctggagaaaagggttccgctactaccctcggctttgccaaacttaacattttgaaattccattccacaaatgtgtgctgcgtctctgggaacaagacagcgtaatgagcatcgtgagaaatctaagacgaatacctaaaccggcgctgtctttaaagagaatacaaccatgctataattacatacagagctgtatctctaataaggacccaaccacggctgtatctggctagatattttgtttggtttgagctctggttatgtgccatancccggaaaatctattcacaagggataggggaaggccagagcct

SEQ ID NO: 298554 - DNA, 803 bp, Homo Sapiens
gttgcatggaggcggagtgacgcttctgcttgtagaccgagcctgccggactacaccaaggctgaggagcccatacccatgaagagccttggagccctgctctagctgctgaacgcctgcactggcggagagcagctggccctgtgccaactcctgcccgacaacattcatgtgcaggagaactgaactctcgctgcggatctatgggaagtggtacaacctgtacatcggttgcacctgcccctggctgagaaacatcatggacaggatgactgagaacacgctagcgctgtgagagggcgctacacacgcggaatcatcatgaccagcactcagaggaggagaggcgactgaaaggatagggcttgagcttactagaaagcacattctgataggaagtcactctatcacactgccaaatgggacataaccatggagtcctatgagcgccacaccacctatgatgagtatgccatagctctgacccatatattgagccggaatcatggacccaccattactgacaagctctacaggcggacgctgcagatgacggtaactctacaggacgactacaaattgtgtgcccagagtgtgaacatccctgcggactacattttcaccatgggccgccgaggtgaatgcgtccctgaagagcacgaaccatagcccatcttaacaccgagagtccggaaggctgagcttcccccagatgaggaaggatcacgacgtgagcaactggtaactgtattcaccggagatactctgcagctgggctatcacgccgatcctgcatgtgatgc

SEQ ID NO: 298555 - DNA, 605 bp, Homo Sapiens
  misc_feature (94)..(94): n is a, c, g, or t
  misc_feature (355)..(421): n is a, c, g, or t
  misc_feature (519)..(520): n is a, c, g, or t
  misc_feature (528)..(528): n is a, c, g, or t
ggcccccataaatgcaattccccccccgaccgggacataagcataaggtgtggtgcccccctttccaaacgtgcggcggttttaggcgttaaantttaaaatgggagctccctttagggtttagggttaggttttaaggcgttcttgccccccaaaaccttaaaaagggtttaggttcaagaaggggcacatcgcccataaacacgatatttcgccttttgccgtttgaggccgcgttccttaatagtgaactcttgtctcaaagtggaacatggacaacccctatcccggtttattgttttgttttataagggataatggctatttcggcctatgggttaaagatttaactatnnnnnnnnnnnnnnnnnnnnnnnnnnnnnnnnnnnnnnnnnnnnnnnnnnnnnnnnnnnnnnnnnnncattcacaattgttagaaagtgggaagggtgagggcctcttgcctattaccccatctgccaaaaggggaaagtgctacaaggcgataaagttttgaanngggggggntttcccatttcccactctatcagaagtcggccagtgaattgtaaattgtcacaccacacgccaaattgggaattggg

SEQ ID NO: 298556 - DNA, 343 bp, Homo Sapiens
ttgagacacacccactccctaaccggcgcgctcttcgcaccgcttaaaacatgctcccaccctcttaatacattacaccagtgctaacttcacacctttttacccacacgtccatataaaactacgagtcatctccttagcccatctcttgaaccgcacaccacttattgcggttcttacgatcacatttccaccccaacgctctccttcccataactctgcttaacacaccctccatcactatcctctcctatatcccagctcccaattccttcttctgtaactttcctgcacgcttttttttgtagcttactggttggtttggccactagactgcagggcg

SEQ ID NO: 298557 - DNA, 398 bp, Homo Sapiens
gaaccgggtaacctttaatgaccttctaatcctctttatctggtctcataacaggggcgtgtttcgacaacatgcacccaggactgacgttgcgcataggatgtgagacgtcggagacagacacattgcagccatgctgtgcaacgcttatacatattctcataagcagcgtaccatttaacatcacgttaaactagcgaatgaagcaactgagtttgcagagacttcagatgctgatgacggagctgaagattgtctcaaatgactgtgcacactatatcgggactagctatgcacaggtgcaagtctccttgcctatggtgagaggagttgactgtggcgcagccctagaacctgagagacttgaatgctcatagcgcacagatatacccctgcct

SEQ ID NO: 298558 - DNA, 365 bp, Homo Sapiens
  misc_feature (155)..(208): n is a, c, g, or t
ggcacaaggcatgctgaattggcatatgacattacaataagtaaaccgtgttcgcatgtgcattttagatggcgtcaagctgtgccagccaggctggagctctatgggacaggatcagataactgcatcctcatgtgtagcaagttcaagcaaannnnnnnnnnnnnnnnnnnnnnnnnnnnnnnnnnnnnnnnnnnnnnnnnnnnnncatcaaactactgtgcttgcagtagatacagaggttcaccatcatggtgatgtaacgctccgctgagactgcagaccaagcgatccatagcatgttggactgacgcgctgggatcaccagagtgaacgaatgggcccggccgtacctagtcctctgg

SEQ ID NO: 298559 - DNA, 401 bp, Homo Sapiens
acccacttgagcttattacaacagagacttcaccaaaccatttacctatatgagatataagtgatggaaatagacacctggatcaatataaatagtactgaaaggaatacacgaagaatcatgacacagcataatataccaaggaataacctgtataagtactgcataatgaattcactataaataactctgtaatgagagctgctactacgcttgatatcagactagctacctacgaacatctatgagaccacacccgtctatgttgctgaatagagggaagatttatacgtagaggcgacgaacttacggagcatgtagataactggatggtctgatagaatcttagtgcaacgatctatatgaccagagaatcctatctctgccattgttgtccctgc

SEQ ID NO: 298560 - DNA, 291 bp, Homo Sapiens
cttgtactacccacgtgataacactgaatactggacgtgtttatacctgactaccttggacctgaactgaggaaacagcgatatgctgataatgagtagatggtagttaatcactcaggaactgtatagtcgatccagatacacacatctctaagaatagggggtccaaagcataatgctcgtggcatgaacaataagattacgagacagatgtcaggactcttgttggagagcctggatgactaagtgacatatgataggtgggcggcacggatatcatccagcctgcgt

SEQ ID NO: 298561 - DNA, 386 bp, Homo Sapiens
  misc_feature (203)..(214): n is a, c, g, or t
  misc_feature (224)..(314): n is a, c, g, or t
gggtaaatagcgctgtgtcatgctcactgaagagttttttttgatacacagtctcactttgtagcccacgctggagtgcactgtgatgatcacaggtcactgtgtggctcaaactcctgtgctcaagtgatcctccaactctagactccccagtaggtgggaccacaggcttgcaccaccacacctagctaatttttggtggnnnnnnnnnnnnggagtgaggnnnnnnnnnnnnnnnnnnnnnnnnnnnnnnnnnnnnnnnnnnnnnnnnnnnnnnnnnnnnnnnnnnnnnnnnnnnnnnnnnnnnnnnnnnntgagccaccatacttgggcctgaaggatttgtgattgctgcatttatgatttatttcacacatgggctgggg

SEQ ID NO: 298562 - DNA, 390 bp, Homo Sapiens
gggatttgttggcgcgttgtctcacagaaagtgctccgctcccagacatgggaccctctgctgtctccctccgaagcgcagcagaaagcattgcgggaagaggaagagcttacctatagaagacccgtgcaagccggtgcaccttaacagcctcctgtgatacaaagctggcatgactcacatatgtgcgggaaggccacaggccgggatccaaggtgaacaataaggacagtggagaggctgtgaccattgtaaagacaccacccacagtggttgtgggcattgcgggctacctggcccctctagggcttcggaccttccagactgtgtttggtgtgcacatcaaggacgaatgccagaggcggtgctataagaattgggcattatgag

SEQ ID NO: 298563 - DNA, 256 bp, Homo Sapiens
atgcaaaagtaacatgagaagcaaaagaaaagataattagggactcggaaagacaaagactgaaggatcggtggcaatgatatttggggaaaaaatatgtagatgaaccacagacaatgacccagactgaaagaatattcgcgcttcgaatgctcaccaaactatcatcaggaaggttctgaaatagatatgaaggcatgcaagctatttcaccagacactacattgctagctctagccatgtcggactttaccct

SEQ ID NO: 298564 - DNA, 753 bp, Homo Sapiens
aattcggcaccaaggggcacttcgattacacctgcgaaggtgctaccttgtcttcgctggacgttactgcggagccttagctagcatcgtgacaacattcattatcgcacctaagcttgaccctacacgtcatcctatcttggcatggaattgaccgctaccctagatgcgcgactgctgcctgtggccataggaagaatccccaagccatcaacgataaaatcctgtgctaaattctcttactactatcacctcttgcgccaccggtactacgtgaattttccctccgacaacctgacgtatataacgatgctcttacagatcctgctcttagacgcaaaggcccactgcagtccaaagctaagtttgaccagagtgtcaagacacgcaagatcatgtcggctcttacagaaactgcagatttacacgcttggatatcatcatcacgcgtttgtgcacaccctttatcccaacaaataccctaagaactcgatgacctggtctcctcgtgcccattacgaagcgatatttgttatggccctgcctgcaactggggaactgtcccaccatgcgcagacaagtgccctattaacccctggactgcagccccgggtctgcttgtatccccccgtaggcgcccctacggacccaaatttccccgacttgtaagtgggaaccccggatcccacccccaggagactgatgacctttaaagttttgtcccctttgagcctaatgggtgtggtttagtac

SEQ ID NO: 298565 - DNA, 428 bp, Homo Sapiens
acagagcgagcacggtcgtgcaatcgtcgattcagaggcccaccaagggcacggtcattcggcggccgaccgctgttgcgtgactggctctgtccgtggcagccatggacggaacctggacatactgcaccggacctgtgcaagccatgtctgggtgccagtggttctttgactgactgactcagtgctctagctctacgagcttgacgcgaaggccatccacgcacgtaacacgtaataacgtacgctatgcgacgcgagcaccggcatgagctgttaggacgagacttactccagataggacacatgtatcgaactggcggagcatgatctggtacatgacagaatcatcaatctccagcatgatattcacagagagtgtctacacactacatctgatggtagagtcgactgatgacacgctcctg

SEQ ID NO: 298566 - DNA, 165 bp, Homo Sapiens
cgaaggtcatcgatgtgctttcccaggagtggactgtacagtctcagccctcaatatgaatgaactgtgatcgtgaccgttggccacattccttgtatgatgtcaggatagggtgaatcatgttgtgtcagatattgctcctgagtggctacaggatcctgcctg

SEQ ID NO: 298567 - DNA, 390 bp, Homo Sapiens
  misc_feature (374)..(374): n is a, c, g, or t
gactagagttggatggcgagttccgtacggatgtagcaggataatccgctatctgaggcctggctactctgtactgagccactatagggcacgaggactcaagaccagacctgggaggagactaccgctctgtcgagaagctttacctcgctgaccctatgaaggctcgcagcattctgagagataggcatactgatgggaacttgagtgtatccagatcagacgagatagtatgtattgatgattcaaccagacgatgctgaagatgacaagaagactgacatgttccacagtcatgtaaggcgactgatggtagccaaggctgcccgcaatgagaccatggctgagtgatatggttgaaccgaacactttgncgtgctctcatggcgt

SEQ ID NO: 298568 - DNA, 406 bp, Homo Sapiens
aatattggtgtagtgagagatctgggcatcatcagatgtgagtactgagtgtcaagagagactagttgtgtcaggccattgatagaaagacagacatttatttgttgggagaataggacaattgcttactaccgtgacacctaatttactgatgcgtgatgacaagattcgtttgtatacctcaccgtatgtcatgctagattgattatgcgtggatctgtctgacatgaagggcataaccatatctgaaacctatgatcacgtataatgagtaacctgtagactgcaagttccgtctagcatacgtcctctctgctgactgtgaatcgtcagatgacaatatgctctgtgttagcgatgcaacgaatgacatggcagttacatgcgatactgtcatgcgggtttc

SEQ ID NO: 298569 - DNA, 368 bp, Homo Sapiens
atgtgtcgggatcgacgagtgcttactaccctgccacgccaatgatactatgagccccatttaagtgtttgcgaaatagattgattcctcacgctcatgatttttatcctactggtacatgaggacaaattcagccaatcttcatatacttaggtcttgcctgtatgcctacgcctttatgtgtcttctatcaagaactatgtcatgtgtgacactgattatacctatgatcactgacgagctacctgtgatcgatatcaaggctcactcctttctgttgactatggataggctgatgactatatgcttgcggcaccgaccggccctgtagattttagcaggtctctgagagactcttgctgggctct

SEQ ID NO: 298570 - DNA, 723 bp, Homo Sapiens
  misc_feature (680)..(680): n is a, c, g, or t
gtgacgctcgcattcttcacagctgctatctgatctcatgctaatcagagttgttctgacaacaaagtcaaggttgctcagaagagactgccagatgaaagaatgggacacaagacagaagcccgtttctgtacccagctggacaggtgaagtcttttaggtgcaggatgatctggccattccaaatatgcacgggtttccaattttgttaaaatgaaacccagactttgaaaaggcccggactttctacaatgcacagtatttatagcgtggagggcactgtagagacgtcatcagtgtattcacaacagcaagatccacggaggctctgccatgtgccaggcatgagacaactgtgtacagcatctcatttcatcctacacagagtatacagactgcttcacagaacactaccaaagaggaccatctaatgatccccaggaagtaatgagtgccttagaactaaagaaatatgaagggccagtaacgccccactgaagaacgctctcctgcgtgggtatacctctgtagtatggagcacaacactgtcccatgctgcgcgaggctactattctatactacactactatgatcaggtgtgttctattctatactactccattctctacgatactattatactggtgcattctacactactatatactgcactatctggnctattctatactactatcttctatactgggagttagccagctt

SEQ ID NO: 298571 - DNA, 716 bp, Homo Sapiens
gtaggttaacacataatgaatgatgaagcactgctcgtcgaaaacatgccgcttgaacaaccatcgtgcgagcatacgtcatcgctgctactactagtgacataccaataaagagtgaagcaggcggatacttgtcatagcacttagcaggagaacagactcggtcactgatatatttcactatacactctggtagatctgtctcggatacctggacaccctgtattttatgtttaggatgtttggccacatatagctactgttgcgtttcaaatagacgcctagcatgttatattacataccatgcaggtcacgagaatgacaggcgcggctgtgtgcaaagtctcttacctgcacactcagaactctcagaggccaacaaacgtttaatcctgtggtcaccagttgaagaccatcctaccctacaccgtgtcactatatgtgcgaacagaatacatgctcctacctatgtgcagagttcaacgagccgacgttgtaccagtgcattctccatactgtcttacagagtatgaccctgtctcaagatatgaagatagacagactgtgtgtcatcacgtgcactgtcccaatggattatagctagacacaggggggatttatgcgcttatttgaagagatataactatctatagccactatatcgctgtgtacccaccaagcgtgcgagcgcgatgtgaacattgtaccttggctcc

SEQ ID NO: 298572 - DNA, 416 bp, Homo Sapiens
agagaatgccagacactgtgtaactgattaaggcttacatggtacttgactaccttgatgacggcgataggcgatccatacgcaggtgcgtgctagctatattctagctggactagatccactgcgcagtgtaacacgggtactgacgtcacagtgtattatatacatacgttactcactagctgcgtactagcgagtgcatgatcactgcattagagatgccaatgtgatacacattgattctccgctttataatatctgacctgtaagttgtgatcactgctccatggccgatcatgttcgagtgattgaactacttcctatggcagtgttaactagtgttactcttccaacactaagcattcctgacgatcgtcacgtgctcaagcactgacatagcttttctcatgtgctct

SEQ ID NO: 298573 - DNA, 429 bp, Homo Sapiens
caccaggagagagagagatagagctgctgtaccgtgcctgtaggatattccacggctgaggatcccataggcatgaggagcctgtcagtcctgatcttgatgctgaacgcctgcctggcggtgagcgctgaccctgtgccaacgacgcccgacatcattcaagtgcacgataactacaatatatatcggatctatgagaagtggtacaatctggacataggatccacctgcccctgactgaataagatcatggacatgatgacagatagcacgctgatgctgtgagaagacgctacagacgccgagatcagcatgaccagcactcgttgtcggataggagtgcgtaatgagacgtgaggagcttatgagacaacagatactgacggtaagtctctctatcactcccactggatcctaaccatggttctg

SEQ ID NO: 298574 - DNA, 366 bp, Homo Sapiens
gaacaagcgcgctgggtatattagccatgctgcagctgtactaaggtgatccagacacactacggctgagctttctaaggagtagggattacagctgctaaccgcagctgccggccttatggtggcccacctaaccctgaatgttactgaggcccccaggatgtacacagagtactgtcctgtcatgatcatcacgtatcatgctactgagcacatggtataccgcacttaacgcgcacaacagagcctgctgtaagtgtataatacattcttatccttactagccgatgggggactaccacccgcgtatatgttctggcctgtgctgtgactggactgctggacgagcactttctgcttatgggc

SEQ ID NO: 298575 - DNA, 410 bp, Homo Sapiens
gggatgcgttagatgaggcgagatgagattgtactactgtcctccagtctgcctagatctgcacgactcagtgtgtagggatgacagatggcagccagactgctgtggacttaggaaatactcttcgttacagaaccttactgtggtgcctaacatattcccaagctactggactcatgagattattctgtcttaatcactagctgtgatagcactacagacagagctcacaagaccaatgattctgtcactgttacctacgttctttgacttaatagccaatcttatgacttcagagtacattgtacggcctagaccaggctgttaatggactgattgtcgaacagaaccgagtaatctgggtttactgggttctttacatgtgatgagctacggccgattgatgtatc

SEQ ID NO: 298576 - DNA, 396 bp, Homo Sapiens
gctatgtgttagatgctcaatatacctgatgctctcatgttgtccagtacatataccagtgggcgaaacgttgcgcagtcttaacagacagagtccctcattgtgtggacctatacacacgcttacgcgatacagatgagtgctagctagcccacgctagtcgtagattactttccttgaatgacattagcagaggagctccctacgtatgccagctctggaatcgatcagagctggtccaggttcctgccagcgcccacatcattcaagttattagcctagcctgagtcatcgagcgtcgacgtaccgagctggatgatactttatacgacagatcgtgtatgacagacaagtaccattgaatgcacgcagatgcgtcatacaccttgctacctg

SEQ ID NO: 298577 - DNA, 444 bp, Homo Sapiens
tgcaggattcgggacgagcactgaacgagtaccaaggagatgcgccctatgtgccatgcggacattgtggcccagctgtccagtggttgacaccatggctcagaactgtcgacctccgtctcattcccatccttcctgctgctggagtcaaccaccgatggaacgactgacctgcgcagattggtaagcattgaactgacagagatgctgatgctatggaggccaacgaagagctagacctacagctgatgccatcaggagcactgtgacctaggatataggctactgtctctagacgctgcagccattctgatgcactcactgtatgtattcagagtatccttgtatcgcataactgcggacatatgtatgtgctcgcgaccatatagtagcatgcgaggataggtgcactagcatgaataacagtgggccttagagcttttc

SEQ ID NO: 298578 - DNA, 203 bp, Homo Sapiens
agagacctcggacgccacgagaactgaggcccttgaacgacggggatctacgcatgcatagtggtcactatctctgcttgcgcgactcgggcagaccatccgacctctgcaccttgggaggacatcgtgcatggacaagcgctcgagaagtttacctgtttcgaaggatctgcgcatgctgagtgcaggcctgatgcgcgttg

SEQ ID NO: 298579 - DNA, 404 bp, Homo Sapiens
ctcattggaggacatgttactgccggtgaacgggctgatggtactgtacgtggacctgtcctgattcatgggcctcaagcggctcaagcttggccagaacggactgaggcaccttgccgcctggacactggctgagtcactggaggagctggacctgcgagtgaacaggtttagccttgcgccagaccgtgacttgggtggcccggagaccagcctccggcgcctctacgtgctgcgggatccactcaagtcctgcgccaatgactagctggctgaccagctggaccaaggccgtgaagacgtggacgccacccatgacctgaactggcggttcagctgccagtacgaggtgcacctgagtcacgggcgtgccgagcactgacaggaggggatagctggcctgc

SEQ ID NO: 298580 - DNA, 572 bp, Homo Sapiens
gtgaggagctcactttataagagatcacacatgcaactgggatataggatggagagataaagagaacactgctgtcattagcccgtggcaaagctagagatctggcgaaaaatacccagggccaagacactgcagatcgtgacacggtcattcttgaagatgatttctaacataaacttttctggatatagatcaatcaaattcacatcaaagaaacagctgaagaacaagcacgcactcccggaggagtgtttcaagacagacacggtcaaattggtgctgcaattgttcgcattatgtggatgagaaacagacttataccaatctgcgttgttcctagaggcacaagccgattgaaatttcacgtaagccttgtggtcttataaagaggtatcctttatttgaccgggctccctcggaagggctcaaggaaattccaacaccggccaccatttttgatttaaccgtggcccttcgcaaatttggggctcttccaggaaccgcgggttaacctacccggtggatcctaattgagctctttttttctctcccttagaccattgggcggggtt

SEQ ID NO: 298581 - DNA, 250 bp, Homo Sapiens
ctatgacttgcctaacatattatacgaatgtatatataaatttacctgtccttggatacctttcatagtcccaagtttcctttctctctcctgatctagcgttgctactactgacaataataactattgagacatggtgtattgcagacctgatgaggatcaattgtacactaaatgtcgtgagtggaccactatactagagatcatcatacttggggacagggctatgtcttataagagcctggcctgt

SEQ ID NO: 298582 - DNA, 287 bp, Homo Sapiens
gtttactgctgatacacatcagagcgcggatattcatagggtgaatgatattaccgaggataacctcagagtcttgcaggtgaatggcttggctcatgatgttcggcgatgacgatctgaagatcatgtagcagtactgcaatatgagcactgaattagcctggacatgctgcgctgatgaactatcatgccactgagacagacacacattgatacacctagtggcgacctcatgcacacttccaactgttctagaagcctatagtgcaatggctgactgctgtgcg

SEQ ID NO: 298583 - DNA, 299 bp, Homo Sapiens
aggacgtcccccactctcctttaggatggccgtggcgctgatcttggcctacctctctctgacggggagactctctcggtatttatggcagcacgaagaactcccccagagcccctggtatcgagcgaaggacctggtcaatgtgatcgaggacgtgctcacagacacgggcatgagactatgctgaccatattgaaggcgttctccttgtgctgacagctaactctacagctacctgacaactgggaccgttagctccaccttcagtcagctgcgcctacagatcgatcatgtgaccc

SEQ ID NO: 298584 - DNA, 634 bp, Homo Sapiens
accaagagaactagcctgcagagttcagttgctctccctagactccattaggctactgagtcttatgacacctgctatcctgggattccccgccagctgcaggtcagacctccattgctactatgtgcgctcatagcattggctgcgtacttagcacattctaggcagtagatcctgtacaacgtctatgcaaacaccggatgtactgtgctcaatacgaattatgaatgcgacatcctgatatcgactagaacagatatgtaccgacggatgatagttaccagatagttgcaactaattccttaatgagacttactacactgtcagagatcttgagtacgcctttgagacagcatccggaagctattcttgacatacatagtgaatttagcttacactttggcaagagaaccacctttgactatacctgctgcatagatgctttaacgtcttctacagaactaggacctatcggcgcttgagacaggattacctgcacacagatggattcttgtacttatgaacatggcgctaatgataggagatgaactatggccatacaggttcgacgtgagggcatttatgagttggagtaatccaggaagcttgcattcactggcccatttttcgttct

SEQ ID NO: 298585 - DNA, 610 bp, Homo Sapiens
gtccatagatgctttagggcaggcgatctatgtatactacgttgctgtgatcagtgttatgaatgaagctatactgatatcagatgcgagctgacatctaggtctggattgggatcagatgggctaataggaagggcggagtctgtacactccatcctggtggtcaatgccatggccaaagtctgaataccttgtgtggcatagagaacttgacgatcaagaacagtgtctagagacttcctggtgtactgtaccagacactatcgggaatgcttccatatgagactgcttataatctgtatttgatactgacggatgacaggcacatgaaagtggcaagagaccccgacatgacagtaatccgacgatcagtgtattcatgactctgtagaaattgaatgaactgactctctcaagattactgagctgaactgagcacagctatgcctgtatacgtgcgtatataatcgactgatgacaggtaagaaggctgcactgagtcttactcgacagtatttcagtatagcacgtacgtgaaacatatgagtgatgcagtaactagtacgatgtgaatgctatcatttcggatactcccaggattttagactaa

SEQ ID NO: 298586 - DNA, 669 bp, Homo Sapiens
  misc_feature (351)..(351): n is a, c, g, or t
gggccatgtccgctgccggaacgagcatatctcactggtcccagtgaggagttgaagctgtactgttatcgatgagatatatctgcatgggaatccaccacatgtactgcgtgccgagagctcgcttgactcgggaactcacaaatcctgtaaacatctgccatgtgacgtagctctacatactgatataagtgcaaacatacagacagacgtttcactgtgtacattgatcgacctacgtatcgcttaggtaatctatggttcacgtgctctattcagactaggttcagcagatggccaccggtctgatgtactggacctagatcagcttctaccatcttgctcgactgntgctcgatgaacagaatcatgaaaggtatatgagtgagtacactgagggtgagttcgactctgaggaattcaggtttaccgtacgctggatatactctcagtatactcgctcactgatactgattgattgcctgcgtcatgtaggaactgagatggttcgctagcgtgtagtgagacacgtttcatgacttcatgaatctggagactgatgtgcgcgatgtactgagcctctaccgtgttctagactcaataggccttgaccgcagtttggatcctcactttcgagaggacccgggtccatggcttttcccgctttgt

SEQ ID NO: 298587 - DNA, 392 bp, Homo Sapiens
atcgattggttcatgcctggttccagggcgacgttctgcttaccagcttgcctctcgtacgactttgcatgtctgagagccgtgcgcgtatcgaacacgataactgacctgtatgagtgtagaaatgaagatgcgacctgacacttactacgatggaatgtttggagagctaatagcgacgactgacgatgtacatcgagatgatactactcaacaggcgagccacagttgtgtgactgtaccgtgatacactacgaccacatggacaacagtgaatgcatgtatatttagagtggctcgtatgctacacacacttagagatgacgacaggcatggtcacaagagtgttgtttgaccttcatggctgtatcgtagccctggtgtggttcgct

SEQ ID NO: 298588 - DNA, 360 bp, Homo Sapiens
ctgcaaagcattcttaaccctgaagcctatgtgcccatcaccagctctacagacactgctcacactaaactaccgaaccacaaacacacaccgaaacatcctgcttaccactcctgggtgcatgattgatgctgaagcatccaccagctcttcaagggtaccatagcatttgaatttgggctgtctcaatgtccccaaagcctgcgagctgcagtggcagtcgatggatgccattcaatcaatgaagaccttcactgtgacatcaaggcacaatgtaccccatgattacacactagaatctttatccttaactaaatcatatgcccaccctgcgcattgacctgtaccttgactgtggtg

SEQ ID NO: 298589 - DNA, 346 bp, Homo Sapiens
atcacataattttaacttataatagatccattggatgtatatgaggggcatgatccacacaatacataactcacgcatgtgggctaagtgatacgatatggaagacagatacgaagagacagttcagtattgctgagctgatgtgctaaacttagatccttaagagtattattattataaccgtaatattgagtctggggttacagcatgctggtataggtaaatacattacacaacgatgactgaatgcgaccagttgatcttagatgaacaagcccatgctgagatgctgtagcatgaatacattgagattatatatgcatagttgagggattgatttgactgg

SEQ ID NO: 298590 - DNA, 339 bp, Homo Sapiens
atgaaactattttaatttgttcatgaatagttctgataatttggggaaatgaacctgattatatttatgccacgattgttgattaagtcatggcagatggtgcctaccatgtagatattgatgaatcttacttgagaagtttattaatactgaactatatgagagcatgtgaattaggcttatcagagtaatatgctataatgggaaatacaggaataatgtatttattcagatctaatatgaactttcttattgcatgaataagatggataaacatgccattttacaatgaagagtctaatagttcatctatattgttcattgttccatggtttcttt

SEQ ID NO: 298591 - DNA, 327 bp, Homo Sapiens
gctttgaggcagccctgggcgttatgagaacactcacatatgtggaggatgcaccggtgacaattcatatgggcatgaggagtacgtaggatgctgcttctgcgggactgggaatgcgctgtttctcaatgacctggtctccgagacctgaacggatacacctaatgcagactttccatcttgatgacttatacttgtgccaacttctcaaaggaatccactgtgcatgaccacacgacttccataacgggggctatgacgggtacactatccgacgctctggcaatctcatctgacaagtgggccgatggtgggctgacagcgtct

SEQ ID NO: 298592 - DNA, 319 bp, Homo Sapiens
ggatgagaatgctgaacagttcttccgagaccaagggaggcagacttcctcgcttcaaccagccagtcctgactctgtgtataacctcatgctcagctggtgaataatagataccaaggtccgtccctcattccaagaaatccaccttgtgctccttcaacaaggcggcgagtgatcctgtcagtgcctgaccatgttcctacggctcaggtcctcccagcaagacgtaccgctcacccatgcctatgccactccaagtggtcacccacactccctacccgtgagtcatatatacgtgtttttacattaaaaatcaaac

SEQ ID NO: 298593 - DNA, 638 bp, Homo Sapiens
  misc_feature (202)..(241): n is a, c, g, or t
aaatctttctgtattatgggcgcttgatcctcctttggctttgtggggctgggggggacagatgtggagtggaggatgagggtgggaaactggaatctgatcatgttacatgcccaagggctctcactgaaagtaggcctcaccatcttccccattgcacctctgaaccatgtcattacatgtctaccttagaaaggcctgnnnnnnnnnnnnnnnnnnnnnnnnnnnnnnnnnnnnnnnnccactccataagaagctgaaaatctgtacttcacatttctttccctgagccctgaggtggtctaagtcttccttcattcattcccacggcctcccgggaaccgtgtcttcatcctgagttatttctgcagtgttccatcaggcatctgcgggtctttaaaggaaatgtgaaaaggtagcaaagacacatctgtgcagcagagacatgtggcacaggaaagaagtgcagaaatcaaagccagggagaagcctgctagccacctagaaatcaaattgtgtcagggagaaagcctgcgtggtagaattagaaaggcactgaacacgagagaagaagaaaggcaagccctgctgacttgttgaggaaggactcaagattcatacctggaggcggcctgggg

SEQ ID NO: 298594 - DNA, 257 bp, Homo Sapiens
actgcacgagagcagacgtaacgcgattataatcgtgactgtgaatctcacacaatgtaggctataaggctagaggactaaaggtgccagggacctgggaaatcttaacccggctgtgcacagaccttgagaacacatgatgccaatatcgagcaggctggaaaggacccttagagagctcttgtgggaaacaggctttccggacaatattgcaccccgcgctctattatccacatatccggagcatactctggcgg

SEQ ID NO: 298595 - DNA, 165 bp, Homo Sapiens
aggaatcgagacgctatgtgatcgtatatagtgagacttatacacgcaagacactaggagaatgtctgtagaactatccgttgcataggagagagaatggcaagtacaggtatactctgccaaacacttcacttctgaagtagattcactggtgtcctttctgtc

SEQ ID NO: 298596 - DNA, 500 bp, Homo Sapiens
gcacgcggggagaatttacgcgtgaggctgtgagctctgaaacccactatatgagctcctttagagttattacacacacgagaacattgtgatacacagagatattctttctttttgtgacaaaacatatttcaaaacttaacttgtgaaggcaaaaattggtttaatacccgtttaaccattataaatatttcatgtgaaggaggaaaacactttggaaaaccaaaatgagatataaggcctatccagggtatattgagaaagtgttgagcttatattggaaattatatggttcaatttacaaggttcatggaaaaaaatttactataggttaacttcctgtgacacattgtgcattggaacacagaacactttgaagtgcactgtcacggtcagaactgtgttgcgaatactctaaatactctggatacacttaagcgcgaatgtgtgtggttaaccgtgggtgaggaaactctattataatttaattgtgaaacatg

SEQ ID NO: 298597 - DNA, 192 bp, Homo Sapiens
aggagtatatgcgcgcacggatggtgactctgacagagcgcgaggtcacgggggacacgggtaatatcttgagactcccggtgctatagcgcgggccttctcaccgcgaaccaggctcttagaatacacctaccctaagtcggcacggacccgtttttattacctgcggggcccaccacagaggattttcag

SEQ ID NO: 298598 - DNA, 276 bp, Homo Sapiens
tggcccaagcgcaaactatctctatacattatcacactaatccgagacgcgtgctgttgactatagagcttggatcccagaactctctgagacctagggccctggtagcacacaccgcgcctatgctctgcgccaccatgtgagtgcgaatatttcaggctgactgtaccacctgttgaccatgccctgagaatggtccaaagcgctctgttggcttcgctaaatcgaataaatgctcttctacacgtaccctgtcagagagtgacacttgggtcc

SEQ ID NO: 298599 - DNA, 409 bp, Homo Sapiens
accgagcgttgttagatctataggcgctcctccgtagtcgagccatggccacagagcctgcgcgtgagacggaactcgaacgacgcgctacagacttcctagctacggaaggggctgatacgttctgctgcagcaccgtgtatgtgagattaacgtgccagcgctgtagatagtccgtgctggactcgagttgcaagatcatggactgttggatcattcatgaactcacagattcattacttactacattgcaagcggaacctgctatgaaccaggacgaagagactgagtatcgagagaagctacagatggtaactcctagccaggaggatgtcgttcgcagtttgatgctacctggcgggcagatgtccacacatagcgctgatagttacagtctgaatggaggcat

SEQ ID NO: 298600 - DNA, 287 bp, Homo Sapiens
gggaccaggcgcactccatctctacacattaacacactattccgaggcgcgccctgtggactcatagcgcggatcccagagctctgtgaggccgagggccctgtagcaccaccgtgcctcaccctatagcccacaatgtgacatctgaatactacaggcagactggaccacctttcttccatgccccgagaatggtcacaagggcttcgttggctacgctggattggggctttgggtggattataatacccgggtcggcttgataaaggagaactttctttccctgg

SEQ ID NO: 298601 - DNA, 351 bp, Homo Sapiens
  misc_feature (48)..(97): n is a, c, g, or t
ggggccaggcgcactccatctctatacattagcacgctattccgaggnnnnnnnnnnnnnnnnnnnnnnnnnnnnnnnnnnnnnnnnnnnnnnnnnngccctggagctccacacggcctaccctatagcccacgatgtgaatctgaatctacaggcagactggaccacctctctcccatgccccgagaatggtcacaagggcttccttggctacgatggtccggaggctttgggtggagtatacatacccggtcggcttgataagggggaactttcattacatcccgggagactgtcccacggcacacgcacaggcgtgcttccttgccccaacacctgatctcctctctg

SEQ ID NO: 298602 - DNA, 418 bp, Homo Sapiens
  misc_feature (50)..(62): n is a, c, g, or t
gcacgagagccgggcataagactccggaacttttgccgcgtgcgaggcannnnnnnnnnnnngcatatgttgtgctttcgcgcggaggagaggcgggaacccgagggcgcagaccgcatatgaggaggaatcggcggagtccgcggacaaaggcctggagccctgaggtgttggctggccccgcccgggtttccccacccactgtgcttctttccttccgtgcgccggtgctggcaggcaggtctattagagaaacttttcctgtgtgccttggagggcagagcatttaaggacacaacttggaagagaagaaggcggggcccgagccaaggctgggaatgtgtgcactttgtggggagagaaagtgggttgcttgggggacacgaaacttgcagcagggagctatggctttggtttt

SEQ ID NO: 298603 - DNA, 418 bp, Homo Sapiens
cacgagggggggtctctcacgcgtgtgaaatgcgccctttcttttccgagaatgcggcgtgaacactctcccggccacaacacaagagagatgagctttctacagcgcaaccaatgtgaatgcccacccaagaaagataccacccgacacagaggataagctcgaagaaagggaaatgggcgccatccaaagcgccagaaaccccgggataaggcctggggcgcgccatgtggtgcttggtcacagaggagaaagcatttggtcggaccagatccgcacacccgttaagggtcctgtggaaacacggaccagacgaagaggtgaaccctgccagaaggagactcccttaagggttccggtacccgatctctctcccggaatgactggttcaccgttctggtcatagacccgctgtggc

SEQ ID NO: 298604 - DNA, 355 bp, Homo Sapiens
gcatgatttgcctaggtggagcacgtggtggtgacggagccggagccctagctgcgccaaccgaccgtgtggctgagctaccagtgctgggaactgatattgcatcgcttccgtgattacctgctctgggtgcacacactgtctgagcagactcaagtagagcgtgctcagttctcaggacactcaggaactgagcctgctgaaggacgagacctttaaggggccagagaacctacaacatgtaatctgcaggaactactgacccggccggtctataagtcgtcgacgacactatccggagctttgtgcatctcatctctcctgccatcccgatcttggtgatgattcttgtgct

SEQ ID NO: 298605 - DNA, 422 bp, Homo Sapiens
gcacgagagcgggagatgctgctctctgtgctctttgacacgtgcataatgtgcaagaccatgtgacactgtgtgagcaccatatgtgtctgtgggggcacagaaggcttcatattttcaagtggaactctttacctggcccggacagaaggagaagaactttcacaccacaacaagaagccgggaagaacttcaaagggcacaagaaccaagtgaattggctgtgaatgtgcactgagaggaacgtgctggtcttaaggttccacaacaagaacgcgcgcctctgggaagtgcagagaaagcagtggattcggacacggggcctttcagaatttaaggccagactggcggtgtgccactttaacaaggacctggtgggcgccgagcaccgggacccgcgccacgggggctttctgtggccc

SEQ ID NO: 298606 - DNA, 867 bp, Homo Sapiens
  misc_feature (20)..(20): n is a, c, g, or t
  misc_feature (32)..(32): n is a, c, g, or t
  misc_feature (48)..(48): n is a, c, g, or t
  misc_feature (53)..(53): n is a, c, g, or t
  misc_feature (55)..(55): n is a, c, g, or t
  misc_feature (62)..(62): n is a, c, g, or t
  misc_feature (73)..(73): n is a, c, g, or t
  misc_feature (123)..(123): n is a, c, g, or t
  misc_feature (129)..(129): n is a, c, g, or t
  misc_feature (131)..(131): n is a, c, g, or t
  misc_feature (206)..(206): n is a, c, g, or t
  misc_feature (247)..(248): n is a, c, g, or t
  misc_feature (257)..(257): n is a, c, g, or t
  misc_feature (267)..(267): n is a, c, g, or t
  misc_feature (278)..(278): n is a, c, g, or t
  misc_feature (322)..(322): n is a, c, g, or t
  misc_feature (356)..(356): n is a, c, g, or t
  misc_feature (383)..(383): n is a, c, g, or t
  misc_feature (394)..(394): n is a, c, g, or t
  misc_feature (397)..(397): n is a, c, g, or t
  misc_feature (403)..(403): n is a, c, g, or t
  misc_feature (405)..(405): n is a, c, g, or t
  misc_feature (459)..(459): n is a, c, g, or t
  misc_feature (490)..(490): n is a, c, g, or t
  misc_feature (507)..(507): n is a, c, g, or t
  misc_feature (525)..(525): n is a, c, g, or t
  misc_feature (568)..(568): n is a, c, g, or t
  misc_feature (584)..(584): n is a, c, g, or t
  misc_feature (588)..(588): n is a, c, g, or t
  misc_feature (593)..(593): n is a, c, g, or t
  misc_feature (608)..(609): n is a, c, g, or t
  misc_feature (614)..(614): n is a, c, g, or t
  misc_feature (620)..(620): n is a, c, g, or t
  misc_feature (622)..(622): n is a, c, g, or t
  misc_feature (624)..(624): n is a, c, g, or t
  misc_feature (626)..(626): n is a, c, g, or t
  misc_feature (642)..(642): n is a, c, g, or t
  misc_feature (650)..(651): n is a, c, g, or t
  misc_feature (665)..(665): n is a, c, g, or t
  misc_feature (674)..(674): n is a, c, g, or t
  misc_feature (708)..(708): n is a, c, g, or t
  misc_feature (715)..(715): n is a, c, g, or t
  misc_feature (760)..(760): n is a, c, g, or t
  misc_feature (762)..(762): n is a, c, g, or t
  misc_feature (785)..(785): n is a, c, g, or t
ccgcgcgcgttggtaggcgnagatatatgtgncgaccgcagggagtgncgcantngtggagnaacttcgtggntgcggacacgatgagaatcatcgtgatatgggtggtaggaggcgtctgcnggcggngnggcgacgatagtggcgccactagtggatgagtcgccgctggtcgtcgtagaacagcaagacgtcgtggtggtgcntcggtggtggagaggagcacctcgtcgtcgtagaagatgtnntgtagaaanaagaagtatntctacgatgcntcgtaggaagaagaggcgacgacgacgaggcgtcctgcggtggntgctccacaagtatgacgaccagccgacgatgtnttgtagatgatccgccgcctcgtggtngtcgcctcgtngtngtcggngnaggacgacaagatgatccaacaatagtagtagtatgcaactactccgctgatanaagaggcgactactgctggtcgttgtcgttnctgcagaggaggacgtngtcgtcgtcgccccacanatgaggtgatgacgacatggggaggaggagaaacacgacggcngtggaatatatcaacntgcntcttncttcatcacctcgtnngcgcngctggngngngnatgaacatcatcaccngcggcgtnnctacagaggagaantatcagcangaagaagaggcgcctcttatataagatgatcagntgctccngccggcggggtgttgtcgtcgtcgacgaaacaacgtaggacgccncncacgattacaacacaccacgtgncgcacgaggagacatcgtggagacggcggcgtctactattgtagcacagaggcgcactagtagaggtagcgactgtgcgccc

SEQ ID NO: 298607 - DNA, 302 bp, Homo Sapiens
cgctactatacatatatggcgcagtgctctcgctgtgcattatatctactctcatgacctttaacacccactctatcttagccaatattgggcctaatgcgcatactatgatttggcgcctgcgaagcaatcgagggactagccctactagacttaatcttcaacacgtatggcctagagctacgacataacctatgacctacttcaatgctataactatatcggccaacaagtatgtgactaccactgacctgacttttctccccctactattgcttaaccgcaacgccaacctttggtgt

SEQ ID NO: 298608 - DNA, 447 bp, Homo Sapiens
gagacttgccaacacttagccagcagatccctgagcatactgcgtgacacaggcctcttatggactctttacgtctgtgtaattccgactcgggatataggcctatattcgattccgtgacctcctccacatcttcaacacatttgttatactgtcgtattgtgctcacgaagttctctgtgtgactgactggagagcatgtgctctctgtcactcttgtatacgcggatgcaatctcctgagcctcctattcactgagagccgggcttcctgaagattgatgcagctgtgctatttaccgctgtacatgaagcggactgtctgctttccagcatcgcgattcgtgcgtctgaaggcctcctcccataggaacagcctctactgggaagctgtggccaccccctggcggtgtattactgggcgggtcccacttggtgccaggtgccg

SEQ ID NO: 298609 - DNA, 795 bp, Homo Sapiens
  misc_feature (225)..(288): n is a, c, g, or t
gagcaaaccagactccagcctgttttgatggatgaggagactgtgcgcagagcactctgatgcccgagggcgagactgcgccgtttgcattcacctgctggggatgcagcatggcccctcttgtaattgaattctacattatatctgtcgtgctgctaatttaccgagcccgggagattatagagacctatttatgggattcctgtagactctctctcgcacatnnnnnnnnnnnnnnnnnnnnnnnnnnnnnnnnnnnnnnnnnnnnnnnnnnnnnnnnnnnnnnnnaagagatgtgtatactgtctcttatatctgcagggctgttgttatatggtgtctacactggaagtatcctactgttgtggacttgagctgagaggagactgtcgctactctagacctctctctgatatacgcggagatgacatactctcgcatgagctttccttcgtatcacttgcaggggcgagagtgctctcacttggagcagactgtgacatgtgcccgcatgctggcctatattaccctgctttgtgagctctgacaggatcagacatggctctgagcctatctaccccacttcatagcagacagttatactgatgcaggttcttgatgaggtcactgcatcttaccaccagttcgtggagcatcaggacacttgctgagctgtggtgtagccttcacatgctggacgcgcatctcaccgaccagggcgctagcgtggtttatgcttgatgcctgacggcctgtgggtactctcaccagcttttgagctagcctcacgacgct

SEQ ID NO: 298610 - DNA, 760 bp, Homo Sapiens
gagcagacgagactcgagaaacctgctttgatggatgtatgagactcgtgcacatgagcacttttaatgccgaaggtcgagactgcacctgttgcagtcaagggcggtgtgatccagcatgaggcctcttataattgaaacctacgttatatcgaacgtgatgctaatttaccgagcccgggagattatggagacctatcaggattcacgatgacactctctagcacatactttcatacacatatatgtttgacactgatacacagatcgacagctctctatgttgtatatacagagaggtgatcacggactcgttacctgcggggcgcatgttagatgttgtccacactgcaagtcacctactgtggtggacttgagctgagaagagcatgtcgctactcttagactgtctgtgaatacgacgagaagacatattctcgcatgagcctttcctcgtatcacatggaggagcgagagtgctctcactgggagcagactgtgcactggccaccaatggtggcctagtttacccagcattgtgagctatgacaggatgagacattctctgagcctatctacacacgccatagcagcagctttatgcctgcaggttcttgatgaggtgattcgctctgagcacctgatcgtggcgcacaggacactgctgagctgtgggatagccttcacagctgagccgcactcaagacatggtgcggtgtatatgctgatccagattgcgtaggtacaccacagcactggc

SEQ ID NO: 298611 - DNA, 762 bp, Homo Sapiens
  misc_feature (119)..(119): n is a, c, g, or t
  misc_feature (154)..(188): n is a, c, g, or t
  misc_feature (315)..(474): n is a, c, g, or t
ctgagatcgcggccttttatttactctttggagacatgatgttgctgtgtcaacgaagctgtttggcacaccttcttgtatcagcttgtgctcactgcctcgtcgcttatcacatatantggagactactcacaactactccactaccgcctgnnnnnnnnnnnnnnnnnnnnnnnnnnnnnnnnnnngccatgtctcactgatcctattgatactgctgagctacaccatgactcctgctcatatcttatagcgtactgaattcgtagatatagcgactggactactcctctatctgaatagatatattatagnnnnnnnnnnnnnnnnnnnnnnnnnnnnnnnnnnnnnnnnnnnnnnnnnnnnnnnnnnnnnnnnnnnnnnnnnnnnnnnnnnnnnnnnnnnnnnnnnnnnnnnnnnnnnnnnnnnnnnnnnnnnnnnnnnnnnnnnnnnnnnnnnnnnnnnnnnnnnnnngtggctgctcagacaggtggagtaaatccttatcaacacagcgtgtcatagctaagatatacttgtcacactgcctcttgctgcaaacagcgacgaagctcgtgtcaagtgtccctagcggagacagacgttctactctagtgacacatgaatattaggatagcagtacaaccttcttagctgtatcgggatggagtagcctagatggacgattatacctgctgcaacactaccttaaggccaaggcgtattccacagatgtgcctcacactctttattagggggccg

SEQ ID NO: 298612 - DNA, 392 bp, Homo Sapiens
  misc_feature (107)..(202): n is a, c, g, or t
ttgagcgtgcccttctcccccctcgtccctccttggtcgttcgttccttgagttgtctcctcttctcccgcccgctgttgctctctttccggcccctgtcttgtccnnnnnnnnnnnnnnnnnnnnnnnnnnnnnnnnnnnnnnnnnnnnnnnnnnnnnnnnnnnnnnnnnnnnnnnnnnnnnnnnnnnnnnnnnnnnnnnntgctgtctctctcgcagtcctcacttttttccagtcctagatattcttaccacttcacctcacccgccttgacttaccatgctccctgatcccctccctcctctccttcaccaccacattctctgccggtattactatacactacactcttacccctgtccatctcagatcttcacatccttttccctcg

SEQ ID NO: 298613 - DNA, 350 bp, Homo Sapiens
gagagagagtgaagattagaatagtagagttccttccattatgttccctgaaaagggcaagagggagaggataacccagtatagatagagatctgtgttccctttacttaatctccatcttctgtttctatgtaaatgagaaatgctggggaaggaagaaatctatatgtaactgaagtggactcactgtttcctggcaggtggcagtgccaagccacctgcctccagcctcttgctgtttttagcaatgggatttattgctgttctcatcctaagtccatagcctgggagaacccctgaggcatgagtgggagctgctctgtcactgctgtcactttccactgaggtcc

SEQ ID NO: 298614 - DNA, 105 bp, Homo Sapiens
catagataactgctttttatgacatattgaagctgtgtggcgactgtgtcaaggaagcctattggctccattttttttaacagcgttgtgcatcaatgtccttga

SEQ ID NO: 298615 - DNA, 516 bp, Homo Sapiens
cgcagagagaacatgacacgagataaccaagcatagtataggggggactaacctctattcactttgcataatgaatcaactcaaagtacctatgcgcggggagccgtacctcttacccccgaggccaggcgagctacctaataacagctctgacagcacacccagctatgtagcacaatagttataagatttataggtcgaggcgacagatctaccgagcactgtgatagatgtgtgctcaagatagagattatctcaactgtaaattgcccacataacaccttaatacgcttgtacattaactgctattcaaagaggaacagatctgtgtacactaggaaaagaccttgatgaagagcacaaatgtacacctatagtcgcctacagttgcaccattcagaaaggctgagctcaacatcactcactggccccaacattgactgaactcttacaccaatgtcccatctctactctatagagactaagttagataagacaagatagcctcctcctcgt

SEQ ID NO: 298616 - DNA, 383 bp, Homo Sapiens
ctggaattctgcacgcgcacagctgtgtgtacacaagagaagagctctctgtgctcttgggagctctataaaaataccttgtggcgctgctcctgcgttgagaggcgagccaacacctgtggcgcggggcacggctctgcacaggcccgagtctcaacggacttgtgcaccccgagttgagtccgagtggcgagctctgcctaccggctcttgagcaatttggcactgtggtggagggccagctggtcacaagaaggggattgtgaatgagacaagttctgttgtaacggctgtgagacagggccacttacctctatgtcacgtggggggttctctctagggcctcaagaaccctgagtgaggggcaccccaccggcccatgg

SEQ ID NO: 298617 - DNA, 413 bp, Homo Sapiens
gcacgagaagcgctttactcatcgcggtgttatatccagactaattttacgctcgtggcagaaccagatggctgagagaatattgtggctatgtgagcttggccccacaggatatattattttatttcacagaaagaacacgtgggcgaaaagaggacacgggaccgaggccatccctataaccaaatatttatataccgtgtctgagattatatcacgaggctataaaatatgtgtgagctacctcattcctgtgaaacccttgcgtgtggtataaatatggcgaggaataaacactggcccatatccatatgactctttgagggttctataaggtttgagtaagggtcaataagtgcgtacactttagcacacactctagactggttggtgttctttctgcgttacacggg

SEQ ID NO: 298618 - DNA, 378 bp, Homo Sapiens
gtgattctcatgcctcaactgcttgagtatcaggattacacatgtgggcgcactacacccagctcatccttgcatatgtagacgacacgcggtatcatcatattggcctatctgacctcaaactcctgacctctaatgattcaccaccctcggtcttccaaacatgctggcattacctgtgtgaatcaccatgctatggctgtattgacgtaattacatactcgacatttactacaatacgtgattcctatcctctgatcttctgaccttcgtaacttctcatgcactgctatacaagtgtcacaatagagattcagaccctgccttctgttgttacttgacatgtatgtcattagcatgcacgatgcctattcttcg

SEQ ID NO: 298619 - DNA, 285 bp, Homo Sapiens
cctctgcggacatccagactgagcgagtacctgatggaggataagatggaggtcgacgtacagtacgtacacatgagcctgtgggtctcacgagaccattgacgactatatcgttagatgccggtactcctggtgtaagagcatgttgaccaactgctatgaacatgactcagcgctgacattacaccaggcttgactacacaaggagctgggatgccgacgcgtatagtccataccaggcctatgcactgttcactgcagtagcatgcatcatatggcttaggc

SEQ ID NO: 298620 - DNA, 732 bp, Homo Sapiens
  misc_feature (518)..(658): n is a, c, g, or t
  misc_feature (713)..(713): n is a, c, g, or t
agaacgttccccgaggaggtcgttgtttggcactatgatttgtctcttcctaaaaaggtgatagagttacactggagagagcagcatccaggtgcagcagggatgggcctggggctcacgggcaggggctctgtgtccggctggggcctggggtcctgcgctgcacctgtgtgtcagaagcactcagtaaatctttgctgatgaaggatgagaggatagaggacatgatgcttgctgctgcattgcctgcaatcctggatgagatgcccaggttggctttgctccccgtcgggtggatgtgatgttagctgtgatgttaggtccctggctttaaaatacgagggagctgggaattgagggagcaggttggggcagaaaggacagccccgcagaggcctggagctgaggcagtgcgggcgaccccaggagcagtgagtgcttccgtcacagccttcatcgcaccctgtggtcctcataaaggggatggaatctacgaatttagttttcccagcctcctnnnnnnnnnnnnnnnnnnnnnnnnnnnnnnnnnnnnnnnnnnnnnnnnnnnnnnnnnnnnnnnnnnnnnnnnnnnnnnnnnnnnnnnnnnnnnnnnnnnnnnnnnnnnnnnnnnnnnnnnnnnnnnnnnnnnnnnnnnnnnggcggagcacttgaccccagaggagaggtttagggggccgattgggcactgaccncatctggcatagatgagcc

SEQ ID NO: 298621 - DNA, 619 bp, Homo Sapiens
  misc_feature (453)..(496): n is a, c, g, or t
cttacccccacatatgtagccactctctataagtgctgtgccgttgccaatcctcctgtatgctatcccgttctgttcgctgaatttattcctcttttgtaagaccctccttttctaatcgacccttttcgtgtgctttttgaccagcttggtgagttccaattcctgattgcgctctttgttcgttgcactcattttgttccccatgtgtttactccaactcttgtttaggtctcctgacaccttggaatttttgtcaccaaatgttgttaacctcctgatgcttttgtattccctgggcctaatactatttttctcgtgttcttgaccagttttttgttgttcctgtcttcccgcccttttttgccttttttacctcatgctgcgcctattcctttttgttcttctaccttgcttttttctcttgaagcccttgcctactttcccagaggnnnnnnnnnnnnnnnnnnnnnnnnnnnnnnnnnnnnnnnnnnnngtgatgggttgacccctttttataccctacccgtcctcgtgtggccttgtggcccctccgccccctgtcctatcttttgtagcccctgtgtggcctgtttctgtctgtttcccccttttttgc

SEQ ID NO: 298622 - DNA, 788 bp, Homo Sapiens
  misc_feature (191)..(191): n is a, c, g, or t
  misc_feature (193)..(193): n is a, c, g, or t
  misc_feature (698)..(698): n is a, c, g, or t
  misc_feature (704)..(704): n is a, c, g, or t
gtttacttgtcgcgttgagctgtatccgctatagctcaaattcagtcaatttctacttataatcttagctgatagatgctgttcagatatgggttccatggatatatgtgattacgactgtcctacttcgatgaggtggagtacttttgcatagtgagtggatacgctatcttgatttatttgagaagagntnatgcatatttaaaatgttgtttgcttccagaattagctctttgtttgacatatacttcttatcaatgtacttgcttagcatcatgttagtaactctctgtattcgtattagagatgtggccggtttgtggcatctgagttgggagtgatcaatttaagagccttcgcttagtaattgtgctgggaaggatttctgtatatgaagaatggcgcaactgtccctatcatgctaatagattaaattactctgctttcacgcctgtattgatagggaagtttgatttggggctatgacattgcctaaaagacggcaacatgttgcgcgaaacggactgacttaatattgttatatgcatggaggtattttataacaggtaggggtttcgataaatcttcgaataattattgggttgagattggttaccgacatcatccccgtgaataggtgagtattattctccgatattaaagtgtcttgtcccgatagggtctaagcaaattaaggnaccccnggggtctcataactgctgagaaccacggtttttttggggtatatacactgggaacacatttctattgttgtttcagggcgtttc

SEQ ID NO: 298623 - DNA, 338 bp, Homo Sapiens
aggaccctcactacgcctccacctctctctacagatgcgacgactgctgctgaagctcgcagctgtagcgctcattgcggggctacaagcgtccgcacaccgcctagcgcttcttgacatgtgccgagtgcgtgaataactccagcaagagcacacacctgagaggatacatcaggcgtgcacttcggtgagcggccattctcctgtgaggagttcgagcctcggttctaacagagtagtcatctggcggcgcatctagaccaccacgcccccgatcggaccttcgcttgacccgactgcggcggtctttcgcgctgtccccgctgtggtgtcttctc

SEQ ID NO: 298624 - DNA, 729 bp, Homo Sapiens
ctcgcctctccattgtgccactgaagtgagtaatcaatagctgcctactctgtatgtccagcacggagaatgactgacaagtgcctcctaaagatagcagacatgagatatgaccatcgtagactgtaagattgcgtgaatgactgagagccacacctgctttgtatgtagtttcactgtttctaatagaggggcatcgtgagagtctgccagaccatgcaaatttagatgcttatgtctgtgaaacatgagatcctgatgcactggtggaagactcaaggcaatgactgctcacgatgtgtagagacggatgatgctctgcagcttctgtagagactatatctgcacctgcacaatgattattcctcaaacctccgaagtctggtgcatacataggctagagatggcgctcacagattcctttgccactgtagagagattgttgcattgtactgatgctaaacataagtcatacctgctatatgccatagccgcttattccgatcgctagtgccaatgtgttcacatggatatacaatgtgttgacaatcagtacgtatgtgtaaacacctaatgacgaatctccatacagttgctgatgaagaacatattgtgtcaagaacatgaccactcttgtgtaccatgcgatcttgttctgacatagctttgacgaattggcgtataggctgctgggccactgcattcactagctgatgctgtggatgcact

SEQ ID NO: 298625 - DNA, 378 bp, Homo Sapiens
ctcttgcccatgttacgtgacagctgtggctttgcccacatcttcactcagatcatttgccatttgcaaggcagacaggaaaggacaattgcagaacccccactggctctgaaggcttttgctcacctgtagctcgtgtctttcacgttcagtttgagaaagcagatgacatcgccccacctggggcagggtgaggcagaagctcaattctttagggagggtcagtggatattttggacaaataatataacctatcaaaagaggtcactatagtagtgaatttttcatgtttgattattttggatgattttatattatttgttacttcagcttttctgtggaatcagtatctatgggatttgattttttctttggtgt

SEQ ID NO: 298626 - DNA, 354 bp, Homo Sapiens
gcatgaaccactgcacccaacccttgaaaaactaaatctctgatcgcatattcatatataactccgacaatttattgccggcaagtgtgtaatatattataagtgaatcgaacattaaaatcttgctgcttaaagtcagcactcatctcggacatgttgaaattaaaatctattcttgtatcatatacactatgtgataaagatattctgcatgacttgcctctaaatctattactaccatactgcatttctactataaagtctcaacttagattatatctgtcattcactttgttctagcagattgtatcagctgattatggagaatattctatacatcaggattattttctg

SEQ ID NO: 298627 - DNA, 350 bp, Homo Sapiens
gctcgactccatataatggcagatctgatgatgcgaaggctggacctcttgcaactagccctatcgacgtggacagagcattcctagcctaatgataatgtacactgagcctatgagtctggattcatggtccacgatctcactgctactatgatgcgtagctggatgcagctaatgaccttgcgcacatacatagtgttagcaggctaatgatctgcacttactcaggggccgaacgacaggagtatggactgtcccaaccgactaggaccttatactgtacacacgatggcttcttccattctaactgaagggcctcatgtactgacgctggcctatactgctcctcg

SEQ ID NO: 298628 - DNA, 292 bp, Homo Sapiens
cggactctggcgagaccagatctgagcatactggacgcatgttaactagactgcctgcgtgtcaccgaacatgtcatggatagaatacacacatctctggaatggcgtttcaccatggcacggtggattcaactgcatggtgaccacatcagatgtctgaactctcatgtgccggaagcatagatagcttgctcactatatgagagacttgcgccgacccgcatacagtggagagccgtctttacacttgctaaccctgccatatcctatcgacatgcagattgattctgtg

SEQ ID NO: 298629 - DNA, 418 bp, Homo Sapiens
gtctacttgtccatgcgctacgcatgactcctgctcacgcatgccgcgacactgctgggcacggacctgtcgatcgacactagactgctagtgtcctaagatatgaagtcctggagcacatgtcctgtcacagatggagaaagccatctctgagactggcgttaccactgtctacctgttcacttcagagatgtacacctacggagctgagacagacagggatggagctgactgcactgacgggccgactgatgagctatttggccccactggcgagcttgctggattgagtgtggctgtcacatgtccaagctcacttatggagggatcgaccagctggttagccggaccgacctgctgctgccagatactaagcacgctcagctgtcagagaccatgcgacgtggagaggatgccc

SEQ ID NO: 298630 - DNA, 281 bp, Homo Sapiens
tagacatctccatagagtcttaataacgtttattcgaacattctctcgctcacctctcgcgatcccaatgacctgaggcccattcaatccatatttctttccctttctcctccttctgtacgtttacgacctgtttctttattactctcccctctattctcatatccttcacgatgccccccacccacacccatatacctttaatgtgctctcactattctcttctcttatcctcctccacaatacttactccactccttctacctcccagactatttctt

SEQ ID NO: 298631 - DNA, 388 bp, Homo Sapiens
acgaggaggacaggggcggtgggcgggaggcttgccagcttcaacactcatgcgatcgcctaatgtgtacacatcatgaccaactcatcatcactgtggatattctttgtgttataaagaataaagatgtccatgtgtctgtctagatgatttgcattccatcccggctgaagctgtccgaatgagactatgggctgtgcctccgcctatcatgtagacacctgatagaatgatgatgatgcccagaacgggtcttactaccacaactgacatgagttttgtgatgagtattggatcaaactattggcataggtctacatgatacatggcgcgcaagaagagcataccatcgcattcatgaaccacgagatcttggcatagtgccgct

SEQ ID NO: 298632 - DNA, 403 bp, Homo Sapiens
ctgagtctgaccacgtacaatgaccaacaccacagggtgacttgtacaacagaccatgcctgcatagactgaagtactgcttacatcctacggttcattacctattatttcacacgctaataccggattaggacacatgagagaacaaggatcagatgttcgaacccatccctcatagaagactaagaatggtaacaaataccatagatgagaatttacctctctggactgtgcaatttatgatggactatgtgtcagcctagctttacccaacaggatacatattggctaacatcgttcatacaatcacgctcactgactctgctgagtatgtactagaggaggcctacatgctattcatgagaatgcaacagctacatgcagccaatgccgacagtgggtg

SEQ ID NO: 298633 - DNA, 505 bp, Homo Sapiens
aggagccgtgtacaagtgcgtcgatgggcgaggtgctcgtgctgtgtcgcattgcggagattggtggcagcggtgggggtctgatgtaaggtgtggagaggagtgcggggtgcggtgaaaatgagcctgtggagatactagtggcagaaggccgcgagccaccaatggtgtgcagggaggatgttcagggcgatgtgggtgtggaagcgtaccataggtggtgcaagtgacggtgcatcggtcatggtgtcttcgtgtcgaggcgcgggattcaactcgcgaggcttggccgtgctgatgagaatgttgctgccataggtacagagacagacatagagaatggtaaagaggcagaaagagagccatggccccgcccccaaaaaggccaggttggatttcctatggaaggaactgtggcccccctggacacttgggttccccctgcaacttcagggcccctgggcctgggccccccttgggaggaaaagtccccctcctttccaat

SEQ ID NO: 298634 - DNA, 259 bp, Homo Sapiens
  misc_feature (97)..(189): n is a, c, g, or t
aaagagtttcgaacgaatgataagacagtgccaggacggataggtgcgactgccggcggttctccccgctcctgcatgctctctttcccctcgtttnnnnnnnnnnnnnnnnnnnnnnnnnnnnnnnnnnnnnnnnnnnnnnnnnnnnnnnnnnnnnnnnnnnnnnnnnnnnnnnnnnnnnnnnnnnnncgttcatctatccattgtcctcgtccgcaccacttccccttcgctttacactctccctggtttctctctt

SEQ ID NO: 298635 - DNA, 644 bp, Homo Sapiens
  misc_feature (590)..(590): n is a, c, g, or t
ttaagtggctattaaatgaagagttctgtgggccagatgaaccaccgcatctgacgctcagaactctgtttcatagccgcttagctctaatcattagaaatgtatttctcatatttaggcccaaatctggttcccgggaactactacccattagttgtagttcttttcctcataatggccctaaggttatagaagacttgtaatcattctttgttctccccttcccaagataattcatttattttgatgatctaaacagatgtagtacagagtgctactacatactcctctgcctttgagttttggatccagaagatatttagtactataaatacttcagaatgcaatgataatggtgtgaaattttagatagtgttgcgttactctatgttgcagagtttttaggctaaataacagtaaactagcattttatctctaatgtgtcatccttaattctaaataatgactactaatctagaacatttgaattacctcccagttttccagatgatatcttaagaaagattctaaagttttacagcctgcctgcagaactatgatgagatgttagtaatccactactctagttntcagactttttgagtatgacgattctctttctaatgttgacctagctatagctg

SEQ ID NO: 298636 - DNA, 238 bp, Homo Sapiens
cgaagactctcttgagaggcctgtacgtgaatcaggagtatagctactaagctcaatggcaagggaccatagataggaatggttcagggcctggagaacgaacctgaagtgatgcaactacggatggagacacgatttcaaggaagcagacaggactaagatgaatgagtcagcactacaggaggcataggtcacgctcacggaactgagtgctcacagacaaggtatatggatgcgc

SEQ ID NO: 298637 - DNA, 264 bp, Homo Sapiens
gaggcctgtacatgactacacgcggtagtgactacgttcattgacaagggaccagacatagcgatggtacagggcatggagaaagaacctgcagtgatcacgatggatgggacagatgtcaaggaggcatgacaggactaagaagaaagagtgaacactccaggcagcatagagcacgctgacggaactgagaacgcgctgagcgtataaccagtacacttgcgcaactggtacagctattcattgatcacagacgtatcaggt

SEQ ID NO: 298638 - DNA, 375 bp, Homo Sapiens
gagaaacgctgtgacgttgatatgtactacagatatataattatgcggacttaagagctacaagagtagtttagagagaacggatatctaagtgcgctataaggatgttacagcaagtgagtaccagaagcttcacattctctaataggagaggacttagagaaacgatagatgatgctgccagaaaccagatgtgagcatagctgagtaggcatgactcgcacctgcgcaggagaactatgtatccgccagctctgatacagatatgagttgtgattagaggacgcctagctgtgtcagagagaccataatgagtagagaattcattgggagcagacgatcatgcttataagctctggaagcctatcatcgttt

SEQ ID NO: 298639 - DNA, 374 bp, Homo Sapiens
ctgacctcctgtctcctttggaaagcaagtatcgatgcatatgagctatatgtgagtaacctatagggatactcgaattatagctgctatacatgagtggccattaattgattcgacattcttataacatcaatgctgtgctatgtatgtagagcgcatattactgatactgcgttacatttgattgacaatctctatgacgattacaacagatgaagatgtatgtatctgccaagatcgctgtgagctgtgattggtatgtgtaacccactagtgaggtgcaaatgtgattctgtgctttgatgccatcatgattggtggctaatggaggagctgaatatattgagacttagagcttttggagacttcggtcg

SEQ ID NO: 298640 - DNA, 636 bp, Homo Sapiens
  misc_feature (441)..(441): n is a, c, g, or t
  misc_feature (536)..(536): n is a, c, g, or t
gccagtaggagagagagcagataaagcacgcagagctccagctacgtactgcctgaagatgggcgacctgattaggacagctctgcactgcttcaatgggatcatccttaactgcatttaccaacggcctctgcacagacgactgacaactatgtgcacggatggaaacgaggtccaagaggtccgctagggccagaggtacttgataagatgatcagctacaggatgatggatatgacccgatgcagactccaccttggtgctagcatacatatgaaatgaggactctgggtgcacgggacatgcgactactcctctgcatgaaggcgcacacatctgagaactgaaggccgccctgacatgaccactgatctctaatggcgctaatgcccacttggtatcatgcgtgatgagacatgccagggttaccaggactctctnctgtacaatggttcatcacatgctccgggatagagtgtggcgtgaatcaagcccattgcttcctgtctgtagctgggcttggtattgactcctangaatcaagagagcatgtgagatgttcgatgacttgagctgggacttacatcttagcacctcataagggagccattcgcagctggaatgtacgcatgtggc

SEQ ID NO: 298641 - DNA, 402 bp, Homo Sapiens
ccgcactgcatgcgaaggcctgtgcgcagtgctatgcgctcagtaacctgaggcaacatgtatagcagaacttggctagactcgattcacaagtactgtatatttctaatgagtgagagcagcagtcttacacattgcactactctgatttgagagactaccatgaccagtacactctgcccgtcagaggaactataatgaccacatccttacactctatggccttgactaacgcacttatagaatatgcacaccaagaagcgacatcatagagcggagacaccgggagatgtgtattgaacaaaccgcagctgtcagattgcaacgtcagcagtgcacgaacctatgctagaggactgtgacacgaagccacagaccaagtgactggtactctggtctgcg

SEQ ID NO: 298642 - DNA, 278 bp, Homo Sapiens
gcgcagagactgagccgattcgaaaaaatactcagtccaaggctgatccgtacgtacacaagatgactggtatatggagatggcaagcttgtctgcggggctttttggtcttaagcgcaactgctattatgccgggcctcctttccgtacccggtgaaaccatcgaatactgattgcatagacacccgatgcactgacccatacatgactagagataactctatattctagctgtcatctgcatacatatacctcgtgcatgggagagcagcatagtc

SEQ ID NO: 298643 - DNA, 355 bp, Homo Sapiens
gtgaaaactacatgcaggtatatgcacactttctgtgaaggtgaggccaatcttgattcaaactgcgcttgttgtgctcgtgacacacaagccctaggcatcaaatgtgcatctgacagctgatattgatgatttctcagcttgtgtaaagaagtgctgcaaggctgacgatgatgagacctcgcttgccgaggagggtaaaaatcttgctggtcattgttagctggcttaggcttataacatcacattgataagcatctgagcctaccattgtgtttacaggtgtcgagcatatgctgattcatctgtttgtctttgtcgatggtgtgaagccgacaccctgtcttacatatgg

SEQ ID NO: 298644 - DNA, 406 bp, Homo Sapiens
ctagggcctaattcatgacgccaagttttgcagcatgcagagatgattgcacaggactgacagacattatacgctattgtgattggtacattatgcatggagagattgacagtatttagaaactgcaggatccaaacatatgtgacgacactctgactctgaagtcagtgactggacgggacatgtacttgacctagctaggggaccagtgatggtgcatgaagacatcattgactgattgagagatccaagtctttctcatatgccgttgccacattctgttgaggatctcttgccacagcggataagagtcagactgtattatgacagcattgttgcgagggccagctgctggatactactggagcatgctggattacagtcagcatgagtattgactgtgggt

SEQ ID NO: 298645 - DNA, 365 bp, Homo Sapiens
agcactactacgacacgggcgacatctagatcattcaaaggcacatggacgcaggcgttgaacctgtcaagcaccagggatgagatctagtatagggacgagacatctgagatgatggtgcacatgatgatgcaggcgatcaccgtcaggtagcttgatgacgcgaagctatggtgacagctggagcagatgaactatcgataccaatgtcactgtgaacatgatactttcagtcaaggagatgcatgacacaggcatcgatgaactgcacctgaacaggattaacatgtgagaccgtatgcctgaccagcagcccagagtgcctgctgcatgccgtcaccatctatggagactatgaccacccg

SEQ ID NO: 298646 - DNA, 343 bp, Homo Sapiens
gcgagaactagcctcgagaatgtaaatttctgtattgctgtcagctctcagtcaagaagggctgaacaatgatgatacctatgaccactagaactcttctacatttgggtctgcagtagaactcatacctatcatataacccagctcaatgactatcacacaggttagataagaccaatggtaaacaggacagtgatagctatttcacgcagtactaagaccctacacttacagaatgtacaatacgcgaagatgcatctatactgctgctcatgtatcaatatatatacttgccactgagtagcttacctaggacacactgttactcatacatcatcagcct

SEQ ID NO: 298647 - DNA, 219 bp, Homo Sapiens
tctattttcattctttttgtctttagatctgctaattgcgggggtttcttaacgagaaattcacacacccagtgaggctcctcataactttaaagattatatagaacttttcaaagccttggtgttgatcgcctttgctcacaatctttagtatagttcattttaagatcatgtcatctataaattgtttctcttcatatcttctatctacacatattt

SEQ ID NO: 298648 - DNA, 295 bp, Homo Sapiens
  misc_feature (112)..(120): n is a, c, g, or t
  misc_feature (251)..(251): n is a, c, g, or t
  misc_feature (256)..(256): n is a, c, g, or t
cacacagctgcggggcgtgtagaacaaaacctctgggcggcacctgcggcggggaagacataacacagccccccgcagctgatttataatacacgctgcgcgcgcacgtacnnnnnnnnncccagacgtctttctctccgctggcggcgagccaacaattctcctttccttcgccttcgcatactgttcgtaatatatgcccttctgaccttacctccttctgatggcatgggaggggaatcaaccccctncagcnagactagtttatatgtcagttcccagtggttttcttttg

SEQ ID NO: 298649 - DNA, 647 bp, Homo Sapiens
cagacattcagaggaagacgctgtggcactcagtactactgactccaaggctgggtagcgagtgtgtcgctggccttagccagactctacatgccaccctggctgctattggatccgaggactcacgctgaggccagatgctaccactcgacaagatcggcgcctctcctgcactcacgtgctgctctgacagtggtgactaacggatgaaccctttggacaagagtgacataaatgtgacactgctcactgtacgtaaacaatgtaatgcatgtacaggctatgaccatctgccttcttaagtggctgcatgcataaaagtagacgttgtaagtgaccttaattctttaaaggagctagataaacgcatagaacagatgacagtaaatgagatgcagttagaagaacaggtacttacagtgtcatcagactgttctaaaagaattcccactgccttagaatatgcataatacctcatgcaatcacttaatcagcttctggagcaagacactcatctattgaccgccattatcagccatatgctgactgctcaccttggatggactatcgtggaaccatgattgccagaatgatgacatcgaacgtcatcatgccgaccttggatttcactgtgactgctgtttttt

SEQ ID NO: 298650 - DNA, 189 bp, Homo Sapiens
atgaacgcagttctgcactgggcagcctgacactgctctgcatgaactcacattggagtagctgctgctatcggagtggctgcagatccagatgagctaataagagggcgacctatcactggaacattgattcatcgtggcacaagtgtagatcgtgtaccgaagcagatcactggctatgcgcatagg

SEQ ID NO: 298651 - DNA, 670 bp, Homo Sapiens
tttgatgttgctcagaattcccctgtaggcagagaggagggttccccatgcaggggatttgatgccgtctaagttcacagtttctattagggcttatcattatgtattatagccagatgttaatctgcctgtgttccccagtagactgtgagagatcagggagcaacacatctgcatctggcaatagaggaattttggacaggggtgtgtgtaggagttaaccagacgtgggacatatcatgataaaccagagagtaggaaagaaaccctgaataaaagcagggcccagagagatggaaaggaagagatggagctttttaggatgtggaatctgtgtcaatctctacaacgaaccagggaggagtcaagaacgagctctcagattctagtttggacaaccaggtagattcatggtaagaccttgatcagagctggggagcataggagaagatgcatcatggatggggccgggatggtttagttctgaatggattgagtctaaggtacctgagggtctggagtacagatattctggtccttttagtgccacaggctgagctcgtctctgtaactactactgggtcctgatggtctgatgtcttactgactcgtttcctgtccttgagtctcacattttgtagtccgcccttgactttgagctctagatggg

SEQ ID NO: 298652 - DNA, 649 bp, Homo Sapiens
  misc_feature (490)..(490): n is a, c, g, or t
  misc_feature (540)..(540): n is a, c, g, or t
  misc_feature (632)..(632): n is a, c, g, or t
ccatgctggtggctactggcactcctgcatactgagtggggccttgcgccgtcggaattgaatgctatgatgctatgctcttgaatatcgatctctaacatgactagcagctgatgataccagagacctctgcggaatcttacatgagagattccgtgattgatggccaactacctggagccttgcgaatcacctgtctcctgatcataccggattacacgatgatctacggacagtgtaagacagtgagacatcactgtagacaaccagacatcacaggtggcactgctgatatgagcattccaactcactatatcttactgacgaatcagctatacctggtatgatatacgctgagtacttgaagctgacgaaactgtatcacgagctcttgatgcatgaggcatcaagggtaacacatgactcaagtattcgatatctgcaggatatatagtgattagatagatcgccttgcaaagactctgtgcanatccatgacatcactggggagtgtcaagacattgccaatatgggagctanacatagcagactgtactatattatacctgtgagagctaaccagcagttctacatatactgagctcgatgggccctgtatatggcatgactgngttctagactagacttg

SEQ ID NO: 298653 - DNA, 426 bp, Homo Sapiens
agcatactcttcggactcattgtgccccttacggctgcaagtatacgcattgtgccacacgcgcaccctctgctttgatccctatggaggccgtgatgcgacccagggaggagatcggctacctgacctgcattgactcgtaacacagagcactgaggccccagattatctgaccactgcggatgctgactccaaggctgcacagcattgccagtgcattgagctcactgacatctatgccaagtgcgaacatgcgcttgtccagactagccagtgcctgacctgcgattactggatgatgagatacgtgccagatgataagggcattggcagaggagacagtgtgctagtgtatgggacgacctgcgatgagactgctacatgcaagagatctgcccgtgttgcactgctagcctatgactctgt

SEQ ID NO: 298654 - DNA, 319 bp, Homo Sapiens
gatccatggctgggacattggaatctctctataaaggagaaatcatattaaggtattttcatcttaggcctctaaccccaagggtatctttacaaagactttattttagtgaagccttcaataaacagtgacctcatgtcaagaattctaaagagagggttatggaatattggtttgatattaaagtcattgttatcttggagctggcctgaatggactaataagtggcctgtcaccagttgtaacttacttttacaattttaatgtgatttaagggaagacactcttggtgcttagttatggttcatacccattcgtg

SEQ ID NO: 298655 - DNA, 344 bp, Homo Sapiens
catggttctcatgcttacagtacgatcctgtagctagatttgttttgtaagaaggaagaagaatgagatgaaataccctatgtataatgttttatgttgctttggaaaagtacaacaatgtagaaaaaggtaaaatcatgataaagtaagaaattaaaaactgtttggactgatttacaagagatgatgctatgatggttcagttggaacctatgactcacccccctccactttatgggggagctgcagcagcactactggcgcctctccagagtccccaccaccaggggactccatttaggcagggtgtcacttcttatacccaacagggctccatttgccgg

SEQ ID NO: 298656 - DNA, 554 bp, Homo Sapiens
gagaggagtgccgcgtataagagataactcttgcaaccccaatagcggatactgggatattgagaacactgctcttattagaccttgtcgacgctagagttctggcgaaatattccacaccgggaccttgcgtaggcgaccgttcattcttgatgaagcacttggacataaactttctaagattaagatttatcctatcccggtttaagtaaccgttgtggaacactcactcactacactgggagtgttccaagacatgcgctatttgtccttgtatgagaagtgttcaatctgatggaatctgcacgatcaggctgctgatgttcagaagagaagttaatcttctcatgaccggcactacttgtgttgagtataaagaaactctaaccaaggccactatacttgatcgaacggtgacctttcagaatttgcccgtcacatttcggaaacagttggttaactgaccctgggacttgacattattatggctccgttttttctatcgctgatctcatgaaagggtgcccatgggtaggtgagtgggcttttttctt

SEQ ID NO: 298657 - DNA, 572 bp, Homo Sapiens
gaattcggcacgaggggaatagtgcacgagagacaagatcacgcatgcacctgcgatagaggctggtgagatattgagaacactgcagttattagcctgtggcaaagctagagttctggcgaaaaattcgcgcaactttttacgattaagatcaatcctatcccgatttaagaaacggttgtagaacaagcactcactacacatagagtgtttcaagacagacacgtatcaaattggtgctctaattgcgcgaattctgaagatgagaaagacacttatgcacaatctcctttgtttcgaagtgttcaaccagttggaattttcactcaaggctgctgatgtttagaaagagatataatcttctcatgacccggactacatggtaagagataaacgctcgaacccggtcaactatattggatagaatggtggccctgcagcattttgcgtcatattccggaaccacgggatgaacccacccggtgaatccaattatttggctcccttttgtcttcccgtgaaccaatggaaggtgcccctaatggtcagctgagtggaccttttcttggggt

SEQ ID NO: 298658 - DNA, 600 bp, Homo Sapiens
agacaagataacccttgtaattgtggtgtatacagtggtgcaactgggctgtgtggtgtagacagcgctgcagctaggctgtgtggtgtacactagagttcagctggactgttgtatgtcgacagagtatcacatggtctctgtggtgtttacagtggagcactggactgtgaggtgtctacagcttaaaccactggtcggcgtggtgtagaaacgggtgcagataacctatgcggtgcatacagaggagcaccaggcctgcgtggtgtaaacagacccaggttcggctggtctctgttggagaagcaactgatcttaagctatgtttattgttgcaataggcctaaatattgacagtgtgacgatgtgctgaataatgttgggcagatatataacaaccgcattgatcggggctatcttagcatgcgataaagggaagtgctttccattccaattatcattggctacaacgatgactttgcataaggatatgtcacatttagtattttgttgaaccaccctggagaatggagtttgtagtgggccccttataccttaagtgacccaagggaggatacccccgtaattccccggggttgg

SEQ ID NO: 298659 - DNA, 345 bp, Homo Sapiens
gaccagtagcgtgatcagagctatctcccgtactgtgccgcagcctacccagatcacagacgatcaggtggctccatagattccagtggagtgaacaatcttagggcagatagaacctggcggagataccaatgccactgaaggcacgaatatttggtggcaaagaccgagcgggcactattgtaagtggcagtgaggttttgtggaaagatcaactgctagccgggaagacattctgattctcactcagtcctacgcacacaagagcctctgactcctatagtgaatacgttgcttatcgcgtccatgtggatggctaccttgctctttccaccttacaggctg

SEQ ID NO: 298660 - DNA, 539 bp, Homo Sapiens
  misc_feature (391)..(391): n is a, c, g, or t
gggaagagttccccttatgataacacctgcaactgcgatataggattttgtgttaacgagaacactgctgctattagagtgtggcgacgctagagttctagcgaaatattccagagcagcgacacataagatggcgaccgttcattcttgatgaaagacttggacataaagtttctacgactgagatcaatcatataccgattgtagtaacggttgtagaacactcactcactgcacagagagtgtcttaagacatgccgtatatctctttgttttccaaatgttcaaccaattgcaattttcacgcaaggcgtgatgatgtttagaagaagagagaatcgttcaatgagcgggactacatttgttgagttaaacgaacctctcaccaggnccactatatttgatccaacggtggccctttagaatttggcgtcacatttgggaaccaatgatgaactcacctgatgagtggacttattagacgtcctttttactatcgctgacccacaggggagcccattatgggttgttcagtgggc

SEQ ID NO: 298661 - DNA, 594 bp, Homo Sapiens
  misc_feature (86)..(86): n is a, c, g, or t
  misc_feature (127)..(127): n is a, c, g, or t
gaatctccccacgtaggaggaaagttcggccacagaggacagcagcagataatcgccttgtgcagcagagcactcactagtcgcgngtcatcgtgacgcgtagagcgcagaaacagcgtgcttttanattaaaccgcgtgggcgtaactctcccagtactcagcgaataattccagacggaacaccttaagttgcacactgctcattctggaccaagcacttgcacatcaactttctccgcctgacttcctccacagacatatttctgtagccgctctggaacactcaatcactccactgggagcggtcctagacatgccttaaaaaatgacgccagcattgttgcatacctggtcaaaaggaggaccattctgacaatctggtgtatgccaagtgttaatcagtggcatctccacgagcgcgtctggtgtttggagagtgttaatatttcccgggtctacctttgtagagatcaagcacagctttacaagccaatttttttgaccaaggagtcattttatttggcgccccctttgcatcgcgttaccacggcggttgccatttatggttattttgttggacttttccttgggt

SEQ ID NO: 298662 - DNA, 531 bp, Homo Sapiens
ctagcatcgagctatctataaacctagccaagtacatacagttaactgagctcgccaggcagataggccaaccctctacgagcagggaagacgtaatctagttgtactatgatgcgcagctacctatgccatgagaagactctgtatgatcgaggcagtcatgctactgataggaccaatacgcatgggcagacgcctaaacatttgcacaattgaccgccaccgacttatgcaccctaatagaagtgcccagctagcagtatgaatcatcagccgtccatgtacagttagcatttcacaaggctaaacctactgactattctagaaatatggtgtgccttaagacaagcctacactttaagacttctagtgatcgtgctacctgcgcgacgcgcataaagaaaaagaagagaaagtggagggggaccccggtacccaagcgacctatagtgagatgaataacaataaactgggcaggggttacgacgacgagactgagataaccgtggagttcctcacttaaacgagttg

SEQ ID NO: 298663 - DNA, 666 bp, Homo Sapiens
  misc_feature (545)..(545): n is a, c, g, or t
gtccatagaccgtagacgctgatagcaatctctagcctaattctatatgcacactataaatgttccactgatcgcgatatctggtagacgtactagagaacacagacagggaacgtctttcataactgattagaataacgtcattgtacagaagtgcggcatgattacgaggcaatatctaaagctaaagatcataagccgcatgtggactaaatgagatgatgtactagtgcaatggattgctgatataagaggatcacactcagacactagcatgaaagcaagaatagataccagttcaccttcagacaactgtactatggcatgactagagcgaatcccacgcaatcagatcgagaatcatattgatgaaagtagcaagagtccaaaggaggtctgaatatggagaggtactggtcttctggacaacctgaagacccttgaccagaattctgactgagctgatgactacatgctgaatatgcatgatagatcatctacagatatacgccatcctccaaactaatcgacactgaactaccgtngactggctcacatactcagtcactgtgtagtgctatgttgcatacttgaaatatattgatgatgtgatgatagtgcacttgactgcccactgttcaggacatgatactactgctacagtgt

SEQ ID NO: 298664 - DNA, 411 bp, Homo Sapiens
gtccgacttgggtcgacattggacaccatgattgagactggctgagcctttttatatcctgacgacagctaccacacagtgaactatgagatgctaacggtggagcacgaggcggatgagctagtggcgcacaacagcgaggtttttgagacgttcaccgagatccacatccagagtgcgatcttagtgcgcgaccatgtgaaagtgcccctggtgaacactctatctatgaaccagtgctgactggacttaatagcattggcctactcatggaggtatcaggataggacgatgggatggcactgtgccgagaccatcgattagcggttctcagcaagtgtctggacatctggataatgttcctggtcattctcaagaccctactggtatcctaattccggttcttgccct

SEQ ID NO: 298665 - DNA, 684 bp, Homo Sapiens
tgcaggaattcggcactagcgggacatgtttacaggaggttgtgcttgcatggagctgggtgtccagagagcaactgtctttgtttcttgcgtgctacaatccagcgaaagttccttggaccccgtgataaacacttgctttcatgggatcaatgaccgagagaaggccttggtatcaccttgaggctttggagacccaactgcctttgtcgaaggtatgatacagtcattacacagagccttctcctacacataatcaccagtgacccgatctgagatggcccatacgtgttactacaggtccatgctgtaaagcaggtgtttatgcatcagctgatgccacccctgctgctgatgagcacgtgcctgctgcaggtccagacacagcatacagcgctttgcattgcctaaggagagatgatgatttgtgagcactgaatgattagattttgaaggatgacgtcgataccagtgtgacacactgatgcacttgtgttgtcacacttagacagtgaactcttgctctcttctgtcatacgggtgtacctaccgctgccgtggaggcgaccacagagttcctggggtcgactgagtccacacagatgctcttggcgtgcattgccatcccacagggttccctttcctgcttgcacgtgtacagccagtggcttttgttcctttttc

SEQ ID NO: 298666 - DNA, 701 bp, Homo Sapiens
ggcaaactgagctgacatctaaaagcctttcatagtgataaataagaagtggggcacaccctactctctgcagacaggagatgatgaaccacttcatggacatcctgctgctccatacgctactgatgcgttactccctaaaactcttgaacaagcactgcacctctactagcagataatcattcacggttgaaagggacctgatcacactatcctccgatgcacataagatactgacgccctatcaatatgtcatactcaaaaccaagcaggacaatcaggatatacacaagcatggcatggaggatacagctcacagatgcattgtgactgagtaccaagaaatcatacctcttgggagaactgcgagaaccgagtagatatttacagctatgtatataagcgagaatgcagaaatcttggatgctccaatttcagtagataccgcttgacctgcctataccttaaagatgcacgctgcacacgagtcatatattaagacatacttgaaagttactgtacctcaacattcatgcactacaaagacataactatctgcgctggcgaggataaaccatggccacattgcacatgtcgtcttgtacgatgaacatgtataggcccgttgttactgggtactacccaccaaataggggttgttgccttcagactggacatataaccgtctgcctacattgggt

SEQ ID NO: 298667 - DNA, 293 bp, Homo Sapiens
tggcacgagagcaatatacacgtgtttataaccatcactgtgaacccaccacactcatgctcataaggagaagggataaaaaagtgtaaagagctctaggcaatgttaacccgcctgtccacagagtttgagaactatgtggcagagatcgaggcggattgcaagcacgcacagatgcctttgtgggacaaaggtgtgcaggaaaatcatgaacatgctgccccttttctatccacatacacggaggatactgtggcgggtttacattgacgggcctgacaagttagcattgc

SEQ ID NO: 298668 - DNA, 193 bp, Homo Sapiens
atcatcagcaacgagcactgcagtgctcagcgagatctcgcgttgtctctgtccatatgtgctatagacctacagaaccgtgccaaaccagatgacttaccatctgtgacacaggacctgttagaaacattatcttgaccaggactaccgatagggcatcacacacgagtgcgggccatacacagtgtgggtc

SEQ ID NO: 298669 - DNA, 357 bp, Homo Sapiens
  misc_feature (57)..(57): n is a, c, g, or t
cccgaacccgttggaggggcagtgctgcacggcgcagtaggcttaggacagcagggntgccatgagactcttaatgctgcatgatctagacaggacgtacgacgtagccgtcatgctaatgactgagaccgtgatgactttgcaagactagctagagctaagacagatgggagcagactagctgcctaagaacagcatctcgagcgcatctcgctatgacgcaatacttcgccaagagctcttggtagaagccactaacctaacgggtgagctgataggtagctgatcgagatggaaccttacatgatctcaagatgtgcatacagatcggtttgaatgcacctgtgaatggcagat

SEQ ID NO: 298670 - DNA, 354 bp, Homo Sapiens
ctcgaaaccatttaccctatagacgctatccttatagacttcccatagactcggagggaactgcagggagaccaactgatttagagcgaattggacatggatcgatgagcgacctctgattgattactgctagaatgaacttgtcaatgatgcatgggctattaccatggaagctatacaagcgacctatgaacacccttgctagtacacctgtcaatagccctgctcctaccgatgaaccacatggacagtacacatacttataactccagtgcagaattgtctgcactctatagaactctatatcagctaataatgcatcgctgaaccatatttcactagagatttgcggtt

SEQ ID NO: 298671 - DNA, 369 bp, Homo Sapiens
attctaaagttatcttttgttaaatgtggtttgttaagagatttcccattgttcagtgttagtaagtggacagtgaacaaagaggacagatttttgtcaagcataaacaacttttgcatcctgtttattaaatggtacctcaatgaatgtctgtgctaacaggaagaaagacattcagtaaacaggaattgtgtgctaagagatacattttgaaagggaaatggaggctcatgcttagaatttgagttataccatttcaccattatgagtaccttttcaagaatgttagatttaatggagtgctaaatggtctttttcattactgctatgagtgataaattgtcttgaccaagatagcatgttgcgtgt

SEQ ID NO: 298672 - DNA, 341 bp, Homo Sapiens
cacgggtgattaataaccttcagaagtttcccacagaggctcagactctgggcaagaaaacgagaaccaggccccagggctgatagcgttaccttcccggcacctcaccagagtctggagcttccctggactgatggagaggggactgtgagagatgatgggagccctgtgtaagatccctgtttgaaggaactcagtcattgtagaggagatttcatggaagttcaagatgagtaaattccactaccaatatctgaatactatatagatgcaatgacatactctatatcagagatttactgctaaggcagtgacgctacatcgtgatgagtgggatatct

SEQ ID NO: 298673 - DNA, 284 bp, Homo Sapiens
tctgcacgaggctctattgcggccgcatgcgcgcctctgtggagtgcacctcgtggttgtgggcactgtgcccccagacccctcttctttggacctacttctgtttgccggcccatttggcctgctgtgggataagacaccccacgtgtctctggaggtcatacctaactggctgtgcccccttctgagcacactggggcccctggcactgcgaatgcgggccaccaacaccccccacatcaaccttaaccttaactgggctcttgctattccctgagcccttc

SEQ ID NO: 298674 - DNA, 172 bp, Homo Sapiens
cgctgatttccagggatgaatttcccttttcggggacccttctggagaaaccaaaacggggggaatttaacaaaaaggggttaaaattaaagcccttttaaaaggggattttggggaacccccgggattgggcaaaaaatccccaaatcggcaacaaatttggaaaaaatcc

SEQ ID NO: 298675 - DNA, 222 bp, Homo Sapiens
ggaccaagcggactccagctctatgcaataacatactattccgtggagcgctctgtggacagatgcttgacatcccaacaccttgcgaggtctaccgccctggagcactaccgatcctccactatgcccaagatgtgaatctggataaccaggcccacttgaccaactctgacccatgtgcccactggtcacaggcgcttcatcggctacgatagatggatc

SEQ ID NO: 298676 - DNA, 712 bp, Homo Sapiens
  misc_feature (95)..(95): n is a, c, g, or t
gtcacgacgagcactcactttcctgtgtctactgagtctcaagaacccaggtggaggctctacagttctctatcctgcagagacactatctgcantgatgcatcatcgatgactattcgggctcttgcagcctgcaaggctgttactctagatcatcttcatgagactcagcgatcagctgaatatgctctcgatgctcaagcatggatattccacctagaacgagatgttcaagactccctagaactcttccagacatgtgcagttctagttctgagagagctgcttacctcaagtatgtggacagatcctgatttcttgtgggatatcatacagctgccattgatgatatcatgaagcagctcatctcagccacatagatggcgagatcagcctcacctagagcatgtacatatacctgaagcagttcaacacggcacatgaccagaggcacaatgccctgaatctgaataggctcgatctcgacttatataatgctgctgaagatccgctagctggatggagactatggcatggtcactgcagtccacaagatatctgtggagttctcaccagccagaacgcattctgacatcttgacgacgcactgactcatgaccctaccaatacaatggattccatgctgtgaggctctggccttctatatgaactgccactgcactagagggtgactgaacttgaagcaaggtct

SEQ ID NO: 298677 - DNA, 138 bp, Homo Sapiens
  misc_feature (17)..(17): n is a, c, g, or t
accagatccttttgccnatggaactcaaccgatgccaattttgcaaccctttaccgaattttttaagaaaaaaccttggtcccgatactggccattcaccgggccacccttgaaaattttctttaaatcttttaaggg

SEQ ID NO: 298678 - DNA, 431 bp, Homo Sapiens
cacacatattctccaggccagagcacatcttacacagacctcaaatctttattctggacacgtacacacagcctgtggcagacacaatttttatatacactgtgccaatcaccaagtgcgtctctcagcaaggtacacggacctttacacaacatatccaacttttcttgtgctatattttggatctacacgggcaacctctatattgcgtttggctcagacatcttcaacccccattacaggataccacttcccaagcacaagcgtcagagtctgaggtcgtgctgcgacacagtaagccacactttcagagagaataattcctggtggaacacagcatagcatgattgcgaccacaggatggctgaaatggaacttgggaagcgccacacccacatcttgttcctttcgggctatttctacagtgcgcg

SEQ ID NO: 298679 - DNA, 636 bp, Homo Sapiens
gttagacaggcgattatcttctatgttagccattggccactgtatagtggatactgctctgctctcaaccatagtgaaggaccactcctaggagtctgcgagagcctacttggatccatcgcgaaaccatggaccggaatgcctttggcaatagccttgagcgtaaatggcactctgatgccctactgacgggctgtaggttgatggctgacaacgtgaatactctcaggggactacgaggcgcaatcaggatactggctgacaccatcactatcccctgtctccctatctcagaagacgatggacgacgagatgaaagctatcggactctgggaggatacccacagcttatgctgggttacagaagtactgactaacgcgacttctcataacatcaaatgccacattgagaaccccttgccgcactacgtatgcagtactagtaccaactagcggacattgtgggagagcttgaggggtcaccggctaccagcttgctggtgaggtgactactatcacactgaactgtccctatggttacgacgtagcgcctggagacggcctaacatctaagacggcccggaccaaacggacttcgagaatgtgagcagcctgtatgaccaaaggcttccccgt

SEQ ID NO: 298680 - DNA, 435 bp, Homo Sapiens
gccacatggcagtgtgtgacacttccaggaaaactcgcgcacatctttcgcgagatacacgaagcgtctgtcctcagataagatacaaaagtggtctttctgtgttaaatatgggccgcaaagagaattgcgttacacatctattgggaaagcttaaacacgagcacacacttggcctggtgcggggggagaagaatagcctaagaataggttagacacaattctgaaaacgaatttaccttataaagaaggtcatggtagaactgggaaaaggaacaaggtatttttctgtgcaagccctttttgtgacttgcgcgcgtattacatattttagaattattttttattttcgaaacatccacaaaaggaatgcttattagtgagaaaggaagaatttccatttcaacacacttatgaaactgacttgacatcctg

SEQ ID NO: 298681 - DNA, 373 bp, Homo Sapiens
  misc_feature (43)..(43): n is a, c, g, or t
cttttggtgccacacagagactctagtgtgcgcctctccacanatatgtggaaagagactttccagcgtgggcacgtagctcgcctgtgcccgagatttcccaaagctgtgtttgcacaagtttccacagtttatgacagatctttcccacaggcacaccgaatgcttcccttgagaaccgcttgaatgttctgatgaccgggcggaccttgtccaatatatctcgggaaataaagattccatctcccttttaccgtgagaatgctgagaaaaacctctgtgtggaatcccactcgattgcccaatcggtgatgagatgccctccgcctttccctcattaactgctgattttgttgttaagttgtgttttccc

SEQ ID NO: 298682 - DNA, 414 bp, Homo Sapiens
cttcagtgtgctttaatacagatacatgaatgttcacagaagatcgcagctgctgtcactcctgtcgatggaacctctgtagtacaccatatacgagtaggtggcttctcacaccattctgttgcagctgaactagtgcctgcaatgcttctaacgtaggctgaggtaattttgctaatatcatccacagcctactggaggattggtagccgtagctgtgacaagaactggatgcggacagcgtgaagaactcggaacctacataggacgcgaatacgaacccatactagatcattatgcgacctgacacaaacggctagctgcagtttgtgagccagaccctgtcaggtctgggaagaagtctgctagattcaaacctctcagacacacctcctgttgcttcgatggagtctt

SEQ ID NO: 298683 - DNA, 354 bp, Homo Sapiens
ataacctgaagcctgaggtggcagagttctatgggacaggattacagatgaaccagcttagaggtaggacgtcctgtcacacgcatctaggcgggtacgctgggtggaacatactcataggcttactttactgagacttacctgagccacgtgaacctattgaggcagagcccaatttcttctcgagcagttgtgccctctgtgccaatggcacggactagcgccagctgtgtcaactgcgttcagagtgtggctgctacacccttgaccaatacttcaggtacttgagagccttcaagagtgtgaaggatggcgctgtggaagtgaactttgacgcactgcgctatatttgag

SEQ ID NO: 298684 - DNA, 217 bp, Homo Sapiens
cgctactatacgcctatggcgcactgcgatgggtgaccattatatctcttctcatgctctctagcacgccttatattcacaggcgtgagtcggcctgatgcgcacctgagagagggcgcgtgttgggttgagttgctagacgaatttgaaggttatggccaattggcgcaaggagtatctgagattggctgaacatgcggtgctggagacacctgtt

SEQ ID NO: 298685 - DNA, 390 bp, Homo Sapiens
cgctactatgcctatagagcgtaatactctcgctgtgcattatagctactctcatatgccctcaacacccactctctctctagccaatattgggcctatatgccatactaggccttggcgcgctgccaagcaaccgagggcctagccctactagactcaatctccaacacatatggcctatactacctacataacctcctacttcaatgctctaatcttgccaacgcattatattactaccactgacatgactttccaatcccctactattggttaacccaatcaacaacaacctatttagctgtgccccaacctctttcctatcgacgcccctaacagacctcaccttctaagactcctacactgactctctacacccttacacatctg

SEQ ID NO: 298686 - DNA, 310 bp, Homo Sapiens
aggtcgtatactgctatagcgcagtgcggtcgcagaggcgtatacttatactctttgtctgtacccgtcagctgtgccgaggcgcacaacgcgccgacgcggacagaggactggacgacagcctatactcgcttaggacccaagtacagaggtgcacttacatggttcaccattaatactgacttaacacccttccatagaagggatgtattgaagcttggcaaggcaccaatgatataagggtatagctggatattctgaagaatatgatatatgcattcgcgccaagagtgcctttcgtggcggatgc

SEQ ID NO: 298687 - DNA, 171 bp, Homo Sapiens
cgctcctatacacctatagcacactgagctggctgacccttatatccattctcgtagtctctaacacgccctatgcgccaggcgcgattcgtgcagatgcacacacctgacatggcgcgttgtagactataagagttccgcggccgaacgacataggctatggacatggtc

SEQ ID NO: 298688 - DNA, 440 bp, Homo Sapiens
ctgtcgcctgtgcgtgtgggtgaggatatgctgtcgccgggtccgcgtcacgctgtctgtcgctctgggcgcggagccatgtgggtttggattgagccgggcccggacggggcgccgagtcggagggggtggcaatgagcggaggtagaagctacggggctcggtttggctgacatgggagtcggcagagccgaggaaccatgcgagggccgcggagactggtgctgggcccggaccggctctggcttcggcttcttttgcgtgcgtggttacaggcgccgctggtcacctctacattcggggtctagaaccgcgctggcgctaccgcaaggtctgtctgtgcttcctggtctacaacttctttgggggcagtgacacacgctgttgaagctgtctttgagcctgtgtacacggtgtgagagaacgtgccgctgtgttgg

SEQ ID NO: 298689 - DNA, 408 bp, Homo Sapiens
cgaactcgtggagcccacggactgcgccacctctgacctgccagctgaagcctgccagagtgcctgcgtggcgcacttgggctaatgccgctatctctgtgcactcgtacctcagtgcaactgatagctagaacccacgagtcactacccattcatggctaatacagatgtcacttctacatctatcattgctacatcctaccaggaggcctctcaagttgagtactagctagggcctgcagagttcaggccaagagcaaggtgtacctggatgtcccactgtggctgagaactcggcacatctgccactaccctgctacaataacggtccctctagcttagacagagctgatacagtcgtactgacacccgaggctacataccgcttggacgcacaggcattactcc

SEQ ID NO: 298690 - DNA, 268 bp, Homo Sapiens
tattggagcaagatttctggtcggtgttcaggggtgtattttcttaacagagacctgtgcggaaatttccttctcttccttttgatagggtggttcacttttggctattggtgggattggtccctttattaaggtttattccttaaggttttggaggttaccagactgtgcatttatttaccttttgggggcgttttatttcgggctctttttttcacggttttgtgttcctttttccacccacatttcatgtggacctttggggctt

SEQ ID NO: 298691 - DNA, 351 bp, Homo Sapiens
ctcctacaggcagccagacacattgattacctgatagattttaggatagaagtcaccgtacagcacgttcacatgagcctgtgtgtctcactacatcatttacgtctatatcgttagatgccactacttctgtcgttacacgtttaccgactgccatgagctagaccaggcgttgacattagaacatggttcactagacatgtatctgggatgccgacattatatccataccagtcctatgcactgtacactgcagcagcgtgcatcctatgggacttagagggttgctgacatctgtgcatgtgtgaagtaccttgcttttctctgactgtgcatttggatgtgtgcttg

SEQ ID NO: 298692 - DNA, 320 bp, Homo Sapiens
ggaccaggcttgtcatgcttggagagagtgacctgcggtgctgcgagaagtgtgagctgaccctggacatgagaggggtctttgaggactccaactacagcgagaggaccaccgaccttgacgtccaactgctgtgactgggccacatagtcacactctttgaggccatacatgccaactgactttcggacagtgagcttgctgcgcgcgggccttagcatgtctgacacgagaccctggtgacaatcgtgtgctaccacaagattcgagagaagggggcctatagcaccgagcttcgatcttgacttcagtgagaggcc

SEQ ID NO: 298693 - DNA, 374 bp, Homo Sapiens
tggcacgagccgactccctgccctctccagtgtgggtatttgtgacaaggcagcttgtgtgtgtgggtccccacagcctgtccaaggcaaatgcgatgtgtaagctctttgtgtgcacagacacgaagggtgttaaccgcagactcttttgtgatggggacacatgactgtggagaccactccgatgaagccaactgtggaagggtttatataggataaatttgttcacaaacaggtttgagggcccacttcttggtcaccagtattattccagtggatgctccccgcatttcattctggacaccagggttaagaagcccttcactgtgtgaaggttcacgccccagaccccaagcgaataccaattctttttg

SEQ ID NO: 298694 - DNA, 358 bp, Homo Sapiens
gaacaatggggctccaggcaattagtcagtaatataaagtgagaaagccagagagcagagcctcctcagcagtctgtcatctataatcagagggcagacagtcctgaaaaccaggcagaggacttaacctaaaaggagcagaacattagaaaaggttgaattttcagctactatcagtctctaacaccaaagtcaggactctaataaggaaggagtgagaccctgagacaaaggacaggactctaatgtccgtagaacttcaagctcctctgaactctttgttcaagaatggtaccaccaacccgaagactatgcagacacctcaaatgaggtaggtaccctacaagacaatgcattc

SEQ ID NO: 298695 - DNA, 489 bp, Homo Sapiens
gccgcttaaactaggtaaccccggctgctgaccttcgggcgatttttgtcaatcccacactttttttataacaatgagaatcgggtacacctgcgatttcacattttcttttggtatcttaacattgagattaattccgacgcggcgcagttcttgtcgcacgatgtcgctacaccgagagtgcaggagggtgcgatcactccggcgtctgccacgatcattgtcgaatgatagcatacatgttttcaacgcgcctcgcgggttgacacgcgctcttgcgtcacatatttctaacgccgtgcccattttgtatataattgggcgacactagttggaccgaagtatctggtgaattgccataaaacccgatctgcggcgtgttgaggcagcatgagaaattggagagtctatcaactttgatacacccttttgggaaacacaaatatgtgcaaggtgacacctattttgtgaaaaccgtttgtggtgggg

SEQ ID NO: 298696 - DNA, 417 bp, Homo Sapiens
gcgtcagcggctgagtgcacgccttggatagctcggtagagcaacgtggatccataacttgcaccattatcgcttgtgtccgtgcgttagtctcctactctgcgtgagccgtcattacgcgcccggtccggagaccccggtgtagccgtcgactttgaaggatgacctctaggaataatgtgttgctcgacgttatcagcgctgagagattctggagttcgggaagacattgatcatgaactacgatgctgataatatactctacaatcaagtcgcctgtcttggatctcacttactgaccaacgacgtgatggtgcatgacatgctagacacaatgcatatatgggacactagcaagacaggcggttccagtcgcacgagtgtgcgcttttacagaggtgcagacagtgcgttctg

SEQ ID NO: 298697 - DNA, 352 bp, Homo Sapiens
gcacaatctattgaatccagtacgacgaactcgcagtgaatcatcactgcaccactgctctctaccctgcgcatcagcccgaaactctgtctcatacaagaagcgaaccgtccatcacagactcgatgccataatccgggactcctatcgaccatgactgaaggaacgttggccctgagtttcatgggactacaacgaatgctcactatactatcatcacgaaggagatccaatctatctaactgtctgcgatcgtctttgaccagcctctacatagcttgctcacaaggctaatcaccagtaacatagttcctggcagataactacacatgggtttacctacatgtaggct

SEQ ID NO: 298698 - DNA, 379 bp, Homo Sapiens
  misc_feature (24)..(24): n is a, c, g, or t
  misc_feature (38)..(38): n is a, c, g, or t
gcacaccaaggaagggagattgangcttgaaacatcgncccaccgtgtattatactaaactctgattcccgaatgtggaatataggagagcgtacctctcttgcgcgtctccttttttatcctacggtgcggggagattattaaaaaagcaatcgcgagatacccgatttcatgtaaattattcccattggacattcttctggttatatataccaacaactgcgtgtgtggcactttgagatttctttaaaaggataatgttataaaccctttaaagagcctttattgaaaggcttatgcaaatcaggattaaggatctttcttaaaaatgacctaccattaacgagaggcttcttggtatatttaaataaaacctttt

SEQ ID NO: 298699 - DNA, 414 bp, Homo Sapiens
  misc_feature (78)..(187): n is a, c, g, or t
cctagactacctctatggcacagcctacgcagaggagagggcatcggtgagtctagcctggggatatgacggaacatnnnnnnnnnnnnnnnnnnnnnnnnnnnnnnnnnnnnnnnnnnnnnnnnnnnnnnnnnnnnnnnnnnnnnnnnnnnnnnnnnnnnnnnnnnnnnnnnnnnnnnnnnnnnnncaatggctggggaccaagataggaatgagtcagggcatggagaacgaacctacattgatgcactaaggatgtggacacatttcaacgaagcagacaggagtaagaggaaggaatcagcactacaggaggcattggtcacgctaacagaacgcatgatggtctgagcgtatcagtggtacacttgagcatggtacgatatttagtgctcacagacgaggtatatggag

SEQ ID NO: 298700 - DNA, 348 bp, Homo Sapiens
aagaaaggggtattataaagctgacctactactagcttatcagaaaaaacacgtgggtctcatatctgatctgaagatcgcctggaaaacaaatagtgcattaaaaagctttggtactctgctggattcagaattattttctccctacctaggtcagtattgatgggtgtaatagaatattttatgtggaaaaatactatgtgattgtttactactctgggagaatgttaatttttttcccaatgaattaggaaatcaatacataatttcatgtgtgtatgggttactgtaaagtattgggtgagaggttattcagactacactcaataataaccaaaaatatttttg

SEQ ID NO: 298701 - DNA, 402 bp, Homo Sapiens
cgaggtctgtgctaagatagttctgataacacagatgctgtatactgtcaagtgctgaatgccttttgcacttaagccagccttgtgtatgatgccagattgtacatgttgacgtttgacattctagcatgccatgacgtcaactccagctcccgatgtgtgcgtagctctatactagatgcaatatagggactttttatgcttagaagtacgagttcactgtcttgacatgcattgtctactttatcagagagtagaatctcatgctattagcattgcttactgcagaatggtcccaatgcacatgctgtttaacagcagggctatgttatgccaattaatgatgtctggaacttagtatctgctttcccaatgacactagtgctgaattgctattactgg

SEQ ID NO: 298702 - DNA, 347 bp, Homo Sapiens
aggcatttctgacgtcaaagagtgtgcgcgtcaaaatgctcactaaccgactgagcgctcataggctattggagacacacgtcaccatggggacattctttctgtgacgggtattgcaaggtagagacactctctactggcacacagactaaagcaccaaacgacagtcaacctttaatgcgagcagcaggagttccgcctattaaggatctctcagttatacacgcctgatggcttcactccaagaacccatatgtttacacggcacacctggccaatgaggctgggattaactgtgcaagccttcgtgtccctctcacgggacgctgatttttatggaggggggc

SEQ ID NO: 298703 - DNA, 376 bp, Homo Sapiens
agggatctctgcgctcaaaaattatacctgtgcagcttctcaaacacgtgactgtgtgctaaacattaagctacgaggatcttagtgcacctgaggcacattctatctgacacggatatggcagggtaaggccactctggactggcacacatgctaaagcgccacaagaccttcaacattgtctgagagcaaccgagtatttgccaataaatgagaccttatttttccagcttgactggccatgtaacttaaacatagaataagcgctaattttcaagcacggctggaaagccgggctttacctgcccctccgttaccatctaaagtgtatgctgaccaaattgctgagtaacatataccgaggctgagaccacgg

SEQ ID NO: 298704 - DNA, 355 bp, Homo Sapiens
atgtagacatgagcttgagatttataatctctaaacatactaaagtgaaatcatagcttacctctatagcagtatcagttatttagacacagaatgggattttatagtgaattgctttaaggttggggagtcggagccaggaatcttttcattaattataaggaaaggttgaaacctctgagtacctttatagggggttctcttactatttggctcttgcgtagaactggttaaccccaggttgctcagagaactgatattggagccacatacaagcaattcacatcatatttttcctttgaaggataatcattggatgggaagaaggacaaggcccgttgggttcgggcttggc

SEQ ID NO: 298705 - DNA, 362 bp, Homo Sapiens
ggcacgcgaggggtgtttcgtgacaccaagcgtgccgggcacgcattgcacagctcgactgtgcacgaaacaccgctacacgagagttcgggtctagaatagggagacggagatgggacagggcatggactgtggtgggacagcctcgagtggcaatttggtaacgggagacttatggaagtgccagtagccactcttcaatggtccttgaggacgaactttttgggatcggactgtgagagctacttttttagcacaagtgttacgtctaagaagagtgcggatactatctagtttctgaacccagacatcagtctgtgtacaggcgcacttatgtgagggcttgccctgatctcttcccg

SEQ ID NO: 298706 - DNA, 404 bp, Homo Sapiens
aggggtttctcgagacaccaagcgtgctggccccgcttgtcacagctcgactgtgcacgaaacacacctacacgagagttcgggtctataataaggtgcactgatatctgacagaggcctgtacatttggtggtacaggctggtctcgacaattagggtaacgtggaacgttgatggaagggccaagaactttctcttcagatggaagccttgtgcaccaactttttgtgatcggactgtatgagctagtgtcttagcacaagagttacgtttaagaagactgccgagatcttaaagtccacttgggccattctttcagcaaccgattcagattttcaattcgcaagttttggcacaccgacaacagctttgtacaggcccacttatgtgagggcttatccttt

SEQ ID NO: 298707 - DNA, 603 bp, Homo Sapiens
  misc_feature (515)..(515): n is a, c, g, or t
ggtaacgctgagctcccttctttgtcagagcacctcggctaatgccagcggcgtgttcattaccgatgcacactagatgaaggttgactgtcggactgaagcgtggcgcgatgatcattagctagcctagaggctgattggctaagctaaggaactgcacacaggatcaattgaacatcatcatgcatcagcgaacgaagctgctgacaccgttgcatcatgcattgctgatgagtcctgtgggaagtgtgacaaaacactgtattcccttattggcgacagaccatgcacagttgcatctctgagcgaacactacgctggggtgcttgctgtactgaacacgagcctgctagagatgaaagcttcttgccgcacactgatgacaaccgacacctacagcctatggccagaccatgagttataccatgtgcactgcttgccatgacaaacaagacacactccagacaataggcttatgtgaaagagcccgaagacatccttacatgtatgccccnggaactctcattgttcttctgtagtcaagctagacgaacttcagactcagtggacgctacgttgacacaagagactaaacgtgccgct

SEQ ID NO: 298708 - DNA, 409 bp, Homo Sapiens
ctctaatgaacagtgacagtgtattaatgatgtgcgtagccagcattggctggcatattcttgctcgtatgtctgtgtaggctgaccctctatatgttcacacacgaacctgtatagatacacgtacaaactatatatccttacaaccatagatttgtatgacatgaccacaatacagatgatcgttctgactgcaacactgatttaactactacagatcttgagatatcgctaatactgctactcatgttctttaccgacaatgagcatccctgatcatgtactgcatcgctgccatgtgactcaagtctgctctactcaggataattccttagtgcatggcactatgcctaatgtgattccgtagactcagactcatgaatgcttatgagcatctacgtcatgcctc

SEQ ID NO: 298709 - DNA, 407 bp, Homo Sapiens
agcaccggcctgacctgagctatgaccatcgctattttactatgagcccccgataccagacccaaccaactgggctagcttagcctaagcctactatatattctagccagcgatagacgagccgttcactcacactttcgagcagggagagcataacaactcacactacactctgcacggttgacgagcagctgtgacccactccatacactatgaagcctcgctagaccttctactatcatcagtactaatgagtgcatcctagagcctgagcaccgttgtcacaacacgagcacacctctgatttctgatgtcataatgagcgttgcacataccatgagttagatacgcactagctgagaccagccgacaccactgcgacctagccgaaggggagctcgctagct

SEQ ID NO: 298710 - DNA, 395 bp, Homo Sapiens
  misc_feature (352)..(352): n is a, c, g, or t
ggtaatagactgacacgtcctgcgtgcagtgctattttgtcattaggctccgacagagggctcagggagtttggctcgcctcgactcaaattactctatatttgactgagtgctacatgtggcttccgcccacacttacctgagtggggatcttgacggacagcctatactctgcaggattgcggaactcttatgaccaagtgcatacactatatacccttgactgacccaaatctattatattcagtcccaatgtgttcatccaagcgtgagagacctgctgatgctgaccagaccacgctgtcagtatcatagtcagcgtggacgaacctgtagatgaggactatgacgncagtgaccatggtgagctctagatgtggttagctggtctgtac

SEQ ID NO: 298711 - DNA, 355 bp, Homo Sapiens
ggggagtgcgtgtgagaatcgactatctccggtagcgagtgactggaggtgctgacacgagtagctatatccacacccacactaagcatgtgggctatatgagcaagaagctctagacgtatgcggaagcaggactctgtgatactcggatctacacactacagaggccttgactgtctccaaccttacgatatgacagcccagagcgtacatgcacccagctatagagctcctgagaccaacagagcattccacgattctgagatatcatcagatgctgagctcgagactaagttagatcacgaactctctgagctgagcttcagagtgcactgtagcatgtggcatacggccg

SEQ ID NO: 298712 - DNA, 353 bp, Homo Sapiens
gggaataggctccaaagcactaggtgcagtgctgtagtcttagctgtacatgaacgatggctcactggatcaggctcgccctgattcaatttactggatctgtcactaccccagacgctgtcaggtggacgaactgtcacgaccagctgcgtacactagactaccgtgactagcccacatctaacatagtcagggccgcgtccatcacagacgcctggacctgatgacatatactgaccagacgcacaatctcgagaagccacagtcggggttgacacacgctcgtatgatgatgcactcgtcggagttagacgccaccagtgctctgtagatctagtctaactggcgcttgg

SEQ ID NO: 298713 - DNA, 594 bp, Homo Sapiens
  misc_feature (461)..(461): n is a, c, g, or t
  misc_feature (499)..(499): n is a, c, g, or t
gggaacctgtatctccgtcattattatctgtagctcggattattgcaggggtgtgttctgctgagatgcacacaaaagtgaggctgctcatcgggtaaaagatgtgggtgaagaaaacaacagcggcttggtgtaggatggcttcgctcagtatcgtcaacctagctcatttgtagatcatgtacagtctacgaatgaagccactgaattcgcggatacacgtgttgctgatgagcaagctcataatggtgacaactcactatataccctcattggagacatataatgcacagatgtgactcttcgtgaagccgatggagggctgactgatggacgctcatgatcctgagagcaaggaatgcttctatgaacacatagatgacgaaccataccttccacgcatgagagaccatacgatgatgtgatgagcactgctattcatgacaatcgaaagacagttnaccaagaaagacattgtatgaacatgtcggaagacatncttacttttatggcacagaactgcgtctattcgtgaatggctggtgatgtacagaatgggccaagctgagattccagagactcaggagcgtcgcc

SEQ ID NO: 298714 - DNA, 415 bp, Homo Sapiens
atgctcttgagaataatatgggagaggctagattctctggagattccagggaatcgacacagaggtcgtttgtaccttgtaaaattctacagaacaatgtgataccaggtgagtgttattaggtaagtcatttaagctcagtgaaaacaagtcctcaattctggaggtagtcaaagatatctcttgcatagatctgtgaggatcagatgctacttggcataaacctaagccaggctcaataaatatcagtttcctctccttccctaaaaacaacgtatcccttggcaactccacaaagctttgacttgtactaactgtatacaaatgtgaatcctctcacataatgataaaatatggttgaggatttgaaacagccaggtgtgtgaattgctatgggcaagaggggaagtttggg

SEQ ID NO: 298715 - DNA, 719 bp, Homo Sapiens
  misc_feature (321)..(321): n is a, c, g, or t
tgtccctgcgggagacaggcgacgtcggttgttctggagaagacgtgacccgtctactaatcgtagcagctctgtgctccctcctattattataggagtagatgaagaaaggtcaaaggcgtgctcccgtcttcactccccaatctctaagaggtggatgggtgtgcctagatctgtatcatatccctgacctctagtgcacggcagagagagatacaactactgtggcgctaaagatgatttcatctcgctcatctatggggtacgtgagatataccaccgtatgtcaagaactgcaaccacttgattcgagcacacgcntccgcacatcctccatgacctggaccacactatcaccttgtgaacgaccagatatcgcgccccactcgcacctcaggcacatatatatctcctcgatgtaaatcgaccatgcgacatcttcctccttgatgggatcaacaagacacgctggggggacagagagtctcatgaggacaaagtagacaaagtgttggagggaccaggagcccatatgcccctgtggtgaggacctaccagacaaagcccgcccattacacagtgacgcataggagatcgtggagtgacttgagtcatcttccctgctgtgtctatcacagacaccttatagcgagtaggtgagacagacagccttccaacaactacctccttggtgctggacactccagcgggtgttgcgc

SEQ ID NO: 298716 - DNA, 634 bp, Homo Sapiens
  misc_feature (521)..(521): n is a, c, g, or t
cccagatggcacgaggaattcgtcataatcaaggaaaccttatccgggtggatatctgtgagattactgagtgtgcatccatcattaacctgatccctggctgataaacactctcaacggaaacgaatgacatatccccagatctattgagcagcactgactagggagcagtgctacccgcactggtgcatcgcacacgatatagcttggtgcaggataatggacattgataatatggtgggcctgcacctggccgtaatgctgaacccgctgaatggctctgtgaactttgtattgcctttatgctgacctatgtgaggatgagcttataccatcatgtgaataatatgcttaaatctatgtattgagaacgatgatggattcgaatggcaacagtccatgatatgcaatggctacattgtcatacaaagtgggaagccaagaatgcgatcaagcaagcttatcatggtcgtaagtagaatagccgcctttttagggtttgtgccaatgtggacatctgncgaatgtctgctggagcattccagagaccagaatgagtgtaagaatcatatcctcgatcagagtgctgacggagctggagatgtcatcggctacccgcgctggctatcagagc

SEQ ID NO: 298717 - DNA, 613 bp, Homo Sapiens
  misc_feature (504)..(504): n is a, c, g, or t
gcgcgagagaacttgcatgacgctacttcccctatcatagtaacgatcataacctgtgatggacgctcgctcataagcaacatccatcacttgacaacagagacgcttaatgaatggagacacccggaactatggctgtcaggctgatactaaggctgatggctactaacattcttacgcattccttacagcgcagactgggttaacggtcaagtaccttaccaggatagtaatcgctgagcaatgtcactgaacgcacgcgcacaccgactacggccgtatgagcccaagatcttgcatacttagatcattatatcgagaaccaggcgatctgcgacatctatacgatgacataactgcatgactaactagcgtagcccccattcgtatactatacacataacaagacgtatcgcagtcatgagcttgccccacattctgcttaagaacagatgccatttgcggatcgttaaaccgaaccactagcaccgttacacgagcggnggtatctacggtcaatgctctgatatctgcggagcgaaccacaggtttatgcccatcggcctactaattggactacaagtgttgcaatacggcccgtacttacgctatg

SEQ ID NO: 298718 - DNA, 326 bp, Homo Sapiens
gtctcgccgagctctctccttgtcgtcgccccgcttatatgcttcggttaccctcagtctttcctctctttataccgctgtcctttgttctctcttcttatctcactctggcttatgcctccgatctttcttcttgtgcatatgcccgagcctttgcttcatggtgtacaccttttagccgttgctgtcgccgtttctctgttgcctctcggatttactgtgattattgatctcatttgcttgcgtctccttgtttcacttgatgttgttactgttgcctagtcacttgacttatatgatttttacctttcctttgtgcttttctc

SEQ ID NO: 298719 - DNA, 319 bp, Homo Sapiens
ctgattccaccttctaccccctccttctattcctcctcctaccccctcttccctctgcccactgacttctctcactcttctcttttccctgtcacccgtgtcttccacccccggttccggacttgctgcctgtctccacctcttcgacccctcccctctctgtatcatcgttctcctcgttatcttcccgtgcttgcgtctcgcctcccctgcccctctatatcttcatttccttccttgactcttctctccctttctactttccccctcctccctctagctccgcttgttcctttctcctttcgtccactctgctccc

SEQ ID NO: 298720 - DNA, 331 bp, Homo Sapiens
ctgaatggtagatgaacggagtgtagtgtggtttggtagaacaactgcattgcacagttgttccacttgcacgggagcactgaacgttaagatgcataccaagagatgcatgctgcctaatgagacatataatgctggctaccagctgtgacacatctctgtgcatctgctcaagcaagtgtgggtaacaacacatgtcgaatgctttttaacagctgatactgtgtaagacgccaagatgcttaggctgagatcggcgctatgtgagtgatatactgagatacctttttgaacacttaacggttgatctgagacattgactaatgtggtt

SEQ ID NO: 298721 - DNA, 120 bp, Homo Sapiens
ttttcattggacttcgccacattgttcatgctggcgcccggctcggcacatagttgcattttcgtttccctaacaactttgctttggcaccgaaccctgatagtacccctttttccctgg

SEQ ID NO: 298722 - DNA, 410 bp, Homo Sapiens
tgtctgcctgaatgtgggctgtgtcttcaactacgaggacctaactgcgatcacggacatgttgctgtcctatattgtgccaactgctggccttactggtgccgttaggacatgctacatctctgtacctgccgataacactggtttgggctcccataatacttcgatttcccacgcttgccgcctcaccacgtacgattttcgctgactccattgggatcctgagtgttgacaatgtgatgcagagtggtgactatgtgtgagccgtcgaatccacgctgttgttcatgctaatcatctcatggttctgctttgagctgtttatacatcatgtgttccacaatcgcatcgtcacttatgattatgagcttgatttcgtgactagactattcattgttccttctttggcg

SEQ ID NO: 298723 - DNA, 338 bp, Homo Sapiens
tgcgttagtgagcgttctcatttccactcatccctcctgttgcttgtgtttcaccactttttcttacccttgtgtcgtgcacactcctgtgattcctactttctctgcgctctcggtctcctcccgctctataccagatccttcgcttttgcttgggcgttccctccccagtctgctctccatatttcccttatccccccattcctttttacattcttcttagaggttgcctttttgtttctcctctgtatacccaccccatggccctttggaggtgtgtttctctctttacagtgtctccattcctccccctataaccctcccccctccgctaaaca

SEQ ID NO: 298724 - DNA, 149 bp, Homo Sapiens
ggaaaacgattacctttatctcattatcttagttctctttggaagatatataagcttgaaccatggtgacaggtgttgcctttaaacatggtgacaggtgttttcctttaaagtccttggcaaatcaactcatagacttcttcaacttc

SEQ ID NO: 298725 - DNA, 410 bp, Homo Sapiens
gtcaccagtattgcccagagacagtgagtctacaatgtcgcatgatgcttagtctcagattctcatgatctcattgactgactgcactgtgaatctgtcaccctgactgacatgaccagtcaggagctccccggactacatatacattgaggctttgtcagcatcatccaaggttctaactcacctagagcctgtcagaatgcgccttaatcctacaccgacagcctggccaccattgcaacagtaccaggaggtcgatcttcctagtgagcatcgatacagacgtctgcagagctcatgaccacagaccagagctgacactcacgatgaactcctggagggcacggatgtgagccttacggataccacggaggctcagatccatcaaggcttgcaagctcatctattcc

SEQ ID NO: 298726 - DNA, 366 bp, Homo Sapiens
  misc_feature (137)..(156): n is a, c, g, or t
agaaaagaggtttatttggctcacagttctgcaggctgtacaaacatggaactggcatctgctcagcttctggtgaggcctcaggaagctttcactcatggcagaaggtgaagtgggagtaggtgtgtcacatgcannnnnnnnnnnnnnnnnnnngggagggaagtctttaacaactaagtccagagtgaactaatagagtgagaaatcactccttactgtagggagggtaccaaacaattcataaaagatctgcccccatgacccgcctcccactaagccccacctccaacaccagggatcaaatttcaacatgaggtttggaggagacccatatccgccatagcacctcagtttcttctttgt

SEQ ID NO: 298727 - DNA, 365 bp, Homo Sapiens
ggcctgctcgccgtctacaccatgctgacgatagacttgctgtacgatgcgcggctgttgaacaggctgcagctctatgatcaggtgctatattttggaatggaccgccttatcattactaatcatctggaaggacttactggacatcactaggacatgaatgtaccattgtcttgttagcatcagtggcacgatggagcctacgttgcatagatgcgatctggtctttctaactcgagtgctaagatcccatactagagggaatgtgtattcatgaatggcatcctgggcatatcaagttattgaccacttgagattatactgcggcagatgaccgatgcctctataatcaaggaccattggct

SEQ ID NO: 298728 - DNA, 223 bp, Homo Sapiens
actccgttcgcaccggctaccgagtcttgtagcacaactccacggccgtctgcacggaccttgtcaagcgcgtcacagagcgccttggtgctgtatcgctgaagctttgagtatatgataccactggtgaatcacgagttgaactatagaagtctgtacttggtcaagatgttctcattatacagacactacccagtagatgtgtacagctgtgatgcatatc

SEQ ID NO: 298729 - DNA, 1123 bp, Homo Sapiens
  misc_feature (47)..(74): n is a, c, g, or t
  misc_feature (96)..(96): n is a, c, g, or t
cgagcgtacactggaacaaacacatggagatagaattggtttggaannnnnnnnnnnnnnnnnnnnnnnnnnnntggtgaagctgcgggagggtcnttttttttgtttaaaaaaagagccggtgctaaggaagtggataggaagtattcagcacgaccagggtgggacccccaccgttggccccagtagttttttttaaaaaacgcgtggcacacaagtcaagtggtcaaggcatgccgacaacgacttcatggacgtacaccatcacggccgccactaggagccatacaagaacagtactcgagaagcaaagagagagagagataggccccccccaggcacggacaggcacgcagaaagtttgactaccagggggactagaactaagcagcaagggacacagcaagagacactagcgcagaggagcgaaaaccggaggagcacgaagaacgagagcgcagacgagacagcgaggggagcaagggtgaagcacagcagcaggcggagcgaccgaggacgcgaaagcaggcggcgggacaagacggagcgcaggagaggcgaagccgaatggacgacgagagcgcacgagcggcacgagcagagcgcgatagaagagacgcagcagaagcgagagcgaaccaagcgaagcgccgcgagggaaacgacgaccacaaggaggagacgggcacgacccgcggcggccgccggggcgcgacgaagcaccgacgcgaggaagggacaggaggcaggagaggcagcgcgagacaaccgaagacagactagagcatgcgagagcgcgagaaggcggaggacgcaagcggcccagagcccgcgaacggcccggacgctccaagcggagacgagagcgagcaggcacggagggcgccgggaggggcacagtgaaggagaacaggaagagagaggaggcgcgagcacacagaggcaaggaggccacgaggaggtggaggacgagtgagagaaggggaagaacgaggacggggaggaggcaagtgcgagacgagggggagaacgacgggcggccggacaacggaggcggagcgcaacagcggagcgcgaccgccgtcggcgacacagcgcgcgcgcacgggccgcggaggcgggc

SEQ ID NO: 298730 - DNA, 850 bp, Homo Sapiens
caggcacgagacatcaaaccactaactatcacgaacactctatatcagagcactgaagacacgtagcaacagaacgaccgacttaccagtgtgaactcagatctctggctcactcacagtaccaactcaccagtgaattgacgctgcttactgcacagacacaggacgatctcttcacagccaacttgatctggcaatgtgcagacacaaactacacactctcaagtgagcactacacagaccgtgccgcccgacaattgactactacaccactcgcccccactacacagcacttcccgccttgattgcattgtaatctagagccatgtgaaaccacaccacctgtgtcagtgtgactgtgatcttgaccacatgtcttgccacagagcccctgcactatggccacttctctacctgactacccacaacttgggaacaataaatctcgatcgtacccttgcagcaacagcatgcaaatcaacggacgacctgtcgaatctggcacgcattgctgcactctctaatggattgcacacaacaatccaatcctatgcaacatacaccactgtgtggcccatccatactgagtgcacactctccattgtacctgcatcactgcattagaactatctcatcacacgacacattgacgctgcccttattgcccatcaactgagagcactcgccccaccaaccagatcacagccactttggagtttaagaacacacctgtctaataatataatgaagatggtcctcgtgtccgtctaccttcccatgctaaccaaagataacgcgtccaaacaattttccaatcaggcaactgacctacactagtctttgctctccg

SEQ ID NO: 298731 - DNA, 367 bp, Homo Sapiens
atgccggtagtactggatagcgcgacttcacggtcaacttcacggacgtctgcacggggctgtgcaagtgcatcacaaagcgccgtggtgctagattggctaagtatggtgcgtattatgagaccaacggtgaaacaagagttgtatgagaatcttgtcgcggacaatgatatatatgattatacagacaatacccacagatgggaatacatgtgtgatggaattgctcattatggcttacgcactgaagactgtctgcgacaggaacattgttggggtaatccactacttcccatacagtgagcataccaagatgatggaggtgcttcattgtgtgcaggcagctagcatgcatgctgtcttcgtg

SEQ ID NO: 298732 - DNA, 626 bp, Homo Sapiens
  misc_feature (73)..(88): n is a, c, g, or t
  misc_feature (517)..(517): n is a, c, g, or t
ctcaactttgccagtattagttgcaaaaccccatgcagaatatggatttttaaagaaaatgggttaaggtggnnnnnnnnnnnnnnnnaaatcccagtttggcttaaaggagtgaagacatttcatgaactattaagaatgaaggtaaatgcaacagtagacagtaaaatgaactcgaagttattatggtaacagtgcctttcagtataatgaaattctttgccttatacctttttaatattcatgaaattgtttaggaacaggagtacagttgccttaagagtttcttggattttatcagtaactattttgatgtatagtatcttaccaaggcattttttttaagtgcaggttttgtttagggataaatattcagagttctaccaccctacttgtgttttcttgaattctttagagaatatggtatctacttaatcttccttcagtgtcagtgctgtgaatgaggaatgctaactccaggagtgagttaatcctcttgcaggtttgaaatcagcanattgtttactcagctacataacataggccttttctccgtcatgagacagttacctaggtgccgagcagtgggagaggataaagaactcgcgtgtagagggggtcccatt

SEQ ID NO: 298733 - DNA, 414 bp, Homo Sapiens
cacgaggaatgaaggaggatctactttgtttttatggaccttaatccttctccatcctaatccattaaagggacagatggaagcattgtctttaggaagagctgccgctagggagctgtatctgtgcctaacatttgttttttgcatctatggtcctgagcacaataacattaggatttgagttgttttacatccagatgaatgaacattccaatttacagaccatgatgaaagatactttctcccttgactcttcctcaagtttgctgtaccccattttgctgataacagtggtccttatctcttaggatggggctgcttttggcatctaggtgagaaataaagggtcttgctaaagatttctgctgttctctccagtgtttctccatcttaacatgtacatgttatttgggg

SEQ ID NO: 298734 - DNA, 391 bp, Homo Sapiens
accacttccttctttggaatgctccctttcctgaccctactttcctgatttttctgccacttctttgctctttctcagtttctctggagttgtttggtaggtcagtctagcacagactggatgccggtctctgccgccacctccgttatttcagtgaacacctgtatgccagtgagttcctttgccataccaccttaatgcaccaacttgcacagattagagtggagcattcacatttattactgcaggcttctaggaaagcatattggtctctggtccttctctcacctcccttgttcctcctccaagcccagtgaggtaggaggaattgctaattagattagtgagattctggtgggtcactcctgtttacttatgagttgctattttg

SEQ ID NO: 298735 - DNA, 409 bp, Homo Sapiens
cagagaacttttgtcgaggtacctgaggttagaggcttactatgcaaagatcatgatgaagcgatgccacagacttggtacccaggataattggcctaagatgccatgccccgagagctgagcgtgtaggcctatgctggactgagttgaagctgacacgtggctggccgtgaggtatattacagatgctgattgtaccatgtccatactgagtgctcctagtaaggagcggacttcatcttgaacagcgggatgcagtgactcacataggcctgatctcacgacagtgccttgacttggcaggacggattcaaggaaggctcatgaccagtatgcagacgatctggaacttaatcatgacgatccattctggcacgagtccgctttgtgcacatgctgtcagcagcgg

SEQ ID NO: 298736 - DNA, 257 bp, Homo Sapiens
gtcatgactatataaccagacaagagaccgagcgacctgggcttggaggagcccaactgaatacccagctgcagcttactacggatcaatcttaaccaggactttatagacttaagcagtgctctgaacagtactgttgccagcgtgctgcgagctgtgtgtgctggcactagactggcttggttggattaccatgctagagatttgatactgttcactgatctcattggacgcacaggcatatacgtgcatgactg

SEQ ID NO: 298737 - DNA, 316 bp, Homo Sapiens
ggaacagctcccctatctgtaatgcgggaagtagtcttaagagtggttataaatatcgttgcatactatgggctttatatactcgatgttttcataggataataatctcatgacatgctcctgtggtcctctaccaaggccttggagatacggcagcccggtacggtgagaatatgatgaggcgttatattgacccatgatatggtaggcttgcgtgggtcatgctgtgaaggcgctgctactgttcctgcagcttgtgcacgggtaccagggtagcgttgcacgtgccggagcctatcgcctgtgcagtatggct

SEQ ID NO: 298738 - DNA, 555 bp, Homo Sapiens
attgtgatttggtacctatgcgcttccctaggttccgagaatcagtgctttctagttctctatattatccctagattctggcttacgccatattgattctgcttctttatccagtactgactttcatgcttgactgtccatccatggcttgattgctgttggtagtgtgattagagaccacatcttttacactccaatgcttcggtgcattttctttcaaccacacatagtccaacctgcttcctaatgcttccctgaatatccttcaactgatctatctttacctctatctccttcatttcccaatggctctcaagctagttgagtctccactcccatcccttgatgtctaattgcaaggttgcatgattgccccattccttctgtttgttcttcaacttcattcttgtgtatataatctcttaactagtcatgactttaatccttttcctgttttctatctgttagaatttcattctttacctataccatagctatgtggttcctttctttacagttcactatacttgctttttctttgcccggtgttgttct

SEQ ID NO: 298739 - DNA, 400 bp, Homo Sapiens
ctggcgcacagttcgtgacactatgtacaaggaggtgatgataatgtcatacgattagtgaagggttgaacgcataagtatgcctattctggtccagagatccagatgctcaagaagcgtacgagatgagttttgcgataagggagcaagtagtattagtatagactctcacaatgtcaggagctgactgtaagactgcgatcatatgactgaggcactatacatgtgctgctacggggatgcatgcagtgccgatgttcaagaggacgccataagttgcaagcatgactgcatgttcgctagttactggagacacacaggaaggtgtattgagtgagctgcacatccaatacttcaataacatttatcttcatatacaagtccaatgctgcctgtctct

SEQ ID NO: 298740 - DNA, 398 bp, Homo Sapiens
  misc_feature (270)..(338): n is a, c, g, or t
ccgaagtggtgtaaggtgtgcactgggcaatatatgagatcatcactgttgaggacgttattgaagctacccccttctatacggacacacgcggtcagctgactgaactgatacttattgcaagagcgctcgaggtgagcatggggttagaccctggcagtgctactgacgtccggtctgcctattaagccactaatgctgatgctgacggtctgtaagacaggtagttcattacaggaaatgggctgtcgattaaagaccagtggggannnnnnnnnnnnnnnnnnnnnnnnnnnnnnnnnnnnnnnnnnnnnnnnnnnnnnnnnnnnnnnnnnnnntgatccagactccgcagaagactggcctgtctcctattgcagccatagctgagccctggg

SEQ ID NO: 298741 - DNA, 417 bp, Homo Sapiens
tttgcgtgcgggcgccccttctgattgaccctgatgagctgtagctctgatggcccctccttcgggaatgattagggtgacggctggccggggctcgttcgagtggcgcccggccggtggtgacccgaacaggagagcgggacggcgaccattctctcgggaggggcccatctggagaaagtcctctcgcttggtcaaactaggagggcgatagcaccggccttactgcgacgatgacaaagtacaacacaccgtctggcgcgaaggagatgctcgagaaccctttgctgttgttatttttcgcgtgtcctccgaaaccaagggaaatgcggctctgtgggttctgttaacgtcagcatttaataagtgaactcttgcattgccccttatggtggccgctggcctcctgagttgctc

SEQ ID NO: 298742 - DNA, 183 bp, Homo Sapiens
accgctctagcgcgcgtaggcttatgcctactcgtaatgctgataggcacgcccataggacgtctgctcattcaacgtacaaccagagtgcctatcacgggcgagatgctaatcggcgttcattgcagtgtccaacgcacctggacgtgctctattggcttgactcctattctgctgctcact

SEQ ID NO: 298743 - DNA, 623 bp, Homo Sapiens
ctgatacacacatatacacaccctatggaactggacccaacaactggattatcatgaggtgttgctatgatgaacatgatcctgactatactcagagctgtagagacctgattcatctaaccttgacgagatacacaggtccactggaaattagacacgcacagacttgtacacccagaagacccctccgacctaacggcggccagatgagatgcagccctaactgacacagagtcatactagggacttgtctttcgagattcaggaaagctctgccccagaacaccagccatttgaactgagtcactaaaacctccaagtaaagatgggcttagtctaaaagttgcaagaatcccaatacctcgcaaatttaacttgacggggtggcccgaaacccaattggccgtttaatgggggcccaccattgaacggcacaggtttttcacacttagccctggaaaaaccccgggttatccaaccaatagcccttgcgggaatatccctgttcgcatattggccaaattggaaaaaagcccgaactaactggctttcaaaacaattgcaaacttaaacgtacatgggaaaattttaaggcatttttgcggtgttcccgagatttttgg

SEQ ID NO: 298744 - DNA, 740 bp, Homo Sapiens
cacatgattggccgagcgtacacattgacagcaggcgcggagaaagcgctggacactcacaccctctcgccagaatggaccagagtccactgtactggctgctcatcttactagggctgaggccacagaggtgaaagctggtgcagatgccctagcattatagctctaaggtgtataccttttagtcgatgctgtggccgctacaacgtggccaaagggaagaacagtgacaaatgagcagagttggtgtagtaccatagtaacaaaagatcgctgcgactggtgcaaagccaattgacttattcgatatatacagaaacattgtggctaaacttgttcatgaagatggcaatgacacacaatgaagaatgctgtgaaggacacatagcactgctagtgtactgcaacgctctatagtcacagaaggctacgagaagagaagaggggagctaacccagcgtgaagctacaaaggagcgaggatagctgatgatgccagaaccgctgaaccaaaaatgcagactatacctgagaccaaccctgatgaaatcgcacaggttcgtatcacatgagtgcaaacggacacacatgcacaggcgcccatatctgcgatgcaatgaagttggaacggctgtcagttcaagtataggatggcaacactctgagagagggattatagagtatcgaatgagtgaattagttcaagactatactgctcatacacttgtcacgtctctaggc

SEQ ID NO: 298745 - DNA, 667 bp, Homo Sapiens
gggaaacgggaggtgatagaagaggcgagatttggggtggaggtgcagaccgtgggaagcctggcgggccatggtgaaccttgagtcttattccaagtggaagagagaggcctggagggtcctgggcaggtggtgctgtgatctgacggggccttcacaggaccttgctggcaactgggtggaggacagacccacagccacaggggcagggagcccagcgtggaagcggtgggggtggagggacacggttggcttctgggtgtgttttgaaggtagaacctgtaagacttcctgcagaattgtatatgggaatgagagaagaatcaaggacctggcttgagcgatgggaagggtggcactgccattgaagggaagggacagcgggaaggacgggcgagctcagtgggcaatggcatcagggcatcagagcagagccacgaagctccagggaggccatcaggccaggagggccttgggagtcctcaggagatgactgtgaagtctcagggctgcctggggtcacctgttctgccgtcactcctgggtctgcgtggctgggtccttgttgctcgggctctgccctgaggtcctgcccagcctgctccaccttccgctcttcatgtccgttctgctgtgtggcattcgccactccgcaccatctgagtgt

SEQ ID NO: 298746 - DNA, 746 bp, Homo Sapiens
gtcagagcgaccttccctctaaaagcattttatagcgttaaatataaagagagcacacccaacgctcgcagccacaaacggcaagaaactcactctggacatcctgctgcttctcccgctactgatcgtctagctccctatagaccttctagaagctcttattcctaatcaggatataatgaagcacccgtgaaagcatgctgattacagtagctgcccatggaatggagagacagactccctatgaactctttaaacacaaaagaaagcgtgctctctagcatataaataagcatggaacggaggaaacacgctccaaatgcatggtactgggtaccaagaatcatacctttgcggtggactgcgagaaccgacaagatattaacggctctggcaacacgctgaaggcagaaacttgggacgctccaaatttagtacataaagctggcgtaacctatacatcagatatgtatgctacacaagatcctcagatcagaaagactatggaagtgtgtgtactcgctcatacttggactacccaggccttctttgctgtgatgacgaggaataaccatgctcacattgtacatgccgattagtacgatgaacatgtttcgtgtcactacttactgagtaactgcacaacaagatagcggttgttgtgtccataaaaatttgacagagtcactgttttgcttacaataactggctacaacgtgcatgtgctctttagcacacgttgcttt

SEQ ID NO: 298747 - DNA, 611 bp, Homo Sapiens
  misc_feature (186)..(298): n is a, c, g, or t
  misc_feature (514)..(555): n is a, c, g, or t
cgggtgtttccttgttcggaatcgggttggctcctctttgattttttacttctggtgacccacgcaaaagcagtcccgacctggttgtattaataataaaggctgtaaggatcagccttttgaacggtccagccgagaactaaccacagagcgcgttttagtggagtggtacttatttttaaatannnnnnnnnnnnnnnnnnnnnnnnnnnnnnnnnnnnnnnnnnnnnnnnnnnnnnnnnnnnnnnnnnnnnnnnnnnnnnnnnnnnnnnnnnnnnnnnnnnnnnnnnnnnnnnnnaacgcaagactatatttactagcagctctgtgtccttgctcattggtgatctttcctcaagacttgctgacacgtttctgtttaaggcatgacaatcctaaaggccaacaattgtggacgggggcaactcttcctttcattatgtactggtgtagtcaattatgcaaagtctggtcaaccaaagaccaccaggctcaagccatcagttttcttagnnnnnnnnnnnnnnnnnnnnnnnnnnnnnnnnnnnnnnnnnnatgcagctgctttctgggtcttttgtggcccttcagactccaggccatgcctggac

SEQ ID NO: 298748 - DNA, 199 bp, Homo Sapiens
cacgagagctctcttatcgcctctgtgagccacactgtgtgtgtgggtcagtcaagtgcctgataggaagggtgatatgagcccaatgagactcaagaatattatcacgtctggacacaaagggcgagaactcaattggaacaattccgcatgccggcaaggaaagaccttctggcttgcgaaatatagcttaccgggt

SEQ ID NO: 298749 - DNA, 169 bp, Homo Sapiens
agctcatgttgcgtgtgtgacatggtgcttgtgatgcgcgggaccactattctgtttgtgtaggtaccgtgtatcactgggcctcttggcaacagtacgagacatgtgcttcctaggtgcccaatagggtttcgcagtatggttaacaccacatgtgcatgctgtggcg

SEQ ID NO: 298750 - DNA, 605 bp, Homo Sapiens
tgacgaggccacatgtgcgtgagcccatatgggccacacctgaggaagtgtgtcttgtgagaatgtgatgacacccctgtttccaagagatagcagcacacatggaggccatggtgggggcctgtcatggggtccttgagggccacagacaggctgagggaaggataggtgggcactgtccacaaggggcctcgggggaaccggttccaagacagacttatagcttgaccccgttggcgggctctgtgttgaaccacaactcatttaacaccttctcttgcgttatactcgggtgcctctttcatgtgaagggccttagacaccctgttataagggttggaccaaaggtctgtgcttctggaagccaaagtgcggacatatggcttgggctcttcttctctctggggttcttgtgtacttaggagtgacacagaggtcaagcacagaatgtgggtctcgcacgctatggacctcaaggagaggcctctgttggccttttcagaaaggctgtaaatgggatatgtggcgggacatcttctctgacgttacactataccttttgggtccgggcactgtgcacttttttatagagtcactctccggtg

SEQ ID NO: 298751 - DNA, 519 bp, Homo Sapiens
agtgctctgctctgagtagtgtccacaggacctgtgctcatactcttcgggtcacacaaccctgtgggcgctcaactttttcacccactttggcttgtggggagatggttcgcgctgttttgtgacaagggcttgggagtggacaggattaagtgggaaagtggagtccacccttaaggttctggaagaatcttacacgggggcttgaagacacacttcccacacccagatgtgggtaaattcagtgcgcttacacaattcttagctcagagaaaggtccattttcggttcacaaggaaaggaaccttcctataggctttcctgggttggtataacgcgatctggtggttatgccactctatcttaagaactgtgcaagctcaactgtgaacccgaatatgtgaagggattgcgtgatgtgagggaagctggaatttaaggagctgagccacacatgggtgtggcgcgtgagtcaagagacctctggttagaccctctctactgtgaacggctgtgccg

SEQ ID NO: 298752 - DNA, 276 bp, Homo Sapiens
ctgattgtgctttaacacaccgcaattattgtctccaaactcttccggcctctccaattataattttcccatctatctatatatcttttccgatgttttttagacctatctctttagacacaattctgattttctagtcattccatctacagatctttcgcggccgaagtctctttaggttctgtgttcccttgccagagtgccttactccgtctctagcactggcgcggataccctgttcatttttctcttctcccctatattcccctccctctg

SEQ ID NO: 298753 - DNA, 719 bp, Homo Sapiens
  misc_feature (598)..(598): n is a, c, g, or t
cgacatcctgggcggacgtaaacatactagtgctcactctacatgcgcaatactatcacactccctgagccaccgccctaatatgacgagctcacacactatcttgtatacgcaaatatgccatcttacgcgactccactaatgactccctaaagcccatgtggaagccacgatcgatgggtcaacagaacttagacaagtactctgaacactaggcgagatatggcataatacgccttacactcattctcaccccgctgaccacatctcctaccccttccttgtactatccctatgaggcataccgatagacaggcccatctgcctactactaacagacctgaaatcactcattgaatactcttcattcaaacacataggcctcgttgtaacagacattctcatacaaacaccctgtagcttcaccgtcgcaaggagatatcataagcgtccacagacttacatgctcattactattctgcgtaccatactgatactaccaacacgctgacaggatcatgataatcctatctcgaggacttcaaactctactgccactcataagcaattgatgactgtagcaagcctcggttacctngacttaccacccactagttacctactgggagaactcattgtggtagcacagtcttctgattacatatttaccacacagaacgggggttactacccacactttacaaggggcccccctccac

SEQ ID NO: 298754 - DNA, 153 bp, Homo Sapiens
cgaggctgtgtcactatctcttgtgatctgcgtccttccttttcagataatgcggatcacacctctccacggcgcaccacatatgagagatgagcttcctacacgcacaacaaatgtgaatgcgcaccacagaaagatatgagcgcgacacag

SEQ ID NO: 298755 - DNA, 366 bp, Homo Sapiens
acccgcggtgtggccctggaccagtgtgaacatgtcttacgaccagttaatccatctgcacagtgcgccacagcggcggcggttaaaccggggcttgcggcgaaaacaccactccttgttagagcgcttgcgcaagcccaaaaagaaggccccgcccatgaagaacccgaaagtggtaaacacgcacttgcgggacatgttcttcctacccaaaatgtgtggccagcatggtgggtgtctccaccggcaagcccttcaaccaggtggagatcaagcccaaaatgatcggccactacttgggcgagttctccttcactcactcctctctcaagtaatggctcagttaataaaggcgcacatgtctcc

SEQ ID NO: 298756 - DNA, 364 bp, Homo Sapiens
gtctggctcttttttctaatctttgatcacattctctgtttgtctatgctcatctcccttccaccttcttcttcatttctgccttttcagctcattaattgactttttgtagccattaaagagagacatgtgaatctcctggaggaaattaagctgtctgctgggggcatggaggatgagttggcaggtctcccatgctaattgatttcatcttgattcagtgagtctcccaagccaggtgacaactcagcagtgcccagaagttccaggcctagaaagaaagctacttgaagctgcctcttgctggatgagtcacagggggctctgccatagggacctcataggccttggattgtccatgagc

SEQ ID NO: 298757 - DNA, 458 bp, Homo Sapiens
  misc_feature (99)..(111): n is a, c, g, or t
ctgagaacacatgcgtatgtgcacatgcgcacacatagcgtacactatcagcacgtgaaaggcgctctgcacattgaagtcggcactgtgttggtgccnnnnnnnnnnnnnggctcggtggtttgactgcgaggctttttggatagaaatttatatggtagaaaggagctaacacttgggttttatatggcacaaaaaacaagtgttatactaactggactttattttttgaggtcttattaatgaagaacattcacttttgcattgacagggaattcaagaatgcgtttataaacccttaaaggaatcttgactaggcgtgcacatcctggcaagtgcccaatgggtctgaagcactaagctttgggtgggctctgtgataaacactttcactataacttacagataattctgaagcatactccaaggctgaaccactgatcaatttgcatgcatcc

SEQ ID NO: 298758 - DNA, 423 bp, Homo Sapiens
gcacgagcgcacgtaggtctacacgacactactttccctataatatgatcataacactcttatgagaacgccctcataatcattttccttatatggttcctatacctggatgcccttttcctatacacttacacacaactattctggccggcattattctaatcctcattggccttccattcctatacattctttacataacagacaaaggcaacgatccctctccttaacatctcaattggccaccaatgggactgagacctaccagtacacacgactaccggggactatatcttcaactcctacatacatttccccattattcctataaccaagcgaactgggaatccttgacggtgacacatcgagtagtacttccgagtgaagcccccattcgcgtaataattacattacgacggtttg

SEQ ID NO: 298759 - DNA, 141 bp, Homo Sapiens
aggcaattttctcgttgtctgtttagggggaactacagcgcttgtataagtggcgcaccctcgagaacaggaactctgtatcgtatacctgtaatgttaccgttctgtatttacacttcctgactaaggtcttgagctggt

SEQ ID NO: 298760 - DNA, 228 bp, Homo Sapiens
agacagtttattccccttctgtttctctctaactcggcttataccaggggtgtgtttccactagatgctcacactattgaggttgctaatatgcattagagatttgggagtaaagaattccggagactgtgtgtggagtgtcctggctcagtatgttcaacggagtacattcgaggaccatgtgttagagaatcgtggtactgtgtgcccttgatggagaccgatttg

SEQ ID NO: 298761 - DNA, 142 bp, Homo Sapiens
aaccaaggtgtctctgcttgatgaaattcacatgctagtctaaatctttttttctcccttgtaacatttatgtgccccctggttagtatatgggtacagcattccctttccaattgggaagcggaccatcattgatagtgct

SEQ ID NO: 298762 - DNA, 205 bp, Homo Sapiens
gctcagcatatgttgtttacactataatgtctcaacttttataagctctctatctagcgctctggtagttgaggattatattgtaacagagagagtatagggtactgtgtatgcgaatcatcatatacagtcggcgatatcctgtacgagaagacctacctgtccgtatgggatgtagtctgactcggacagcgagagctccttg

SEQ ID NO: 298763 - DNA, 596 bp, Homo Sapiens
gttcattctatgatctttaatacatcagttattcattttgagacatgttgaacaaataaattaggatacagcaggaatcccatcttttgaagaattcattggtaatgggacagagaagtcagtaattcaaaaacagcagaactgttaaaatttcaagtctacttaatttgtttactgagcaggctgtaatccatctcggcacactgtaacctctgcgtcccgggttcgggcagatctcctgcctcacccctcgtgccgaatttggcacgaggaaatgcctagtcaagtacgcaggccacgtgggctcagtaaattctatcaaatttcatccctcagagcagttggctctcactgcttttggagaacaaactgctcatatctggagatacgcggggccagttgccacacccccaactgttgctgacactagtcagatatctggggaagaatgagtttagtgctcttacaaggactagccccaccttgatggggatgtgtccagcgacttgcccaaccattcgggtcccacttgcattcctcaagagccaccaggggcgtgggtaatagccttcccttggttggtttggggggctccc

SEQ ID NO: 298764 - DNA, 381 bp, Homo Sapiens
gtaaatcttaccagaaatgaggatgactggcttacaacgttagatacgctaagttgccagataatttgtacagagcctgtgattgcaaaaccacaaacatttcacaatactggaaacctctaattaaccataataaatgacaggatgggtttgttttaaatacatggttaataatgcttactgctttaagaccataaactgtgtgattctctatggaggtgacagaggtaggctgcaaatggttttgcaaagtacgtttctacctctgcatgttaagtctgacccagaacattctactaatattggatcagcctctcatctgacgtaatttgcctgtgggaattgtatcggctgttctagctcctcttagtgctgtttgtg

SEQ ID NO: 298765 - DNA, 357 bp, Homo Sapiens
ggactgtgtacaggctgtaacacagagcccatataactatgtcctctgaggttccattggaatgtaagtgtactgtgcatgatgcattaccgtacaaggattacattggctacaagatccataagtactattatggcctggcgctagaactaagctgacttgacagactcatttttgtgccaaactattcatacatgctgcttattccctagatattacttgtgaattagctaatgtaacatatgtacttgcataaggagttagactgtcatgaaatctattgacatttactgcggtgctttatgaacatgtatgcgcatcattctatggctagtgtacacccctgatacggcactt

SEQ ID NO: 298766 - DNA, 349 bp, Homo Sapiens
ggcctgcgtacaggctgtaacacctagtccataaaactatgtcctttctggttccattgtaatgtaagtggactgcgcattatacattaccgtcaaggattacattggcctcaaaacccacaaggacagtttaaaaggttcgtcgatagaactaagctgacttggcagtgtgcatctttgagccaaacggttcacaaatgtcattaattgcctagatatcaccttctcagctagagcgttcttacaacttgtgaatgtgcactgcttacctgtacattagctaatgtaacatacgtacttgcggaaggagttagactgacatgatatttttagggtacaccgcttgtcg

SEQ ID NO: 298767 - DNA, 418 bp, Homo Sapiens
  misc_feature (350)..(350): n is a, c, g, or t
cgactgcgtataggctgtcacatagattccatatgactatgtactttgaggttccattgaaatgtaagtgtactgcgcatgatacattaccgtcatggattacattggctacaagaaccatgaggacattgtgatagtgcctgacgatggaactaaactgacatggtagactgcatttttgtgccaagctctacagaagtgtcactaattgcctagattcaaatcatgttttaatgctagagtcgaacttacaactagagaactgtgcactaaagattacttgtatcatatctaatgcatcatacgtgctcgcagaaggagttagaatgacatgacaaatatagacattnagtcgggtgctgtatgaacatgtatgagcatcattctatgtgtagtgtacacgcactgttcggcgctt

SEQ ID NO: 298768 - DNA, 130 bp, Homo Sapiens
gctggcccacaggaattctgttttatttaaatggggggtagaaccaaaattgagccaagcaggctggcttctggagtttgaacccttaatttccctccttaaaccaccctttgggagaaattggggtctc

SEQ ID NO: 298769 - DNA, 654 bp, Homo Sapiens
aaagcatgcaagtttttaactcaaaatggcatggaatgaggtgggacatgaataaataatttaaacaatatagcccagtctccagtccagcagtttacagtcccgccctctcgctgtcgcagttctatgccttggcctccagagggagctcagcatctcagtcctgaggcctgaaaggggctgccttggatcatggatgcgctgggttttcagtctcagcaggacgaagtgataagtatgaggttgatggagccacgcgtcattgttcagataccatttcttccactttctaactgtatagcacttggcaggctgctcaaggctcaagttctcacctaaaaaatgtagataaaagtgtacctcacaaggatagatgaggaataactgacttcatgtaagtgagtacagtgcttacctataaatgggagccagtagaaggtggttttcattgggaggggtggggtaaaggctggtcttggtccatggggcgggcttctggttttcattcttggctcaaagaggaatttaaatcggtgggaagcttcttccacgggattgctggcttgctgggtgcatggaccttggcccttccacttccccttggagcctatttttggtttccaaagggttacaagctagggctgggggcggggg

SEQ ID NO: 298770 - DNA, 252 bp, Homo Sapiens
tgcaactgaaggagacaggattagacccgaaacgatcattagggactcggaatgacaaagactgaaggattggtggcaatgagtactggggatacagtatgtggattaaccacagattatgacccagagtgtcagaatatatgtgctttatgcaatctctttgaccaggcactacattgcttgctcagaaggctagtaagcagcaacattgatggtggcctgtagaatgcacataggtttagccatgttggc

SEQ ID NO: 298771 - DNA, 333 bp, Homo Sapiens
agacaaatgtgcatgcgccgtcaccaccgcacggatgtgacccacgactgtaccatgagcgccaagtgcagctacctgtgtcactatatggaccacatgtaccgatgccagagcaagcctgtgttcactggcaatggcatcatctgccatgaggacacagacctggatggcttgcccaatgagaacctggtgtgcgtggacaatgagacttacacactgtgcggattattgtgccaacctttccaacttaaggccggaagacactgacaaggatggaattggggatgcctgtgatgatgaccactactgctatgtgtcacagagtgtggtggg

SEQ ID NO: 298772 - DNA, 351 bp, Homo Sapiens
aggattctgcacgagagcacatgtcagtaccgcagcctctagtacacacgccacaagggcctgtatgtggggcttcccgaggagaggctcttcggaaacacggacctgttgtccccttctgggacatggcagcctgattatacagggggagactgctgcaacgcgcggagcacaaagacacacgggcggctctatctatagaacaagatccacacactggagctgcttgaggagagacataaccggttcttagacactggagttaccaataagacgcttgcggcagagatgcaagagctgcgagtcccgcttgccgaggcccaggagacacgccggaccgcggagcgaccg

SEQ ID NO: 298773 - DNA, 335 bp, Homo Sapiens
ggaaatgttagagatgtcggctgtgcccagtgggcgtctagggccggcgtgtgggctaccggtgttgtttgccactgtgctctaagcgcggtctgatcttgtggcacagatttcataggaggcatgccgagaggtcaggtcttctatagaacactggtttgcaatattgcgatcttatccgacagtgtaacccgtgttagatggatcctgattgcaaaggatgcctttaggaagaagcacaatttggaaccagctgtgttcaagagatattcttgtagttcgcggatgtaaaggttttggacgacaatgggaacaatggtgtagctgagcttctc

SEQ ID NO: 298774 - DNA, 405 bp, Homo Sapiens
cacgagggcagacaagcgaaccagacactcttgatcacacacatgtgtctaccacacagagcaaggagtgtgtgagtgtccttcaatgtgctgatggactacacacatgtgaaggccagggggtgggtgggcgtggaccttcccttcactggacagaactgtcccccagcttagggaccacactctactttcacactggaggtggacagagtcaagctggggggctcaagagaggtcacaggccctcaatctcttgtcctttccctgtctgtaacaaggtgtctggcccgcctttcccaacaacttggttcatatgatataacgtgtgaactgggaacaagcccctgtccgcggtgggccccttaagcaatataacacgcaaggcccctgtcctcttataacggg

SEQ ID NO: 298775 - DNA, 419 bp, Homo Sapiens
ttctgatccgctgggtctctgcctgctcttatgccaatgctgcgtctggtgactacgcacacacgaatgatgctgctgatcagagcagagattgaggccaacatcacacctgatcctcggcgcccattgcctcagctcaggatctctaccaccgttgatgtgcagatgatctaaacagatactaggacgtaggacaatggcctactgcatgtgtaggtgaacagtcaagtccaatatgtgacccataccgacctgcacaagtatgacactgaggatgcacgaaagcatacattgggcaagcccctgaccctggtcactggctcgctccacgaggacctgacatacatgagtgcgactgtgcgtcacacagatgacggcccgcatacagctccgatgctagactaacttcaggatgaggt

SEQ ID NO: 298776 - DNA, 359 bp, Homo Sapiens
tgcgaatattgcacgagatctccgctgtggagaccccgccatgtgctgtcgcactatgtgcatgtgatatgtggcgcgcgaactgttccagagtttctgtgcacagagggataagccgacctccacagactgtgagccaatatacctggaaggccgcaatttctttcgcttcaacagactgagttacacgcaagaatgtgggcgcggagaccgcaacccaccggaaaggtgccggtgggcaattaacggagataccggcacaggaagacctgccactcttatatgcgcggcaccattaacaggaacgcgccgaaccgtgcaatggaagcaatcgcaagggcagaggcatattgtgcgcc

SEQ ID NO: 298777 - DNA, 678 bp, Homo Sapiens
cccctgtgtttgtttcactgtgtgtctcagcccttcgtcctacgggtgcatctgggcgttcattcctcatgatcggggatgggtaactatccaaggatactggacagtagatgtcctgctatgtaaactctatgtaagctgcactgccttgaaagcgtcatggactatcatctcctatgagtgtaaaggatggagttactcactgcttagcatgcgctctgacagatcacctgattcacgtgaatttcactgacctttcacgttcgtgccataacagagccttctatcgccagctgtactagccacttatggacaccacatgtacttaactgtcagaggggtaagtgtggataatctctgagcgataaggccagcccctgacgctgtcattgtgaactactatcatatgaccatatgtgcatagctgactgtagcaagtctgtattgttatgacgcgatcacactcacttgcatgcatatagtaagcactttgtaatagcctatcgggtcctggatgaagagatgcctcatctgccataggggccacagaagcaagcaggtatattcactggcgcttgacagtacacggtgtcaactctcgcgatgcagatgcggagtggcttcgtctacaccatctggtgacacggccagcctgccacctttatacttgctttgagt

SEQ ID NO: 298778 - DNA, 413 bp, Homo Sapiens
ccaacatgtcctctgtagaccaccctgaggcctaggaagcacataggggggtcgatgagaactctggtgtgaagtgactgtatggacagcagacaccaacatgagatccgtgacataggacgggttcactaggagagtgatatgaagcgagtacagcctctgccagctgagagctggtcagtgggagaagatgcccttaggcacgatcctgggagtatagagaggagacagtcccagtaatcaggctagccaatagaccactcacattctgtatcaccatgtgaggcatgtagtgctgagcatttaagcggccagcccaaccactgacaatgacagctggcgactcagtctgacgtatgagctcgagctcgctggctaccaattacagtatgactgtcagcctcaggctgtgg

SEQ ID NO: 298779 - DNA, 410 bp, Homo Sapiens
gatgcacgatgtagggaggcaacagtcgcctcaattacattacatggctagtctagatatcggttaccagattccgaaggtgacccttatcgactctcagtgccatatactttgcagagacacggagcgtatccgtgtgataactgagaaagacagctgagacgatgccgattgagaagctgcgcagatcggcctacactatatttagcctatgatagctaacgctgtgtcaattagcctactgtgaggatcaatatgtctgccttatggtaaacctgtggaactcactacactagctgctggtctctatgacgagtctatctggctatatatgatgtggatgcttctatgtcctactgcgctgcactatagacctgcgagatgccatgggtatcatctgggcgctcgct

SEQ ID NO: 298780 - DNA, 418 bp, Homo Sapiens
atgggtttctgcggcttcagaccctaattcttgactgccttcgacgttccttctacctatgttagacttccctgtgctcctcacgccctatctgtatagaccagcactcctagagccagcctgaggatctgtaagctacctgagcgagctcattcaccactgttgcaaggtgacacagcccatcacagacattgaccttcctttctcctagtctccatagtcctagccttaagtacgtcagcatgacccgaggacgttttctgtagaattctgctatgcctgagagtggctctgtgtgtaccagcctctttcgaccattcttttgttgtcgcaccctgatctgatgccacgattcgtcccacagatgcactgctgcttggattctcattggtcagagatctgcacagcatgactttcc

SEQ ID NO: 298781 - DNA, 373 bp, Homo Sapiens
gaatggataaattcgaaggggctgaattgaatacagatcaacctgcaatggtattcaaggcttatctggctgcggtgactgtagtacggcccgcccgacataaagttctggctaacggaggatcgcttaaggatgcttataggtgacacatgaccttaccctcattcaacactgacgtcgatgacgacatgacagatgaacactttgcatctgctacggagctaccatgcatattgacatgccttcgtaacacttgatacacgaatgccgcagtacaatgcattcgtactgagcctgacctcactgatgcactctacaggcatgcatggccttgagagcttcatgggtggcttcagcgacgtatgtccatgtg

SEQ ID NO: 298782 - DNA, 400 bp, Homo Sapiens
aggaaactcactctagattactagctcacaaccttagacacgaccattaccctaagtacgtgtaggcgatatggagaggaacctcgggcagtagacatagagaccggaggcatagatgcacaattataaccacgcctaatagatcgaggactaacccctgtaccttctgcgtatatggattaaccagaaataagcttgcaaggagagccaaagcttagacccccgccagacgagctacctaagaacagctcaaggaggctacaccctatatgtttccgaactatgggaagaatcattggtagagagtacgaacctaccgagcctggtgagagctggatgtgcaagattgagacctattttaactttgaatttgcccacagaaccctgtagtgcccttgtg

SEQ ID NO: 298783 - DNA, 409 bp, Homo Sapiens
ccttgctctctgttacacagagcatatcagggctgtcctgtgtgggttccagatgagggtctgtgtcccggaagcttgtgttgagagcgtcaaggacccaccccgcttgctgaaccctcacaggtcttggggttgtgcagcctggacttgtagcacacatgtgctgaagcaaagcttcgcggactggatgagccacctggccacagtccttccatggagggcctgtcgtgacgctctaaggagagaggcacaggcctgtgtcttcacttaagccacacagtgatgaggaaaccacagatggagctctttggcgataatactgactctagcccatgagtggcttggccaagccgaggaagggtaggttggcttgtcgagcccttgagcgctgggagaaggggtggggggg

SEQ ID NO: 298784 - DNA, 400 bp, Homo Sapiens
cggcgctctaggcgttagcgagtgcgcggtccactgcgtgcggagcctgtggcaactcctatagcgcgccttgtggagacacgcgtcccagacctgtggctcctactggggagagcgctctgcggaagattgctggactcgctgaagagagactacgcacgagagccccagccacccattaaatcagatagagaggattcaccttcttacgctctgtgcggtcagaaaggactcattggctatgcgcaccacgaacccgagtcttttaacggatccttgagaaatgtggctgtagatgagactgagcacgcggggctgtaccgtgacagtggctgatttgcatgccatggactttgagccgagggtcacagacggtattactcggactctctcttcctgg

SEQ ID NO: 298785 - DNA, 412 bp, Homo Sapiens
tgtacatattacatatgtacatatcgtataagatgaacttctctagtctttccattttctgaaactctttgacccagactcaggctgctagtatgatgtcccataccttataacgtctatatagtttaacccacacggatacccactgtggatcctagattgttttagattataaggctgcttgctaagagtgaaattctcatatcttagggcttgcctttaaaggatgaaagtacagaggctcgtttggctctaaagagaatacgcctttgatatagctgtatgtatatacaggtaagaaacttctcagatattactggctctagtggtctttactgcgtaacatataccccacatttagactctatgtgcccaactgtcttgcctatcgtgtctcctgatgtgctgctcc

SEQ ID NO: 298786 - DNA, 361 bp, Homo Sapiens
agtgctaccacagacaactgctgtgtctcagacgtaagatacccatgttcttgtgcaactacctgtggcattgcagatatactgtgtacattatcaaatcaaagcggacagggatctacacgctttggaagacatcttacatcaaggtgagcaacaccacatttcaagtcacaacaggtgatcagactctgttaatttgaagtccaggaacacgccttaagaaattctgaaatatgagagcgctcgattttatacacatgactcaagcgttcgagatttgcgggaaatatatgattcaaatagtctcaagattggtaacctggagaacgtggaccagcttgaagcacaatgccggccttgt

SEQ ID NO: 298787 - DNA, 412 bp, Homo Sapiens
  misc_feature (43)..(94): n is a, c, g, or t
ggctgtaggaattcggcacgaggagagagctagtgtcgagagnnnnnnnnnnnnnnnnnnnnnnnnnnnnnnnnnnnnnnnnnnnnnnnnnnnnacagcccaaaacccttattttccttttggcccaatggaagatttttgcacaacctgaaccccggggctgggcccaacgtttccattattccccaaggggaaatccggggggtttaggactcgcaatttcccttttttcctgaaaatataaggaactggacctattggagaaaccctccttggctttcctaattataaggtttcagagggcttgaaatgtggttttgggaagttgccattttggaaaggggttaatttgttggggatacagggattgcctgctttaaaaacccccttacccgtgactcgcccctttggg

SEQ ID NO: 298788 - DNA, 354 bp, Homo Sapiens
agcggtattacacgagctcacgagaatgacgatcacacagggagagaggggaggcacctgagatatgagctctaggccttttagcatggaggagtgcccttggccacatatatagtccaatctatatagaaaggtgatattgtggacatttagggaaaggtgaccgttcaaacaggaatggcccttggcattgttggcaacatgcgagctgagggcaagagttttgtcccgagaattaacgcgcgtattgagcacattcagcgctctatgagcccagataggctcccgaaacgtgagaagggtaaggttcagcctaaggttgaagccaaagcgaaggtgcctgtgtttctgcgc

SEQ ID NO: 298789 - DNA, 437 bp, Homo Sapiens
ctgcagcggtgaccgattacaggcagtctgccttgtcttcattggcctctgatattattgatcgcttggccgtccggatctactatgctgatgtatagcaggtctatcagagcgtgagttaggatgcttatgctacagggccttctgactactttgtggatcacgtgttgacattcgacagcacatatgaaatcactgtatagaattgcatgctatctgcagatgctaccgaatgctgtgccaccgccttcgtaggaacttgaaccatttagctggagcttcatgctactgcagatgcctacatatgttgtgagacttgttgacacatctatgcctatggacctgattcacagaatgtgctcgatactcctggtacacctagtagcgtgcatactacgtttgaacgtcccatgatcgatgtaggcctcacgtgcatg

SEQ ID NO: 298790 - DNA, 563 bp, Homo Sapiens
  misc_feature (404)..(404): n is a, c, g, or t
catcgagatagagcgagtggtgacctacttccgtaactgtaagtcctaactacgtctgctaatgatctcaacatagcaaactcacctctacttgctggcatagcccatggttcacccagcacttagcccagctgtgctttatctaattctcggcttagtgttaatgatagatcacgatccatctccacaatggctgctagacacttgtggagcatgcgcctagcgttcccgggactgctatgtacgccctgactagatgggcgacaccatcttgtgactgtctgtgaactgtctgaatgctcagctctattcagattatgcccacagtaatgactcctgccgtgccatgtcaagggaacagatgtttatgttgtacttacctcaccacatcctcgggactgttnggagatcgtatccacgaccatgcaacctgtttttagtatactgctttttgatgactcccacgactttttacctcttgcagttcccccatgactgtaaccgggctttcatgtaagctttcccaggcccaccacttaacacctcacctttcgtttcatgtt

SEQ ID NO: 298791 - DNA, 363 bp, Homo Sapiens
gtacgatgtcatgaacagacagaatccgtagagtcagatgaaggcctactcctctgtattatagaaacaccatcggaacgatgtatgctctcagtataatgctgatgcatgtgcatgacgcagattataaagcccaggcgtgattcaagggagagcaggccgttgatcgacgacacaatgctgtggagacagcgtggagcgatgacctgcacatttcgcatgctacctgtagcgacaaaggcaccttaacgagatacagatgcgcttagatgatttcatacccagactatagcagatcctagcagataagatgaatgcatccatacgagctaggtatcacgaacgaagtggtccggacgcatt

SEQ ID NO: 298792 - DNA, 419 bp, Homo Sapiens
gtagatcgttatcaccatgctggatccgcagactatgatgcgtgatacactctatcactgtgaacagacatcctcagagagcctattacacatagagcatcctatggattctgagccatgcattgccactgacctaggactatgaccagatactcgtggagctccttcataccaatgtgctgcccgtatgaagtgcacacattgcaggcagacctcagatttgagcacagagctgttctttacatagctcagatgaccgtccatgacgtttaactaatctggatgccactagacgactgtactttcttgcctgagttctgcgcggcttccctacgcacgctccatcatagcaggctgtgcgacctaggattctatggtaccggtgattacagctgggtgcagctatcacatgcctaggg

SEQ ID NO: 298793 - DNA, 657 bp, Homo Sapiens
cgatggtgctctggtaggagcgtgacatttatgcctgccagttcaccaccaccgtggagtattgctgtgccgcggagctgttcaccgaagggagcatccgcaaagctgaagtgctgagcagatagcaagtcatgctggacgacaaagcgcttttccctgatggctgtggacaggctgatgaccgtggggcagaccatgacatttatgtgctgagagtgactcacccacctgaacagactggtcattttaccctaacacccctgaatcctgaaaggcacccattggtacctgctgataggcagcgtgtgactgaccacatgctccacacatagggtctgatgtaatgatcggagtgtgctgaccatctatttcagctgaaagacacatcatggtagatagggagatctcagagtgcgagtgagcttgacactcactctatgactgcagagccagcatctgacatagagcacagcgtccatgaaggtatagatcggctggctgagcatgcctagaactgacactgatgatacttatagtgagctggtaagtgacagcccatcctgatgacctgctgtgctcacttaggtgtaacatcaaggcgttgtatcaacatgcgctcttgaccctacggtgactctcctgagcatgaagacttcg

SEQ ID NO: 298794 - DNA, 418 bp, Homo Sapiens
gagaaatgctgtcgactgtgcgaatccgcagacgatggagaatgccacttactacggacatgaggagtctgtcactgagagaatgttacccatagagcagtcacgactatatgtagagacctgctgttcctatgctagcccacactggatgcttgatgtgagagagcctttatctgagacatgtgtcacgactaaccgctctgtccaatagagagtgctcacattatgctgatgacggggagaataagtcatggctgatgactgtcataaagctagcccccgtgcgtacggctgaactggaggaggcatagctactagctgaaggtatgactatcatcctctgcagatgctgcgagtctgtgtatgcagattgcatggccatagagctgtctgaacacacaggtggactcagtgctct

SEQ ID NO: 298795 - DNA, 747 bp, Homo Sapiens
  misc_feature (132)..(183): n is a, c, g, or t
  misc_feature (614)..(614): n is a, c, g, or t
  misc_feature (678)..(678): n is a, c, g, or t
cagatctatgagcttgttgagctccttgaagggatgtctacaaagctgcagcttattcacatcccaacgtgtaggtgcactgagccatatagcccagagtatgcatgtgtgagtgtgttgatgcacacacannnnnnnnnnnnnnnnnnnnnnnnnnnnnnnnnnnnnnnnnnnnnnnnnnnntcaggacactagacactgggtgttctagtagaagctcactcgccatctctcaggggggttccggattacatacatcacactcccactactggagtcgcggggaactggagggagcagaacactgatttgtcactggtcaagatagattgagactagttcacctctagctagatctctgagaaccaatacactgaaaacttgtgtgcttagagcgatgactcaatgactaatatgccaaaagctcaacacctatattggagtacttatatccatatagacgtgctataatatatggtcatgctctggatatttcaaggatctgtatctattcatccaagagtactcctgagctcttatcagcgacactaatttatcaaatttgcagcactttgaaaagatgagatcgcttcctaccactatagatgtgtgtntctatgtgatataccatacaaaaactcttttagtgtaaagattctagcactaaatacaattggnacacacattataaggatgatgtttttatgtgcctgataccagaattcctttacgtagtgccgcgtctgt

SEQ ID NO: 298796 - DNA, 734 bp, Homo Sapiens
  misc_feature (515)..(515): n is a, c, g, or t
cctcggcaggacctgctgtgttgtttcccaccatgtgtccatgggttctcattgttcagctcccattataatatgggaacacacagtatttgtttttctgttcctgcattagtttgctgaggataaaggcttacagctccatccatgtgcctgcaaaggacatgatctcattccttttcatggctgcatagtataccatagcatatatgtgccacattttctttatcctatctatcattgatgggcatttggtttgattccatgtctttgctattgtgaatggtgctgcaatgaacatacatgtgcatgtatctttataatagaataatttatattcctttggagatatactcggtaatgggatagctgggtcaaatggtatttttgcctctagatctttgaggaatcaccaccctgtcttccacaatgggtgaactaataatttacattcccaccaacagtgtgcattcctttttctctgcaacctcaccagcatctgttgttccttgactctntaataatcaccattctgactggcataagatggtatctcattgtggtttgggtttgcatttctctaatgatcagagatctttcctaatttttacaacacataatgttgagcttaatgatctgcaattggcactaattaatactattgatctgtaactggcactaattaatgctattttcaatagtcaattgttgtatgatgtcagatatgatgtatacac

SEQ ID NO: 298797 - DNA, 717 bp, Homo Sapiens
agagagttcataagcaccaacagcaccactgaagtagtcttagttgtataagaagaggactaccaaccatctggttcctggtcagaggattataatctcacggatatcctcagttgtgagagaagcaatgatctgtgactgtccaaaaatgaaccatgacattctatgtgatgaagaataatataaaccctttgcccaagtggatacagaggaagtatactattactcctgggaatataattttgtgtctccttttcctttaggactcacataacgtgcgcatagcaaagatggtcaccaacaccagatagtctcagactgtgtctctttcctttcgtggaaataatatgctacacacgatacagacttgaatacaatgtgaacaacattttctgtgtagaacaaggatggtacactcctcccaaatgtatgtgcactatttctgcaggagaatgcgggccccctccacctatagacagaggagacattacttgatttctgtggtcattatatacaccatgaccatcagaagagtgccactgccagaacttgtatcatctcgagaggtacaactcttatacacgtggaaactgaccatggtgacaaccaccaaatgcttataaacatgtggtacatctcaagagatgaatggcaaatttacatttattaaagtgttcccacagcagatgtattgatcaggggacatatatgatgagg

SEQ ID NO: 298798 - DNA, 406 bp, Homo Sapiens
ctagtcggaggttctgctgctgctgggccacgacctgatgacactgtagtcagacctggcactggttcatctgcctcaagcgcatcagccttgccgagaaccgcctgacgcaccttgcccgctggacacaggctgaccctctcgcggacttgcacctgcaagacaccagttatagccttctgctggaccccgccttgggtggccctgagaccagcctgcggcacctatatctgctggggaatccactcaggtggtggaccattggctggctgagagacctgctgcaccatgggcgcgacgacgtgaactccacccatgacctgaactgacggttcaaggtccactaggagcagcacctgagccacgtgcgttacgagcactgcaagaaggggatgctgaaccaccc

SEQ ID NO: 298799 - DNA, 393 bp, Homo Sapiens
cccgggctgcaggaattggcaccaagagatagagaattacagaacctgcgatccattctggaaatactactactatggatatgactacattgacttcaacacagaaatcccaccctgtgtcccatgtgaatcaactgcccagataaccaagcagatgtgataggcagaaccagtctacgtgcattgctcctaggcttacctggaggacgattgccctgcgactctgcagaagtacctgatatacagcataaatattctgcaccggcaggatcctacctctgtgatggtcatcagtcaccaagcccacgcaggaagaaactggcgccttgcctactactactacctagtgggagatgttctctacactggtggcacttaccagccctgggtggg

SEQ ID NO: 298800 - DNA, 418 bp, Homo Sapiens
gttacacatacgtgaacattatatcgaacagatctttgcccattactgctagaatagggcacagctctaatgccctgtcagtaataatgcacattggagccctaagaaatgaacagatactcctgcgaggctcgactcatgagtttctatactggtaaaccctgtacgagctgctagctgtacctatataagaatgacctctattttcaaggagaggtagcggaatctagatcggttgtatgagcctcaccacattaacgtacatgagtgtcatacaggcactataataaagatgcactgcactgcgaatatatgaatgcgagacaagacgcctcggcacaccaggagtgagagagccaccatgcagtggagagctgtatgcatctcataccataagtactgtgtgtgctcttctctg

SEQ ID NO: 298801 - DNA, 384 bp, Homo Sapiens
actttgaataagtgtcagattctgatccagtattggacacctgtgatattggacacctgtgaggctgggataattacttttgaattacacctcttctctagtttctggaccttgctctgtcactttaacacagggtgatcaaacctgaatgaggatcagaactcacccaggcacatactaaagcaagattcctaaacctcagttccaggggtaattctgacatcacccgtccagcatagtcagctgaaattataaatctaagaaacagttacatcaagattctgctgtgtcatttaattctgaaactcccagtattctacccttcttcatcactgcatattaccccactcttccatcccttggctatcctttcagcccaccctt

SEQ ID NO: 298802 - DNA, 280 bp, Homo Sapiens
ccacagtcctgcatcacatctatggtaagttcacggactgggcttcaactaccctgcttagtctatgagttagcgactcacggaccggcatgcctggagcgaagaggctgaactcggattctatacctgagcactggctggcatccggaatagactgatgattgatggcgatggagtctgtgggacatgctagctgataagcttcagcagggaccagttccgatacgtgtatgtgacgatagagttcgataactatgtaccctagctccaggtctatcgc

SEQ ID NO: 298803 - DNA, 236 bp, Homo Sapiens
gtgtaacactgcactgcattcttgctagtgactgatacatggcctcgcagccgactgacacttgacaagtctggtattgaccttgaggttcccatatttatactgagtgttgaaggctgtgactgttacttgccaagttgaaagctctctaattcttagacggatagaccttactgtatacgctggatgactgtcattccctactcaccgttgctagatcattagcacagagtctt

SEQ ID NO: 298804 - DNA, 1010 bp, Homo Sapiens
  misc_feature (165)..(165): n is a, c, g, or t
cagcacgcactctagcaaagtgtgcctgccccgaggccaagccctcagttacctcgtcctactccccagatcttgaacgatcacaactagtaatctacatcaatccgatgtaaatgagtcatcggagtgatctgcacgtcattagcggccagttagtcgatagcnctggcgtttgaggacattgttgtgagaaggcagacaggtgtgcgctgcatgactcaggtgagcaacagaaatcacgtctagggcgagacacacgttgaactgtgaagtgacccagcccggtccgagttgaaaccagccactggaagtccgtatagaaccacagtggaccaccggcggcactggtcacagggtacaccgaacacaagccctggggacacaccggagatatgacgccggcagtgtgatgtagactttttctcaagcgacactaggatacaaccgagtagtgtgaaagcccattggtgatgctccgaatgtgtgtcacacaaagacaggggaggctccgtggggcgatgaatcaattctcacgtttgacaagtatgaggtcggagatacccattccagacggcgagttgtagggccataacaattatacccgatattcaagatcactgggacaatcctatgtacttgctatcgctcagacagagagcataacgggtgagtgtgtagtcctgatcaccaggatttcgaacattgttctcgactctatcctagatggacatagtgggcagacatacatctgccccagaggaagaaacaacaagagatgccctagcaacccagcaaggccattccatgcagttcggtaagcagttggacatagggggcctagacagactctagaaagacgcagctctggcaagagtaaggacatacttagtggtagttggaccttatgcggtaccacccttttccaattaaactcaagaggatacgacccgaatgcaatacagttcttcgactcctccaacatatgtgggagaccacagacgtgctgcatg

SEQ ID NO: 298805 - DNA, 1059 bp, Homo Sapiens
  misc_feature (1025)..(1025): n is a, c, g, or t
  misc_feature (1030)..(1030): n is a, c, g, or t
cacacacatgacagcaccaagagcaacgcacattcgaggaggaaccataaatagacgcacaagcacaccacggtgcaccagcacagaacacaaccaaattgcaagcacatcccacggcagcagccttaacaactagcaagctctacaccacgaagcaccagcagcgtgtgcagcacataacacatcaccagaccagcgcagtttaactactatggcatgcacctagggaacgttgccagctagcagcaacagcagcaaactctccacgtctttaccccaacctcatgtaccaaacagtctcgttagacacttatctaacactagcgttctacactcgtagcatttcgtcataggtgccaggtgcaatcatcgtagactctcataagacccacccagtgcgacagcatctcttaagctccttgtcagcaagcagcaacggctacttctacttcagccaccagcgcagtgcactctgtatattccccacagaacttgagagcacatgccaaggtcgtcacatttgtaagcgaggcattccagccccacgcaacagcaacaagccacatttgccaggcagcagcatgtcaaatgcactcacaccgaccattctagcaaagcaaacagtcacgtgtacagcactacagcaccctgtgttcaactgacgacagtctaccacttggccagacagatagtaagaccatatacattgtagaccacgcacaaacgcaactccctacaactaaaccgagagaactccacgtcgcaccacacttagaacggcttcaaggagattactacatcttcatggatgctaacacacgctcctaattcatgcagcacttttaaccttccttgaccagccaactcctgactgcagctgtgcaccggatacaaactcagcgatctaccgcaggtgcgcgtactaggctgcgcagtcttggacaccactgtcgcatatcagggggcgcacacttctgcgatctcgtaccatataccgcgaggcgcacatatcagttcgtcttccnactantccgcagtcctcgcgccaccaccactccc

SEQ ID NO: 298806 - DNA, 659 bp, Homo Sapiens
  misc_feature (447)..(447): n is a, c, g, or t
accagctctaccatactggcatacggccttcgcgcttatgattctccatggccgagtacatgccagagcccatatgggaatcatgcattagagccgagtcacgatgggaaagatgaattactcctgcccagcattatatcgctcggactaacccgctatacggtatgcctacagactgagatacaaatcacttccaacggatggccaaagctcaaaccctcgagaccagactatctacctaagaccacttatatgagcacacgcgtctatgtgacacagtcgagataagatttatgagttgatgcgacatacgtaccgagcatggcgattactggttgatcatgatcgagtcttagttcaactgataattgaccacagaaccctatatatccccatgcatgtgaaactgatagttcgaagaggatcagctctctggacactaggaanatacctagtacagagagtaatgctgctaacaggcatgagatgcctaactgtcctgaatcataaggcgatcattctcgacacccactgcctcatgtatcccatacatataactgaactgctgagacccaattggaccaatctatcaccctataggagaactaatggcagtatatgtcacatgcattcatcgctcggattaacctgcgtctttt

SEQ ID NO: 298807 - DNA, 699 bp, Homo Sapiens
cagagaactaggctcgagagtttattgcttacaccatatgtcctgccttaaattccgttaaaggctgttcatagctcttcagacaattggtactctactctgcgtaaatattgattccttctgacacgggagccagggtatagcctacgagacatatcacgactggaaggtgacgcgtgtctcctgctcgacctaagccagtatgctttacgctccagctatacggcttgcaagccccttgcgggctcagggaactgctcgcccagtgtgcactgtgagtgtgatagcccacccgtgcatgagggaaggtgaccgcccaggtgtcccacataccactgaatctggcttacaaggcggatggaagcacgtactcaccgcctcaggggctgcggcctatgcagctgcctatatgcatctgtgtaaacaccctgaccaacacaagtgacagcactagctgaatgcatggtaccgcacactcccattgtagcacgttgcctattactatgctacggttcacacgagaagactacatgtcactatgctaagctccatacgggctcctgcttatatcctgcgcaccctgacctgtaatggtgagtgatatggccttcctaaccacactgatctccacttgggctatcatttcccggtgacgtgactcggccgatgctcctgcgctagcgcatgcttcatgtcggc

SEQ ID NO: 298808 - DNA, 659 bp, Homo Sapiens
ctatgattcaggcaccgaaacttactgcgaacacctgactgtcgtcaacgaatatgccgattacggctatggtaatatggtctatggctcttcacatagtcattgacagattcgaagacagtactgtcctatacacaatgcacccaatgaccactatataagttgcataagtatggccatgaagtcactcctagtatatagccctgcatgacagactacactatagatgccataccgcggcatggactgacttattgatgactatgactaagacgcatgagaagcatgctgccatttccatcctactgcagacacttggactgatgaccgatgtatatgactgtatgctgctcgcaggcaaactgtgctgtgactcgccatcaaacctcgactatgaccaatgagatgactctagcagagcgctgctggagagaccgctgctgacctatcctgagctgatatcgagacaagcttggtaatcatgaggacttataccgctatagggatgctcatgacaggcttctgcagcatacatctgatggcattctatggaggatattgaaagcatgaacatctgcatgatggctatgattgacctgtgacgggactggtcgcagagaatcttaccaactccttcgttatggtccatatctggatgg

SEQ ID NO: 298809 - DNA, 293 bp, Homo Sapiens
atataacctgccgaagatcttgtacgaatgtatacatgaagtgacctgtactaggagacctgacttagtcctaagattccttgttgttcctaggattaagatggctacatattgacatatattactgtttcagttatggtgtattgcaggccggatgctgatttgtggtacggattaactggtaaggaaaggaccttatagaatatatagtactatacgatgaccgcgtttatgcctatgagatcctggtcatgcactgggtctactcagctgtcagcatgtctactgacgag

SEQ ID NO: 298810 - DNA, 157 bp, Homo Sapiens
ggattcattgtctacccccaacgcccatacctatcaagctggcactccttataccccattctctgtttcatctcatcccctgttaatgaggcttttgcccttatggacttaccaattctgagatattgcctatagacagaatcacacactatttgac

SEQ ID NO: 298811 - DNA, 363 bp, Homo Sapiens
ctctagtagcgggacggagccttgcggccctcgagcatgtacgatacccctcaggaggtgaccgaagctagactgtcttacctgacagagaccatatagtgaggcgatgctgacgatgggcacgggctagaggaacaacagaagcggatcgtactggaccctacaggctccatgaacatttacctgatgctagatggatcagacagcatggcgtccagcaacattacacgagccagaatgggactaggcaactgaattgagaaggtggaatactgctatgcctgaactcgtcagaatggaatctcgctgatgctacaggactagctccctgatcattctagtcactatgaaccagggccatcg

SEQ ID NO: 298812 - DNA, 322 bp, Homo Sapiens
ctcttgtagaggcacggtgccttcttgccataaatcgtgcatgtgcgatactcctcaggaggtgaccccagctttattgtcttccctgacagagaccatttgatgaggagatgctgacgtatgggacgggctagtgtatcaacagacgcgtatgatagcactgtgaccctaggagctccatgaacatatatctggcgctagaaagatcatacagcattgtcgccagcagctatacccgagccataaggcgactaggcaactgaatggaggtccaatcgtgctatacctgagagctcgacgaatggtcatcgctgatgctccg

SEQ ID NO: 298813 - DNA, 611 bp, Homo Sapiens
cacgtgttcagcgctgataagcctaaatatgctatgcgcaccttagtgcttgcctgatccaactggtctttgctggcgtatgcatatctgggacgtcgctgccctgcacctgtgcgccgactctaaccggcatcctagaagcccgatactcactatatgaataatgtcacgctctagatgggcaaacgcaagcgcgtggcttcattatagagaatcgcactttctatagcagattgtgtgactatgaacatgctagtatcctgagggcgattggattatgcatttactgtgattcgtaggcaggttgctagctagaatgatgagttaatttgaccatattcgttgctatcatgtatgtgtacatatcaccgcatggcctgctatattaacatgtaggctgttcatatatcattagagcgcatcaagatgatctactgagacatctgtagaaggatatggatctcatacgatactgacatgcatgacgtcagaagtcatcatatgattgcttgatcaccgtaatggctcaatgttgattactgattattattgctctcagtatactacactgagttacattaatgctaattgagcgctgatgcaccagccct

SEQ ID NO: 298814 - DNA, 346 bp, Homo Sapiens
cttccggggacatcttaacaccacacaggactaggtcatcatgaggtcagtcgagtctttatggatggaacgcgtacttttccctactatggggatgagatcctagacctttacgtccgcgatgagctcgtcataccgtatgatattctgcctgatgcactgcacggcggatgctatgtggatccaatgtgtgcacatctgcgagcgattaccctgtgcatgagagagaagattggatttccagccactagtagctagcctatagctcctgaacatccttccttccatctcctgatccacttattggatgacattatataaaggttgctgcgtgatttatctcatg

SEQ ID NO: 298815 - DNA, 347 bp, Homo Sapiens
attgtgtcatttccactcgcctgtggcacattgaagtggttaacctttatgtcccttctttatgtgtttacctcggcttattccaagggtgcgttccgtcgagatgcacacaagactgaggttgctgatcggattaaagatttgcgtgatgaacatttcaaagccttggagctgatggcctttggtcagtatctgtagcatgtggcattcgaagatcatgtcatactagtgatgtgaagcaactgaatctgcagaaacatgtgatgctgatgagtcagctgtacctttgcctgaaacctatgctgaaatggctgactgttgagccaaggaagaactattatagtgtg

SEQ ID NO: 298816 - DNA, 163 bp, Homo Sapiens
  misc_feature (47)..(103): n is a, c, g, or t
gaacagatagaggcaaacagaggagcgcacggaggaacaggagcacnnnnnnnnnnnnnnnnnnnnnnnnnnnnnnnnnnnnnnnnnnnnnnnnnnnnnnnnncgaggcagacgaacgatgtaagagcagacaagaggaagagcaagtgtacagagcgcggga

SEQ ID NO: 298817 - DNA, 238 bp, Homo Sapiens
ctccagcgtgctattctgtagatgcgagagattgttgactatagtgaggcgcatttatgaagatgacaagagacggtgcaacgagacctccctcacacctgatcgcctgctttgagaatgccagctaaggtgttatacagtctatgctgtccctctggcccatatacttggtcgaccctgacctgtataagtgtatcaatgtgggcaggatagtatacagcgggcatgggccagaccc

SEQ ID NO: 298818 - DNA, 603 bp, Homo Sapiens
ggacagagacgctggctaggccgtcatacacagtgttgccagcatgaagctgctcgcggcaactgagctactcctcaccatgtgcagccttgatggagctgacggtcgtagacaggcaaaggagccatgtgtggtgagcctgggtgctgaggcctaccagaccgcgactgactatggcaaggacctgatggagaagggcaagagcccagagcttgaggccagagccaagtatgactgtgttaacttgctgagctatgtcgaggcacttggaacacagcctgccacccagtgaagtggccagaccagcgtattacaacctcagatgtgctctagaacacacacatgacagtcgtagatgctctgtacataccgactctttgctgcatatacgctgaatgaatgcaaatttttttgactgagactcgagtgctcttggatcctggaatctaacaggacatcttattttaacggcacgataacacacgagtttactggggtttagggctgagccgtcaatttcgtgatggcgtcccgtaaagtcgggctacctggtttgcgtgaacttagtgaccaacccctctttcatatgccatgcgtggttcg

SEQ ID NO: 298819 - DNA, 194 bp, Homo Sapiens
atcacacgcacatctcactgtgctgacctgtgctgtgctattcactgccgtgagcatccagtcgcgaaccgacaggtattcatttatgtccgcaacacagatattgctataggctctgtgacatcatgaaggacatgtgtatggttaacttctatgggcacaaggacagagtactcggcttgaaggccttgttc

SEQ ID NO: 298820 - DNA, 640 bp, Homo Sapiens
cgttgcacggccacaggagggacacacatgtaactgtgtgagaggtgcatattagcagatggggccagacacagtatggcgtgtttttcgaacccgagggccaagataccgggctaataacgaggcgcgttacccaacagatacacttctgtgtccagacaagctgcgcaagcgggcttcccacacagtgcctggcaccaccacacccaagaatcttcattctttaacacgcaattatggtgaaccatgggtgacaaacaggtgtgaacttcttggaaagcaccagagtgctcagacttttccgtgccatttgcagagggaacgcccattccagggagcaagcttcgactttcacgatatttatcaaggaaagggtttcactctgtggaggacacgtggcttgagaacacactggagctgtcagagttcgaacacaggttgctgagttcaagaagacattcagacgagcaggaagtctagctctgagcaaagctgtgagcaaggccagcagacgccgaggcacagatgcattagactttgacatattagaaatacagaccgcgtgctcagatgtgtgctgtgtccccagacacacagacctataccccgagcaggttctcgggcattcacagaggccttt

SEQ ID NO: 298821 - DNA, 514 bp, Homo Sapiens
  misc_feature (330)..(330): n is a, c, g, or t
acgcggagtcacatggaatgcgcgagtgtgagacctgtgctgagtatcccaagccctctgctgtgtacacgaatgtccccttgctatatgaaagcaacccttcgatcacatatgagaattctttatttctttttatataaggattttacaggggaaattaacaggcaccaacatggtggggtctttggtggggagagggggagacttttggaaatcaagtgagaatccactaaagaaattaaatttggactggtgaaacatatggtttaaggacacaatggactcggtgcctctttctgtactctgaatatgcacgggtattgcggtggngaatggggagttggcggccctcacttgggccttctctgtgggtcttttccgagacacaacccaagggcccttgtgatgctgtgcaaccctggcccaatatttcccctgtgccttttccccgtgtgcacaaggtctgggctcggatacccacacccgggttctcttgtaccacgattgggggccc

SEQ ID NO: 298822 - DNA, 529 bp, Homo Sapiens
gcacgaggggaagccctgtcagagacagactcgtagagagccagacgcagacctgtggagagacgcgcttagagacaccagcgaggagctgagatatccaagacaggccccccaggagttcacagcggcctctggtaacttcttcttcgagcccatatctagacattaacaacttcctgggcaagggcaaagagagggcccaccagaaacgcaccagcaaacgggccccgcagaaggactggagccagagaaacgaactctttagaaacctctgagacgccctggtggcacccacagactgtgaaggcccagccaggatttcaccccacactttttccttcttcccaattactctcctggatcaaagtgccaattagagcccacataccctttcttgagacaaggattttctagagaaccatagtgcttcctgagtttatgggtgaatgtgtttccgtgcttccgcaacagcctttggcacactgtctgtgacatagctggcctgtgccatgtcacgatcatgggaccg

SEQ ID NO: 298823 - DNA, 473 bp, Homo Sapiens
gcacgagcgcatgagctgtgcaactatgtgaacacacggggtaccacgtgtcaggcgcgcgcacacactttacacacgcggacatgagctatcttgagagagagcgtatagtgggacctttctgtggggggcccaaggcacacccagagaggtatggttaccgaggacctggagctggctggaaggtttgatagcgcgggaaccatgggcacagtgtgccaccattgagagcagagaccaagggttctgggggttctggtgggcctttggggctgtggaaggcatttctgagcggatctggattcacaccaatgggcacgtgaacgtggaagtgttcgcggaggagctcggtacacagctgtggcagcatgtgtggggaccggtgtgatggtgggtattccggtgaagcttggaacttttggacaagctccattccttcctgtgagcgccacattacggggttccgggccccg

SEQ ID NO: 298824 - DNA, 431 bp, Homo Sapiens
atgctgtgtgcaaacatgtctgtgcctcaggccctataaggccacagacctcacattcgtggagcgcaccatgtgcactgtgggtcctggaaaacaccaactctggcacaaaactctctgacatttgtgacacagaaacaaggtatattggagacacactgcgatcaggtgccatatcactgatcttctcacttaaagagaaagttggtgcaatggccaaagcattgcgcctaattgaagagaaagatgtgaacctggaccacattggatctagacctcttcgattaaagaaagattagtatgaattctttaaccatttggataaacacaacctggctgctctgacaaacattatctagaacttgaaggatgacatttgggccactgtgcatgagctttcacgagataagggacacacggccctgtgtccc

SEQ ID NO: 298825 - DNA, 617 bp, Homo Sapiens
ggcacgagattgttgagagcacacacgagcctgtgctctggcaacaatctgaattatatacttcctggagaacacagggcctggagaaccatagggtttgcccggcgcatttatgaagactctgaagcccatttgcaattgcagggcttctatgaagaagtggccaacccactggtgaccggtgtggagataggagtaccccgagaacgctattctggaccttacaccagaacacttaccagcacttctaccaaggctctgagaacgtggtggccgcgcgcctgtgggaccaagacatgaacaggtttaaagcagatagtgaaaggccatggggccaccaacgaactgacctttacagaggagagggacactgaaggagaaggagaaaggcctgcacgagccggactacatcttcgggaattacattgagcgcgtctgtgcctatcttaccattgagcacatgctgtagaagcgcaagaacgcccatgtggaggaggagaaccttacaggccggccctgtacctgtgcctcaaggtcactctgtgactccactgagctcaataggggtgaccaagcctgaggacaacgcggattagagggccattgtcgcgcctggg

SEQ ID NO: 298826 - DNA, 164 bp, Homo Sapiens
tgcacgagggcaatgtgtgtggagggaaacatgggaagcctttgaacctgtatctatacatttgctaacttgggaccaggatgtgagttcaaatcatttcactgacatataacgcatatcttttgtgtaatgaattaggcccaaagagctttcggttctcttcg

SEQ ID NO: 298827 - DNA, 418 bp, Homo Sapiens
catcgcgcccagtgtgcctaccactattcacgtgtgtaaggacacgctcgtgggtgcacttctgaggccagacacgattgatttgccgctgcggattctggtcctcacccagagagctggtgccatcatcgtaccggagggcttgaccatctagaacattactgggcagacccagtcccggttcgatatccgtagaacagagaactctggagctgctgagaatcctgtgaccgtccatgccaccccatacgctacttatgaagcatgccgcatgattcttgaaatcatgcagagcgaggcatatgagaccacactagccggacagagtcctctgtagatcttgcgacacactggcttcggtggaagactgattggcgaatgcagacctttgaagaacattggacatgactcagggccg

SEQ ID NO: 298828 - DNA, 134 bp, Homo Sapiens
aatttgtcaaaaaaataccttgagatgacaggtagttggttttgttaatattatgtttgccactttaactatgttaaatgaaatgacaggtattcattaaatatctacaccatttccagataagacaaactact

SEQ ID NO: 298829 - DNA, 365 bp, Homo Sapiens
tgttctgtcaaacatacactcttgtgtgccactctccacaaatttggagaaagagctttctcagcatgtgcactaactctcctgagccacatatttccccaagctgagtttgcagataacttccacggttatgaccgatcttatcaaagtccacacggtatgctgtcctggagaactgcttgaatgtgctcatgacagaggcgagaccttggctatatgcgtgaaccaagattctgaacccagtacactgtatgaatgcgtgtgagactcccctgtttggaaattccactttattgttcgaatggtgatagagattcctgttgactctcctctatttcctcctgttcttttcgggcgtctttttc

SEQ ID NO: 298830 - DNA, 760 bp, Homo Sapiens
  misc_feature (25)..(25): n is a, c, g, or t
  misc_feature (248)..(248): n is a, c, g, or t
  misc_feature (290)..(290): n is a, c, g, or t
  misc_feature (295)..(296): n is a, c, g, or t
  misc_feature (298)..(299): n is a, c, g, or t
  misc_feature (594)..(594): n is a, c, g, or t
gagagaactggctcgagtagcacangagatctgtgcttcacttttgcattgtttccgttggcttctctgtcttttttaaacacaacaattgtttgttgcacctccggtttcctcacatacttttgaacaaaaaatgtccaccaacccccccctgcctccgttttgggccacaggagttaatcacttttttggcaaaccccataaacaaagaatcctttcacctgcctaacctcgtgccaaattctgcncgaggtgaatgtccaggaagacttttggtaaaaaaggcgccnaaagnntnncttttgggaagaagaaaacctcttggaggggcttgtaggaatctacatgaagcgattatgtggaaactggtttccccactcccccggattcccttttgctatacttaaaggcccgtaccttgcctctgccctggattggttggcaaactaaaggacttgacgtcataactccggtgccttttcccttacaaggtggggagtgcccctggctttcgcctttgtttggtgctttggcctcgggtgcattttccaccgcccttccatgggccttttgtggtccctggggagctctttnctcataattttgcgaattttttttgtggggttttcatacctactttcggcgcctaaattgccaaaaggaaagggaccgaaagaacctccttatttgtaatgaggattggtttagcgctgattttaaaccttatgagctttttgtccacatatatgggggggtttgg

SEQ ID NO: 298831 - DNA, 229 bp, Homo Sapiens
aggcgattttgtctttttctgagatgggggaactacagcgtgtgtgaaatgagctcacccacgagatcacatactctgtgtgcggaaagtgtggacagatgggttgtcacattagatctaccctgaatgtgcatttctggtgcctataatctataccgttcggtgtgagctcgacctcactgtcttgagccatggatgcgacatgttgcaggtgttcagaggttggggc

SEQ ID NO: 298832 - DNA, 350 bp, Homo Sapiens
ccagtccgctcggacgctctctaccacgcgccgagcacgtattgagttgggcagctgataagatgtttcttggctccacagcatacgcggcactgagaacgcggttgcacgcgcgtgaacgcacattcgactaccttttgcctacgctgacaacaggcgtgaccttcagttacacaagcgtcgggatgccgctgggagactgctatgccccagacggggctgatggcgcctgtcctaaaggaaagcctggccattatatagggacagagcgcgaccctggttattactgttcgaaatatacctatgtgtgccccaacgagatcagaatcttgggccgtggcagatatatc

SEQ ID NO: 298833 - DNA, 429 bp, Homo Sapiens
ggcaaatggtgcgtgcggaacacgatctgaccctagttccatacggggagcctgtaagagctgaggccctacttcacggaccgtggttggcctatgcaccggcccctctagacgtgcaccacatataaaggctaatacccatcccctcagctgctcatcaacagttatccttccctgcgcccatcccaatctgggcatcgtcaagagacacttcgataggatagccgtgggacccagaccccagcacctgagtccatggtggcgtatgtagtcacatactgtggaggctcctaagctctggccaactgcggccctatattcaggacaatccttttcccaagcgctaagggctttgatcttcgcataccaccctactcatataagcccagcctggggctgtgccgtccacacgagttgacactggtcttg

SEQ ID NO: 298834 - DNA, 438 bp, Homo Sapiens
gctacttggaagctcgaggtgcaatgttccaggtacgtagcggctggggagtccctgggagggatctcatctattttcagactttcaacaaatccgcacgtgtccatggtcgactgactcatcgttcatatttctgtttccaggctatcagcttgtgaccactgctatccaagactttgcaatccctcctacatgatctgcactgaaataacccgatcccttctctctctgtcactatttaacacactacttaaccactagttcagggattctcactaactgctcagactgactcgaacccttatgtgaccccatctgaggcggacaaatttctctgccgcagtgacactgatctaataatcctgcagtgcctacagccctccgttggaagggaaggtaagctgagacagtgctgttcctagagactgaggacgatcc

SEQ ID NO: 298835 - DNA, 392 bp, Homo Sapiens
caaagtttgcatactctcgctattacggtccacgtacagcgctattagtactgtgaccgttttccgcctctgtaaacgtgtaagcgtacagcatggcgcatactaggcagagtagacccacttactatcactaatggagtgaaagtagagcaacttgagcataagcccattggacggtgccttatgatactaacgaatgagtactggaatattgacaggccctattttggagaacgcctaatgagagtgatagacgcagaagtccgttcttatgcaacggatctaggcagaggtagtatatacatacgtgggaatacagccttacaagactgtgcaagttcaactacgggattgacggttgccttcacagggtgctggtacacattcccggg

SEQ ID NO: 298836 - DNA, 137 bp, Homo Sapiens
tcactgtaatctgatttactacttgtgagggcccccgaaaggcctcctcacctccaatttaaattaaaaatttttaaacttagcccaagttcccaacggggagggcgcttttttcgcctccgaataccccggttttt

SEQ ID NO: 298837 - DNA, 236 bp, Homo Sapiens
  misc_feature (13)..(13): n is a, c, g, or t
  misc_feature (86)..(86): n is a, c, g, or t
agataggacatanatgtcatttatttgctagtagtatttatccaatagatgatactactctttatcttaaaaatacataactgggnggctagcgaatgttggaaatgccgtttcccacttaaaaaaagctgggggaatttctggggccttcccttggattttccggcctttcccccgggggggcttcctggggacccaaagcccatttttgccgattttggcccctttgaaaaggc

SEQ ID NO: 298838 - DNA, 345 bp, Homo Sapiens
ggttgagaactctgtggcagatatagaggtgtatgtaaagcgaatagagaggtctctgtgggacacagctgtgcacgaagatatatgagcgcctgtaggcgcctctttctataccagataccgagggtatactgaggtggtgttttccattggcaggcctgagtaggttagcacttccacggtgggaataagaaggagctttggaatggtgagcacacacaggcgggagctatgccacagatggagccagaaccgcggaaacctgtgaaaggcagagatatgtgaaacaggatatgggcttttgggacatggagtggtcagcagaccgatggagtgagagggttt

SEQ ID NO: 298839 - DNA, 300 bp, Homo Sapiens
gtgtgtctctgtctatatctcactctgtgtgcaaagcgatacttctattactaggatgcatatcaatggagacactggagacccataagaggacaagccaatataagttcatacatttggtcattactggaacatttatatcttagctggctgaacttgcacttgacaaaaatgcaaagctgaaaataaaaccacggagactaattaactgagagagttattaaaggcacactccgaggttcactacgatcacatcatggccatgctcaggccagatatgctgagtgcgctgtcggctct

SEQ ID NO: 298840 - DNA, 501 bp, Homo Sapiens
actcactcatatttcccacacctagtggtcagaggagggaggggcacagtgaagaacgcagcccaccacctttgcgggaatgccgcgtatagtggccgacatgtggtgccagcatcgcgctaactatgacataatctgtatcttgccagcggagctgtgaccccaggttactgcaactacctgactgctactctcttctgatgtgctgctccttccagacagagcctttcccttataccgtgaccccctgtgctgaccccattgtgtgaatgtgcacatgccacctccctatctatgaggccatactgtgtatgaaacaggatcttcagggctagccttaatctgcgcatcaatctggtagggtgggggcccccgagccaccgtacctacgtctacggagcccgtacttcagtattgcgtgtgtaacaagagctacggctgttggctcttcaagacacgaatgcctggctgcgtgagatatattggtgcttgcttagtgtc

SEQ ID NO: 298841 - DNA, 356 bp, Homo Sapiens
cggcacgagctgagcgccagtacatgtagggagctgttcgccagagacagtgctgtgttctgcgcctcttctacatcggctacattcatgaggacacggttgtgtcaaaggcacaggtatttgaggctgtgcaaaggttcctcctgtgtctgcaggacacacgggcgagcgccccccacatgggggcttcggctccatctatctggttgcgatctggcacggacacaagacacatacccttcgtgagacatatgggcagtgccatcagtctggtcaaggtctttctgtgggattcagagcttatgagtaggtatgggcaccgtgtgctggaactttgggtcttctggggagagccc

SEQ ID NO: 298842 - DNA, 591 bp, Homo Sapiens
ggagaaagacgcacccaggggctggggaattgtcacaggtataaactctagaattggggaatgtagagtcctgtattggcaaagccggttggtttttgcgccctaggctatataaaaaaccgtggaatggaatgttgtcttgatttggtctaaatttggatatatatgaggtctctgaatatatccaaaatggattttggttgatagatttataatggaacccttttctaggtcctgaataaatatagcctgctttccctagatgcctttgtgtaggaaggatatacctttccctattactctcatcagctgaagaatatggactattggggtaccccaaatatgtggccttccatttggtggtttggtgccagcttagtggtttgtaatggaggttttggaaatggaaccggtggaatatctaaggtcaggcccctagtaacaggggtttggtaaatcctttcagaatccttgaagccgtcttaaagggtcttttgcagatgggaccaatttggaccatttgaatataggattttgaggtctagtaggactgagattggccccaaccaattaaaaactattccatttttg

SEQ ID NO: 298843 - DNA, 358 bp, Homo Sapiens
ggcacgggttttgtccctattgcccgcctcacagaggaagctccacacttatttgtggctcgtgctcctcggtgctctgacctttcactttgtataccctgtggaaatgagcacaggagggacgcgacgcggctgtggttaatttggggtaaagacccctctggtccccggcgagtacccggtcaggtgtcggcccccgcgttcgggctctctcaccctggcggagaacccccttcaacggcagaaagcctctgcacagcaccgcgcacgggaggtgccggtctctcgcacccccgaacctgctctcattcccaaagaggagagcgctggccgcgtcttgaaccggggtcgcctacct

SEQ ID NO: 298844 - DNA, 406 bp, Homo Sapiens
acccacttgagcttactaccgcacaaccttcaccacaccatttacccaaataaggattaagctatggaaatagaaacctggcgcaatataaatagcaccgcaagggatacacgaagaatcataaccaagcataatatagcaaggactaacccctatgccttctgcataatgaattcgctataactaacttcgtaaggagagccgctaagacccttgataccagactagctaccttcgaacagcgttgagagcacacccgtctatgatgctgaatagagggaagatttatacgtagaggcgacgaacactaccgagcctgatgagaactggatggccaagatagaatcttagttcaacgatctatatgaccacagaaccctctcgatgccattgtatgtccctgttg

SEQ ID NO: 298845 - DNA, 209 bp, Homo Sapiens
ccgatactatggcctctacgtgatagtgtaccacacgcgcgtggccgagacacactcacatgcgatgacggctcgctctgataccgaacaggttaggcaatctgtgcctgagacaaccgcacctctgtcgtagtgtttcacccagtccagctgttgattgccaggctgccacggatggtcgccacctatctggcctatgcgcagcgtgc

SEQ ID NO: 298846 - DNA, 343 bp, Homo Sapiens
gcacgagagagatagagcaccactctattctctctgtttagaaacaagcggtacagtgtggacatttttgtcaccgttctcacagccttgctgttttcaaaacaaaatcctgtaagtgtctaattctcattacctgggccgagataaccaagctttcctagggttaggagacccaccggtataaactcccaccgggtgactctcgttggacccataacaccgtgttgtacccggaccaacatatttcccagaaattgcgtaaaacccacgacccttaaccaatgtctgtctatcgcaaggcacctgatgaagggctactggacccccgcgcctctgttttctt

SEQ ID NO: 298847 - DNA, 365 bp, Homo Sapiens
gtgttcttaatgtattgcccccaagccatgcgatagagactactgcgcacagtacacctgatacatgctatagactggcctacactatgacgccttctgtatgagatgtgccatgcaccggagctcattgaagtgataatagctcttatgtatctgacaatccttgcacaacactcatggtattggaacacactctcgtacatcatcttactcttagagtctcactcttacatgtgcgcgactcgcactgactcgtataagatcacgaatcattactagtgacagtgccacaaccaaggagaatagcttactcttgctcaccaagatgtcacctgtttcgatacggcagagcttggagtcatctt

SEQ ID NO: 298848 - DNA, 275 bp, Homo Sapiens
acccaaggggaaaacatggtcgtgggtttggggttataggaacaggggggctttggtgaaaaagcaaaatggaccaatggagaaaagccctcttctggaaacatgggactcaaaaaaggggaaggaggataagtggtggccttaaagatcaagataaactttccggacaggggtaagaactttatagtatgaaaaagggtgaaacttgggggcgggtccggagaatctccaaatttggcacgtggtttgaagataatataaagctagggagaaag

SEQ ID NO: 298849 - DNA, 648 bp, Homo Sapiens
  misc_feature (573)..(573): n is a, c, g, or t
ccgggctgcaggaattgggaccgggctgctgtcagaggttctatgcagatgatggcagttctagcaacggtcccaggagtctgttccctgttctagatccgcacatcctataggtaggcccagatactgtgcgttgaggctctagtgagggaacagtggatactgactgtgcgtcagaacgtttactaccgatgagcctaccttgggtttgcggacccagtctaatacgaccttcatgtgttctccatgctctcaagcgagccatgtgcccatggactgagagtcacgcctgaccagagccagctcatctcacagccatatgccactaacggactatgcgggatcggagctcacactgttccagatcccgctacttgcatagccaggcctacagcgaggtccagtagccttgatgcatgatgtacacctgagcttccagctagatctgctcgagctggagagacctgagagcctgaaccagagtgtggtcctgagctgctgacggctgacagatatgtggagcctacagggaccaagtgtgagagaggccgcaggtgtgagaccaacggtacnggttgacacagatctgagacatgtcgcggacagcgagacgtgcactgagggactgttggacctgtggtggcctgt

SEQ ID NO: 298850 - DNA, 415 bp, Homo Sapiens
gggaaagacccgagccagcgggcgcgtggacgtgggtaacgcacggtccaataagggaggtctgtatggcccgttctggcagcgacgaggacgcgcctgagcagagcaggaatcacgaccgtcgtcgactccaggagcgcggagaggagagacatgaggctgagctgattacggattctgacagtactgtccatctgcctgagcgccgtgatcacggacacgtaggccgtgggccggaagctgcagatccatgtcaagatgcggatggaccactgtaccatcacatagcacatagtggatgttctgcacatgcactacacacagaagctggaatatgggacagactatgacgagatggctgactagccagccctatgacttcgagctagacgcatgccaggtgatccgggctggg

SEQ ID NO: 298851 - DNA, 417 bp, Homo Sapiens
ccgagaccacctctatggcacagactacccagaggagagtgtatcggtgagtcttccctggggatatatcggtacatggctgtgcaacacataacagtggtcacacttactcagtagaaatgcatccacaacccgaagactctcctgagggcctgcacgtgaatacacgcgtatagttactaaatctcattggcaagggaccatagatagcgatgcgtcagggcctggagaaagaacctggagtgatgcacgtacggatgtggacacatattcaaggaagcagactggaccaagacgaatgagtgatcactacaggagcatcggtcacgctcacggaacgcagaaggcgctgagcagtatcagggtacacttgcgcaactggtacagcgatttattgctcacggacgtatatcgtgt

SEQ ID NO: 298852 - DNA, 427 bp, Homo Sapiens
aaagaatgttattcagccttatggagtcagtataagattatatgctgataactccaaagtctgtatattctggccttcaactacctgctgaatgtccccactgcgtatctttttctgaaagttctgcaggtacctcaaggtacatcaagattgatatatcttaaatgaatctaatcttttttcttaagcttgtttttcttcctggtttctctgatattaatcactggtgtcatcatcctaaactatcatgtctcctcaaggaacttacgagcttctttagccttccttccactcccactttaactttcattagcaatgtctccattttgcctcccttcttcatggtcacaactgcggcatttcccgttcgctctcttcatttctgtttcatttatctgattcatactatctctacacaggactgttt

SEQ ID NO: 298853 - DNA, 405 bp, Homo Sapiens
aggaagagcacgcgacatttcgagagcacacccttattgtgacgatttaccgctgtgccgaacacgctttagagaatgcatcgtggcgcattataactatgtgccacaggcttagacccccgtcttgagccacaccacatacatgagggccaactcttgtgccttctagcgtgatgggttacactcgatctatgcgacctagggcagacggagctcaaaccccttaagccacccgaggtgtctatgaccggctgctagggtgcactccaatatgtatcttggactctgtgaagaccaatcagatttggctgcttaactaccgcggctgccggttgttagttgtgcgagatctgaacgttatttctgttgcatttgcccgcaataccttgagtcctcatgtctggt

SEQ ID NO: 298854 - DNA, 414 bp, Homo Sapiens
tgtacatattacatatgtacatatcgcataagatgaacttctgtatctttctattttctgaaagtctctgaccctgactcaggcagctagtcagatgacccatacattataacgtttatatagtttagcccacaagagatacccactgtcaattctagattgtttcagattttaagtctgcttgctactagtgaaattctcatatctcagggattgcctttaaaggatgaatgtgcagaggctcgtttcgctctaaagagaataagcctttgatatagctgtttggatatacaggggaataactatccagatagtactggctctagtggtatttacatcggaacaaatacgccacatttagaccatctttggccctgtgtttcctttgttctctttgatgtacatgcacttgcc

SEQ ID NO: 298855 - DNA, 407 bp, Homo Sapiens
cggtccacgcgcctgtgtgtactgtccgcgtcacagagtgtacagatgtgccctgtacaccttctgacatgtgagaccgagctctacacggtttcagtgacctgacctgtgaccatgtggtgattccagctcagctaccttcctgtggtacaccacaattacatgttacacacacctggtctgtcacagacccttacaccagggcacacacgcaggccgtgtgctgtcagcctctttgcttgtgagaggtctttccagacgtcttgggccaggggtgccctgcggctcttcgtgtaccctaggcacatgcaccagattccgtatgagtcacgctttgtgcacaagggtctagacccctctggactgttccatatagcaagcactaagggtcgggtgtttggtcttcg

SEQ ID NO: 298856 - DNA, 369 bp, Homo Sapiens
cgtgagcgctagcgtgctctgtgagactggggaaagtagtctgagcaagctctgcgggctgtattttagagctctgtatcgtgaggacatgtgcagagcacagaccctgatgatacgtgtatatgacagctagggtccttctgtactgtggccctaactctctggccggactttccagatctctgagagcttcaactatatgggaacgaattggataccaataggtcaccgtgagggcccaagtggctcaaagacctaacagggatacttttcaatcagtgctggaaggatgcgttatacctgtctgaagctacgtcatcctttggcattgatgtctcattgggtgtggaacatgtcacgctcatggtc

SEQ ID NO: 298857 - DNA, 347 bp, Homo Sapiens
attaataaagcaagtaagcattcctatcactaaaagtacttaaaaaaacaaatcaagcttaaacttacaatagggggtgggagaagtgaattaactttttattttcattagtgcgtgctcatgtgaaaggagcagttaggcaatggagtgttaccactgcagccaggcaggtctagtgtagattcgtccccaaaccatggtatttgccaggcagctctgagggtatgaacaaggcatgtgcattgtgtcctgttgtgtgtaatgcgtttgtatgaagcagattctgtaagaagatgatgttggctgagatgtgggccagctgtacttcactgcttcattacaagggt

SEQ ID NO: 298858 - DNA, 368 bp, Homo Sapiens
ctaccgccaccaacatctaaggactgtcatccatgtgcaagcagaccggggacttgaccaatgacgcacacagcgagacctaggaccatgaccgctttcagctgtctgaagcatgtgcatatcagggcagctgatttcacagaagcatgccagcaagtatggacaattgctgtgaccttagactgagatacgccactgtggttacgtgcacttatacttggacttcatgccatgcagaacctactcttccacatacccttcctgacatatcgtctgtgctatatactggagcactgacgaacctgtgccagtaatgcatgagacacgtctagactgaccatgagactgagccgcatgtgcataggctt

SEQ ID NO: 298859 - DNA, 343 bp, Homo Sapiens
gggggtttcaacatgtactctgcggacagtgcgaatatgtcaatgctcgacagaggagcgggacaccgtacctcagaatggttatatatatataggacacgggtcgtgacagagccatcacacatgtatctaaccccgttggacaagattatatgagtgagaaagggtctgcataggattcagatctcccttgaggcaggtatgttagtgcccagatatacgggtgagactacaaactccaatatgaagacactgatatggacctgatataagaatccttggtcgctatagtgacactccgagaacttttgtaactgggccacttagggtgctaattgtcttc

SEQ ID NO: 298860 - DNA, 377 bp, Homo Sapiens
cacagatatagatattatctgcgtctcttagatataccaattgctacctatcgctttctaccatcctcttcttccctcttggtttcacttgactttttgttattcctggtctctttttatctttctgatctctctgtctcctgggttccattttttaaatgtttaccactatgttgacctgttccttcccttcttctccactgacttgcggatgatgccttccattactgtcgatggtatttacagtccattcgtcacgcatgtctggctaagtagtctcgcgtatgctgttgcgctattgactgtatacgtacatggctgtgtctgctatgttgctctgtctggtccgagcttcttctgctacgtcatgtccatct

SEQ ID NO: 298861 - DNA, 742 bp, Homo Sapiens
  misc_feature (469)..(625): n is a, c, g, or t
  misc_feature (699)..(699): n is a, c, g, or t
  misc_feature (716)..(716): n is a, c, g, or t
gataataaagaagagtcagaaaagcaaagtgaattagctagccaataaatgtgtaacactctctaagactacatttgcaagcccatgtttctgcctagttttgttgggtttcacaaaaaatatgggtacttccaaagaattttacagtcgactggggaagggctaatgtgcaagaaacaattagagaactctatgtgacagatggtatataattagaggtgaagtggtgcagtgccaggggagttatgagaggagagagattctgctctgtgaagttttgatttggcttgggtggaactagtttagggaggggagaaggcgctggagaaaccaagtagaattatcatttctgttgggagccttgagggcccagcattgaatcccatgacagtggatattgtgcccaaacataagtatctcatagctctctgtcttatagtacagtggtgaagagccctgaccctggacnnnnnnnnnnnnnnnnnnnnnnnnnnnnnnnnnnnnnnnnnnnnnnnnnnnnnnnnnnnnnnnnnnnnnnnnnnnnnnnnnnnnnnnnnnnnnnnnnnnnnnnnnnnnnnnnnnnnnnnnnnnnnnnnnnnnnnnnnnnnnnnnnnnnnnnnnnnnntactgaatgcctggcatggtaaccacaacattgttagctgttattatgacaacttttgttatattatcaccttnctcctgaccttcttgangtggtgaggtttatgcccagtggatg

SEQ ID NO: 298862 - DNA, 524 bp, Homo Sapiens
ctgctcctccatgaggggcatattatttcaagggtattgcttcttaaaaatcttggaaagcctacgagagttgaaggcagcctcgttttagtttcattatgctctgttataaatacatatgcgcataaaactgcttctctcttacactgtttgaactagaaaatcagctctttaatgtaggtgaccacttataagcacaaaagaaacatgtatagaaaaccacatctaagggtgttaaataaaatgtaaacagctcctatttggtagagatgactcatggaaaaatagtgtaggctgggcctgcacgtgtaatgatgagatcgtatatcgcatacatgtgtcacttttaaatactaagtccacacaagcgagccgaatttttagatgacgacgtgcatatataactcgagaatttttgttatctgttgttaagctgaaatgtgtattcatctatcactaaatagcacatagcctttatttatacgtgctctgtatttgggtcacagagtaataatacctcatct

SEQ ID NO: 298863 - DNA, 710 bp, Homo Sapiens
  misc_feature (134)..(134): n is a, c, g, or t
tgcccctcggtggcagcagtatacatcatgggtgatctggcgcagcagacttgtggagcccatgatagagatgacttgcccagcttataaccatcgtggtgtgcgtggaccgcgtatacgcatgccactgcttntatgacacactgtctgagcagggagagaatgctcttcaatagtgagcactacccactccgctcagaggacagacgactagagagacgcagttctaggtggaagtaagtgacaacgaaacccggctcctattcgtggtctagatgactcagtggcaccatatcgcacgcatgggcatgcagtgtgtatggataatgaccgcacatgacctactatgtgtctctagcccacactgatgccacgcgagcgcgccgagacccttggacacccaagtgcggatggtgctcgagatattgtgttgtgtgaagataacgctacacgtttattctctttgactaaactcacatcgccgcgtggagactgtgactacatgtggacacagggttgtaatacctgctttataaatgcactactgtgacgtgtatattactaagactaggttctccgcgcactgctgagcatacacaacctgggggaattgttcatcatgcacactttttgatactctgccttccgtatgttggagcccacggtagagggtgacggcttctgtctgagcgtttgataatactggagtg

SEQ ID NO: 298864 - DNA, 702 bp, Homo Sapiens
tgcccctgcgggcagcagtattcatcatgtgtgagctgccgcagccgtcttcgtggaccacatgatagaacatgctgctctcagctcacaaccatcatggtgcgcagggacccgtagacgcatcccaccgtgtgtagagccactgtctgatgtgggagagagctactccatagtgagcactacccactccgctcgaaggacagatcgacatgagacctgttctcagggaaggggtgacatcgatacctgctgcattctgtctgagtgactcggtggatctagtcgtaacatgggaatgctggttgtggcgcatacccgacatgacatactatgtgtctctagcccacactgataccacagcggcgtgtcggatagttgcacacccaagtgcggatgctgctcgagttatagagctggtgaagataatgctacacgcttatgctcgttgactgtagctaacatctgcgcagtgggactgagactatcatgtggacacagcgatgtactacctcgtttattacaagcgctgctgttacgtgctctgtatattgtgagatattgttgtaacgcggactgctgagcttacacaacctggtagaatggtgtatctgcccacaaattgacactctacctctcgaatgtgtgacacgagagtagaagggcacgccttctgtcttgaaacacgtgtggctactggggtgc

SEQ ID NO: 298865 - DNA, 719 bp, Homo Sapiens
cagacttggtgggggagcttttgggagatgcaagaagctcagcttataaccatcccaagcatatgtgcactgactatatagacagaggtgcatgtgtgggtgtatatatgcacacacacactctgtatattgtgtctgtgtgtgtgtctcactctctattactctctaataaaagagactcagtacactcctgcttgctagaagaagctgactaggcaactctcatgggggttcccgatagtatccatcacagtcccaagactggagttgtgaggaactcactggagcacaacactgatagcgaactggtgagagcgcgtgatactagctcacctatagctagagctcttgaaaccaatttactgagaactgatgcgctgaaagttattgacagacagactaatgtgccaaaagctcaagggcgatctgggtgcgtttatatccatatacaagtgcgatactgttttgtcatgcgctggacattagacgaatttatatctatacatccaagagtacttctgagctcttatgagcaacataaactgatgaaatcagcacaactctgtcacagatgagactgctggctacaactatagacgtgtgtccctatagtatccaccatgtagaaactcttgttgggtgaagctgctagcactaactacactcagagcacacattctagtggatatgttttttgtgtcttaatactatcacccctt

SEQ ID NO: 298866 - DNA, 545 bp, Homo Sapiens
gacagatggaactagaagctagtctttttacccgatcagtttacactgcttagagccacgacatctgacacaagccgtcaatggtggcaagacagctttgaagctcaccgaccattctcaagacacatgattattcttcccatcactgtttagctccagctgcttgagtacagaaaccctacatttagaccctgtccgattagctgttgagaagttgaactgtggcccaagctcatgtttcttagtccgtgttcactgaataaagtccgattccggtttatgtatctgcttagtgacatcaaatagggtacgagcccatctttagagcaaccgtctttctcacgagcatgagctcaagtcttcgagctatcgactatctggcagaccccctcacaggacgtatccatgctcttgataattatacttgctggaatgctgctaggttctcacagtctgaatcagtgtaaactttctcagggttatagcagtaaccttatataaggtaccaatcttcaagacgtcctagtgcagcgccctctttaggt

SEQ ID NO: 298867 - DNA, 718 bp, Homo Sapiens
cgagcctccgtacaacaatacccctgatggagtgatgggtggaagaggctaggaatacgcattgagacggattcgctgcctggtgtattataactctgatatacccggaatggatgtgagcatcaaccatgcttctaccctacactgtgtattaggagagaataggtacttaaataataatcacaacctataccctcaaaggacacatgagagagagagcagctctccggggattaataaaatagtaaatagttcctatcatggcagaactgacactagtggaagacatgctatagatgggagtccacagctgtgggtctcacactgtatctctttcatttcttggagcaactaggacctcgtgagcacataaacatatagaggtcacagtgcagctatagcccgcatactcccttccatgaagacttacctacaacctgcagcttgtatgtccaaattaaagaggcgcattgtttagacagacactgtaatatgtacacaggggtatcccatctccttttaacactcaagagcactaatgtgaaatgttatcgtgtgtaataagacgcacacttgaccagatacagagtgtcactatccaaacttgtaggcgtacatagatgcgcgctctaccaaatttatctgagcaagatacacactttcgaagtgttactcacatagcaccctctctgaggtgcaattttgttgtacgggcggg

SEQ ID NO: 298868 - DNA, 287 bp, Homo Sapiens
ccttgtgagcgtcttacctacttcgttccttttactctatttctacccgttcttctgtctccttccatccatcacctatctaagtgctctttctgccatgttgttttcttgactattgtgcttaccgcttctcttgcgctcatctcttcctgctcactctcatgctctctcctttccctcatgtacctttacatactgccccgctccttttccattttttcgcttttgtcctatttcctctgttttgggtatttctgccttctcatgaccagcttttgtctcttttc

SEQ ID NO: 298869 - DNA, 386 bp, Homo Sapiens
gggtaaccttgattaccctactgtagctctttagctcggattattccagtggtgcgtttcgtccagatgcacacaagactgagggtgctcatccgttcaaagatatgcgtgaagactatttccacgtcttggtgttgactgcctttgctcagcatctctagcagagtccatttgacgatcatggttaattcgcgtgtgaagtgactgaatacgcctgatcctgtgtagctgatgagtcagatgcaaattgagactaatgacttcataccctgactggagaccaactatgcacagatgcaactcttattgacacctatggagtggctgactgctgagctacacatgagcccgctagacaggcgctgattgcatcacatagatgacgc

SEQ ID NO: 298870 - DNA, 656 bp, Homo Sapiens
  misc_feature (524)..(524): n is a, c, g, or t
  misc_feature (593)..(593): n is a, c, g, or t
tgtatatggatgttctggatgactatgctatgcatatgcctatagcagtgctctgatctggaataaacatcgcttctttgtgatccattctctgctatgttgggagacagaacaaattcaaagtgggatagagactcgtactctgcttgatataaacatcagctttttatatgctgtgagacactagaagagctcttaaataaaggcatacttagttaaataaattaatatgacatgcacatactgcatctggtcctggtaatggtctcaacagtgaactgacgattagcttattccacagtattaagcaaacataggcatcttactatggtatataaaacagccttttcctgcagaccagctgttggatcattatttacaaagatacccggcatagtcatatgacaattgtgtaaagtacacttcattcacgagtaaatggcttgatgacaaatcgtataatgaaaggtcatgtgctatggttcatgtcttgccagtccgagccatttggtgcatcatgcagngtagatacacctccagtcacaatgagctttgagatcatgtcttggagcacattgatgaaatctcacgtntctacataaggattacaatgaaattagcactggaccatggtaagcatcgaagacctgatcccc

SEQ ID NO: 298871 - DNA, 394 bp, Homo Sapiens
gtgaaacgttgatgcttgtaatgcagtgtcttttgaccgtgcatctgtgttcaacagttggaaccgtacttatggtatccctgtacgttaatatgcgtaccaggttatgaatgggacctattaccacatgtagtgcttggtaccagctttggcagagctctgtatatctgctccctgcactgtgaataagaacacattgcacatgatctgtaacaggtgacactgtgtaagacgcctggaggccatatttggactatgactgatacatgctgatgaactttcgattaagctgacactgtatgacggatggtcgtgtttggacaactgtgatataggtagtagtcctatatgaacagctcacgctttgttggacatcggctgcacgtggggttgg

SEQ ID NO: 298872 - DNA, 309 bp, Homo Sapiens
  misc_feature (133)..(133): n is a, c, g, or t
gaaggggccgagctcccgaggacgcctggccggggctccggaagcgcaagttcacgccaaccgcacgctgagggttcaggtcaatgaccgttctcacgccatagagcgcagtctggatcaccaggaggggccncctggagtggacatatcctggtggtctgcggagctgtagttctaatgaaaggagctgtgcccaccctgttctcttggcttcaccccacaattgcagggccgcttcttgggcctggacccccatggggaggaagagtccccctcactacaaataaagaaagctggcgtgaccctggg

SEQ ID NO: 298873 - DNA, 369 bp, Homo Sapiens
gacgagtgcatggggcctgcgccctgagaggttgcctttccttttcctctcccagcctgggggtttgtggtgatgttaagttctgttaggaccaaggtggatctcagtaaggaggtagagtagatttgtgaacagctgtcggaggtagaatctttgcagacccagagtgggtgggtgtagacactttgccatgggtggtagctttatttgtaatcctcccagtgaaagctttgggaaatccagccctcccctcttgcctttcttgtaagactttctaagcgcatggctttgtcgtaagacttctcgtggccatgtgtctcaccctaccgttcgtctcaccaatgccagagctgggataccagcaggccc

SEQ ID NO: 298874 - DNA, 665 bp, Homo Sapiens
  misc_feature (526)..(526): n is a, c, g, or t
cttcgactaccccacaggctctcgccgcgttccatatcatggggtctcgcttgttccctcctttcgcgtgctctgtcactgcacttgcccttacattcgccgcgcctgacatacctgcactttccgctacaccctcagctcttacctccgtacacgcacaccgctctcataacaccttctttaactgtcctgatctctctgcgttccttctcatgtatacctcgcgaatacatgtactggtttccactgaactgcatgaatacttgataccacctttgtctatggactcttactgagatggtcatctgtctcatgattaccatcctgcgtacttgtcttatttaactcctgattttgatggccttccgcatggtttcgtctctcctgtgactctggatgttgtctctgtccttttcctcgatgcacactgcagcatgcgttgtcttataacgtcttgtcgctctacatgacgcttcgttcatcgggcacgtctatcactactttctgatacttctgctacttccgntgcagtatcctatagtagtcgcttttctcgaatatgttcgtgttacgtcgaacctctcttggttttacaggctcccaatctaattcctacgaagatgtctagcttttctgaaccagctttgtagagttccattttctct

SEQ ID NO: 298875 - DNA, 150 bp, Homo Sapiens
ctcataccgagttagatacatactgacacacaccttgatcttgctttgcccctccttctcccatcattccttcattcctccctgttctcccatgcctctcttctgctttattccttctccttcattgctcctattgtatattatttaccc

SEQ ID NO: 298876 - DNA, 393 bp, Homo Sapiens
tcccccgggctgcaggaattgggatcaagcctgtgtggagctcggtgagaagtgcgcaagatgcgtagtggacattgtggatgatgtgccaggagctggacgcctctatgcaggagcactctcgcaattaattgaactgatagctttacgggactgctgaaaccaacgagggaatgacttatatgatcggatctgactgcatggatgctagagtggtgcttcatgtatatgctgcaattagtgctggacggaccttctatgcagacagtggactctgtaggataggcgcatgcgtccttgtcacgaggtcatgtgatcatataatgggctagagaccgttattgaggctaggatagattgatttagtcacaatgtggttgcggtgttttttcg

SEQ ID NO: 298877 - DNA, 296 bp, Homo Sapiens
cctaagatcacactatctccactttctcatccctgttgaagattatcgtccgtgtattacaatgtgattggagctgtgacactctggaagctgagacgataaccatgctgacatcagcacagactatcctcgtaacattcccatgaatcccatgtgcatttaacggttcgcggataagaaggcacatgatcatgagggctcagatctgaagatccctgttgcctccaaccgtcgtttctgtctgggcacggccaatttccgatctgctaccagtctctatcaggctgggagattac

SEQ ID NO: 298878 - DNA, 1042 bp, Homo Sapiens
cgctcgtggacagctgacctctgtctttcaacctctgctgtggtcaatcccatgacgcacctgcctgtgcatgccccagtagcaagcaccagtgcagcacatggcaagtcccaaataagtatcactctaaagtatccatcctacactcatatgtgattgatcaatcctgcacacaatgttatcatctgtagggcagccagcacacatgtgtggcatcccaagctcacattgcctccagcatcccgccaatgtacaccatatcacctggtgcacaggcttgatggcatgcaagcactggcgccacacgcaaccaccacatgcattgacagaccaagtgaccaatcaccgcagtggcaaccctgacacacacacaacctccagcctcatgtgctgaaacaacttgcgtgcgatcaatcatcctgtgggtgcacatgtgtggcattcttgttgtacaacccacatgcagtgacactacacattgacaattcaatgggaaccactgttatgccttgtacccaacataccatgatgcccagccttgctttccccgatgactgtctagccactttgcccccattgatgacgcacaaattgtaacatgcccatgaccaccattgcgtctcttggccccgacgaaagcactcccataacaccaatcgcataacgtgtatcaagcacataaccatctaccagatgtacaccaactacaatccatgagatgaatgtgcaacatgatcacgcactgaagaacaccatgttgagcctacgcaagccacacctgtatacccatactcacactctaccccttccaccatatggcatggtcatccacaaggtatccacatggacgcacacaaccctcactcttctatcaacagaaactgattcacatactacggagaccacgcgcaccgatgctcacagcaaccatgactacccccccctaacggccacatctatgaagcacgacacaccgagagcgatcgctacctgtaactatgacaactacaccaacgcgcgtgttacctaaatagcgcagcag

SEQ ID NO: 298879 - DNA, 197 bp, Homo Sapiens
gagagcgaagaaagcaaagacagccaaagaagggatagaggataacacctagagcgtaatcagaaacataatacaggtatgaagaaaaaggatcaagataagatgcaaaagagtgaagacaagtgtacacggattcgatgcaagttaaaaaggaaaggataagagcccaaacagaagatatataaagaaagaaacac

SEQ ID NO: 298880 - DNA, 356 bp, Homo Sapiens
caggcacacagtgtgtgcccctcactacaagtctgagttgcagggctatagctgaccaagtagcagagaagtctttatatccaatagactgctaacagattaggatcgaatacttacaatgtgagtgaatgctatgaccaggcctgacacatcagaatggaaacatacatgaaccactcctgtgagggctggagccttggggttcaggaggaggatacaagactacaggcatactgtcaggcttgctcgggactaggcacacacaggatggcgttataaagagtgtgctgcacgactgacacgccatttacatcagcttcatcactttgcttgctctctgtaacatcctattctcc

SEQ ID NO: 298881 - DNA, 374 bp, Homo Sapiens
tgctagcatgggctctactgacatgctgttagataccataggagccaacctatcacaatcctagtagcatatgaagactcacataatagaggctatttacactatagtggcgtagctctaggtcatgattgatttgctatgcctgtcatgactgattagcaagtaatcatcgcagatccatctactcactattgctggcttttgaattgcaccagaggatcccggaccccattacactgtctctcttgatcgtgttaatgatgccatccagatgcatgacaggccctatgaagtctgactgacctgctatgcagacatgaatgtcttcctactgtgctctcacttattcgcggccatcacgggagtgccctgcg

SEQ ID NO: 298882 - DNA, 670 bp, Homo Sapiens
  misc_feature (595)..(595): n is a, c, g, or t
gcgtgccgcatgtattggacacagaatggcacgttcagtgtgcgcgcaggcatcgggtgggcctcaggtgagaaagcgtgagacttcaagtccgggagacgagtgactggtctgtcattgtacaataacttcactctctggggtcaacttaactagctgtaaggcacagtcagtatctaaactgatgttcctggcggtcgatgaagatcatgtagtactgtttatggtacagatacggagttcatgctgaatatcactgtcctgtacgttcggtaattgaaagaactgcgtacatagctgtatgctagctactgtgataagactggatgaaatggcttctcatacagacaatgccctaacttacattgactgattcgatccgagacacttgcactgtccggagttcagtgtgtcatgactgaggacttgtgaaagcctaggctatagagcctagtaggagacactagcgggtagctgtacatgggacatcgtatcatacacgtgtgaacacgatctgcgtgcagcatacacactgtggcacacacggacgcaacagctatatcagtgcttactgagacgtgcactagtctacgtntcaatagtgtgtttgcaccagtttcacaccgcttgactatgcacggtttctaccaggggctatattcttaggcct

SEQ ID NO: 298883 - DNA, 659 bp, Homo Sapiens
gcatgccgcaggctttggacacagaaaggcacgttcagtgcgcgcgcagagattgggtgggcctaaggtgagaaagcgtccgagttcaagtccgggatacgagagactgttctgtagttggacattaacttgaatcactagggtcaacttaactagctgtatagcacagtaggtaacgaaactgatgttcgctggcggtcgatgaagatcaagtagcactgtttccgttacagatacggagtccatgcagaatatccatgtccggtacgttcgctaattgtaggaactgcgtatgtagctgtatgttagatactgcgatcagaggagaagtctgacatagtcataccgatatagccctaccttacattcgctcatgcgatccgagacacgtactatgtcaggagagcacgatgtgcatgactgaggacttggacagcctggctatagagcctataggagacatccaggaagactagatgggacatctatcatacagtgcatcacgtctgcgtgcagacgcacaatgtggcacacacgggtgaaacgtttttgatggctatgagacagtcacgggttacgatgaaagtgtgaattgccgcctttcacacgctgacatgcacggtgcactagggtttatcttcggactttcaacttagggc

SEQ ID NO: 298884 - DNA, 612 bp, Homo Sapiens
  misc_feature (214)..(214): n is a, c, g, or t
gcactctgcaagcgctttcctgagaaaggcatgtttagttagcgcgccaagattgtgaagccctaaggtgataagccgtccgagttcaagtccggcatatacgaggctgttctgtagatgcatatgaacttgagccactagggtcaactcacagagctgaatattacggttgctaatgcgactgaagttgctggcggttagtgaggtatcatgngtacgccaattgtaggaactaggtagtttgatgcatagtgaatatatcgctcagaggacaagtctgccatagtcatatccacaaaggcgtacctaagagatactgaaacggtccaagagacttactctgacagctgagcacgattgcattgttgaggacttggactgcccagcgaatttgccgggaggagacagcacgtaagactagatggaaccccgtatcatacagggtcattccgacaaagcacagacgaacgatgctggtacacacggttcaaacgattttctgatgcaactacgacgttcacggcttacgatgcctctggagttcccacttttaacctgttgatcttcatgacgcaactagaagtgtataatcaccggtgcttccacctgatg

SEQ ID NO: 298885 - DNA, 644 bp, Homo Sapiens
ctacactgcacgcgccttcctgagagtgactattttctatatcacggggtaaatgttacgacgtaaggtgatcagccgtcagactgtatgtccagcagacatggttctgttcactagatcctctgtaactagagccagtttggtcctgtcacagcggtcctttcctggtggcatatgcgccgtatcgctgagtgcgttacatgaacgactgtgaaggatcctggactgtcagatatgtcaacggttaatcacagccgtcttcgataggtccgccatttgctgcaacttagcgctttgttctgtacttcactcagacgtatgatgcactactacgtcataatgcgtgctctcagagccatgctcatggcatactaaacggcgctgacagactgaccatttgagactgcgctcacttcagtgctgaggactcggactgctccctgcattgccggagcattatgcaagctgcactagtatgaacagcatatcctaacaggttcgtccctctaggcttatatgaccgatcagaattgcagtcctataaatgtggctcatgctgctacgagcaaggctcctgatgcgtcttgtagtctacactatgactctcttgatcttccgagccacacataggtgtatatcactcg

SEQ ID NO: 298886 - DNA, 610 bp, Homo Sapiens
ctagactggacagaccatcctgagagtgaccatgttggatatcacgggctaaatgtttcgttggacggtgctcaggagaccggctgtatctctaagagtgatgcttctgtctactacgagcttatcgctgtatagccaatttggacctgcaccagcggtgccttactgatgcacagacgccgtatcctatactaccttgtttaatgactgtgaataaccctggacagtcagatatttgccaggttaaacactgccgtcatagatagccctgccatttctaccacattgagcgcctgatcagcagcttacacacactgtatgtgcgctctacgtcagattgcatgtacgcagagacatcctcatgcataactctaaggtgctcattcctgaccatctgagcctcattatacttgaaggatgactcacacgaactccccttacacgatctctcggggcattatgctacactgcaattatttgaacgctatagtaaccactgtggggaatccatgcctggatgaccggtcatgctttgaggtcatataccgaggcctatattcaagatcttgccaggcccttctttgcctagcactcgcttgtgccccttctg

SEQ ID NO: 298887 - DNA, 445 bp, Homo Sapiens
gctcaccctcctaagttcctcgcccatcacccgtgtacctccatgttcttcccctcgctgttcacctccagccccttcagtccagattccttccttttaatccctgtccgctcacctcttctgaccttgaactgtctgcctcgctcctgcttctcagtcctgctcactgactaggcgttggctcccactcatgtatcggcttcttacacctaaccttgatgctcccccttttttcctagcctcctgtctcattagcatcttgacctgccttggagcttactctctttaagacccactctcactatgtctccattctcttctgaatcttacttcctggactgctgcctgcctctcaccgttcttccctgtgatcctctcctcatggctctctcctatcagtgctagatctcaccatactctgttccgcctagatgctctccccctc

SEQ ID NO: 298888 - DNA, 647 bp, Homo Sapiens
ccggagtctacagacacacctgagagtgctcatgttgcatctcatgtgcctcatgtttcgttggacggtgctcaggagaccggctatatcactacgagaggtgctatcgactactaagatttatcactgcatagcccattcggacctgcaacagcgtgcgtcttacttatgcagagtgcgccgaatcctatactcgcttgtctaatgattgtgcatgacctcttacagtcagacatttgctagctccaacactgccgttatagatagccctaccatttctgcctcggcgggcaccttatcatgtgctcacagacactgttggtgtgctctgcgtcatattgcatctacgcagagatgtcatcatgcataactctaaggtgctcattcctgaatatctgaacttcattacacttcatgcagactcacacgatctccctctcatatctcgggtctttatgcgtcactgcattacttacacagttatgttgcagattgtcggccatccgtgctgcgatgactggtactgatctgcgcgttatatacagagatctactatcaacttctactggcggtgcttctagcaacatatagtgtagtcatacacgaagactcttcagatcttgctggcccttatagcgtgtagcact

SEQ ID NO: 298889 - DNA, 647 bp, Homo Sapiens
gcgtggatgacggccatccgatcaactaaccctggacagacagtttgcggaatacaataggcacaacggtccggtttccaaaaagaggaactgtagttgctgtctttggggatatgccacttgaggctggtaatatatacctctccccagaggtgctacccagaagataggacttctagcatgtctcccagaactctgttacctgtcctataaccccactcctctaggtggtgccagtatttctgtgggggatctttagtagatgagcagtggatactgacttgccggggaggttctcctcctggtgagcctgccttgtgtttggagaccaaatctcatgccacattaaactttccccagagaagctaacaagggagctctagatgcaagacactgagagtcacaaatgacctttaacagctttgtacccaaccgtatacctttcaccgactatgaggcatggttgaccaccccagactaacgtcttggaaagccaggcttacatatcctccaattacccaaaatgatttgtggtgccttaaactgccagtttttcctgttttaatcttgaaatgtaaagcctttaccaccttttgggcccaatgtttctttcgcccttgggttttttttcccccacgggacttttg

SEQ ID NO: 298890 - DNA, 677 bp, Homo Sapiens
actctgcaagattgcaaatcattactgcactatgtctcagggacccatatgcggccgttcaacctcacgcgacttgtagagcacctggtcctagccaacttactgcctgtatagaatcagcatggacagcacatggaacatgcactgcacacacgctgcgtttgtgtcatgctaggtacctgcgcaactgaaatagatagtacacatatgtggtgtggcgtgatggactacctgtcatttgagggaagacccacctgtagggaggattacgagagactcgaaactgagaagatcattagtgtttacttttcatgtcactgagaggtacaacagagggcgccgcactatgtgactgaaccgctgtcatgagcacagtgtcaaagacacatcctttatattggtgacattgagacatgcccttaagagccaagggcagccacgtatggggtccatacgctgctatctgctgtatctaatggctgctatgctgacaggccttttgggcctactctagggcagacactgacgcagatcgccttatctcagtgccttgacatgtcacagggcgcctgacccctatggggagactggagagaatcctcccaggctcaaagataattgtcttttgttcctatcacactttaccagaacttttggtcttttggggcccgccctgt

SEQ ID NO: 298891 - DNA, 418 bp, Homo Sapiens
ctgtcttatgctgggtcaaaggtggccttatcgctacagccttgaattgctcactgttggcttactaagggcccatatgctggtacagatctcacttccacagcctggacctgagagggctatcactgccacaagccattgtcctgtgaccttgggattctgacgtggtagaatacttcgtaagccaatgttactctgcacttcctgtccggacactactctttcaatcaacggttattctacaaccgcacgatgtcagagttggcaagcacgcgatacctggacaacactgcgggaaactactcaggctctggggacggccggcctagctgactgaacgatagctcttaccgatgatctcagcatccagaccttgcctaccatactgaatatctttgacaatcgatgtcggctgtgc

SEQ ID NO: 298892 - DNA, 626 bp, Homo Sapiens
  misc_feature (228)..(228): n is a, c, g, or t
ccgatgcacgatgataaattcttaatgcataatgatttaaagagctttatgcgacagatctatttcaggacgcacctgtcccaggttagaagaggcatcgttatgcatagttgtttggtgaagagcatgcaatgaggcaatgaagacgatgcctatgtcttgctagccgtttctactacttcagacgggggaagagagagcttatatatcgtgtcctgctacaggtgnaaatcttctctttgatgttgacgccggaatatgctctcttgccgacattttcactgttgagaccttctctatcccacttttgggaggctactcctatcaggtggtcccgcgccccttctgtttgtgctcatgtcgtgaactctggtacagatactgaatgatgatcttggagactggatcatctctctgtggagccatcaaatgcactcttcatccagacctacttttgcactctctggggatataacgcatcacttggcaacaatgtcctgtatgctctcgtccgctgcctatgctggatgctccctatgcgaagcgttgaatttatccttgacgcggacaacccatggaatatgtggcaaaccacctggatgccctgaagttccgtgccgtgtcct

SEQ ID NO: 298893 - DNA, 277 bp, Homo Sapiens
cgcaatgcgggcatgcctatctgctcgtaggtgctgtagacaccgcataccttgtcaagcgtatcggagacaatcaggattgaatgtgtattagactcgaggcatgctagtgagctgagatggcgttaatatctgctgattctggtgagagcatggatgcatggatcaactaagctgacgcataggatgatttactgcgtgtttttgcatccatatgcgatacggtgtcctgggtactctgtcgagctgttgctgacatttgcctggacatatggtc

SEQ ID NO: 298894 - DNA, 404 bp, Homo Sapiens
tgcaggaattcggcacgagatgagagagatagtgatagataaaaattaattcaagaaattatgggggatgaacttaatgattgatatgtaaaccctattgattgagtaatggtagatctagcctacctagtctaaaatgatgattaatccttaaaatgttctttaagtactcaactatatgagagcattttaattatgcttattagattaacaagtttaagtgagaaatacaggtgttatctatttataatatcaaagttaatattgactttcgaatagcatgaaacagatggggaaatatgccattttctaatgtagatgctaatatcttatctgtatgagttcattgaattctatggttaaatcttattttgtatttaattaaattatctttccatatggtc

SEQ ID NO: 298895 - DNA, 740 bp, Homo Sapiens
cctaagcagagtgattacaacgttatcgaagcatacttcaacagcttggtgggggtctacctccaggattagtacacctacctctatgtcctatcacgatgtagacaccgatcatattctctatataagacgcgatccacgttttcagataactgaccccgcagacccatgatgactactagcgtctccttaagacgcaaaaaccgagcgacctaccaactctctttcaagacatcaagactccatcttacgatgaatcaccttctaacccagcacaccataaaagctagtcccgccctggcaatataattgtaccacagacttctgagctctatgccctctgttctgcccccacggaccccgatatctgcaacttacatccgactcacttcctagatcagtcactgattcttattgagaggatgctggaacacatgacctagatacacaggctcctatgactgaacgctgtactcaccgaggctccaatttacaagcctatttctacaaacacgtgttagataccttctcgatgccaaacatttttgtaagggcacactttcgaaggaaaataaacccactgacttagccattttacatcacgccaatagacagcttatcttacctattctaacaagccctctgtgccaactccaaaacaatgctttctgatgccgaaagatgaacaaaactctcttgagtttacttggcagaggttcactccgaggggcgccttgtcc

SEQ ID NO: 298896 - DNA, 716 bp, Homo Sapiens
cgcaaggtgaccatgcagaattatgccctagcataggttaacaaggtctaacacggtggaccttccgcataatgaatggacagcaaatagctatccagggggagccgctgctcacacccctgaagccgaactagctgcctaagaacagctaacggagcccgctgagatatgaggctcagttgaggcaagatagataggaagcggcgacgaacctacccagcctgccggtaggatgatggccacgatggtaccttagttgacatttcaaaggaaccacagaaccatctatatcctctagtgaagttaactggtagctctaagagcatcagctctatggacactatgcaaccacctcgcatagagagagagaaaatgaacacccataggaggcctaaaagcaggcatcaattaagaatgtgtgcacactcacacacactagctagataatgacatacataaagctgtactcttcacacccagttggaccaatctatcaccctatggaagatctaatgtatgtacaagtaaaaagaaaacattctactgcgcataagcctgcgtactagcactgctctgacattttaacagacaataattacaatgaacgcacatggtagtagtaccctcactggaggtgttgcccgggaccccaattcctcatatactgggtgctgtacaattcactggcacgagatttacacgcggggcggggccgt

SEQ ID NO: 298897 - DNA, 407 bp, Homo Sapiens
ggtctcttgggttccggataggtggcagatgaggaactcccagtagaggggccggtgggacgctctggcttgacaatcgtcctggccactgcagtgcttgtactgaccgctctgggcatggcactcaggatggcaaaccagaggtaccagtggcccagtgattatgtaatgcacatatgtttacacttgaatatgctatgctctaggactgcatgaattacgggttacaacagcggtcaaagtcaagcctcaaactatgagctgatacgagctcggaagtctgccataaagatcttacatcacatagtgccaagtaggttatcgagtcgtgcattctctatgagtggtatgcttaagagagccttggaggcattctcttacctgactttacctcatgtctgatttct

SEQ ID NO: 298898 - DNA, 163 bp, Homo Sapiens
acctgagggaactggactgacaccagctgggtgacagtggtgaagagtgaggtctgctactacagggactaactgtgcgctgcgacacatgcgtgctgtaggatgtacaggtgacgctgaggcgtggctgagtgttagctgagtatgcctgaggtccagaggc

SEQ ID NO: 298899 - DNA, 553 bp, Homo Sapiens
  misc_feature (449)..(508): n is a, c, g, or t
ctcgttagagccacattccctgttcttcccttacgccttcatttccccctgtgcgtcttccacctctctgtgcgctctttcacgacccttactatatttgccgccgaccccattgttcctcttcatgccataagtgagtcctgctccggagacattctctacttggtctttaaccgcctgtgtgtctttcatccacattgctctttgctgtacagctctttccctatcttcccaaattttctttgctctcaggctactcgtcatatcgagcttcctagcgtcatgactacctatccttcatagcccacatttttgctctacttttacctctacttgccatatctgcactctctattttgtgctgcacattccttggcgcacttcgcgtgtctatctagtctctcggcaccttcaagcctccgcttatccattctaatgagagcgagccnnnnnnnnnnnnnnnnnnnnnnnnnnnnnnnnnnnnnnnnnnnnnnnnnnnnnnnnnnnncgcgtgtgccttgatccctttggcctcctttgtcgtttcccttcg

SEQ ID NO: 298900 - DNA, 248 bp, Homo Sapiens
ctgtacgaatattgcacgagacgtgattgagggccatacgctcatctcactctatacagagagagtgcgatataccaacagacaacattattgccatgagtatctattgaaagatccgcttatactgaatgtcccgccaggcttctagttctgtgcatatggccaacacgcggctctaaagcatcgatgggcaccctggttcacccacaggatgtataggcacacctgctccttaagctctgatgctg

SEQ ID NO: 298901 - DNA, 255 bp, Homo Sapiens
cgtataagcgagggcaacaggcctcagatctgtgtctctaagtagagctctatgaaacctctccacagtttctcactatatacgcatggctgagactgtgggatccttcttcatggctgtcatccacagcttaaagaatggaccgcgggctacacacttatttcacttcattggtttcaaccgtgtcaaaccaaggccagatgatggaatcactcatagcgatatgattgccaccgtggcacgttcttattaggc

SEQ ID NO: 298902 - DNA, 624 bp, Homo Sapiens
ccgggctgtaggagtagtagatcacgatagcgtctgtagagaggagaaacacaatgagcacatgtggcagcagaggctactcttagacaaaggcccacactcagaagcagaccccctgtgctctgtaaccccaaggccctgctgaagagacactggacctctgaggaacttcttacttccggggcttcgtatgcacaggaagacattcaccagaggtggtgacgccggtggctgggggtttgaggtgccaggaagtaagcgcatgccacatacaagctgtagaccccagaggccctgcaggcgcaacaggaatgggctgtcaggttggcggctctgtcaacgggctcaatggcctgcatgtagactaccggaccgcgaacaatctgagtctgaccggcccacggaccaatgtgaaggaagtcatggaggagttagagtgctcagattctgtgccttccaagccttcacaggcctgtggctgagggaagccacaatgacacacagccatgcgtagacacaggatgccatgcacaaggataggattggacatacgcagactttacgcacatacatgtgtcaagttgagagttatacactgaatgtgggagcccgtatcatatcttt

SEQ ID NO: 298903 - DNA, 369 bp, Homo Sapiens
gcacgagggcaggtgatgaacggaagtagatataatgcagcttagtgacctagcacctgtaatcctgagagaccagaataactttacatcatagcaggcggggagacgagagattgagtatgaggaccaaggtcgtgggtagcggatcttcttagatgctgtcacctattgatggggggaacagagatcatcttacagcttttctgagagaaagaggcatctgcagatgacatgctgcctctgtaagtactgctgctagctcttcatctgccaagtggtgacaatgcagacgcataccaggaacacgtgtacttgcatgttcagaacttatgatttgtcaacctgtcctgtgcacgaggctatggttcg

SEQ ID NO: 298904 - DNA, 240 bp, Homo Sapiens
attggcacttgcttttttgccggggctttttttccttcccaaaaggggtggagtctgggaccaagacaggaatgtgttttggggaaagaccttggggttggggacccctagaaaaccgggtgggggaagcccctttttggccttttcccaaatgggggttaaggaggaccccttaattttaggggccttttaaaaagggggtattttccccctttttggggggggaggaaacaaaaaaac

SEQ ID NO: 298905 - DNA, 587 bp, Homo Sapiens
gcctttggcaccatggagtgcgtaacctatattacccttctttgtctctgtagctcggcttattccagggccgcgtttcgacgggatgcacacatgagcgaggttgcccagtggcttagacgagagcgagaaggtccagagccttggagctgacatgccttcgctcagcctcttcagcagtgtacatcaggcgagcatagtgcaatcagtgaatgaagtaactgaatttgtacagtcatgagctgctgatgagtcacctgcaactctatgggaaacctatgatgaaatggatgactgctgtgcataacaagaacatgcgagcaacgcatgcttattgcagcacaaagatgacaacccatagctcccgcgactggcgagaccagaggatgacgttatgtcactgcttttgatgaagcttgaaggacattcctgatgaatacttgactgaaatcgtgagaagacatcctgactttatgccccggaacttcctttctttgctaaaggtataaaggtggctttacagaacgttgccaagctgctgataaagctgccttgctcgtggcacagctcgatgacttcggtttggg

SEQ ID NO: 298906 - DNA, 229 bp, Homo Sapiens
agacagtcagcatcagtcctgttatgggcccatgacaagaggtggagaaggcgcggacggaggcggtcactgaggcggtcgcggaaatagtggaccgtacagaggcgactatagcggtgccgggaactatcaaggcagatccttctaaaggaaatagtgcaagtcctaaggcccacacccttacacacaccgaattccctgttttgcttgagggagcccttctgctggt
